United States Patent Application Publication US 2008/0220983 A1 - sequence listing, part 5

SEQ ID NO: 10797 - DNA, 2499 bp, Homo sapiens
attctgcagaaataatggttatttgtgaacttgtctgatgatctcttcccatttatcagattaccttttccacaaaagaaagtctctaaaatatcacagatttacctagagggcaacatttagatacaggaaaattttacatagtgttttgtcttaggattagacgtgaccagattgatcctgtttgattttggagagatcctattctaacaaatactctaaaatgataaaattgaggtacaactctcttaaaagagtatggataactatattttctggattctggaggttgataaccatatgcacttaacattatattctataaacattaagtagtgccagttatgagattcccagttcttactaaattgtattagcaggagctggtaattacttgtattatcacatgtaactaataatttgaactatacttgaaggaccgtgttgatgtcaggtatttacagtggttggaagatagcagtattattagcataagctgcatacgtaatattcagtaactgccatattatataacaaatttacattcacaaattcagtatcctgttaagtgtcatattcttgtaatctgcattctccaggagttttatgtgtttaatagatgaatttattttatttctaaaggtattcaaatgtttcagcaccatataatagaaatacccaattatattctagttcctttatgtcctgtacatcattctctgcttggatttccattattctgtttggttagagaataaaattggtaattgcatttgaagaatgtgttaatgtcataataaagccatgattgctatcttatttttgttatccgagacctttgcaaacattggcaaatagcatcaattacctactgtatttgtttctttgtttatattttcagtaagccctggggaatatagcatggaattgagctactaaatggttttggttccgttttacggagatttttcctcatatttagttttgaatgaggaaaatgtgctcaattataaaagctgtgttattgttttctattattatttttaaataatcacacttggactcttttcaaacattaggttagtttgtaatgaaagcaaaaaatttgtgaatactggaagtaacgtggaaatctaatgtggaagccattgtggcaaggtttctacaaatcggcatttggagcagagttgtttgtttttgttgtttgtttcctttaagaaaaaccacagggaccaagaaagaaaatataacagtttgatttctgtcatacccattgtatttgaagatatatggatacagattatatatatatatacatattttccttaatagaggaatgcttcatattattcaaaaattatatcctgatcacctttttttgttttttattgtaaagtatctctgctttatccattgctgaattcgataggatgttgaaatgctggtcaccaaaaaaggaaactgagcaaattcatttcaacaacatcaaaacttcagcttctcatagtaaaaagctgaatgttactaatatttttcatatctaaaaaaaaattcttagcaatgaaattgctgttaaaacacaaatttcaatcaaatacttttgtgtatagaaaatatgtatagtaggtagatagaaaagtataaaatgtttgttgaagtatcttattttagaatgaatggagaaatgccaaagatgaatccttcactgcattatgaaaatatttcacatgttctcttggactttatataaatctgtaatagattttagaattgaaaaattctttgtgaaggtcttctaaaagtgttccaatttatctcaaaatctccatatataggatcagcttaaaacataaagaaaaccttgaatttctcaaatgtttgagatgttcaagacagtctcttaatccgttaatgcttttggaaacaattgacaaaatagggcaggcagctcatctcatgtcctgaagttggaatttaaataattcctatttgcaaattagaatgacagtgttggaatttggaggcagtagttgagcatattctctagtatatagctacacctttaataaaatgaaggaatgtcttcaatcatattttagtgggctatttataaatagtcttgaagtcaatttagtttatttatttaaaagataatgcatcctgaaagggatcatttatgaataacaatctgaagtcttttcataaaaaaaattaataaactttagttgtacatttagccagtgttatttgaagtatgtaacttttaaaatattaagtgtcttgtatgattagaatatgtgaatgagtaacttattttgtatcaggaatgttttggtactgtgttttcactcaaaccactgacttaacagatactgctgtgtataacatgtactaaatattacagttattgtgcataacagattgttcctcttatatttgtgtgtatacaggcaattcatgttttaatgtaaataaataccattttgcagtttgtttttt

SEQ ID NO: 10798 - DNA, 684 bp, Homo sapiens
acacgcattcccaactatatatctacagatgcattccattttaactcttcttgagctaaaacgtcaaataggagaggaagataagataaatatttgtaaataaaacctaaagtttaaatgttttaatctgaataattgtacataaaattttgtatctctaacattccaaattactgtcaataaaatatatatttattattttaaatgctatgtgttaatatttcacttgcttgtattagaaaggcaaaatgtaagactttggtatgtgtgacatatgctttatttggctttattttacaagtacagtatctgcaaaaaacaaagtaaccttttttcatacctgccagttttgaatttatatatgttattgaacaaatagtaatagaggattcgctgttgaaacaagttgtccaagcaatgttatattcatttttatacttattgggaaagtgtgagttaatattggacacattttatcctgatccacagtggagttttagtaattatattttgttgatttcttcattttgttttctggtataaaagtagagataatgtgtagtcacttctgatttagtgaaaccaattgtaataattgtggaaatgttttgtctttaagtgtaaatattttaaaatttgacataccctaatgttaataataaaaagaactatttgcatattgca

SEQ ID NO: 10799 - DNA, 3481 bp, Homo sapiens
aatgtacctgccatccagttttggatctttttaaaactaatgagtatgaacttgagatctgtataaataagagcatgatttgaaaaaaagcatggtataattgaaacttttttcattttgaaaagtattggttactggtgatgttgaaatatgcatactaatttttgcttaacattagatgtcatgaggaaactactgaactagcaattggttgtttaacacttctgtatgcatcagataacaactgtgagtagcctatgaatgaaattcttttataaatattaggcataaattaaaatgtaaaactccattcatagtggattaatgcattttgctgcctttattagggtactttattttgcttttcagaagtcagcctacataacacatttttaaagtctaaactgttaaacaactctttaaaggataattatccaataaaaaaaaacctagtgctgattcacagcttattatccaattcaaaaataaattagaaaaatatatgcttacatttttcacttttgctaaaaagaaaaaaaaaaggtgtttatttttaactcttggaagaggttttgtggttcccaatgtgtctgtcccaccctgatccttttcaatatatatttctttaaaccttgtgctacttagtaaaaattgattacaattgagggaagtttgatagatcctttaaaaaaaaggcagatttccattttttgtattttaactactttactaaattaatactcctccttttacagaattagaaaagttaacatttatctttaggtggtttcctgaaaagttgaatatttaagaaattgtttttaacagaagcaaaatggcttttctttggacagttttcaccatctcttgtaaaagttaattctcaccattcctgtggtacctgcgagtgttatgaccaggattccttaaacctgaactcagaccacttgcattagaaccatctggagcacttgttttaaaatgcagattcataggcagcatctcagatctacagaacaagaatctctgctaagtggacctggaatcttccatctgcatcttaacatgctctctaggtgtttcttgtgtttgagaaccatgacttatgactttcctcagaacatgagactgtaaaacaaaaacaaaaaactatgtgatgcctctattttccccaatacagtcacacatcagctcaaaatttgcaatattgtagttcatatattaccgttatgtctttggaaatcgggttcagaacactttttatgacaaaaattgggtggaggggataactttcatatctggctcaacatctcaggaaaatctgtgattatttgtgtgttctaatgagtaacatctacttagttagccttagggatggaaaaacagggccacttaccaaactcaggtgattccaggatggtttggaaacttctcctgaatgcatccttaacctttattaaaaccattgtcctaagaacaatgccaacaaagcttacaacatttagtttaaacccaagaagggcactaaactcagattgactaaataaaaagtacaaagggcacatatacgtgacagaattgtacacaatcactccattggatcttttactttaaagtagtgatgaaaagtacatgttgatactgtcttagaagaaattaatatattagtgaagccacatggggtttcagttgcgaaacaggtctgtttttatgttcagtttgtacaatccacaattcattcaccagatattttgttcttaattgtgaaccaggttagcaaatgacctatcaaaaattattctataatcactactagttaggatattgatttaaaattgttctacttgaagtggtttctaagatttttatattaaaaataggtgtgatttcctaatatgatctaaaaccctaaatggttatttttcctcagaatgatttgtaaatagctactggaaatattatacagtaataggagtgggtattatgcaacatcatggagaagtgaaggcataggcttattctgacataaaattccactggccagttgaatatattctattccatgtccatactatgacaatcttattgtcaacactatataaataagcttttaaacaagtcatttttcttgatcgttgtggaaggtttggagccttagaggtatgtcagaaaaaatatgttggtattctcccttgggtagggggaaatgacctttttacaagagagtgaaatttaggtcagggaaaagaccaagggccagcattgctacttttgtgtgtgtgtgtgtgggttttgttttgtttttttggttggctggttgttttcgttgttgttaacaaaggaatgagaatatgtaatacttaaataaacatgaccacgaagaatgctgttctgatttactagagaatgttcccaatttgaatttagggtgattttaaagaacagtgagaaagggcatacatccacagattcactttgtttatgcatatgtagatacaaggatgcacatatacacattttcaaggactattttagatatctagacaatttcttctaataaagtcatttgtgaaagggtactacagcttattgacatcagtaaggtagcattcattacctgtttattctctgctgcatcttacagaagagtaaactggtgagagtatatattttatatatatatatatatatatatatataatatgtatatatatatatattgacttgttacatgaagatgttaaaatcggtttttaaaggtgatgtaaatagtgatttccttaatgaaaaatacatattttgtattgttctaatgcaacagaaaagccttttaatctctttggttcctgtatattccatgtataagtgtaaatataatcagacaggtttaaaagttgtgcatgtatgtatacagttgcaagtctggacaaatgtatagaataaaccttttatttaagttgtgattacctgctgcatgaaaagtgcatgggggaccctgtgcatctgtgcatttggcaaaatgtcttaacaaatcagatcagatgttcatcctaacatgacagtattccatttctggacatgacgtctgtggtttaagctttgtgaaagaatgtgctttgattcgaagggtcttaaagaatttttttaatcgtcaaccacttttaaacataaagaattcacacaactactttcatgaattttttaatcccattgcaaacattattccaagagtatcccagtattagcaatactggaatataggcacattaccattcatagtaagaattctggtgtttacacaaccaaatttgatgcgatctgctcagtaatataatttgccatttttattagaaatttaatttcttcatgtgatgtcatgaaactgtacatactgcagtgtgaatttttttgttttgttttttaatcttttagtgtttacttcctgcagtgaatttgaataaatgagaaaaaatgcattgtc

SEQ ID NO: 10800 - DNA, 439 bp, Homo sapiens
cttcgtttttgattgtgttggtgtcatgttgagaaaaaggtagaataaaccttactacacattaaaagttaaaagttcttactaatagtagtgaagttagatgggccaaaccatcaaacttatttttatagaagttattgagaataatctttcttaaaaaatatatgcactttagatattgatatagtttgagaaattttattaaagttagtcaagtgcctaagtttttaatattggacttgagtatttatatattgtgcatcaactctgttggatacgagaacactgtagaagtggacgatttgttctagcacctttgagaatttactttatggagcgtatgtaagttatttatatacaaggaaatctattttatgtcgttgtttaagagaattgtgtgaaatcatgtagttgcaaataaaaaatagtttgaggcatg

SEQ ID NO: 10801 - DNA, 4448 bp, Homo sapiens
cctaaacagacttacttcgtatgccctgccctttattggtctcccagacatgcaaactttgaagaagtttgaagaaagttgtggtccgtttttttatggtcattaaatttgccaaacataaggcagtatttaacatctttgtcaaataaagcagatcattatactctagtcttctagggctaatcattttggctcatttggggactcttttttcccagaattactaaacaaattttatcacatgtgactacttaaatatactgttacagtgtcattttattaaacattttaattcacctgtcaaaacaacagattaactccttagtgtaaactactagagataatttttaagagggaaatggaattcatatcacctcttatttattatgagcaatattttaatataaaaattttatatgtgaaaatgctattttaggtactttgccattctctttataaatgtgtatttgagtggttctgtatatttatttacattatcatgtgtgaatatgttcacccatatttcaggtcactgcattttattctcttaatacaatgttttcacaacggttaccttgctttccaaagataaatatattttggattagaaatctgagttgttttaatttctaatacctcttgtaaaagaagaattaataactttttaaagcagtattcaggtaaatacaatacattattttgttttctaacaaaagcagttcttagttcaggaagaaaagactaatctggcttctatgtcaatttgtctccatagaaatgaaagcctcctcttgcttctttcattattagcttcacaccagtgactgtgatgcattagaatttggacagagtaagtcaagcctcacttccaattcaaatataatgtctatcttcaaattgagtgtgctgtgaaattgttctgtctttgaaaaaaaaaagtaagattattttgtgtgccactttgggtaaagtttcaagaatacttaaactgtccaaattgtattatcaccatcattgaacttagtgctcaaagaaagcattgtgaggtatttttctaaactttagactctatagagaaatataggattgttctacagaagaaaagcaaaactcctaattaaaaaaaaataaacctatgtattaagagaatgttctcgtaagttgcctatgatgcttccaaagagtttttatctaacagattgtgccaaacagctagataaattttaataatgtattacagtaaaggctataaccaatgcagaattaaaatgggctctaaattctgtttttaactcatgtttagaatgtacttatgaggtagatccttgcttgaaagtatctgctgaaaagcccagtaacgtggcagcttcatgcataaagatataaatgacatttgccttaaatttggcagcctaccctggcttgggtcagattttgttgttgaacacaagaaagtatttaagcaaagaaacacttcagtttaattgaaaacaactttttgtaatgctgacgtgttaaattggcctgagggtattaattgatatctgttgattttgtttttctttgaagtataacattactttttggagggaatttttgaaagatgctttcgatttctctcaattctttaagtcatgcaaaatgaatttaaaatccagggagtatggatgcattgccttagttttgatgagctttaaattaaatgtgtgcaatatcaaaatattcaaacttacaagctgggtaaatacatttcctgattaatatcttagtgcttaattgttcccacattttcaaatttgactttactcttttttggcgtaattcagtaagattgttaccagccagtgtgtttgcacacatttgggtttgtgtttagatgagttagggacagtcataaaagttggggatatgttgcatttgatatcaatagtagcatatttccagaatatgagccataagttgcagtcctgaatacaacagtgttatccaaagaaaggagttttctgacaaatatacatagctttgctaatgagtacggaacaagtggatgaacgtgtgcatgtgctaaggtcttaagtgggactctgatttattccatttagatatttctacttaagctctaaaaaggagaggtgctcttaaaaaaaactttgtggtgctggtactcacactactttatttggatgagttcctagtaaaaaaaactttttgttgaagtattttgcacagcagtttatccaaatgtttggtaaacttataatttagtcctatgttagttttcttaatcaaatatgcaattactgtgtatgcaaatataagtatcaggtacagagttgagttctaacaagagaacatgaaatatcacaaatattgttttccacacttggctattctctacagttgttagtaatttttgagaatgttttgaagcatatctcatgtactactgtttaaaaagtggcaaaacagactgccagtcatccattactaaattttcagagcttatatgattaaggggagtgagataagacaaatctttttcacgttcagttttataatttgacacgttaaattgagttttaaaaattagaaaagtgtttttgaccacacaggttgttctctttaaagttcagccttataatgaagctaaaaatcaattatgttttactttgagattatcatcttatcctttgatcctcatattaatatctaaattagtcttttttaaaaggcatgcacttgagactccagtaatagatgattcaggcagcagaatagtgttttgttgtgtcgttgactatgcacaatggtggagcaaagacacattcttagtttttcaaaacacatgttcattttaccacaaagtgcccatttttatatacatttaaggattattttttcaatgtcaagttcatgttagtgatttcagaaatatagtcaaaatatatagtcaaatatatcttgacaggcatcttgagatttggtttttcattttactatatttatgactgaaaatggttttgtgttttctttatgttgtttatatattttttaccttagtgtttacactggtaaggcttgttagtccatttttgtagtttttttaaagtaagcttttagatctatttgtgttttaatgtttcccagtttgggttttgttttgttttggaagaatctgctttcattattaaattataaaatgtaaatgctctaaagtaggaatttttaaagagtaaattatttgtgtagcttattaggaggttcaggttagtgaccataaagtgggttacttgtacatgaaaatttgaaatggtaccatgtaaaattcttctattgtcaactttttctgatgtatgccagttcatttactgacaaatgttgttactaagtgcttattaagaagtgtaatacgctataaaaaagttaatactttttgttcagatgtaaggcaaagataattgatgccgtttcagtgtatgattgtatttttaacttttacgttggtgggagtaactatttgaggaaatttgtggtgagaattagtaagagataaaacccccaacagtttattcttaccaagtaaagttttgtggtcatggggcagggaagagtttatttaccagaatactagagccctcacacaaaataaaggtaacttggaggagggctataatgcttgcatctcagtattttcatttcacttcatcctttcataattgccttgattatggtgcagtctaacctattaagcaacttctggctatggtaacattgatatgaaccatattatatcaagtctccaaaacatctagtttgttaacatacactttccctgttctttttagtttgagtccacattactaatacattttaataatatttaattatttcacaattttaagtttaccaaagtaaacaaaaattcatgaagatgagtattgccctctcccaaaaaaggtttaaagattagttgaacttccctcaactacacctaaagcaaaggggaattttagtaagtgtgtgtaccttgtttctttcagacgcatctagaatgtttttctttcaccgtacctccaaaagaggcaatttagaaagtattaagtagtgacttttgttcagttccattttgtgtgtgtgtgtgtgtgtgtgtgtgtgtgtgtgaaccttgctttaaaacagtagcgtatactatggtcattgaacttaatctctctggtgttagaaatttactttacaaaattgtgttaagacttttggaaaaagaaaatgaaactgctgtggtaaaaaccaagtttgtttcaaaaaagtaggcaattatttggctgttatattttctttgaaaactgcaataatttatatatttgtattgctctgcttgggaactgtatatatgcttgtctactatttttaattttacaacaataaaataagtattttgttatctgcta

SEQ ID NO: 10802 - DNA, 596 bp, Homo sapiens
cgcatttcttaaactaaacaggaaagtcgcattattttcccattctactctagaaagcatggaaattaagtgtttcgtacaaaaattttaaaaagttaccaaaggtttttattcttacctatgtcaatgaaatgctagggggccagggaaacaaaattttaaaaataataaaattcaccatagcaatacagaataactttaaaataccattaaatacatttgtatttcattgtgaacaggtatttcttcacagatctcatttttaaaattcttaatgattatttttattacttactgttgtttaaagggatgttattttaaagcatataccatacacttaagaaatttgagcagaatttaaaaaagaaagaaaataaattgtttttcccaaagtatgtcactgttggaaataaactgccataaattttctagttccagtttagtttgctgctattagcagaaactcaattgtttctctgtcttttctatcaaaattttcaacatatgcataaccttagtattttcccaaccaatagaaactatttattgtaagcttatgtcacaggcctggactaaattgattttacgttcctctt

SEQ ID NO: 10803 - DNA, 93 bp, Homo sapiens
ctgaagatcaaagtaaagcaacagaggaatgtacatctacctaataactttctaaaatttaaatatgtataataaaataaatgttttaaatat

SEQ ID NO: 10804 - DNA, 159 bp, Homo sapiens
agaaataaagtaaaattaatctggtaatttgtcacggattagttgtacaactagttagaagtttcagaataaacatgcatttcataactgtcaaatgttcttttaattctgagtccaaataaattatttggtgatgttgagtgtgttcttgatgaattg

SEQ ID NO: 10805 - DNA, 1119 bp, Homo sapiens
acccccgccacagcagcctctgaagttggacagcaaaaccattgcttcactacccatcggtgtccatttatagaataatgtgggaagaaacaaacccgttttatgatttactcattatcgccttttgacagctgtgctgtaacacaagtagatgcctgaacttgaattaatccacacatcagtaatgtattctatctctctttacattttggtctctatactacattattaatgggttttgtgtactgtaaagaatttagctgtatcaaactagtgcatgaatagattctctcctgattatttatcacatagccccttagccagttgtatattattcttgtggtttgtgacccaattaagtcctactttacatatgctttaagaatcgatgggggatgcttcatgtgaacgtgggagttcagctgcttctcttgcctaagtattcctttcctgatcactatgcattttaaagttaaacatttttaagtatttcagatgctttagagagattttttttccatgactgcattttactgtacagattgctgcttctgctatatttgtgatataggaattaagaggatacacacgtttgtttcttcgtgcctgttttatgtgcacacattaggcattgagacttcaagcttttctttttttgtccacgtatctttgggtctttgataaagaaaagaatccctgttcattgtaagcacttttacggggcgggtggggaggggtgctctgctggtcttcaattaccaagaattctccaaaacaattttctgcaggatgattgtacagaatcattgcttatgacatgatcgctttctacactgtattacataaataaattaaataaaataaccccgggcaagacttttctttgaaggatgactacagacattaaataatcgaagtaattttgggtggggagaagaggcagattcaattttctttaaccagtctgaagtttcatttatgatacaaaagaagatgaaaatggaagtggcaatataaggggatgaggaaggcatgcctggacaaacccttcttttaagatgtgtcttcaatttgtataaaatggtgttttcatgtaaataaatacattcttggaggagc

SEQ ID NO: 10806 - DNA, 2291 bp, Homo sapiens
tctatctcccagaacagaacatgtgccaatgggcgatcttgcctggaataaaatgcctctactcagaaacaggcaggaaagaattgctccaaggaatactttttggggtcagataatgtgtcaggtggaatatccctgctaggagatataggatttctactctgctcaaagctgaccccatctggagtattaatgtttggttctatggaaccacattttaagagatctgctgatccacctaagcacattcagggaagagtaatgtaattgacaaaatatctgataatcatgttgtttaagggctaggtgaagaaagtttcagtattgatcctggaaaaaaagaagatctaagtaggatgggagaatgatttggcccacacaaggaagcaactttattctatatagctttaaaagtcagaactagaattgttcattctttcattcatcaataaatgtattttgagtgcctaagagtttactatgtgcctagcactgtttgaggtcctgatggaagttacaggacgggtactctggttttagtacaagaaagagcaatgactagattgctttgtgaagctcttggtagagacacgctccagaagggataacaaaatcaaatagtagatgggttcattgggcctcagaagttctgctcgtattttaggtgggtgtgaagtgaatttctatatgtccaggagtgaatacaacagaaagagttggatcttatttatttaattagggagttaaaacaagaccaaaaagactcaacagccgcttgaagccaagaactcttcaatgccagctactgccacctaaaaatcatctggctttatagtggatcagaataaaggttattctaactgtggggagaaaaaaaaaattgtatcaagttccacaggtagcagacacttcacttccaagtaaaagatgagaaatcaattattcccacaggattttaggtcagggagcaaaaatctcagaacttgaccatgaagatacacaacagactcgcaaaaataaagtgggaaatgaagttcagattcccttctgtagatttccttaaaactattatttttttcttcttcgtaaaattttgataatctgttctcttaaaaaagttaatgacacaattaagatactgacatcaaattgttgccttttaccaaaatgcaaattttatgaagtgcctacctttatatgtataaagcatttaataaataattctaatgtgccatattttgctgtgagtgaccttaacatttatatttttatatgaattgtttcatgtatttataaaaattgtatattgaacattggaaatagatgattagatttttgtgtcattttacaattaaatctaaaatgcttaatccaatatcatcatcaaaattcagtgaaatcccaaaacagtgccaagaattttgctgaatgaaacaatcaaacaaagcattttaaggtgtaagttatagtacctgtacttgcagataagaagcttactatatcattattataagtagcatatattactttcaaatacctatattagaaagatattgatctgactgaaatataacctacctgccagtaaggtccaaaggctgaatttgttttgaatgagttccttgatctttaagcactgatgattttcttatatatgaggatgcaaagcattcaagagtttcagcctgttctggtgaggggctccctgacttacataaagttttcagtgcaattttaatagtacatatgctttaatttatttttcttctgcgtgtggtcagacccaattacactgtggctaagactctcaaagtgccagggtttctgtgatgattctgagaatgctgaatacaaatataccttatattctttaaggaaaacggaaaggaaagatcagcagaaatagggttttctcatcttcaccatcaataaacatttattgcgtacctcctatattctgcaaattttccccaaatagaagccagttcagtccacaccatctcttctttgagttgtttatggcctcccttaaggcattttacaaacccataagcctacaatagatgagtatttttactatttgtattaagtgtcataatagcatcaatgtgcacattaccagtatagactgttggagttcactgattgttttcatagatgatgcttcttggggaaaaatagtataggatgtgaaagttttgaattacggttatttaaaaactaacatttgctatggccaaagtgtttacaataagcaataaagtgaaagaacctattataacacagattat

SEQ ID NO: 10807 - DNA, 1290 bp, Homo sapiens
gtggtttaagtggtgttagctttgagggcaaggcaaagtgaggaagggctggtgcagggaaagcaagaaggctggagggatccagcgtatcttgccagtaaccagtgaggtgtatcagtaaggtgggattatgggggtagatagaaaaggagttgaatcatcagagtaaactgccagttgcaaatttgataggatagttagtgaggattattaacctctgagcagtgatatagcataataaagccccgggcattattattattatttcttttgttacatctattacaagtttagaaaaaacaaagcaattgtcaaaaaaagttagaactattacaacccctgtttcctggtacttatcaaatacttagtatcatgggggttgggaaatgaaaagtaggagaaaagtgagattttactaagacctgttttactttacctcactaacaatggggggagaaaggagtacaaataggatctttgaccagcactgtttatggctgctatggtttcagagaatgtttatacattatttctaccgagaattaaaacttcagattgttcaacatgagagaaaggctcagcaacgtgaaataacgcaaatggcttcctctttccttttttggaccatctcagtctttatttgtgtaattcattttgaggaaaaaacaactccatgtatttattcaagtgcattaaagtctacaatggaaaaaaagcagtgaagcattagatgctggtaaaagctagaggagacacaatgagcttagtacctccaacttcctttctttcctaccatgtaaccctgctttgggaatatggatgtaaagaagtaacttgtgtctcatgaaaatcagtacaatcacacaaggaggatgaaacgccggaacaaaaatgaggtgtgtagaacagggtcccacaggtttggggacattgagatcacttgtcttgtggtggggaggctgctgaggggtagcaggtccatctccagcagctggtccaacagtcgtatcctggtgaatgtctgttcagctcttctgtgagaatatgattttttccatatgtatatagtaaaatatgttactataaattacatgtactttataagtattggtttgggtgttccttccaagaaggactatagttagtaataaatgcctataataacatatttatttttatacatttatttctaatgaaaaaaacttttaaattatatcgcttttgtggaagtgcatataaaatagagtatttatacaatatatgttactagaaataaaagaacacttttgg

SEQ ID NO: 10808 - DNA, 6130 bp, Homo sapiens
cctgtggttatgatcttatgcacaaagataactggaggattcagcactgatgcagtcgtggtgaacaggaggtctacctaacgcacagaaagtcatgcttcagtgacattgtcaacaggagtccaattatgggcagaatctgctctctgtgaccaaaagaggatgtgcactgcttcacgtgacagtggtgaccttgcaatatagaaaaacttgggagttattgaacatcccctgggcttacaagaaacactgatgaatgtaaaatcaggggacatttgaagatggcagaactgtctcccccttgtcacctacctctgatagaatgtctttaatggtatcataatcattttcacccataatacacagtagcttcttcttactgtttgtaaatacattctcccttggtatgtcactttatatcccctggttctattaaaatatccatatatatttctataaaaaaagtgtttgaccaaagtaggtctgcagctatttcaacttccttccgtttccagaaagagctgtggatattttactggaaattaagaacttgctgctgttttaataagatgtagtatattttctgactacaggagataaaatttcagtcaaaaaaccattttgacagcaagtatcttctgagaaattttgaaaagtaaatagatctcagtgtatctagtcacttaaatacatacacgggttcatttacttaaacctttgactgcctgtatttttttcaggtagctagccaaattaatgcataatttcagatgtagaagtagggtttgcgtgtgtgtgtgtgatcatactcaagagtctaaaaactagtttccttgtgttggaaatttaaaaggaaaaaaatcgtatttcactgtgttttcaatttatattttcacaactactttctctctccagagctttcatctgatatctcacaatgtatgatatacgtacaaaacacacagcaagttttctatcatgtccaacacattcaacactggtatacctcctaccagcaagcctttaaaatgcatttgtgtttgcttatttgttttgttcaagggttcagtaagacctacaatgttttgtatttcttgacttattttattagaaacattaaagatcacttggtagttagccacattgagaagtggttatcattgttaatgtggttaatgccaaaaagtggttaatattaataagactgtttccacaccataggcaataatttcttaatttaaaaaatctaagtatattcctattgtactaaatatttttcccaactggaaagcacttgattgtacccgtaagtgtttgagtgatgacatgtgatgattttcagaaagttgttgtttttgtttccatagcctgtttaagtaggttgtaagtttgaatagttagacatggaaattattttataagcacacacctaaagatatctttttagatgataaaatgtacacccccccatcaccaacctcacaacttagaaaatctaagttgtttgatttctttgggatttcttttgttgtgaaacactgcaaagccaatttttctttataaaaattcatagtaatcctgccaaatgtgcctattgttaaagatttgcatgtgaagatcttagggaaccactgtttgagttctacaagctcatgagagtttatttttattataagatgtttttaatataaaagaattatgtaactgatcactatattacatcatttcagtgggccaggaaaatagatgtcttgctgttttcagtattttcttaagaaattgcttttaaaacaaataattgttttacaaaaccaataattatcctttgaattttcatagactgactttgcttttgacgtagaaattttttttctcaataaattatcactttgagaaatgaggcctgtacaaggctgataacctatatgtgatggagatcacccaatgccaagggcagaaagcaaacctagttaaataggtgagaaaaaaaataataatcccagtgccatttgtctgtgcaaagagaattaggagagaggttaatgttacttttttccattttggaaataattttaatcaagtaactcaaatgtgacaaaatttatttttattttttgtggttatattcccaacaacattaaaaaatactcgaggcataaatgtagttgtctcctactctgcttctcttactatactcatacatttttaatatggtttatcaatgattcatgtttccctcaaatagtgatggtttacacctgtcatggaaacaatcctagagagctcagagcaattaaaccactattccatgcttttaagtagttttctccacctttttcttatgagtctcactagattgactgaggaatgtatgtctaaattcctggagaagatgatatggattggaaactgaaattcagagaaatggagtgttcaatagataccacgaattgtgaacaaagggaaaattctatacaactcaatctaagtcagtccactttgacttcgtactgtctttcacctttccattgttgcatcttgaattttttaaaatgtctagaattcaggatgctaggggctacttctttaaaaaaaaaaaaaaaaaagaattcgtctgaaaatgctcaggtttgtaagaatctaatctcacttacataactaagcactccataataagttttattaagtacaaagggagccagaaaaaatgacatttatttcttctagatcagaaaaatttaaattaagccctgccttgctgtttagaaatatgtgggcattgttataatttattcaataaatttatgttcctttgccttcctgtggaaacagttttatcccactaaactaggaattaggggataaatcacaaacaaaaaaaaagttgcagcactgaaaaaaagtaatttattgtttttgcaactggtatgtgaatttgtgtgataaaattatttattcttatttaacaaaaatatgttcaaatttttctatatttaaaatgttttgctgttgtcctactttttaatttatgcttcatgtttgtgtataaagtacacttttacactttgtgagtttacataatatacagcactggttgcttttgtatttttttacagaaagctttctgtgtgaagcaggtgtatatgtatatattcctcatgtattcttattctgatactatcatttttctttccaaggaaattttaatctgtcatgaccaatagtgttcattacttgtgcctatgataataggttttttacatcacattaacactattttttccaagtcacaaataagaaaaacacttattcaatgaaacaaggtgcaagttttaaatttgggtacacaaatagcctagaagcttcctacagacgctaagacacagccaataatcagatcctttcacttcatcgagaaacttggacaagtcgatattgatgtattagatgaaagttgtctacacacaacttctgagggatacaaacgataataaaaccaaatgttgtctgtttctcctttagaaacacctcctaaaattaatatcatttagtctctagtgtctgtaggattctacagatgagcacaaatagattgggtttgtataacaaatgctaatagtcataactgtttctacaaatatggggtgtccattaagagaatgtgatgttttcctactgctgttgaatcccatggggtgattataggacttgaaataggcagagtcacctctgatgacatcagcttgcctctgtgatttcacagtctgatcctggcaacaagacaaagcacccttggacacacagccaatctctggttgtgatatttccccattgattccttccttgttaacaaggtcattttaatggttcaggtgaggacagcagccagattcaaagtccagaatttgtgctgttacatagagttcacactgtcaaataacattgaatttaataatgatcaaatttttctagtagtctttggcagagtgtataatctcattggcatgattggtgaatattactaatctctttataatgaaagatgctttacaaataccttatatttgctaacatttcaaaactactaaataaatgaaatagccatgtgtacagaaatggtcatttaaagctttaatagaaccaaattcaagacaatgtatcatttagacacacagaaaaggaacttgtatgttttccctattatttttctcatttgccaacaatctatagttttaggttatcaaacagatagatcaacttaactggctagtacattgaaaaatcttcctaagaatcctttgttagcataatctatagagataatttctcaaattatatcatcatgatgcatataaactctataatgtataattgtgtttcatttatttaatgtatgagaacatattgaaatacaaaaccatgcattagccaaaaaattggaatacaggtagtgttcagatcagcaaaacattcagtctggtaaatgcctgcctggggctatgatatcattctcaatgcaggttttatggaaaaactaaaagaatatgttgttagatgatgttggttttgaaaaaaaaaagacattaacatacacattagttagcccagttaattgcattctactaatatagttgcacattagcaataattttgctgtctctggtctttattttgtggcttcaactaactggaccatgtggactgtaaaggtcaaatggaaaaaacgagcagtggcccctcatcctgtaaggtactgctacatcagagtgacctaaaagtctaacactgtgaggaaaactgtgatttgtaggaaaaaaaaaaaaaacaaataaaaaacagggcatgctttttaatttttttccactttcctttggcacacccaatgaacaattctaatttttattgaggtgctaacatctttcgtgaccgactgtcaaatgtggtatttttgagttactatttttctacatgattttacagtttgcaagaaagacctctaagctttgtgtcacggtagggcacaacttgatactcaaaatttgaaaaataagcacatccaatgattgttttgaccaacagtggtcagtgacgtaaactgcatgtgcatctgaggacatttaaggggtcattaaaatttgaggagcatcaggccggagtagcagacttttagatgagtcatatttcagcattcactaagtcctcagcattccattcaaactgtcgtgtatatttggcctgattttttttcaagctttgcaataatttatgttattggtaaacacttggtgactatatctcagccttttctttaacaactcacaatatattagaaacacgtctacctatactgagagtatatttacaatagaagaacatactgtatgtgactttgtaaagctagacttttgattaagaaatatataatctctggatgctatttttgcattatacactcaggcacaacgtaaaccttgatggctcatcttgctacaattacgagttgaaaaacactacttacgtatttgtatgacctattagtcagaggaaatcatacatatgctttgtaaatagactttgcagataactaaatagactgaagaaatatgttgcatttgatagaagcaattgcataaatatttggtttctatattagagtctgtgagtaaagtcaagtaataaacctaagtaggtataacagatttttaaaccttgaaacttgctttgatggtagagaaaatcattgaagatttacatactgtatataagatgtaaaatgtacgctgcttattaccctcaattttccagaagcaatggtatataatgcagttgaaaaaccaaaaatcttggaaaactaagacgggtcttgtttaaaatgtctctcagctttggcaaccttcaaatcttaatcaactatttaaagcattactgtgtcttgtagcctgcattccacaacagctctgttattcaggtaaaagacttgaactgagccgtttgggacctatactgtaatattttcattgaggaacaatatcctattttgtaaagcatttccctatgtgtgactttaaactgtaaaattaaacactgcttttgtgggttcagtgggcataataaatataaattgtaaact

SEQ ID NO: 10809 - DNA, 4194 bp, Homo sapiens
catacagtgtgtgcccagaactactggaaactgaatgcatttagcatattttgaaactgaagtcattcattaggtaacaaggaattttatcagaaatttgtcattaaaaaaaggtagaaaggtggaacattccctttcagtcaggcctatagaattatttgcacaagtacaagtaaatatgtgtattatatttatagtttgcattttaaatataaaaattatgtatgaaatatttatttcagcattatgtggtaaggcaatggaattgatctggcaaatgtcttttttttcataccagtccataaaggcagtttgctttcagatggcagggccagcaacacaccttcattgtcgtatctccggtgtgtatcagctctccaactctatgtcataattcagttcatggggatcttgattacctttcccttccacaaaatattacactgattggttatatcgatgacattatgctgatttgacctagtgagcaagaagtaggaactacattagacttagtggaaagacatttgcatcagagggtaggaaataaatatgactacaattcaagggccttctaccttagtgaaattggtagggatccagtgacatggggcatgttaggatatttcttctacggtgaaggataagtacttgcatcttgctgctcttaaaaccaagaaagaggcacaatacttagtgggcctctttgggttttggaggcaacattttccaatttcattatgttataccagcctgtttaccaattgactcaaaaagctgctagttttgagtagggcccagaacaagaaaagagtctgcaacaggtccaggctgctgtgcaagctgctctgccacttgggtcatatgatccagcagatccagtggtgtttcagtggcagtggcagatagggatgctgtttgaagcttctggcaggtccctataggtgaatcttggtttaggattttagagcaaagccgtgccattaccaacaaataactagtctctttttgagaaacagctcttggcctgctactgggccttagtagagactgatacttaatgagtcaccaagttaccgtgcaacctgagcttcccatcatgaactggatgttatctgagccaccaacgcacaaagttggatatgcacagcaacactctgtcatcagatggaagtggtatacacatgattgggcctgagaggccctgaaggcacaaggaagttacatgaagaagtaggccaaatttccgtagtccccacttctgctacctgccttctctcttccagcctgcatcggtggcttcatggggacttccctgtgatcagctgacagagaaagagaagacttaggcctggtttacagagtgttctgtatgatatgcaggtaccaccctaaagtggatagctgcagcactacatctcacctctgggctaccttgaaggacagtggtgaagggaaatcctcctggtggacacaactttgagcagtccccctgttgactttgcttagaaggaaaaatagccagatattcaattatatgccaattcataggccgtggccagtggtttggctggatggtcagggagttcaatataactggaaaattggtgacaaagaaatttggagatgaagtatgtggatagacactgaatgggcaaaaagggtgaagatatttgtgccccatgtgaatgctcaccaaagggttagcaaaaaaggattttaataaagtggacaagataacctgttctgtggatactagtaggcctctttctccagccacacctgtcatcacccaattgtttcatgagcaaagtagccatggtgacaagaatagaggttatgcatgggctcagcaacgtggacttctactcaccaaggctgacctggccaaggctatctctgagtgcccagtctgccagcaacagagaccaacactgagcccctgatatgacaccattccccagggtcatcagtcagttgcctagtggcaggttcattacattgatccacctctatcattgaagggatagtgttttatccttactgaaatagatcttactctggatacagattcactttcccttcgcgcagggtgtctgctaaaactaccatccgtggacttacagaatgtctcatctatgaccatggtattccacacagcattacaagaaactcagttcacagcaaaagtgtggcagtgggcccatgatcatggaattttcttaccatgttccctactatcttgaatcaactggctacatagagcagtggaatggcattttgaagacagtaataacaccagctatatagcagtgccttgtagggctgggacaaggttctctagaagactgtctatgctctgaatcaacatccagtatatggtgcatttctcttatgactgggattcacaggtccaggaatcaaggggtcagaataggaaggacaccattcgctattagccctggtgacccactagcaaaatttttgcttcctgttcccatgacttatgcactgctggcctagaggtcttacatagggtggaatattttccactgagagacgcaatcatgatttaattgaactggaagtttaagactgctcctcagccatttggggcttcttatgcctctaactcaatagacaaatgagttacagtgctggctgggtgattgttcctgactaccaagtagaaactggactaccccgaatggtggtaaggtaaagtatgttgggaatacacaggattccttagggcatctcttagtgttatcatgccctgtgattaaggtcaatggaaaactacagcctaattcagacaggaccactaatgatccagacctttcaggaatgaaggtttgggtcaccaccaggtaagtaccatgaccagatgaagtgcttgctgaaggcaaagggaatacagaataaatggtggaataaatactagctttgatcatatgaccagttacagaaacacagactgtgattgtcataagtatgtcctccatattttgctataactacattttgtgtgtgtgtagctttgttttcttctcatttccttattctgtaacataagatgcattgattttatagcatagtgtttaaatattgttaatttttttaactggctccagtgttcaaccttgattaattttacatcatagtatttaagttatgggatatcaaggagagagtaaacatcacatgaagactttaccacctcttctgggaaacgggttaaagtgtttctggtggaatgctggattgttaatcgtgttagatggaattatgaccttgttgttgtctttatgtggcagttaagtatggtttaaagagatgtttatgggtgccaagttgacaagggtaaacttgtgatggttaattttatatgtcaacttgaataggccacagggtgccaaatatctgtttaaacattattctgaagtgtcttgagtgtgtttacagacaagatttgcatttgaactgggggactcagtaaaggagatagccatccccaaggtgggtggacatcatccagtttgttgagggcgtaaataaaataaaaggcagaggaaggaagaattccccccccttttttttcctgcctcattgtttgagctgtgacatctcatcttctgtcctcagatggatttacatcactggcttccctggttctcaagcctttggattcagactgaattataccacaggccttcctgggtctccagcttatagatgacagatcatgggacctcttagcctccataatcatgtaagccactttcttgtagtactggtaaaagatatattaaaccaatctataaaacagatagctatgaaagagaaaggtgacaggcacaagcctaggcaaatagagaagggttcctggacagcctctgacttgcctaggtcattgtgcacacgtggcttgcctgaatgaacatgcccactgtgaaagattccatttctcaacacatgtgcagtaagggaaataaatcaatgtggctcaaactaaccgcccacacatggggtggagccacaaggagtttgctccttatgcaggggagaagccgtgcctcttcagctcgtgtgtggtggcctggcattcaatttgtgaggtgtaaaacctgcatgaaggacccctctttttgtggagagctttccttttgcctaataaattctgccctcctcgcc

SEQ ID NO: 10810 - DNA, 2304 bp, Homo sapiens
gatttttttcactggaagggatccctgaagtacatcaaacaaaggcattggatttggatccgtctgaaagtgtggatgtggggaagccagtgagcattacttttaaataggaccttctctggaaaattattttggttaatgtaataatcctaaaatcaggtttacttaactttagattgctttgtaaatgtttggaaactttcttttacaaaagaatattacatatttgagagaaaatatttctattaatggtttaatttctttgtatatttaaaaataaatatgaaaaacccctaaattacagaattggaatttgtgaaaagattgcacaactatattattgataaacccattccgtttgttgatctgtgttttagaatagtccaagtgaagcaaaacgaactgagagagctgatttacatctatagatattttaagccttatttattagttatgacaataaattagtattctgatatttgtagattattttaatgataaaaatgacactaagctattaatacggcttgtcttaagatatctggaggcatgctctgaaatcctatataaaagagtttaaactgaactttaaggtgcctccatttatcaagggttatgaaactcagaaaattaaattcttgatgctgacctttttgcttgtgggagaattatttctatatattagtgaaatttgaattgtaaacttgtcagtgaatttatcactctgagcgagtctctagagggtgagaatttgagagaaatagtaatttgattatttcattcatgaagcggagtggtagttatccttctattgagagggaagaaataaatgagtattactgaaacttaaagatcagtggaaaaaaaaaacatttaaaaatgttgtaggagactttcaattttggaagcaaactgagctattcttaccagccaaagttatactaaataagagacttgggggagcaaatgtttttcagccttcagaaatgaaagttaaggattttagcactaggtaaaattcagtataataggctgaagtggagtaagtgaaaacctgccttttgccactcttaaaaattgtgcccaaaatataaaagtgtggaactttagaacttggaataattttattgcagtcttccattacatggaaatagcatatctaatatctaggttacttgagagaccagctaatcatctctgttgcacatgtttaattggcaaaaagcaattcatgataaataaaattactgctttccatctactgggtaaaatgactattgaaatagtatgaatgtggtcagaggattatagttgagagtgaagtactatgtgtgagttatagatctctcgaattatatttatagatgcagtgtcctgcccagttttgtttgcctcctacattttactgtaaaatatttattgtcttctagccttgagcctctgagggtcagtaagtgaagtacagatagcaaaattttactacctcgttaacccttttcttaaaatattctctatctttctatgtctctttctgacatagtaatcccaaaggattgtgttactccccgtgaaagttattacttttcctttaaaaatggttttataataagactgtttaaaacctttccagtattggtacatcttggcttctggcccaaaccccaagcagaaaagaaaatggaataatggagcattgtttttccacattagtattagggcatcagattcttggtgaaacactataattaagtagttataattaaataactgttcttcatacttaggactcttaatacatttctttaagacttgtaagtataattgtaaagcttgttaactgtttatatactaaagaaaaagctttacaagataagactgaaattcagaataccacatctgtacagcgttgacaactctaactaaaaggattacagcccttaaaattttagcttaaggacattttaaaattgcatgagattagcaaaattattaatttaaaaccccaaagtaaattgcaaattttaaaatttatttttgactcttttatcacatgctccaatgtatgtacataagtgtctgtggcttaaataatatgttgttatttgatacatttttgtggtgcaagtaattaatgttattatttgattgttataccatatgtgcccattaaaattctttttaattaaaaatatttcaaatatgcagaaaaataataatataaatgcccttgtacccttcacatactattttgccatatttgcttctgatttttaaataaataaaatgttactcttttgtacttct

SEQ ID NO: 10811 - DNA, 656 bp, Homo sapiens
catcaagagtagttgaaagtatcttgccactgttggccttttgatttttttttcccactttttcttgaaagattaagtaattttattttagttccattctagaatgttggggagtggggcacaagaaaaaatagtatagctgaaatgcatctgttaaaaatgtcatgattgaaagcagaactgagtttcaaattacaaccttaaaattgttgttagatatttcttcacatatcagctgcccattttgaaaaagaaattatccataaaggtaatgttggtgctccaatttgccagccattcccaacccccttctcccttacctgccttcactaaagaacccagaaaagctaattgctcccctttcagcctctgttgcaactaacaactctcagtggcctcaggacacagctttggccttgggaattctgggaaaacttttacttcctgattaaagatacatatgcagctaggccacctcctcccccccttactgccataaacaccaaagtgatgactggagctggaggagttatttgaaccacgacgaagggccaagagaaccacgaagatgccagttgccacattgttgagctgctgacccaacaccagccattgcctgtctctaaacatcttatgaaataaaaccagttttgttt

SEQ ID NO: 10812 - DNA, 146 bp, Homo sapiens
aattggcttaatttttactgtaggtgaaggctgtatttgtagtagtactcaagaatcacctgatgttttcttattctccttaaattaagagttattttgtgtttgtattcttggctggatgttataataaacatattgttactgtc

SEQ ID NO: 10813 - DNA, 295 bp, Homo sapiens
tccaaggaaacgcctgtaggaagaaaaaggatgcattccctacagatttttggagaaaggatttctgaggagtgtgtgatgtgtttccatatatctatatccataactctgattatgaatacagatataagaaatacaaaagtttaaaaagctcacatagatatgacttgggaagtgacaccagttcttttaaaataaatttgtatgctcaattattttgcattttttctttttccccaataaattgttgtgtgtgctttctaaataataataaaacaacagggtttttttccag

SEQ ID NO: 10814 - DNA, 1236 bp, Homo sapiens
ttgtgtatgtttttttaactttactataaagccatgcaaatgacaaaaatctatattactttctcaaaatggaccccaaagaaactttgatttactgttcttaactgcctaatcttaattacaggaactgtgcatcagctatttatgattctataagctatttcagcagaatgagatattaaacccaatgctttgattgttctagaaagtatagtaatttgttttctaaggtggttcaagcatctactctttttatcatttacttcaaaatgacattgctaaagactgcattattttactactgtaatttctccacgacatagcattatgtacatagatgagtgtaacatttatatctcacatagagacatgcttatatggttttatttaaaatgaaatgccagtccattacactgaataaatagaactcaactattgcttttcagggaaatcatggatagggttgaagaaggttactattaattgtttaaaaacagcttagggattaatgtcctccatttataatgaagattaaaatgaaggctttaatcagcattgtaaaggaaattgaatggctttctgatatgctgttttttagcctaggagttagaaatcctaacttctttatcctcttctcccagaggctttttttttcttgtgtattaaattaacatttttaaaaagcagatattttgtcaaggggctttgcattcaaactgcttttccagggctatactcagaagaaagataaaagtgtgatctaagaaaaagtgatggttttaggaaagtgaaaatatttttgtttttgtatttgaagaagaatgatgcattttgacaagaaatcatatatgtatggatatattttaataagtatttgagtacagactttgaggtttcatcaatataaataaaagagcagaaaaatatgtcttggttttcatttgcttaccaaaaaaacaacaacaaaaaaagttgtcctttgagaacttcacctgctcctatgtgggtacctgagtcaaaattgtcatttttgttctgtgaaaaataaatttccttcttgtaccatttctgtttagttttactaaaatctgtaaatactgtatttttctgtttattccaaatttgatgaaactgacaatccaatttgaaagtttgtgtcgacgtctgtctagcttaaatgaatgtgttctatttgctttatacatttatattaataaattgtacatttttctaatt

SEQ ID NO: 10815 - DNA, 269 bp, Homo sapiens
aaccagcagcttctttgttccagtgaataatcactctgagcatccacaacaaaaattcaaactccatggacttttgcttctttgctagtagcaactgatgtttcttagttttactgtgcctgatctaatgcaagctgcttctctcgcatgttttatcttgttttcatctttccttgacatcaaaaaaattagtttacaatgctattcaatgttgctctggtctgggaagaatgtatttgttttgcactataataaatgcgattaagtcc

SEQ ID NO: 10816 - DNA, 294 bp, Homo sapiens
atttccagaccttttaagcaaagtgtctcagtctctacgtagagctgttatcataggcatttccagcaatgtgagctaacccctcttactactagctcttcatcctttctctggcatcaagtactggctggacaggctagttctttcagactgtgaaattaatgaatgagcaaaatatagagtcaaatgtctataattttgaaacaagtgattcgttatcacgtaagttcatcttataaagtatatggaagttcagttttgtttcacgtaataaattcatttactgttgattcc

SEQ ID NO: 10817 - DNA, 248 bp, Homo sapiens
actactgccccagcaacacaatgtgtgaaattataagaggactttcccagagctgacttcaatcattggacaacaaagatcatgctggagctatttgcacaaaagaatttaacatctcagaatttcaggcaattttttttctctgtatacccacatctctataataatcctagtattctctacttttgcttttaaagctgattgaattatctgtttatcttccaataaaacattctattttcaaacac

SEQ ID NO: 10818 - DNA, 122 bp, Homo sapiens
aaaacttgctgattctcatactctaactccaagatcttgcccgtatgcttcagcaaggcgaacacttttctcaatgtagagaaaatacctaccattttttggcttcatgctccagaaggaac

SEQ ID NO: 10819 - DNA, 331 bp, Homo sapiens
ttggctgaaatccccgaggtgtagcatcttctctcccttgaaggctgagccccacatctccaggttccccccgtatccactccttcagtcctcatttgctcatcaacctcagagacactgctttccaacttacctcgagtcccaggggaggaaaatgaaaaagcagacgcttcctcaagctgcctcccctggctgatgttctctgggacattttcggaaatttgacctcccacttgtcatgagctacttttgaattttccatgacactcatgacttgtgatgaagtcatggatatgtctatcaaaatctcaataaatttgtctcagctggt

SEQ ID NO: 10820 - DNA, 386 bp, Homo sapiens
gtgtgtaggagccagtgagcgaatcaagactccacgacctgccagctgtttccaggatcttccagcatgctgcttgtccctgaatagctcttcatagctgacccttcttgtgaccgcctgactgctggctactatccatgcacacgctgtctttagcactctaaaatttttctggccagccctaagcttgttttaagggttgctcactggtgctgtgtatgcctctggatgtgtccagaagctttaccatccacaccccagtctctgatgcttttgacatgttttcaccttgctgctgtatctcctggcctctgcttttgtgtctcacaaaaacagagcttgtctcaccatgtatttctcaataaacctgcattagttggcattgc

SEQ ID NO: 10821 - DNA, 1950 bp, Homo sapiens
ctgcgtcacctgccccgtagagaatgtgtgtagatacttcctgccctaactctgcccaccctcctgtaccgtcgacaagaatgtccccttaggtcgcgctcttgcacacacggttttggcagctgacttggttctgaagccatgtagccacccaactttgtcattttcaacaacatcagaaagaattgatcagaatcccaaataagcttgagtcctatcttctgtatattactaagggcttttatttattctcaataaatcagggcctgaacaattaaaagaaaaaagattctatagcactggaaagcaaatcaccccaggagttaacggatgtacaacagattaatttaagggatagtagcacacacacgatccttctatctgaaatcagtctcctagctggggaaacctctttcacacacaaaatgaaatgtgtacagcttgccgtgttctgactgtacccttccctcttccatgtctgagaatctccgtgtattttaagaatgtgtgaggagagggtggcgattcatgtttcaatgagcctctttttttttttccttcctgttttggtctatggctggtcttactctgtgtccatgttcggaagctctagttttgcatagaattatagagatgccaaactctttgaaaagagatccaaatttatcgcttgagagaaagaaaagaaacactattttttgtattttacctgagatacaggggcacaaatagatgagaattttacagtgttagtgtatgtatccctgagcctaaaaaatgaggatataaccttttacagagagagtgaggcgtggtggttttatatttatatatgaaaggccagcaagctcatgcgaaggatatacttttcttccaaaaagcggattttttttttttaatgtttgaatctatatttgagatgggagtttggttggattaaacatgacaccccggtgggcggtgtgtgtgtctgttgcacatggcagggaggggagcctccttctcatggggttgccatggtgatcattggtttttccatcaaaattgcatcttcatccatagattaccttccccttccctgacagtccataaccaaacctttaaacagaacaacctctttaaaaacttctcttgtgtttaacactttcttcatgccaacgaaacagggtaaacatgctcaaaacattaacagtctaaacagatatccaaatactaagaagaaaaacaagttatagcactttcaattttttttttttttttaaaaaaaggtttatagctttttcttttcccatgtcacaatgtccacttcctaagaagggtttaaaatactatgaaaactttctttttggggaaaatatctatttggtgtttgacacatcagtaggtactttaaagacctgaattttatagtagctttaggagttatattttataaaaatcagttatgactttatatttccagacaatagagagttcagtacatcatgctcttgtgcctctgcctgcttttcctgcgttcccaccctgtattccccccgcctttcgggtttccagggcttcgagcttgatcttttgaaagttttattctattaaatttttgctatatcttctggttttctgaaaaagctttagaatggtttctataccctttgtatcactgcatttttccatatcatctccggttcgatcgcgtccagatggaaaacggaagcagaggcttctaatcgtcgcatttactggctccagtgcaacacatccatctgaaaacactcggaagtctggtgcttggagagggtgccattgtctcttgtacataaggtcatgacgtgtctatgtcaaaagttcttatatatttcttttataagctgaaagaaggtctatttttatgtttttaggtctatgaatggaacgttgtaaatgcttgtcaaacaataaaaataacgaaaagtg

SEQ ID NO: 10822 - DNA, 163 bp, Homo sapiens
agactggaatttgtgaaaatgtgacagtgacacttcctggagtgtagagcttgaggtgtacagatgctgtattatatccgctcccgctgtactgcagccccgcgccagctggtggggaactgtaagcaatttgattgcttcccttctatttaaaaatagccac

SEQ ID NO: 10823 - DNA, 816 bp, Homo sapiens
actctagtctgtgtcctccattctgcccccgcccttcctccccttatttgttaaatgaagcaacatagtgagacgtcgtctctacaaaaaaaaaaagaaaaaaaaaattagccaggcatgcgaaacgctgaggtgggaggatcagatgagcttgggaggttgaggctgcagtgagccttggtcatgccactactgtgttctagtctgggcaacagagtgagaccttctctcaaaaaaaaaacccaaaattgtagaattacttctatagctatattttatgataaagaagtgattgtttctcaaaatcgcattttaaagacgttttatggtacttgttggaattgggacttaggagttttgattttgataagaaactgggataattttctgaactttttttcctctgtatcacatttatttactatttttaaaaactttgacatttaacacttgggacaacatttattataaatgataagaaaaatcttagaggtttgtctacccacagtgtcatggaatcttctctgaaaactaatccataaagttccctggagaaattggtcagaatgatctgtcagaaccatttgaaaacttgctcaagagcagttgcttatatatagtaggattttactttttcctgcttatgtactactatatgcttaaaaaacctggaggaatacttaccaaagaggagtaaccatctctgagggtgggattctgggggaatttttgtttttttctgttttctataatgtgaaacttttgtagtatgtatttttctaattgaagagaataaagattaaaacaaagtgcttt

SEQ ID NO: 10824 - DNA, 222 bp, Homo sapiens
agatggaaaggtggcctcggacacctgtgtcactctacactggccccttggaaaattcagattcagataaagttccacttaggtctaataaaagtactcaatttgttattcaaaatagacctagtaatttattaaactaattatgtttctatagataaaaacttgaagttcttcagacatgtctctaatgctataaaagcaaacaacttggattgggtttta

SEQ ID NO: 10825 - DNA, 64 bp, Homo sapiens
agttcaccagctgatgacacttccaaagagattagctcacctttctcctaggcaattataattt

SEQ ID NO: 10826 - DNA, 3039 bp, Homo sapiens
gtaaaaacaaatggaatctctgatggcaaaagagaatcaccattaaagattgacccatttgaagatctgtcatttaatctgcttgctgtatcaaaggctcagctatctgttcaaacgtcacctgttcccaccccagacccaaagaggttgattcagttgccttctgcaacgcaaagtaatgttttgagttctgtaagttgcatgccaacaatgcctccaattccagctcggagtcaatcccaggaaaatatgcgaagttctccaaacccatttattactggcttgaccaggacaaatcctttcagtgacaggactgctgctcctggaaacccatttagagccaagtctgaagaatcagaggcaacttcatggttctccaaagaagagcccgttactatcagtcctttcccttctctgcagcctcttggtcataacaaaagcagggcttcatcttcacttgatggctttaaggacagttttgatctacagggccagtctacattaaaaattagcaacccgaaaggatgggtaaccttcgaggaagaagaggattttggtgtgaaagggaagtcaaagtcagcttgttcagacttactgggtaatcagccaagttcattttctggctccaacctgacattgaatgatgactggaataaaggtacaaatgtctccttctgtgtgttgccgtcaagaagacctcctccacctcctgtccctctgctcccgcccggcaccagccctccagtagatcctttcacgaccttggcctctaaggcttcacccacactggactttacagaaagataacgccatgcaatagaaaacagtgggtacttgcttttggcaggatagagctaagagaattgggcattagtatttcattatgtgcaataagtcattgtaagtgcactgatatcttcacaaaacaccactatttgatgtgtacagagttggactatgtgtatattggaaataaggaaaaacccttctcattgttaactggagttttgatgtatttctctttggatgaataggagacagtagtagccataaaaagtacttatactttagaaaacagtccttattcagaaacttttcggtcagtcttctgaagaatctcaaaaagcccacccaactttcagctgacatttccaccagccctctcatacttgttaacaattggtatctttgagtatttaccaaagagctgccaaggttacagtgaacagagttttgaaaggcattgctttaaaggaaaaaagtataggtatgtgtacatatataatacatacaaacacatgtacttctgtatacatttacatatttttacaattcatactttaatttctaggctataactcagaccaaattatacctaaaagttccaacaaagtccctttttcaatatcacattaccaaaaagatggctgcaaatgtaatttggacctttcattaattttgttttcaaaactagaataatctcaccacagaatcagaattttctaccgttccacacccaaccccttcaaatacacacaaccttgttacttttcactccagcaccttcatacgcttttctccaggaggaggttcttgcagctggaaacagcctattttgtggtcactgtcaagtggatggatattctagcgctcccaaaaaagcactatggccttatatgcagggaaggcacataccaccaagttcaatgagaaatattagagctaaccgtactctcttctctgcgtacgttcgagtatacgttgcccatatccctcccatattttctttttgctgcttttgctctggaactttgcttttagcagggaaagcagctgtcccctgagtgctttgaattgggaatatacccagtgtgtgttctcccccctcttacgaggctacataacacatctatgatgctgctttaagtttttagaggctatacctcaaagtagctgcggattttgtctcctgcactgccaatatgcaactgatcccgcttttattaattttttgaagaagtacacagaatttttacagaatgtagtattttgatatcattaagtaaaccaatcagaaaactccttgagcaatagttgtttctttgtcagtttcagttacaatcatctttacccattaagacttacattaacattccttttatataaagagttgtatatgtccacctaaattcctatgtccacacttaacctttaaagatgtacattgagggaatatcaaaaaatagcgttcatggctacgaatatgtagaatgttaaaagcacagcaaactgcactgcacttataaagcaaatctattagaaaaaaagcatttttctaaatgctcaaatgttatcaaaatactatatttatagaagtaatcttctctgttaacagccaagatttgctgttagaaataactcttgtgagttttatattgtgctttttggaggttctaatcatttcagcagtagcgtcttaaacagcagtattactataagcagttgcttcaaaatgtgaattaacttgttgaaactgtggctttaacatccatgtgactagtgtatatggtatttgctctccattagcaaaataattcattgttaggtaaacttcactagtgcaaattgcagatctgtgagcaatgtttcctattgaatataaactactgtctaaaatatacatatcagcagcccagcctttatcaggaaaattatacttggcaagttgctgaaaatgcacaaagttatgaaagttaaaggtatgctgcaaataactagccattattctatgtattattaaatatttactagttctgttaaaagcagagcagaagttagacactaaggatctctttgtgaactctgtgttctctatattagattgctgtttatatgtaagaattttattgcttatgtggcatacaatatttataactataaactttatagaagtacagtattaaagtcagtggtacacagacattctgtacatatcctgtgaaacgtgctgtcatatgaaataaatatatctgtctttac

SEQ ID NO: 10827 - DNA, 1051 bp, Homo sapiens
atctatgagactgaaaaacctatttgcttgattaccattcccaatgtgtaaattttgtatatatgtaaagtttcttaaactgtaaaatagcaattcttgttttaatacaaaaaacattatattcaatactgtgtccttaaatgatatttcttcagaatgaaaggaattcagattatttctaggagtctatgaatgttttctttactgcctgtcatactttgtttactgaagtattttgtatggtcatttaaattaaccctctcagttaattgtcccctgtaaacgatgtgtgcagtgtaaattgtgtaattatgcatatatatatttataccaccatggacttactttcacactggaaatttgtggtgtttttccacagaggaagccttttaacagcagaaaattatccggtagcaaattgtcttagggaaattactacactgttgtaacaaaagggctggcaagtgactaaatgttcattaccttttggttagcgttgctatcactgtagctgtgctgccttaacattgagagttgagttgtggacttagtcattgagtgaatgttgaactttcttccttgaatcagcgttagagtcaaatgtgggtttaatgtgaatgctaaatgaatatgcaacatagtttcaaatggaacatagaaatttcacttttgaaaataataaacccacaacctaattgcatggttttgggctgaccgtcctgtctcattcatgattttactccctgcccagcttgcagatacatgcatttgaattttagtagtctgtcatatttaaaatcccacatatgtgagttaaatatgcaataaagaatacgccttgctgattagccacacccaggcaatttaatatccatggtcttctataatgtttataccacattgtaaatattcagagaacttgttttaaagtttatgctttctgattctgtgattttcaaaagaggaatttttttggaaattaaggactatcgtttgataattatatatgtaattaagatttagccaagcattaaattaatttttaaatata

SEQ ID NO: 10828 - DNA, 930 bp, Homo sapiens
cacttggtgccagtgttcccaaactctaaataatgtgttttccatttgcactaaccatcaggaaactagaatttctggtttcctcaggtatgtgtagtggtcattagtgttacgtgaaagtctcatagcatttgattataacataaggtatttagaaaaagaaagttttctgttttaagttagctctcatgttcttttgtattctatatgaatcaagtaaatgctttagggatattaacctggaaaaattattgactttgtaagttcacaattcatgtaaagaaatttttataaaatatgggagaatttaaacatttgacaggaagagaacaactttttaaatttgagatatattgagttcagagaggttagtgatagctggaaattttattcgccctagtaattattttgtttacattaaaaaatctgtaataaagctacaaaatagtaaacagattactgtaacgtacttggtacatatgagtggcagagcaactgaaatgtccaaaattggagaattagcagactcttgttcttacctacttatagagccattgcacttttttggtaccacacagtgataatgttttactttgaactacaaaaatcgcaatgcagataatgctgctggaaaattaaaaatagatattaaaaagacttctaagtacttaaatattctctaagggaaaagctctaaaattgttgacatttctttacttgttctatgaatactgaagtgttacatttcttaactaatgtttgctccaataactaggcactggacattatagctctatgcatggattaaaagaagaagtgtcgtttcccaaacataaaacagaatttgctacttgtgtgctgttggggattcatgattattctgtccatagagagggtactttttcagaaatccggaaatagtatggaacc

SEQ ID NO: 10829 - DNA, 170 bp, Homo sapiens
gcagtagatcatacctttttgtccagtcatgtttctgcatgcctgtacatatttcgttaaacctaaacatagtagacaatttctcctccatctttgggtcttcattctgaaggctgtcatgttacataaaactgtgatcaaataaatttatatgccttttctcctgttaa

SEQ ID NO: 10830 - DNA, 3003 bp, Homo sapiens
gtatccctacccacaactgtgcctctctccgcaggctccatttgcaacacagccacacataccaataaccagctctctgttctgctctgtgcccaactgcgagaacacttttgaaaaacaaaagaaaaagaaaccaaaaaaccaacttgattccgtccagggacatgtcttgggagccagctaggcttggtctctgcaactagaagcctgcagggaaatgtcccgtcagaaatggagaaagcaatacaccctagagactgcttagtggagctcctcctagaaggtgacccccaagaaacatatcttctttcaaaatactgccttaatttttttctgtttcattttgtgaaattgcttggaattcccctaagtagagaataatcaatttcagaggtttggggactatgagttttataaaatggtcgggcacagtggctcacacctgtaatcccagcactttgggaggccgaggcgggcggatcacctgaggtcgggagttcaagaccagcctgaccaacatggagaaaccccatctctactaaaaatacaaaattagccgggcatggtggcacatgcctgtaatcccagctactcggaggctgagcaggagaatcgcttgaacctgggaggcggaggttgcagtgagccaaaatcgtgccactgcactctacactccagcctgggtgacagagtcagagatcacaccattgcactccagcctgggcaacaagagcgaaactccatctcaaaaaaaaaaaaaataataataataaaatgattaggttctcttaaactgatcttttctaaataccttgctaagaatagatgcaccaagaaataagaggttggagactgtgtttgttggggtggaggtaccacaggcatggatagggtaagaccttaggatcaaatggggggaccagtgttccagagagagggatgcagcagtgaaaattggaggacacaaaacacatttgcatctatctcaaaattttgcttagagcacagcctaactgcaaggaaagttcttcacttctagcctttcacattcttttccttttctttctttgcatggtctgtctttgcccctgctataccatttcaccaatttctcttctcattttcatcttctttctcctactccttttcctcttgctccaaaaatcagaacttagatgaataccattcaagctatgtttaactacattaggggctagcctgggaatttactcaccacttacaacattatttctattgttaaaagtgctcaaattattaacagataattaacaaaaaaacatctaaggctcaatccatttggaaggttaagattgcaaagtgaaggcattttatatgacacggttaacacaaaatgattttatgtgtgctgataaaaggaaccaaagcaacatacttttgaaaaaattaaatggattcattattgtacaaagaaaattttccctcatagagacgcaacttgccattaaagtggactgtaaagaatccatggcttgggaggccgaggcaggcggatcacctgaggtcgggagttcgagaccagcctgaccaacatggagaaaccctgtctctactaaaaatacaaaataagccaggcgtggtggtgcatgcctgtaatcccagctactcaggaggctgaggcaggagagtcacttgaacctgggaggcggaggttgcagtgagccaagattgcgccactgcactccagcctgggcaacaagagcaaaactccatctcaaaaaaaaaaaaagaaaagaaaaaagaatccactgcaattgtgatacaaatgtctaaacctggagtggaatgaatttgaaacattattgcattcatgataccataatgataagaaatagtccatgacttaacaggatatcctggggttgatgactttagatcacatacatcacttttttttttttttcacttaaccttaacatagagtaactgaaataatctgcaatttctacatttgcttaattggtgggggatttagccattcaggctaattagcatgagcccatgtcagtgtttaaattaggccaaaacaaagaccaaagtatgaattttaatagaaaaatgtgacctcattactgacattgtactgcagataatgttaaagtgaaagaaaaaataaggaaaaggggaaaaaggaggaaaaaggaaagcaagaaaagacaagtgaaaagattagtaatatattcattgtcattagttactgaaaatataacaaattgaattttaataatttttattaataaagtataaaattaaatgatgatagaaagtatatgcctcctataaatatcttccatttggtagcttttaatagtttcaaagccctttcacatatgttttaagtaagtcttttgagaaatacttgtgagttaatgggacttaaaccaacagaaaaggaaagctaatttagttataaatcaagcctgaggtttcagatttctggactaaaaatatggttcagtttgtgctgctgtgggatgaagaatgggcagagaaaatccacagtgcaggcatggggattaatggcatttggcacttagctgcagggtttgggggacaacagggagtggtgggatggtggttaagtaagggtgcatgccccacctgaagctctacagtggctcagctccaactgagtgttgccatgggaaaatctgatggggccagatctgatccttcagagaatgaggaattccaggttgttatgtgaattctcacaatttgtaaatgtcggcttgccattcagcttttttgtttgtttgttttaaataatatcatgtgggtcaaacaaactatgttaatggtagccatctggcctggggctagtagcttattgcctctggccagtggtgtgctaacaaaagtttaaccagcagctctccaacaaaaaagggaggtgggctgctctgcctatgcagtagccatgcttttattcctttactttgttaataaacttgctttcacttt

SEQ ID NO: 10831 - DNA, 1676 bp, Homo sapiens
gatcacttcttaagtcacattttccttttgttatattctgtttgtagataggttttttatctctcagtacacattgccaaatggagtagattgtacattaaatgttttgtttctttacatttttatgttctgagttttgaaatagttttatgaaatttctttatttttcattgcatagactgttaatatgtatataatacaagactatatgaattggataatgagtatcagttttttattcctgagatttagaacttgatctactccctgagccagggttacatcatcttgtcattttagaagtaaccactcttgtctctctggctgggcacggtggctcatgcctgtaatcccagcactttgggaggccgaggcgggccgattgcttgaggtcaagtgtttgagaccagcctggccaacatggcgaaaccccatctactaaaaatacaaaaattagccaggcatggtggtgggtgcctgtaatcccaactacctaggaggctgaggcaggagaatcgcttgaacccggggggcagaggttgtagtgagctgagtttgcgccactgcactctagcctgggggagaaagtgaaactccctctcaaaaaaaagaaggaccactctcagtatctgatttctgaagatgtacaaaaaaatatagcttcatatatctagaatgagcactgagccataaaaggttttcagcaagttgtaacttattttggcctaaaaatgaggtttttttggtaaagaaaaaatatttgttcttatgtattgaagaagtgtacttttatataatgattttttaaatgcccaaaggactagtttgaaagcttcttttaaaaagaattcctctaatatgactttatgtgagaagggataatacatgatcaaataaactcagttttttatggttactgtaaaaagactgtgtaaggcagctcagcaccatgcttctcgtaaaagcagcttcaaatatccactggggttatcttttgacaacttgccattatctgatgttacacaattcaatagcaagcaagtttgagacaatcgcagtttaaaagcatgaaccatttaacaaaaagtggaataattaaagataaagcacttcttcccaaagggaattatcacctagtgaaaaattatgcatttcatctactcagttaccgactgcaagtctctcctcgctctagctctcaagctttgggtgaatattcctgtgaaatatatcttcaacttgaaagttcatactccaatcaaaaactccttttactgagtttgcagtactgtatttgcactgtttgtattcctctgggcccttattgctacttttgctttcctttgttacacagattttgtgttgcactttttctccagaggggtgttgtagagccttggttgtatgaataataccagtggtagtgtccacggctctaatgtaagcccatttggcatcactcctctcctctctcttgagaggatttcttgtgcacagagtatgaagcagttgtggagcgctgtgcctttgtcaagataccatcttgtttgatgacttctttctttgctgttttttcttcaaaatgttagtaagctctgtcatgcttctagcaaattgtaagactaattatttgtttccacctcataacctgttgcaataaatattacttctcatac

SEQ ID NO: 10832 - DNA, 295 bp, Homo sapiens
tgtttactatcataaatcattcttagttccactgacactttacatggaaaatgagatttattgctataatacaagaatttaagaattgtgccattgtacttatcacaaaactaatcacatagccaatgatgtgtgagtgagaaacctatcaggtttgtcctgaggatatagcaagaaaagaaaataactgaaactcctttttttttgagacggcgtctcgctctgtcacccaggctggagtgcaatggcacaatctaggctcactgcaacctctgcttcccaggttcaagtgatt

SEQ ID NO: 10833 - DNA, 755 bp, Homo sapiens
aactctaagcaagttagctgtagtgccatttcagaaactggcctaaatggctatgtagaacatttcattaaccctataagtcattcagtattcttttctctctgtgggagtgatacagtcttggtttgtattttgtttgaatcaaaactggttatagcaatactcaaatggaaaaaacttcatgatagcgtaagtttggaaagtttagcaaaatcacagtggtactgatttttatttgttttctattttttttattttatatttttaatttttttaacagggtcttcctctctcgcccaagttctcatgcctcagcctcccaaatagctgggactacaggcacaggccaccacacctggctaatttttttgtattttttgtggagatggggtttcaccatgttgccaaggccagtctgaaatcctgggctcaagtgatcctcctgctttggcctcccaaaatgctgggattataggcatgagccgctgcacttggcctgatactgatttttattccttgcgttatcacatagtgttgtatttgaaacatagttcatggttttatcaaagaactgaagatgagaatactggtcatctaactttgtaatttgatttgattatactgtaaagtttgacagtctcattttatcactgcgtttgtatctattactaaaatgtattttttgacctcttactgattcattgttggtatgtacaaactgttgacttgtaaaatcaataaagtcttagttggaa

SEQ ID NO: 10834 - DNA, 157 bp, Homo sapiens
agccttttaattcagaaatggggccagtttagaaagaattatttgctgtttgcatggtggttttttatcatggacttggcccaaaagaaaaactgctaaaagacaaaaaagacctcacccttacttcatctatttttttaataaatagagactcact

SEQ ID NO: 10835 - DNA, 401 bp, Homo sapiens
acaccaaagtaagcctaaaaggaatctttgaggaaaaaagccttctagcaaggaaattcaagattcttgaagttgaaggaatatactgaaatgtttataaacataacttttactacagtagcatctaaggttttaaatgtgttttactattttcagattagatttttagatataaagatgaaaaactcagataactcaaatgagatatctatatccctacaacctaattgtatattgagcagaaactgaattaatatgcttccttgcaaatgggaaatcacatagcagttaccccatggcattgtgactaatggcatcagggcaaaaatatgttactttacgatttacctgttagcaggttcttgtttcataaaggtagaaaataaatacagacaacatct

SEQ ID NO: 10836 - DNA, 478 bp, Homo sapiens
ttttcttctttctcagacctcagtcggatgaacatattccagtatttgaagccagaattttctttggaaattgttgagaaaaaccaaggaagataaaacaagttgcatttttaagcacgtttctctgctaagacaagatgctcagttgacacatttgaaaagtgtttgaaaaattcttgtgcaaatgatcaagataattctataattaacatcttaagggaatttttctaaaaaccttttcattgtttctatatattttgcccctgctataaaattccttccatgaagaaaactgctgctttcagcaaaagtcacactactcttgataaaagctgttgcaggcctttgctaagctatcaaagtaacgtattaattttgtatcaactccgttctcaacaccttccttaagtctttgctgtcataatttaagcatttgagtatattttgaagtcttaaaagacttagcccataggcactt

SEQ ID NO: 10837 - DNA, 72 bp, Homo sapiens
aagtgttggttttctgccatcagtgaaaattcttaaacttggagcaacaataaaaagcttccagaacagatc

SEQ ID NO: 10838 - DNA, 2554 bp, Homo sapiens
accccaccactggctaaaactggacacatcctgcctggcaacctgattttctaatcacattcctctcatactctttattgtgatggataccactggatttctttttggctgttgtaaggggtgaggggtggattaatgacactgtttcactgtttctctaaaatcacgttcttttgtgatagactgtcagtggttcccccatatctgtccctgccttgctaaatttagcagaatccctgaggacatggcctctgagaatagcagctgcatttcccagactcccttgcagctagcaaggttgtgtgactaagccctggccagtaggcatggaagtgaagactgtaatgtccaagtaatccttggaaagaaaagaacgtgcccttaactaactttgtcctgcttcccagtggctggatgtggaggaggtggagagcagttatgagactgggaaagaacggggcactcaaagagccacacacatctgggcctgggcgacgtggatcctccttaccacccaccaggccagatttacaggagagagaaatccactccactcttccttaagccactgttattctgatctctgttaaggtcgcagaatcaatgcccttactgatacacctaccttataggactgaacctaaaggcatgacatttccatacttgtcacaagcacacactgattctgcccttgtcacttctgtgctcactcttgtggctctatcctcctcctgcccttccgccttccactcctcccttgcacccatcctgcacacatctccctgaaaacacacaggcacatacactcatatacatagacacacatacacacctcaatctagaaagaacttgctttgtacagggctgagatggaggagaaaaaaatgcccccttcagaatgcataccaaggggaaggtgctcggtcactgtgggagcagggaaaggtgcccccactccccgagagccaggggaaggagtggctctgggcagagagggacacatagcactggggtggcaggtccttttgaggtgatgggccggttttgtgagatgaattgtatcccccaaaaagacaggtaccttcaatgtgacctaattgggaaatagagtctttgcagatgatctagttgagatgaggtcattggggtgggccctcacccaatatgactggagtccttatcggaagagggaaattcagacacagatgcatagggaggacaccatgccgtgacagaggcagagggtgcagtgacacagccacaaaccaaggaaggccgaggatggatgcgcatccccatcccaagaagtcgggaagaagccaggaaggctcctctcccacaggtttcagaggaagcacagccctgcttgaattcaaacttttggcctccagaactgtgagtcagtacctgttgttgaagccacccagcttaggatactctggcagcctactgccatacagtattgggatactatagtgagcccatgcagcacctctcacccacccagagatggagctgctctgccttccagcggggcacccggagggctgccccagcagatagagagggcctccgttctgccacctgccttgaaagggtctccagctgccatatgtagcattggagtcctctgcaatgcgacatcctgaaagctcagctgcctgggcattcctgaagagtatggaatatttaaatgaaacatatttttttaaaacctgcgcataagataaaagcagcccgtgtgcatcttgggccatcctcaaatggacagacttggtcttgtgaggttccagtccttgtttcacataataaacactggcatggctcagcccctgagttaccacagtccttgagatgagtggttctttgggttacaaagtcctctgaaagtctagtgagagctgtgatctttgccccacccgaataatgcatatggacaccacaccttgcctgccgtgtccaggattcatgaccagtagcagcccagctatgcctgccacgtctcatggcccctgtgtaagccagacccttcttaggcagttgcatattcccagactgaggcagggcaggtttgcagagagagacccagagtgcacgtgacccgcagtgtgatccctggcacgcactgactttgatattccaggcacacggactggctatttatcaccacttctttttccccactaagattcctgtgccttttaaggcagagggagatccctatggcgttagtcttcccaggccttaaagggcccttgtcttcactcacaaacctcttatctcttcttctccttcctctacattttaaagggggagagggaaaagtaaccgggagacaaattgagccacatattttcagacacttgttaccatattttaaaatctggcttcacatacacagagtctttgctatgcaccatgtactgttctaagcttcttaaaaatagaatctcaattattattttgcaggcaatactctatgcattcattagctaggacaacaatgcatttgcagtagtgagatttcgctaaaaaattaaagccatttactatg

SEQ ID NO: 10839 - DNA, 1596 bp, Homo sapiens
actggcacgcgacgaggacgcattccaaatcatactcacgggaggaatcttttactgtggaggtggctggtcacgacttcttcggaggtggcagccgagatcggggtggcagaaatcccagttcatgttgctcagaagagaatcaaggccgtgtccccttgttctaatgctgcacaccagttactgttcatggcacccgggaatgacttgggccaatcactgagtttgtggtgatcgcacaaggacatttgggactgtcttgagaaaacagataatgatagtgttttgtacttgttcttttctggtaggttctgtctgtgccaagggcaggttgatcagtgagctcaggagagagcttcctgtttctaagtggcctgcaggggccactctctactggtaggaagaggtaccacaggaagccgcctagtgcagagaggttgtgaaaacagcagcaatgcaatgtggaaattgtagcgtttcctttcttccctcatgttctcatgtttgtgcatgtatattactgatttacaagactaacctttgttcgtatataaagttacaccgttgttgttttacatcttttgggaagccaggaaagcgtttggaaaacgtatcacctttcccagattctcggattctcgactctttgcaacagcacttgcttgcggaactcttcctggaatgcattcactcagcatccccaaccgtgcaacgtgtaacttgtgcttttgcaaaagaagttgatctgaaattcctctgtagaatttagcttatacaattcagagaatagcagtttcactgccaacttttagtgggtgagaaattttagtttaggtgtttgggatcggacctcagtttctgttgtttcttttatgtggtggtttctatacatgaatcatagccaaaaacttttttggaaactgttggttgagatagttggttcttttaccccacgaagacatcaagatacacttgtaaataaagctgatagcatatattcatacctgttgtacacttgggtgaaaagtatggcagtgggagactaagatgtattaacctacctgtgaatcatatgttgtaggaaaagctgttcccatgtctaacaggacttgaattcaaagcatgtcaagtggatagtagatctgtggcgatatgagagggatgcagtgcctttccccattcattcctgatggaattgttatactaggttaacatttgtaatttttttctagttgtaatgtgtatgtctggtaaataggtattatattttggccttacaataccgtaacaatgtttgtcattttgaaatacttaatgccaagtaacaatgcatgctttggaaatttggaagatggttttattctttgagaagcaaatatgtttgcattaaatgctttgattgttcatatcaagaaattgattgaacgttctcaaaccctgtttacggtacttggtaagagggagccggtttgggagagaccattgcatcgctgtccaagtgtttcttgttaagtgcttttaaactggagaggctaacctcaaaatattttttttaactgcattctataataaatgggcacagtatgctccttacag

SEQ ID NO: 10840 - DNA, 4333 bp, Homo sapiens
ggcgccaggcctggcccggctgggccccgcgggccgccgccttcgcctccgggcgcgcgggcctcctgttcgcgacaagcccgccgggatcccgggccctgggcccggccaccgtcctggggccgagggcgcccgacggccaggatctcgctgtaggtcaggcccgcgcagcctcctgcgcccagaagcccacgccgccgccgtctgctggcgccccggccctcgcggaggtgtccgaggcgacgcacctcgagggtgtccgccggccccagcacccaggggacgcgctggaaagcaaacaggaagattcccggagggaaactgtgaatgcttctgatttagcaatgctgtgaataaaaagaaagattttatacccttgacttaactttttaaccaagttgtttattccaaagagtgtggaattttggttggggtggggggagaggagggatgcaactcgccctgtttggcatctaattcttatttttaatttttccgcaccttatcaattgcaaaatgcgtatttgcatttgggtggtttttatttttatatacgtttatataaatatatataaattgagcttgcttctttcttgctttgaccatggaaagaaatatgattcccttttctttaagttttatttaacttttcttttggacttttgggtagttgtttttttttgttttgttttgtttttttgagaaacagctacagctttgggtcatttttaactactgtattcccacaaggaatccccagatatttatgtatcttgatgttcagacatttatgtgttgataattttttaattatttaaatgtacttatattaagaaaaatatcaagtactacattttcttttgttcttgatagtagccaaagttaaatgtatcacattgaagaaggctagaaaaaaagaatgagtaatgtgatcgcttggttatccagaagtattgtttacattaaactccctttcatgttaatcaaacaagtgagtagctcacgcagcaacgtttttaataggatttttagacactgagggtcactccaaggatcagaagtatggaattttctgccaggctcaacaagggtctcatatctaacttcctccttaaaacagagaaggtcaatctagttccagagggttgaggcaggtgccaataattacatctttggagaggatttgatttctgcccagggatttgctcaccccaaggtcatctgataatttcacagatgctgtgtaacagaacacagccaaagtaaactgtgtaggggagccacatttacataggaaccaaatcaatgaatttaggggttacgattatagcaatttaagggcccaccagaagcaggcctcgaggagtcaatttgcctctgtgtgcctcagtggagacaagtgggaaaacatggtcccacctgtgcgagaccccctgtcctgtgctgctcactcaacaacatctttgtgttgctttcaccaggctgagaccctaccctatggggtatatgggcttttacctgtgcaccagtgtgacaggaaagattcatgtcactactgtccgtggctacaattcaaaggtatccaatgtcgctgtaaattttatggcactatttttattggaggatttggtcagaatgcagttgttgtacaactcataaatactaactgctgattttgacacatgtgtgctccaaatgatctggtggttatttaacgtacctcttaaaattcgttgaaacgatttcaggtcaactctgaagagtatttgaaagcaggacttcagaacagtgtttgatttttattttataaatttaagcattcaaattaggcaaatctttggctgcaggcagcaaaaacagctggacttatttaaaacaacttgtttttgagttttcttatatatatattgattatttgttttacacacatgcagtagcactttggtaagagttaaagagtaaagcagcttatgttgtcaggtcgttcttatctagagaagagctatagcagatctcggacaaactcagaatatattcactttcatttttgacaggattccctccacaactcagtttcatatattattccgtattacatttttgcagctaaattaccataaaatgtcagcaaatgtaaaaatttaatttctgaaaagcaccattagcccatttcccccaaattaaacgtaaatgttttttttcagcacatgttaccatgtctgacctgcaaaaatgctggagaaaaatgaaggaaaaaattatgtttttcagtttaattctgttaactgaagatattccaactcaaaaccagcctcatgctctgattagataatcttttacattgaacctttactctcaaagccatgtgtggagggggcttgtcactattgtaggctcactggattggtcatttagagtttcacagactcttaccagcatatatagtatttaattgtttcaaaaaaaatcaaactgtagttgttttggcgataggtctcacgcaacacatttttgtatgtgtgtgtgtgtgcgtgtgtgtgtgtgtgtgtgaaaaattgcattcattgacttcaggtagattaaggtatctttttattcattgccctcaggaaagttaaggtatcaatgagacccttaagccaatcatgtaataactgcatgtgtctggtccaggagaagtattgaataagccatttctactgcttactcatgtccctatttatgatttcaacatggatacatatttcagttctttctttttctcactatctgaaaatacatttccctccctctcttccccccaatatctccctttttttctctcttcctctatcttccaaaccccactttctccctcctccttttcctgtgttctcttaagcagatagcacatacccccacccagtaccaaatttcagaacacaagaaggtccagttcttcccccttcacataaaggaacatggtttgtcagcctttctcctgtttatgggtttcttccagcagaacagagacattgccaaccatattggatctgcttgctgtccaaaccagcaaactttcctgggcaaatcacaatcagtgagtaaatagacagcctttctgctgccttgggtttctgtgcagataaacagaaatgctctgattagaaaggaaatgaatggttccactcaaatgtcctgcaatttaggattgcagatttctgccttgaaatacctgtttctttgggacattccgtcctgatgatttttatttttgttggtttttatttttggggggaatgacatgtttgggtcttttatacatgaaaatttgtttgacaataatctcacaaaacatattttacatctgaacaaaatgcctttttgtttaccgtagcgtatacatttgttttgggatttttgtgtgtttgttgggaattttgtttttagccaggtcagtattgatgaggctgatcatttggctctttttttccttccagaagagttgcatcaacaaagttaattgtatttatgtatgtaaatagattttaagcttcattataaaatattgttaatgcctataactttttttcaatttttttgtgtgtgtttctaaggactttttcttaggtttgctaaatactgtagggaaaaaaatgcttctttctactttgtttattttagactttaaaatgagctacttcttattcacttttgtaaacagctaatagcatggttccaattttttttaagttcactttttttgttctaggggaaatgaatgtgcaaaaaaagaaaaagaactgttggttatttgtgttattctggatgtataaaaatcaatggaaaaaaataaactttcaaattgaaatgacggtataacacatctactgaaaaagcaacgggaaatgtggtcctatttaagccagcccccacctagggtctatttgtgtggcagttattgggtttggtcacaaaacatcctgaaaattcgtgcgtgggcttctttctccctggtacaaacgtatggaatgcttcttaaaggggaactgtcaagctggtgtcttcagccagatgacatgagagaatatcccagaaccctctctccaaggtgtttctagatagcacaggagagcaggcactgcactgtccacagtccacggtacacagtcgggtgggccgcctcccctctcctgggagcattcgtcgtgcccagcctgagcagggcagctggactgctgctgttcaggagccaccagagccttcctctctttgtaccacagtttcttctgtaaatccagtgttacaatcagtgtgaatggcaaataaacagtttgacaagtacatacaccat

SEQ ID NO: 10841 - DNA, 1419 bp, Homo sapiens
aaacaaaagttaattttgaagagcatcatcatgggctggggtggtggctgcccccaggacatgcaggatttctgcagggggcagcacaggttctgggattgtgaggctgtgagtgaaggtggacaagctgtctggatggcaggtctaatgctcttccgaataaagtgctgaactgtgaggagagaggcggactgtgaggcagccaggagccagctgcgtccgtgtgtggtctgtcaccacggggcctgcttcttatctgacacagcagctatcagagtctagtggttgtgcttttaagatgctctgataccattgggttaaggggcagattggcggtgggtgtggggcagtgtgaggtagtcctggatccccgccagggtggcccagacgccagcccttccctgtgtggctgcactgaggtgggtgttgaagagccccctaggggacacacagcttccaggaggagggaatgtcctctaagcatgctcctggcctctcaaggtggcgcttgtctaattattcacttgggaagaatgactagctcagccagcggctctttctgctttgttctggcgactttcctgggcaggcctttccacctggggagctggctcatcctgcacagctgggccgtggtgggcctgtctgcttgattctggggttcagtgtaggtcagctgatggcgaaccatggtggtggtttggcttctgttcttattcttgagttttgataccacgcagaccttgggtggggagagcttcctgcacagctctcagcggcctgtggccttggaactgcctgcgtaagtaacggaggggctgctggtcctgttcaggcccgtgctggggacgccgcttagacaatgttgcccagagtcctgtttaccctcccagggttcattcttcccaagaactcaaattcctttctcattggagcctagtgaaaccaaatgaacgggacctgctggcctcaggaggcaggcagagtttaaaataaaactttctcatgatttcttgaacatctttccctgtttgtatatacactttgtgtttatttttcagtagctgcagtatattttttttcaatattcagtataatgcagtgtatttcatcatatgctgtatggagagtgggcagacttctgtggagggcccgatagtaaccatttgaagctttctggacctgtggtcttagtcccagcgattctgcagagcggccatcggcagcatgtcaaccatttgcatggctgggctccagggaaactactgacaacgacaggtggtgggccatagtttcctgacccctgtgctatgccagaatttctttttcctcttccctatgagtggacctaaatatgttaattccttttcacctttcaaaacggacagccccttgaacattaaaaacttcgcagaccct

SEQ ID NO: 10842 - DNA, 73 bp, Homo sapiens
cattaacactatataatttttttccccatttggagatgtgtattttcagttttaataaaaatatcaaaacctt

SEQ ID NO: 10843 - DNA, 353 bp, Homo sapiens
gtccccacagcctgcttctcccctgggctgctgtgggctgggtccccggcgggactgtcaatggaggcaggggttccagcacaaagtttacttctgggcaatttttgtatccaaggaaataatgtgaatgcgaggaaatgtctttagagcacagggacagagggggaaataagaggaggagaaagctctctataccaaagactgaaaaaaaaaatcctgtctgtttttgtatttattatatatatttatgtgggtgatttgataacaagtttaatataaagtgacttgggagtttggtcagtggggttggtttgtgatccaggaataaaccttgcggatgtggctgtttatga

SEQ ID NO: 10844 - DNA, 3354 bp, Homo sapiens
tgccgggcgtccccgagacgcggctgcctgtccgtgcccatgcatctggaaatctaatttagagttgtaggtgaattttcttttcctccaattcatttgttaagtctttgttctttttctgtgtttctgtttgtttttaggtttgttttgttgtcgttttctttggtgtttgaagaggctctgggatagatggttaagaagtagaaaatttagtttagggaaagccctcccacaggtgggaaattgctctcccctctgtggcttggacttacgtttattgtcaaggggagtttttacatggaaatgacaatgggaaaattcagatattttcttagtagtgcagacctttacccctagtctatgaaaaaacaaaccaaaatatgctcttgcgcccaggccagtggtgagttagaggtatgctatcactgtttgtaagcatctggggaggtactgaactgtaagaacatgcttggacacttagtcattgttctgtgtttttattaatgaagaaaagggaagacagacttccaagagttactgtccacccggtggtgtggccccatagcgaagtctaaatgcctgtagagatagagctagctggtgtggttgcagtgaccttgtagaggaaatcagttcattactttgacatcattcagtgagctctcctttcctaaggaagtttaaatgtccttagttagggactgactttcttaagtaagtttaaatttactacatattgtgaagagacaggatcaagttcagaatccttaaatgtctgattaggcatcacttggatgaggaggtgggcgatttggctctgacagctggagatgaaggcacactcataccacatacaagggaggatttggagcttttaagccagtttcagatttactctgaaatgtggagcattcctgcaagactgtgcagctcacggaatatagaagacatggcattttactcagaagtcataagtttttgcccccctcatttacctcgtattaccaagaaagaaaatgttatcgatactaaacaccatcagttcagagggaggatgtgtgtgtgtgcccgcatatgtgtgtgcgtgcgtgtgtgcgcacatagctttaaaagaagacattcaaaatttgatgtgctacaagcctcatgaaagaacaaaagaaatgaagccttttgatatgcattcgctattcccagatgtacgccatgccttttccatgtccctcctatctctgttgaacttatgaatcatactcattacttttcagctttttaaaaggccaatttttgtccagttttctctcttccagtcccagctgaaattagtggaaagaaagtttgatggagctttcagctttgaacaaaatcccttcattgtaaactagcaccatctttatccaggtcttacccagtcaggctaattccagaaacttgtggtttttagtatagtctgtctacctttagccaggcacaggacagccctatgaaaaaatacccaatatatattttttggaaatgaaacattaaaagaacttaaaaagtaatttttggaaatgaggcttcaattagaattatttttctcaaaaaacaaacaaacaaaaaacacaaaaaaaaccactcttctccaaatgcccaagccttctttcaaaattagttagaaacttaagtaaaatacaagtccacaccatccccaaattacaaaatggacttacccttgagagggcatctgcagaatatcatcagggacaaagatctcgaggctaacgatgtaggtttcatttctcagactttgtaatataaggcaagccctctctcagagctgccatcatcactttttgaatttctttgggggttatttaatgaaaaacatgctatgttttgttttaagctgaagtcctattctggacactctgctttgggaaaaaatgttatcatttaatttcctttctgcaaattaaaactaatgaagtgtggccttgtcaaaggctatggagatgttccgggcatactgctgtgctctgtgctttccagcaggcgctcctccctcacgcaggagactcagttgtcctgagagagatgaagcagccttgaagcagatgctgcgttttccataaacctgattttgcctcacatgaaccaaagactctcaaaactccgcttctatagaattagctgaataaaggcattttactgatagctgttcgtgttagcgaaacctgtctacctgctatagcacactctccgatttgggccatttatgcaccccgcaacctgggatctcaaggagctttaaagtcttaatgggaacttggcattttcctgatgatctttaaaatgtggtcactaaactcaggattggcgtgtgcttttagaacactggagtagcccttgttttagaggctgtgcattgagtatcgaccgtattttgtaaaaggcaagatatcctcccttccaggctggtaacgggtttcaaggggactcttgaggaagtgccccctaaaatagaacacagcaataactgggcttcctgtccccacccccaccccagcagtgctctctggcactgggaactctgctagggagtggtggaagtaggaaggatttgtgtgcaaaggaaaatcgtggttgagtttcactgcagcaggctgacgttgcctgatgtgagagcaagtggccgactggggtgcgggtgcacaggtcgggggagcacaggccacagagcgcagcctctgggggtcccccaaggcacagcatatacagcatggtcgccccttgccctggagtctgggaacaaagagaggagccagcctccccgcactgcttcagatggaaaagggaggcagggtgggcttccgttctccagatctgtttgctcttaacaggcagaacatgggagaatccttattcctggttaatcactatgcatatttgaaataaaagaaagcgtaagcctctgcaattttaacttctcaaaggatgtctctgaaaagaatcactttaaaccaatgcctataaaaagcaagtctaccaaaataaactaagactttctatgtggtttgggctccctcttatttttacaagtttcatttttaaaagtaggcaactactttgggttacagtatttttattcatatttaaacatttttacaaaataaataaagtgttttacatagtaaggaatatgtacgtatttccaagtattaagaagccaagtgtttttttttttgacgtattattgacaaatgtattcagcgccatacacaagagaaatattattactccaaagaacgaaagttaacaaaactccaaagcaaaaacccttttaatggaggtgagaaataaatttaatgtaac

SEQ ID NO: 10845 - DNA, 218 bp, Homo sapiens
actgtgtgtaaccatagtaacaccaagcacgtatttatttataagtttttgccattataattttgaccataaattaatttgaccatctctcttattaatagagaagtaaaaaatgtaagttgaccttctcttagattatgttcaatgaatattgtaaatgttcaagtattgttaatgaatagaataaatacaatattgcattcccatatagcagactt

SEQ ID NO: 10846 - DNA, 2119 bp, Homo sapiens
cccggaggagggaagcatagagaacgggagtggccatctggaaatccagctggttatccaaatcctaaggggagctacagccagcggcatatacttgtttttgtgattattctgtatcagaaatgaaacagaccctcaaattaactttccttcctcatttcttgaggcttctgcttccaacaggcacctctaatcagaccttttctttgaaattcaacaagatttcttaatgctatttgccaagaccatttcacagaaaacattgactgtggctcttgccttatctgttcctttttaggtacagtaaaacaattgtgacagcagtttgagcttgctggagagtggcatcatggggacaaaaggaaacctctgacttgctaatggatgtagccagggactccccatagcaaagggtctgtggccagttgacatccaggatggctgcaagcgcacttgatggtcaggaagtttgcagatactcgccaaggcagagcgcaaagtgctagccactggaaatgcatgacttccctccacccctactctattctgtagttttttggttttgtttctgagacggagtctcagtctgtcacccaggctggagtgatctcagctcactgcaacctccacctcccaggttcaagcgactctcctgcctcagcctcccgagtagttgggattacaggtgactgccaccgtgcccggctaatgtttgtatttttagtagagacggggcttcaccatcttggccaggctggtcttgaactcctgacctcgtgacccacccgccttggcctcccaaagtgctgggattacaggtgtgagccaccacacccagcctctgtagttctttttacaacatttttcattataactttaaattttttaagcaactggaaaagtgttccttgctctcttggggggatttggctggtgccgaagtgtttctgaagtctcaagaactgccataaaatctcacgctgccatttccctgaacagatacatacatagagagagacagttttccaaactgtgtcacgcaggctgagtgcactggcaggatcacagctcacggcagcctcaacctccctggctcaagcgatccctcccctcagcctcctgagtagctgagactacaggtgagtgccaccacactcagctaattttcaaattttttgtagacagggtctccctatgttgcccaggctggtcttgaactcctagactcaagtgatcctcctgtcttggcctcccaaagtgctgagattacaggtgtgagccactgtgcccagcagtttcccagaatatatttaaatgcaaagttacatgaggggaaaacatgtatgtttgctcctgttgttactgggtaggttctgaacagcagaaacccatgtgcagggtgggctggtgaaggcccctctccgcaaggtggtagcaggaaaaggtccttgacttgatgaatttggtctgcctctgagccactggaggaagctgttttgagccagggttttttggcctaaagccagcatttcctcagtctccctttgtggttcgaaggatatggactattgcaatacatttcttccttcaaatcctgccactgttttgttggcccacaactaataggacctcaaaataagccatgctgctttgcacacacactagccttcttttgtacttttcattctggatgggcttggccaaaacaggctcaggccaaagacctcccaagctgtatgtacttccagtatcctgaaacagtgtttggtgacataatgccaagggtaaacaagcctgatttaggcactgctttatccaggggcttcacccatgaaattaataaaacttatctgagtcacttgaaacttggttcccagaaaacacatttctggtttataatctccttttatgctcacctgacattaattatctatccttgatgatgtgtttaaactgagtagcagaaaacagaggccacactttctgggaaattttaaaggaagaaaccatttttaatgagatgaaaatatttaacgaatttaaaaagctaatgacaattttgagaaaaggtttgggatgtatattgctatgtaatttaataaactgattttatggatat

SEQ ID NO: 10847 - DNA, 674 bp, Homo sapiens
tgccctagctgggcaaacccttctcttctccccccaacacaatctttccttgtctctcattctctttctttttctgtctctcttgctttgttctttatttgtttatatttaatttttacatgaccagaaaacaaatcttcaaggtgtaaaatatctacctgccctctctcagttattcagattgacaaggtagacatggatttgatgaaagtgcaaagtgccctcatttgtggcccaagcctggtctcctcccaaaatactacacatccaactcctggagatttcagttacttacctgcatgtgttgtacaataccagatcactcaaaaaggtgtgtcaaagattttacctgggatatgacaagcaaggtttctggtgcctatttattcattcagtgagacacagagtggagccctcagttttatggatcccaattcatttcatctactacagggtgaggtgcttgcccccatgtgggtgtggcagttacagggcccaggtgagctgaagacaaaccactgtacatatatatgccttatgtaattattttctttttgtaattagtaataaaacccagcatgtacaaaagtaccatagaacagaactgctaaatactgtacatagatgtatcattaatgtaggtttagatatataactttagaaataagaagcaa

SEQ ID NO: 10848 - DNA, 635 bp, Homo sapiens
aggcataaaccacatccagccacctccttctgatcagcagcaaagctgacgttttgatctccatctgtctgattcttgtgtctacttctcagtttacaactccagtgggaaagaaagagctttatttacagacccataaaaatcccatcagtgtcgtcccctgctgagaggccatgtgagaccatatggaaaaacaacagccataatggcagcatggcagtggaagggtttgtcttgtgcccaggccttgcggtcatgcaagtttcttgtggatcctgttgggaccagccactcaccaaggctgagtaggtccacaaataatggggactttctaccagactcacagagaactgctgggtttttgggaagggtgtgcgtgtctttggggcatgcaagttggggttatagtggagacccagaggatgagaaaacttctctgcctcagcagaagagtggcagctgagagagaggcaagaaactcgcacccactgtggactggggcagagagattttgaggagaatgaaatccagaaactctgtgtggtattagtttgtatccagagggtgaccctcttctcaaggaaatgggtgtcatcaattttctacactattaaagatataaagttcttggcatt

SEQ ID NO: 10849 - DNA, 1524 bp, Homo sapiens
agacctggcggaggcttttcccatcagcgtgcattcaccagcccatcgccacaaactctatcggagaacatgaatcaaaagtgcctcaagaggaatgaaaaaagctttactggggctggggaaggaagccggggaagagatccaaagactcttgggagggagttactgaagtcttactacagaaatgaggaggatgctaaaaatgtcacgaatatggacatatcatctgtggactgaccttgtaaaagacagtgtatgtagaagcatgaagtcttaaggacaaagtgccaaagaaagtggtcttaagaaatgtataaactttagagtagagtttggaatcccactaatgcaaactgggatgaaactaaagcaatagaaacaacacagttttgacctaacataccgtttataatgccattttaaggaaaactacctgtatttaaaaatagaaacatatcaaaaacaagagaaaagacacgagagagactgtggcccatcaacagacgttgatatgcaactgcatggcatgtgctgttttggttgaaatcaaatacattccgtttgatggacagctgtcagctttctcaaactgtgaagatgacccaaagtttccaactcctttacagtattaccgggactatgaactaaaaggtgggactgaggatgtgtatagagtgagcgtgtgattgtagacagaggggtgaagaaggaggaggaagaggcagagaaggaggagaccagggctgggaaagaaacttctcaagcaatgaagactggactcaggacatttggggactgtgtacaatgagttatggagactcgagggttcatgcagtcagtgttataccaaacccagtgttaggagaaaggacacagcgtaatggagaaaggggaagtagtagaattcagaaacaaaaatgcgcatctctttctttgtttgtcaaatgaaaattttaactggaattgtctgatatttaagagaaacattcaggacctcatcattatgtgggggctttgttctccacagggtcaggtaagagatggccttcttggctgccacaatcagaaatcacgcaggcattttgggtaggcggcctccagttttcctttgagtcgcgaacgctgtgcgtttgtcagaatgaagtatacaagtcaatgtttttccccctttttatataataattatataacttatgcatttatacactacgagttgatctcggccagccaaagacacacgacaaaagagacaatcgatataatgtggccttgaattttaactctgtatgcttaatgtttacaatatgaagttattagttcttagaatgcagaatgtatgtaataaaataagcttggcctagcatggcaaatcagatttatacaggagtctgcatttgcactttttttagtgactaaagttgcttaatgaaaacatgtgctgaatgttgtggattttgtgttataatttactttgtccaggaacttgtgcaagggagagccaaggaaataggatgtttggcaccc

SEQ ID NO: 10850 - DNA, 1215 bp, Homo sapiens
gggactatggtagaaacacagggcaaaagctataggaatggtccaacataataactgtttttttttttaattttcaaaacatgataaatgattaagaatataaaactggaatttagaacttacagagaacttgtatgaataaattaaaaagacaacctaattttaaaatgggcagaagtcttgggcaggcacattacaatatagcaggggtcaccaaattaaagcctcaccagcaaaatccacctcccatcccagcctgtttttataaataagctgtgttggaacacagccaatcccattcattcacacattgcccatggctgcttttgcttgacaacagcatagttgagtagtagggacaagaccatatgacctccaaagccagagatattaactgtcaggccctttatagagtgattcacggagacccccataatagaggaaaatacaagtggccaatagcacataagaagatgcccagtattacagccaagaggaaaatgcaaattacacccacagtaagataccattatgcatccattagaaaggctaaaattaaaaggactgacaacaacaagtgttgacaatggtgggtaacagcaagagctctcatacactgatggttgaagtgtaaattggttcagttttggaaaagagtttggaggtgtctactacagttaaacatacatatttccatgccccagaaactcctgggcatattctcaaaagaaacgagggctgtggccaccaagagacatgtgtgagaaaggtcctagcacctttatatatcatagtcccaaacagaaaacaacacatacccatccacgttaggatgaactaaataaattggggcatatgcattcaatggaatagtacatagcaatgaaaaaataaactgttgccccatgcaaagatgttttacagacataacgttaagcagaagaaagcagatctcaaggagcccacattgtacaattccgatctatatgaagctcaataacacatggtactagaagttgtaatagcagttacctgtaggactggaggtttgtattgaaagagaaggaacatcaggaagtctgctggagcctggaaatgtctgagatgttgctctgggaggcagttgcatggctgtagacatatgtaagacattattggatggtatacctgagattggagcacctacaatagaaggtacagtgttacatctcagtg

SEQ ID NO: 10851 - DNA, 122 bp, Homo sapiens
tcttaaacattgttttgtagtgtatattacttgtccattcctttaaggggagcagcctgcactcttttgtagattacttttgggggatatattttgagaatgatgaaacggaataaaattgt

SEQ ID NO: 10852 - DNA, 6036 bp, Homo sapiens
ccttgagggaaagccagttcatttaagaggaaatggactggcatttatggtgaaagctggctgttaaaattatttttttgtcttacaattcagggaatatatttatatttttctatgaaaagttatgaatgtgactaaatcatgactgttatttttatttgcacttgctggtctttgtagcagcattcagcacaggtgccaaaatatgcttcattttgggggcagatctattttgacagtatttgactacatatagcaagagtttgaaatatgttaaacactagacatcctggttatcaaaaccaatgagcattactttcatggcagcaagtgtcatgcagttattttctgaatttgtcaaagaggcagtagtttctaacccctgttctatagtagttacaacaatttcacaacctatgtttacagattcttcataaatacatgcatactgacactataatcatgggaggtgtaaccatgattagtaggcgaggtacctaccacttttttttttttcttcccctggctacttgagtagaatgcattataccagatctggtcactttcattgaaatggtttctaattttcttcccaagtgctgttgggtttttttcttcttaaggaaaacgttgtcacttttatgttataaacttgaatttataaagtgctggtaaattatttttaatgatttgagtgcatgttttaaacctctaggaccagagcatagtcagagcattttcttttaaattgtgcactaacaaaatgctatataatctgtcttctgtccaagatctcctggtttccattgtaagggatttaaccaaaatcttgctcttccataatcttactctgtgaaatagaggaattcgtgtgccttagatttagaagtgtgttctttaatagagtgtacagggctaaaagagtatttaagttaatatgtaggtttcccccatctgtattccaattgtagaggtgagttttgttaagagtacaattgcaaatcttatctatataggaaaatagctaaatgtcattctccatctctttgttttagtttactgcttccatgtgcaatcctaagcattctttgctggggcaactaaatgtatctttattagtgacttctagtccaaatataagaaactgtcatgttttgtgggaaaataattttataatccatttaaagtgaaagtttatcacacaaatagtacacttattttctaaccaaatacttgataggttatgctactccagtgtagatggccattcctaacttgtttgtgcctgaagatggacttgattcaaatggtttacatatttagtgggtaagggatatgttacagtaccccacctgtaagttatttattagccctaattgtgtttgatttcagacaaaattaacccttttctcctgtgtatctttgaagtggcagataaggtgaagcatcagactggtatcaatattagacaatgttatttattagccctaattgtgtttggtttcagacaaaaccttttctcctgtgtatctttgaagtggcagacaaggcgaagcatcagactggtattaatgttagagaatgttctgaagtgttcctattttgtagttatctattccatttgacatagtagaaggtacattttctttctactctgatgcatggggaaggatgtttttggacattatcaactgagataggtgggaaacctcctctcatttgtggcttagagagctatcaccatttcagaactatgatgcttttcttctcagaacttgtgttaagtagatagtaaacagattgattcatgataattgtccttgactaagactgaaaagactaatgggatgccttttactttgctaattttaaaaactggtgatagatgtcaaatccattaatttatttaaactcttcttaaccttctcttttataatctgttctcaggttttaactccatgtttaccatcatttgcaaaaaggtaccaaaaaaatccataaataaatatggaatacattcataagtacatacattcttttggtataaaacaatattttgacagtttaggcttcattaatagaactattctgattatttggactgcattaattggtcattgactggccatccaattaccattttttctttcagtccaaaatagttagacccttgcatacagaagtggtattttggtttttaatcagatttggtttcatcagaagcagcaagaatggacctgatgtctttaaaagcatagccgacaatggtagcttctcaagttatgaaataaaactgagagataatggagaaaataatttttatgggtttttttggttatggtgctattcctaaggttaactttgaatatgtgacacacacactcctaagtacctttaaggaaaattaataaatcattaatagttaaaatgtttacattgagcactagaacatgtttggccttttttttctacgttatgcaaaatgcccagggatttaatgcacaggtgtactttaatgtttagggtcagtttgtagtattcttgagaaaaagataaagggttataatttgaatgtgaactgatccagaaataagtgctgtacctttccactgcacttgaagttcaacttaatggtgtatgtgaaaaacaaaaactactttggttgtgtatgtccaaagtcctatggttttattcatttatggttttacaggctttgaagtactcagatttgatttttgctttcttggaaagactcactttaccaagcatataaaggaaaaatgatttcaaacattgacaagatagatgagtgttaacaaagctttcttttttcgtgtcctccttatttaaaaaggtatacttacaatgtgaagtaacttatgaataaaaggaaaagtttatcccatattcaaataattcctaaggtcagcctccctttttgtaagtggcaaatatctgattaaatcatttctcagtttattaatccttggaaacaatgatatagcagttactcacagcttgtaaattacaacagaaaggttcctttcaaatagtagagctgcacctaaagaggaaattgggtttataagaaaatggaggcaaagaacttaagttttaagaaaaagcacttcaaaacagaagggcaaatggaaaaggggaatataaaacaaaccaataaaaataccatctgagggtgttactgtccaaaagtaaagaataagatgcatcactaagccctttgcactcgttatgacctcgtaagtaaaaattatcacttagaataaggggtgcacactacattccctctgtcttctagacttttttttttgtagaagaatcagaaaacaatttactaacctccctgtttgatattaaaaataggaagaattttaatattttctgttagtacaagttgaacttgattgtgccaactgaaaccccagaggtttgtatatcagtagaatgcaagaacattgttaaaggtgcttacgatcttttttgttttcctttccactccattgtatcaattttttgagtaacttttaaatggctagaaaatggtctttttgctttgcccttttaaagctgaaataaccagctccattcttttcatgaatagtaagttgatatatttatttatcaggtatcttgcagttgtcaccaaatactgtagttttcttatgttgtatggaaattatagttcaattattttaatgtgatagagtgcaacaagtcattgtagaacttttcacctgttaatgttgaagttatacctctgaatttctgctgtggatatcaaggaaataataaagcagaaaccccaagaaatttgcaacttaacagtttgagactgtctcttatcctagtatttgggaagagaaggaataaatttgtcaaaactaggtgagaaaatagagcattgtgggaaaaactgagtccaactagattagcaaatgttaattcctagctcaaactgtgaatagtaaggattgaaaagtaaagtatgtaatgctaagggctgtgttgtcttttcttacgattttaagttttaaaggctgttaaattacagagatgttgcccaaggatacatggggattctcaaaagtaagagatttttacctttttcataatctgccaagctggttcctaatatattgttaaattggtagaaaaatatctttaaattggtgtctgctcaagaattgcttttctagatttgatggagggagggggagagtcacatcatttggattctaccaatctgcaggctctatctttggcaacatgtaaataattagactatacatctgtttctcaagtatggcaagaccaatagtttgaatttaattatcaatgctatggtatactttctggtcatattttagttatgtcagttttaaggtaagttttttcatttattaaagcccttaaatgagattttagactgccaaagagaagaggcagtccaattgacctaactgaaatgagatgaccagtatatagagcctagatggactgtagcagctctacccctttgttttacaaggtaaatcattttaaaaattaccttttttgatcagtgggtaaaagttaaagggatctttaatttttgatatattcaagttaattttctaaatgtgaatcagtccttggactgcaactatatattcacctacaaaatcccaatcaaaaaattacatgagcctgtcaagcagatctttagttttccacttcacataagatcgttaatgttctaaattaatctattcatttagatgatttttgtcagttcttaaatgggatataataaatttagcattttcatcttaacaagcaaaagagttaaaaaacaaaacaaaacactactccaagccaaatacattctagctggttaattccagacttgtcccaagtggttccccaacctcttttccactggtaatttcttttcatgcaggcagaatataggggtgcgagcgctgtgagttttacatatgagcttggataggggaactgaagcgagtcaggagccctgctggaaaaggggtttgccattggattgtctgtggcctggtttctttccagtagtacagtaatagggtagattgaaaacaagtatttacttctgattctgcctgcatttagtgtgaaatgctcttaaggtattgcttctaaaaagcaaattaagcagttaagtataaagtccctgaattcatatttcaaaataaggcttttatgagatttttattaaaaattgcaatagccatcacaaatctgagtttttctaggggtgagagaaaactgtattgtgatgagctagattagttgtagttccagaataagaacaaaaattcagagttgtgtggtgcccatcattgagtaaatgaaccctaaaaatgaataagctaatgaactagttcatggaattatttctgatggtcttttgacctgatgctgccatactgcagtgttaccagctccccctagaaaacggaactgtttaaaaacacagcaagttacagaaaccattttattctacagccattggggtacttcagtttatgggatgtttttggaaacttctgctttgggagggatgaagatcattgataaatgttatttgctttctgagttttggggtcatttcattgcttatcaatgaagggcagacagaggagagaatatctcaagtcttttctgataaaaggcttgcttgagggagcttataacttgcacctagagggtttacccactttgtggatttgatttatccaccaaccacagcaaccaataatgtcaagattctaggagtttatgaaagaggctagtatgttttcattttgagtcagacattcttttctcattctcaaatctgttttaaatgctccaattttaaaaatgccaatgaaaattttataatgcttctgtagtaaccatatgcagtttactttgaatttaggaaaacagttttgtatgatgaaatattgtgcagaatctgtaaataaggtagcttaaaaattaaaaaaaagtctaatt

SEQ ID NO: 10853 - DNA, 1978 bp, Homo sapiens
agaagtgttctgctttgtattaatagcctaataattattataattgtgaagtaatgtaagcattgtggaagaaaggtgataatgtaactataaatcatgctgtggactataaaattctctgcatttagcatagaacattgaattttattacataagtgtttaatgggtccttctgcattaaaaagttgataaagatatagatgttaagctaaaaagcttgaatttattctgagatgttgtttgaggttttatcaatgtgagttcttaattttccattttgtagctcactcataacttcattgaatgtaattgtatgtgtctaataaactctttaaatgctagaggtatttcatttgatatttagcttctgaaagccctttgttataaagggaagtgattttctaaatttggtagcagcttgaaaacaagcaccacaaatgtaaaactgcatggttctttttttactaatttaatttttttgccaagttatgtgctagcaaaatgtttgaaattgctattctttttctgttagcttggtatatatgacttagactaagtatatgtatgtgatataatatatgtgtacatgtggctaaactgctaatgggcaaagattgttggttcttctgatgctgagtatacatcaagttcatcccatgattattttttattacgagctattgctgatgtgatgctactcttagctgcaccaccagtataaagcttaactgagaaagaacacccctccctcttagttccgtgccagactggtttgttagctttagttgtttcttagtgctctagccatgtcaccctgtggcactaatcaggacactgtttatattcttcctcttctgtgtccctattcactttgtaattattctattttagctggttatatggtagttaattggtagcctgttttcctttgttttctttacttgtgtcaagctccatgtcgttgttttgtgatgagcagtgatttagaactggccagaccttagaagagtcttcagcaagctgccctagggtaggggcgtattctctgtttgttttgtactggtaccccaggaggatgccttgtaactgctctttggtcatgatagtggtaatgaatccattcatgtaaaatgcaatatgtctgttagtttggggcacccgaggctcagtagaggtttagtatgatgccttccctttcttctttgagttatgaagaaactaatttctggcacagtgtgactgcttcaaacctatgttctgctgctatctcctatagaggagggcagacttttttttcttagtgcatttgctggtaggtcaaggagggatggactttgaattagtgttcagagtcacagatcctacgtatgtgctcttcagtagaggattttctgtgatcctacaatgaagggaaagctatataatttattggtacttcctaaagatagagactaaagtcatggtagtattggccaaattaattttaaaactgaacaagtcatgaattttcatataaatcaaagaactttttccttataaaagcttccatttttgaaaagttggatcagttgtaagacctttcatctttagtattgtatgatataattctacattgaaaaataaacacttggcattaaatgggacttggagtcaaaagatctggttttatggtccatcttttaccaatcatttgctgtggatctctttaaaggtcctggaacctttgagcctcagttacctcacttgtaaattggcaaaaatacctacctcacagggttgttgtgaggattcaatgagctaatgtatgttgaaagcactttgtgaattgtaaagtgctacacaaatgttagttgttgttgctgctgtatctgagatgtcttaattttctttttcttcagaaatagtctaataaacctccagggcttttctgttaaagtatactagttggtaaaatgttgaataaacagtttattacaat

SEQ ID NO: 10854 - DNA, 1548 bp, Homo sapiens
tgactatgagaatgtagaagtggcatctgaaaacaattggtacacaagtaaactggcagttacattctgctcccagctctaaaattactcccttattggcatctttggaggaattttctaaaagccataatccagtgggttcctcccagtcagctcttgtacagacatgtgctctggggaattctgaggaggaaataaattgcagagtctgtaggtggagaggtggaaagaaaagacaaatggcctgctataagactactattcctttccagaatgcaaggccttgaagacatgattccttagaggaagaatataatgggaagtgtacaggctaggaagaacttgaagtgaacaaatttcaaaatcttaacctgatgctaattttcagggttctccattacagtgtaaaaattcagaccacgacaactatggtgtcatgaggaaaaaaaatcaggcatttttccaaaggaagtgctaatgggcctatttgacttctgagtgaagcaaaaactacccagatccattccctacaattcacatccccaaaggtcaaaaacaaactaggaggacctgggaatttcagctggagatactgattattgagttctgaagtagagtgttggaaataggcaattagagaaagtccattgatgtcattttgtttataatattgcagttcatactgaatgaccacttgatatgactaattcagggaatatatatttttctatgaaagctatgaatgttactatcacggcttttccttatttttacttgtatgtagcagcatttacagaaatgccaaaaatgtgcctcattaagaggcaggtcttaatcagttagataaaaataaaatgtatagcttaagatcaaaacagtcatatttttagatacagtgaaatcttttatgtttctctacagcaccttaaaaattagaacttgaatactttgagtaaacttactacaatctcatcccaacaaactttaatggtagcatgtttggcctatttcattgtggcctgtactaggattagaaaatttggtcgtggtataacaaagaagtgtatttacaataggatttaatttgttgttaatatgtatttgttgaaattaaaattgccagattaaatgaatatactgtcgcatctttttaacatagtaacgtgttactggaaaaattaagttgttgaaagtaagttgttttcccatttaaaaatatctgaatatatgatttgcatgtgtaaatctgaaaaactaaactacagaaacctagggttttctatttcttttttaagtcaaatgcatttttttttttttgttatacagatgaaccaagtgtctaaaatacttgagaaatttgtggttgcatgtctgttttaaaaaaaaggctttttgttttttagcataagccagaatattctaacctactaagtctgtgtcctttgctccttttgtagtatactttcatctaaattactgatccccaatatgttgatacacaggtgagaaagggaagaattcctaataaactgctattacttttaggtg

SEQ ID NO: 10855 - DNA, 791 bp, Homo sapiens
taaccatataccatgtcttatcagtggtccctgtctcccttcttgtacaatccagaggaatatttttatcaactattttgtaaatgcaagttttttagtagctctagaaacatttttaagaaggagggaatcccacctcatcccattttttaagtgtaaatgcttttttttaagaggtgaaatcatttgctggttgtttattttttggtacaaccagaaaatagtgtgggatattgaattatgggaggctctgactgtctcgggtgtcagcttaacattccacagatggggggttagtttttatatcctataatacaaagcatattaaatggcaatatggagtcagtcctgcatttaatgtcttgaacattttaaattacttctattaccatgttgttttttagtagaattgtttcctaaagaaaaccactctttgatcatggctctctctgccagaattgtgtgcactctgtaacatctttgtggtagtcctgttttcctaataactttgttactgtgctgtgaaagattacagatttgaacatgtagtgtacgtgctgttgagttgtgaactggtgggccgtatgtaacagctgaccaacgtgaagatactggtacttgatagcctcttaaggaaaatttgcttccaaattttaagctggaaagtcactggaataactttaaaaaagaattacaatacatggctttttagaatttcgttacgtatgttaagatttgtgtacaaattgaaatgtctgtactgatcctcaaccaataaaatctcagttatg

SEQ ID NO: 10856 - DNA, 36 bp, Homo sapiens
atataatcaatatcctaatgcattctggtttgatat

SEQ ID NO: 10857 - DNA, 554 bp, Homo sapiens
ctctctcccgcctcttccattctctatggcttgtctgcctccctctttcatctttaagagtgcatgtgagtatattggacctacctgaatcagccaggctaacctccccattttaaggtctgcagccttaattctacctgcaaagtcccttttgccatgtaatgtgccatattcacaggtgtcaggaatcagagggcaggtatattgggggaccattattctgccaactacacagggccttatatggtctggctctgtgtccccattcaaatctcatcttgaattgtaatccgaattgtaacccccacgtgttggggggagggaccttgtgggaggtaattaaatcatgggggcggttaccctcatgctgttcttgtgatagtgagtgagttctcacgagatctgaaggttttgcaaggagcttttcccccttttgctcaggactctccttcctgcagccaagtgaaggacaagtttgcttccccttccacaatgattgtaagtttcttgaggcctctccagaactatgagtcaattaaacctctttcctttat

SEQ ID NO: 10858 - DNA, 618 bp, Homo sapiens
cagacagcatgactggacagcggttgtaaatacaattcaaacaattcaatcaaagctaccttttttttacggaattccaatatttataattaaagaaaattgccaaaatatattaaaaaaaaaaaagagaaaatactgaaaccacagacagtgcaaagactctcctgctttttttctgtctgagtgtgagctccatccgcctgggcatctgattttttgggaaagaagtccagttttatgatcttcacaggctattgcatttttactgattttctacaaaagtgcatgggggggattaattaaaccttctgactggaagttctatcacacaagaggcaagaaagaaaacagggtgggtgggaaatcagcctatttgtgaatttaaaaggaacaccgatttgcgggcaggggaaaacttcagtcacgtttgcacacctttctttcccattagaaaccgggttctcaatttggtcttcttttgttgttaattaggatgagtgccgtcagtgaaggggtggggggaatcaatttggttttctctcttgtttcttttttaatttaatgagacactctttgcattttgtctaagcgaaataaaaaagaaaaggttgtctgcct

SEQ ID NO: 10859 - DNA, 3945 bp, Homo sapiens
caccctcactcctcaccctggacaccctcactcctcaccctgacaccctcactcctcaccctggcaccctcagtcaccctgacaccctcactcctcaccctgacaccctcaagtcttcacctccctggctgcagcctgggacacgctttccctaacttctgaaggctcagtcctcctcaagccaatctcatctcaaattgcacctcctcagagaggtcttccataaccgcccttataaagcaggattctttcaccaataccccttcccacatggcactgtctcacagcactcctctaaaagtctgtttacttccttgacaatctgtcttccttataaggggaggttctgtaaaagccaagactctctctgtctagttgactgttgcataccagggcttagaccaaggccctgacatgcagtaggtgcttaatatgttttgaggcaaggtcttgctctgttgcacatgctggagtgcagtggcacaatcgtaattcattgcagccttgaactcctgagctcaagtgatcctcctgcctcagcctcctgagtagctgggactacaggcatgcaccaccaagcttggctaatttaaaaaaaaaattatatagatagggacttgctatgttgcctaggctgatcttgaactcctaacctcaagcaatcctcccacctcggccttccaaagtgctgggataataggcatggagccgccacacccagccaatgtgccgaagaaagaaagaaaaacatgctcatcctttgagtcaggttcaaattttttctcctctttaacccccagtcactccagttataagtgatttttaactcttctcacactttaatgcatctggcaagaagatccacgtggtgttaggaacaatacaggaccttaaggatgggggaatcagcaggtgtcagcgtgccctgtatgctcagggcagctgtttccactggacattctccctttgcctctctgggcagcaactcctaggccagccgacctgctgtgtcgagtaaccaggatttctcaatcttggcatggttgccattttggaccagatcgttctttgttgtgggggctgccctgtacggcaaagaatgccgagcagcacttccagtctccacccacaggacgccagtagcaccctctaagttgtgagaactcaaaatgtccccagaggatgccagatgtcccctggggtggggacacaatcaccccaggttgagatccatggagccaggtctgtttgccaccaaggggtaaagctccattcccaccttaggagggctaggaggcagcatcgtggggccacagaaggcctgggtttgcagtcagaggacaggatgcacattccttcaagatacagacccagattgttgggcatctagttcttgggttttctgttgttgctgttccgttttgtctgtcttccctcctttgtttactagcagcctggaatttgccactttttctaaacgaagatttatggaacacttaccacacggctgacgctgcgcgaggctaaggttctaatacaccgcagctcacttaactctcgcaataccataaacgcacactgtttcatcttgaccctttcttgggaaggtgacagagaggtaggagggcaaacatcttgtgtgccccgtcccaagggtattactggtggaataatatccgccccccaccccagtttctaatttgctgtaggctgtgacgctgtggggcaagactaggagtcctgttgaaattaggaataagtgtgctgtgagggaagggctgccttattttagagcacagattttctgaatatctattttgacaggttcgatcctctccccttcctgccttccttctgtcgattttcaatgtcttgatggtgtcccacctgagtggcctttagagatgtgagttgtgaggcactggggaggcaggcacacgtcctccagcccaagactgcctaatttaacagggatttctgcattctggaacaagcctccattttccccaagcaggattactccagagggcaaaacacagcccaatagtatcacatttcctttctgctttagcaaaaataaccactgtctcattcatgggaaaaggccgccaaacaaatttgttactggaaccatttgtaacaacttctagtttgcactgccttggagcaagcacactttgtagaggagggatttgcagttacttgggcaacaaggtaaccactgatcattacaggaagcttcagaaaccgtgggaccagtgtagaagaatggactatctgtccaaactaagaataaaaagaatgacacttgtattttgtatgtctttttcactttgcctttctagtaattcatttttcttgatatttacaccttgtggccctgtgatagactggaaatctcaaaaacacacgttcagcaccaagattttcagcagcaccgcctcagaatgagacccctagaaaaaactgcgtgttttccacttgcccaacacgaggagtttttggaacacgacctgcttgaggtggagattttctagatgggcaaagagaaggaaacacttaacctaggaagagtatttaggaagaagaaagaacacagcctttctgcacaggaaaccgccgagcagaggggcatctggcctctgcagtggcctccaaatagagtccaatggctggggccagcgtggctgcttaaaggggactcaagggatataataaaatgcagattctcaggtcctagtgcagacaggctcacccaataagtctggactgcatatgggaatctctatttctaggcccttctgcaaggtattcctgctctttccaggaaccatcggcagctggtttggggaaagaagcaacgactccaagtgtgacctgtgagctggcagcagccaccctcagctctgctctcggtcactgaatccgattctgcattttaacaggaccccaggtgttgcacccacacaaagctgaagcagattggtctgggggcaaaaaattagagctatggagattctctcaaatgaaatagatgatatcattgactgttagagcttctagaaggaatctgaggtcacttgttcaaattccctgatttacagatgaggaaacagaggctcagacagctcaaatgacttctctccaatacccaacattcgacaagtagcagctctgggactagtacccaaagcacctagctctccaatcactgcgcaagccacacaattctgtctgcttgtcagtggcttttctgattcaaaaaaagcttaggaatttccccaggaggcagcacgatgtagtgggaagggctctggatgtctctccaaggcttctggaattcatgcccacctccaccaagaagccactttcctgccagctacaggtgctcacctgaaaagcaagccagaccatattaaccctggcattgctggtacctggaagactttctgattcaatgctttccacctcctcctacccctcaccacccccgtggcatgaaatcctgggggctgctttagaaattgttttctttggctgctggtgggggtgctgctggtgggggtttgcacagctggcacactgcaccagtctggtgggggtttgcacagctggcacactgcaccagtctcctgcctgctgccaacaaggccatttcccaagcactggctttggagaagttggggctctgaagtgggaacacaaggctgccttttgcaggccaggtgtaaattctccccctgccactttcagcctagcgtgaaacagatggagtgtgcattcccacttccctttatggtaccctggaatgatggagctgcccagggcatcgccacgttactctctagacagtctctttgtcttcctgcaatggcagcgccgaggttgtatatttctaggtgcaggtatatgattgccatataataaaaatctgaaaacatccca

SEQ ID NO: 10860 - DNA, 1588 bp, Homo sapiens
tccacatggtcttcgtccttgacgtcgttttacaagaaaacaatggggctggttttgcttccccgtgcatgatttactcttagagatgattcagaggtcacttcatttttattaaacagtgaacttgtctggctttggcactctctgccattctgtgcaggctgcagtggctcccctgcccagcctgctctccctaaccccttgtccgcaaggggtgatggccggctggttgtgggcactggcggtcaagtgtggaggagaggggtggaggctgccccattgagatcttcctgctgagtcctttccaggggccaattttggatgagcatggagctgtcacctctcagctgctggatgacttgagatgaaaaaggagagacatggaaagggagacagccaggtggcacctgcagcggctgccctctggggccacttggtagtgtccccagcctacctctccacaaggggattttgctgatgggttcttagagccttagcagccctggatggtggccagaaataaagggaccagcccttcatgggtggtgacgtggtagtcacttgtaaggggaacagaaacatttttgttcttatggggtgagaatatagacagtgcccttggtgcgagggaagcaattgaaaaggaacttgccctgagcactcctggtgcaggtctccacctgcacattgggtggggctcctgggagggagactcagccttcctcctcatcctccctgaccctgctcctagcaccctggagagtgcacatgccccttggtcctggcagggcgccaagtctggcaccatgttggcctcttcaggcctgctagtcactggaaattgaggtccatgggggaaatcaaggatgctcagtttaaggtacactgtttccatgttatgtttctacacattgctacctcagtgctcctggaaacttagcttttgatgtctccaagtagtccaccttcatttaactctttgaaactgtatcatctttgccaagtaagagtggtggcctatttcagctgctttgacaaaatgactggctcctgacttaacgttctataaatgaatgtgctgaagcaaagtgcccatggtggcggcgaagaagagaaagatgtgttttgttttggactctctgtggtcccttccaatgctgtgggtttccaaccaggggaagggtcccttttgcattgccaagtgccataaccatgagcactactctaccatggttctgcctcctggccaagcaggctggtttgcaagaatgaaatgaatgattctacagctaggacttaaccttgaaatggaaagtcatgcaatcccatttgcaggatctgtctgtgcacatgcctctgtagagagcagcattcccagggaccttggaaacagttggcactgtaaggtgcttgctccccaagacacatcctaaaaggtgttgtaatggtgaaaacgtcttccttctttattgccccttcttatttatgtgaacaactgtttgtctttttttgtatcttttttaaactgtaaagttcaattgtgaaaatgaatatcatgcaaataaattatgcaatttttttttcaaag

SEQ ID NO: 10861 - DNA, 1363 bp, Homo sapiens
acagcatgtccggtggcagtcggttaccacacagaatttaggaggcccagtgaaatgcaaatgctaggtaagtgacacgtaagtttttgatataagcatatcccaggcaacatttatttattggaaattgaaactcacatttaaccggccatattattttttttaaatttttttgttctctaaatctatcttttgtttgccgaatttctagcaaccttagatggagaggtggctctgagattagcatccccacaggcccacctctggctggagagacaaagggaggtggggtgctgccggggagggagagccaaggtctacttccacgccgctcccagacctggggccagaggcccgcttgctgggggctggggctcagaggggagcgagcggctgctgtcaggctgtctgaaaatgctgtgcggattccccgattttctctcgcctggcaggtcacctggcccacactctcctcccctgatcccctgagtgctcccctccccctgcaggtccccctcccctctgggtgagcctggatgccagcaccctgttccgcccgcccagcatgcagaacaaaagcacaacgcacagaaacacagccggtgcgcgcagggcggcaggctggcttctccctccctcctgccgaggtctccggccccttcccccttccctccttccctcccctctcctcttctattagaaaatgggagtgttagggttgaattgtgtccccccaaaacaggtatgttggggtcctgattcccagtcccctagaatgtgaccgtgcttggagataagacctttacagagtaactgattaaaatgaggtcattagcagggaccctagtgcagcatgactggtgtcctttcaaaaaggagaaatttggatacagacatagacacacactgagggaaggtgaagtaaaggggcaaggagaagacggcctgcaacgggagtgacgcccttacaagccgagggacgcctggcagtgccagctgacaccaggagcagggagaggccaggaagcctggcagtgccagctgacaccaggagcagggagaggcctggaacggttctccctggagacatccgggacacaccttgatttcaggattccatgatagcttccagaactgccaaagaacgcatttctgtgttttcagccacccagtctgtggtatcttgtgactgccgccctaggaaagtaaaacaaggagttaattcatgaagggtgggggaaatacgtaccctttgaaataccacctagaggaaggggtaatagtacacccgatcatgtgctccagtttatgaaatagttgcacgtcactcggaattttgaaaaacaatatattttcaggactc

SEQ ID NO: 10862 - DNA, 1469 bp, Homo sapiens
ctggctgcctgcggagaccgggggtccacgtggggctcttgtcctgtcctgtgttcctcgtggggatggaacgatcctgcgtggggccctgttgtggcttacctaaatgttaaccaagcagaggtgacatggtgccatcaggaggcggctgctgctgaccggagtgtcccctccaggtgaagctggctcaggtgcacatgcccgctccatcatcgatctaggcacctgctgtctgaagggaccgtgggtcagaatcatttcgttgtgctcctaatgggtcgctgaggctggtctctcagtgatgaagccccaggcgtggaagcatccactctctcctgaggcgagccaccttgggttgctggagctcaccagtcttgagggaggtgcaggggaaactgtgttttttatcttcatacatgacggtgggcagagaggcctgtcttaaagtttccatggaattgttttataaaatatcttaagagatgaataccttatcagctgttgcttgaaacctgttaaaaatgttcataacattggatagtctagtctctaaatgatgactaagtagtggggttggctttgaaaacaatgttttatgcaacaaggaacgaatggtagcagccagctttgcggggcgtatgtgtggccagctcttaaccattccagtctattacttgggtgagtccttgtggacaaccacacacacgtgcccacatggtactagctgccgttcgtttctcgttgcctaagatgttttggcaactctagagccacaggcctaagtcattaaaaaattctccctttgtaacctcagtgctggggactgaggcgagccccctcaggtcgctggagtgcaccagtcttggggaagaggtgcaggagaagctgtgttttttatctccacacgcagtatgaagataaaattacatagtattacctagacatagacagtattacctaggtagatgcactgctcacctgcgcccttcccagctctcatttttgttaggtgatttgggatagggatagtgttttggggtatggggggagtgtttctgacctgctttgcagacgtgcctccgcacctcagcagtttggggtgtggccccagggcggttcttggatgtaaaagatgtggccatctagcctcgtaacttcactgtcacctgtgtcccatagggtgccttctgaatactgttattagaataagtttgttgcagaacgtgaccctgcgtgcaaacatgtaccgtggcctggtatatgatagagattgatattaatgtaccatgtatgttaatgtgaatctgtgggcaggatacttttccatggcaggaaatatccaagctgttgaaactggctatgttttaatatgcctcattgtgcctttactgttgtgtggactgcgtgagggacaagaagttccatttgatgtcaataaagcaaagtacttgcctacttttttgaagctg

SEQ ID NO: 10863 - DNA, 75 bp, Homo sapiens
gctgcgttccgggagactcggggcaagaactgcagagggatgtttgggatttgtttagatgtgtttgctggatac

SEQ ID NO: 10864 - DNA, 4013 bp, Homo sapiens
ggcctgaggtcatcacctccaagccagaagacgtgcacccatgttaactaccctcaccaggacgcagccagtgtgtccgccggatgtccagatgccccgcttgtcttgctgggtttcttccaaccatctcgtcatttaaagggaaaacaaaatctgagtctccagccaggaggcttctcccagagaggacaaaaaagcccaacttgccaccagatgctaaatgagacttgacagctgcagagcttgggctgtgctcatagctaagggttagggttcaatattagaaggagattaacattataagtgaaataatatgctctaatagattgtggagggcaggtttgagggacttagtttacctattctacactaacaagtgttgttttgggtccatgcctggaccatgtcacaaaaaggaggtgcccccctgtgctgtcactgtgaatggaaaggatgggtcacctctcttcatctgctgcttggaataaaaaatgcagctggccctgagtacagggaagtggaacataggcaggattttggattaatagagaaattttgataagaatggagacgctacgacagatgtaggaagtcatctacctttgatattagccatagaacttgaacactaactatatcctatgcatagtatgcagaacacttttctaagtttactttgagcctacttgcaagtggaagatatatatattctcacatggtttttacatttttctctatcgtgttaaaagctctaataatgctagtggagcagttgacatccagggttttttttcctgcctgtcatacttgctaaacaagagcacagcgggcctgtcagatgaagtcaggagccatacgtgaccgctcgtagaacacagtaaccaaacacatacatggattttgccaagtgctgccagtagccaaaacaaagtctttttagggcaatagaggaaattattttgtgtctcaggtgtcagtcttaggaatggaagtttaataacaaatgggccaaactcgcaggacattccttctatgagcgcttcagaattttgctgtgaacagtcctcttggacacaggttggggtgcccttgtttgggtttgttttggtggaaaacatcacaaacctggcacaccatttgaatatccctaatatcattccagtcgctttcctcatcagttgcctttctatttcagttcattcacagatctcacttctgaatgtgccacttccagtagacatgctggtcaaagagcagtcatcattggggtgaagtgttcttgacagtttaatatgattcacttttctccaaagacatgtaaaaggctgttacgaaagcttggcttctgtcatggagacggaaatgggcaagcttccttccgtagcctcttgttaatccttaaacattaaatatttcgggggtaatagagccactggtgagtaaaaacctatataaaaaccaaaattataggattttttcttttttagtaaaaaccggtatcaaaaccaaaattataggatttttttcttttttagtaaaaacctatataaaaaccaaaattataggattttttcttttttagtaaaaacctatatgaaaaccaaaattataggatttttttcttttttagtaaaaacctgtataaaaaccaaaattataggatttttttttcttcttttttagagagagagattagaaaacgacattaggaatttcactttaaaatgcgcattacaaacttcttaggtgttccaggaattatcaagtgactttaaaatgacttttccaacctgctttgtttttaaaaattatattccagttttaatcattgtaaaaaaagcacctggagtttcaaaacatgtgaatactaccaagtttctgtccccaaagtcaggcatcactgttagtcttttgggacagatgggacagatgttcactttaatgttttacttgaagttttactgctctttgccatgtggtaaaaagaggctgagacatatttaagaattccaagaggatattatgtgtcagaatttcagacactgatgagaagtttttaattgttcttttttatttgattttggaattcaggtgcactctattcaagtgcaaggatatcagaagtttttttttatttaaaaaatttttttttcgagatggagtttcactctgttgcccaggctggagtgcaatggcagcttactgcaacctccacctcctggttcaagcgattctcctgcctcagcctcccaagtagctgggattacaggcacgcgccaccacacctggctaattctatttagtagaaatggagtctcaccatgttggtcaggctggtctcgaactcctgacctcaggtgatccacccaccttggcctcccagcgtgctgggattataggcatgagccaccaggccggccccaggattttatattaagccttcttgctctcaaaaaaaaaaaaaggttttaactattccatttccagatgaatcccatgagcgctgcttactgttgaataccaaggtctagggctctgcttcctgtagacacgcacacgttgtctccatccaatggccttttctgaagttacagaaaacaccaacatgggagggagtttatgaagcaaaggcaaaggcaacacgtcggctagcttcagggtagcaccgtgagaaatgggctgtattgatactgtgaatgtttgttttccaagctgttttatacaggtttgttttttcatggtgtagggtatttatgacaaagtaaatgttgtgaaggttaaagataaattaagattatccaccaaatgctaaaaatactgatgtgtaaatcacctttatcgcctcacctcttctacaagcttttgtggcttgagggcttttgtttttggcttttgtctggatgaaagttttgcccagttgtgttttaaaaacaattcctcatgaacactaagattaattgtgtctgtatctctggaactgggtgctcatgttggttttaatgagcttgcaacccttccccgtttgctttgtttaaggaggtgcctctgttctttgtggaggagtgaaatggagctttaagtgtgtgtgtgtgttatgtgtgtttgcacacacgcgtgtgttattgtagcaataacaaaaagtagccatctccttgttccagctgaaaacctgctgtgagagttttgacagagcactttattttcgtcaagtttcaagtctgagttcaaaaccagccctgatcccttatgaccaactgctactcgaccagtcgccactcagtggccacctggtgcccgtttagatttttgcttgggttttactggccacctctatagacgagagttgcaaagttgctttgagcagagagggaaagattaatttacactgctggccaccgaaggcaggtgtttcctgggtagtaatctcacggctcttgatctggaaacttcagagtacaaattggtggatggtggaaggcaggacacgtatctctgtctgacggaaaacagacctcggggctggcgtaaaccctgctgccaggccctctccccactgccccaaaccggcctagacacgaagaccaaagcagcctgcacagggcaaggcccccgcggaatcctgcagagcaaactcaggttaacttgggtccatgaccgtttgcattcgaaacacaatacactgcctcgttctctcagttagcagctgggcagcagcgcaccattcatcatttaggcttgtggtttgttgtttactctaccaatgttatgtcgaaactgcattgtaaaaagagaagaaagtggcaggttttccaggtccacggaaaggtttggcctgacgctggagtgcggtgatgaacttacgtgacaatgattgtattcctcagtagcactttaaacgccgaagacagccctgcagcaagcctgcacacgggcttgggtgggttcctttggagaagatgtggctggaacacaaacaatctttgaaagaaataaatgtgcacacagaacactac

SEQ ID NO: 10865 - DNA, 4064 bp, Homo sapiens
aagaccaacactttttacctatgggaggcagtccccagatttcaacctgaattgtgaaatgtgtcataagaaacaaaatattttttaaacaagaataataaaggttggagattgttacgcttgaaattaagttggaggcaaattgataattacttagtaatgtccttaactttagaaatacagcttttaaaatattgtggttctggaccttacaagaacaagatggtttgatttcattaatgttgaaattggattagtcttgattgtgtgcatggttcctcattccatggtgtcagtataatcatttaattgaggtttttggttttttattgattagtggaatactgtcgaagtattccttcttttaattattttagacacttgagttctagttaaatcttaaccatgttcttaagtccaaaataggaagaagtggagtagtttgcagtattgatttatatcttagactactttagcaataaaagataaatctcaactttaataagttatcctgacacttgataaaaataaatatttggtattttgtggtcatgtaaaacttctttttgtatgaaaattgtgagaaatttaaatcagcaatagtaacacttagatttttataaactaacaaaaacttgctctcagtcaatataataaatgatagttaaactctaaggaagacctgggaaatgaaaacaatttatggaagtcccctacagtcagtttataagggcttcagtagtgatagacattgttataaaaacttgtaccatgttacatgtacactgcaccacagtctaaattcagaccagcatttgaaggactgcacatatttcatttcctctgatttatgctgtcacaaattgaaaatctgagtgtagttaggacaaaaaacaaagctaaccatatggcactaattttgattttaacattagtgtaacaaataaggtcgggacatatatttacatagatcccagacactcaagaattagcacagctgatgtaaaattctaaattaccatttacttccagatagagcagaggagaaacacctcactgcagtttcaacatgctttccaagaacaatatatacgacatatacattttcctgcctctctcttgtgacaatttctgttagaatttgttgggggtctgatggttaaaatcatgggcaaggccattctctacatcattgcttaatatttcaaaaataggtattagagcactatcagtggtccaaaattagttttagctacttattttgctccatgggttttgggcttttcaaagaatactatgtataatttgtaattgaaagcctttcagtaggatatccaaagttcaatgtgtttcaaaagggaaaacttttacttgtgggggtgggagttagatgtattaaaaaaacgaaactacaaaatccttttaagaaagtaataccaatttagactctagtttgtgttacgaggtattctttcaaattttttttaaaagccaactactgtcattaagaaataattttagatttgtgctctagcagaaaataactctgtacccatcaatcttattgccaacattccataccagtggtaggaaagatattctcattttttttattgaaccagacatttttataaaatactgattgactttgtacattatggatattatatatgaaattttgccttgtattctttcacttgaaaaaactccaaaattccacaatattttagtagttaacttcctattctttcttaaatttgatggagaagggaaaataaattgcagttattgattcttgccatctttgttttcttaaagaaatctatgcattttaaggataaaactaaagcatatgggtttacatgaaacatcaggatggattattgtacattgaattcattccgcgtataatgtggtatttcttactctgtccatcttggtagctgtcacttcaaaagaagacagtttccctgagtaatcatcacctacatggccattagagtatctatcggtgataattccatgatacagagtatcttggcattataaattcagtatcccaggacctaaacctttatgctacattttcgaagattttttaaaaataatattgttaatcagtaaaaaaaaaaaatatttttgatctaaacataggttctgcatatctgttagattttaaaaatgactggtgttttgtcttcacatttttgtctaagcaaggaatataagatttcaaataaaattttgaaccaaaaacatttataatgccgttctggtttttctattactttttatactgtactttaaaagcattaggctgaaagagtttattttggtggtcaaaaaaaatatgcttccactcatgtaactattttaaatgttaagaagtaaaataatgaaagatatgttaattactttattcagtaaagttttttaagaatgtttatctcagccagtaggcaaatacttggtgtaaaacaagttggtcttaaattgttgcaactcattagctagtgaagatattcatgtaaatatattttaggattgtaattaattttgaaaatgtagaaagctctttattccatgtaagtatgcaggatgcctgcttttttatgcagttgtggaaagaatgtaaaatgttttaatatattctttgttaatctgagaacttgatactgaatcgtttatgtgggagaaggaaggagtaacataaaacatgtttttatcactcaaagtaagcaatggaggtaacaaatattgtgcattttaacagtaatatttgaagatttgtagaatattcacctttaaaactagttagtatgcatttataattttaccagaatatacaactaacaattcaacagtgatgttctttgcatttgtggggagatgtgtgatgttcttggttttctggtttggaatggaacgtttatagccttgcctgtaaaaatgtgccccagcacttaatgagtgaccgtttgaatccatatgtagtcccattggtgctaatgagagtagctgctgtgaaacaggaataaaatgtgtctgttcacggaggtgcggtgtggatgcacctacaaggccaactctctgatcagggtgagggagagatggaagaattaacagatctaaagttggcctttgttgtctcaaattgggtttgtacacacatgcatgcatgtgtgtatacaactgtaatctggaacttcaggaagtaaaattatttgaagtttcttagtaaaaagtaattaggtataattccaaatagatttctgtataaattgtatctaactggattacaagtcagtttgacaatttacgatgtctcagtgatgtttctgcaataattgtgaaatgcattattgatttaaataatgctgacacgtactctttaaaagtgttctttaacactgactactaaactttaagttttaaaaaataggttttcatttatggctttttgtggttttagcactttaagaagtttaattttttgtaatttttaatatgctctttcagtgtatctcagcgggtactccagcttgtggcattcccatgtgactggggagaagacaaaattggtgtttagattctggaggagaaaaaatgagttacaatgtcaggtgtttttaaaaattccttttagagacagtcttttgggaaccaaagtattttactgtaaatctttaaaataacagaattcagtgctctttcatttgttaatgctgtccagatttttcacacagttatactcagttaatactagttttcagaacattagtccaaggctatttcaagttttccattgaatatatgcttatggttaaaagaaaaacgaatggttttataattctgtgtattttgtcatatgccttagcagagtaagtcatttttccattttacttaggaataagctttttcgaactgaaaattcatggtaaaataggatttctatctaatgttaatccattgcttatttgtattcaattccattgtctacagtttgcttaaatgttgactaagaatgattggagtcaataaatttgtactgtattttgcttcga

SEQ ID NO: 10866 - DNA, 202 bp, Homo sapiens
ggcacctccagctgcccccggccgggggatgcgaggctcggagcacccttgcccggctgtgattgctgccaggcactgttcatctcagcttttctgtccctttgctcccggcaagcgcttctgctgaaagttcatatctggagcctgatgtcttaacgaataaaggtcccatgctccacccgaggacagttcttcgtgcctg

SEQ ID NO: 10867 - DNA, 173 bp, Homo sapiens
gagaggctggttccagaggatgcatctggctcaccgggtgttccgaaaccaaagaagaaacttcgccttatcagcttcatacttcatgaaatcctgggttttcttaaccatcttttcctcattttcaatggtttaacatataatttctttaaataaaacccttaaaatctgct

SEQ ID NO: 10868 - DNA, 195 bp, Homo sapiens
acacttctgcagggatctgcctgcatcctgacgcggtgccgtccccagcacggtgattagtcccagagctcggctgccacctccaccggacacctcagacacgcttctgcagctgtgcctcggctcacaacacagattgactgctctgactttgactactcaaaattggcctaaaaattaaaagagatcgatatt

SEQ ID NO: 10869 - DNA, 871 bp, Homo sapiens
agaggaaggggacaagtagccacctgagttcctgaggtgatgaagacagcccgatcctcccctggactcccgtgtaggaacctgcacacgagcagacacccttggagctctgagttccggcaccagtagcaggcccgaaagaggcacccttccatctgattccagcacaaccttcaagctgctttttgttttttgtttttttgagatggagtctcgctctgttgcccaggctggagtgcagtggcgaaatccctgctcactgcagcctccgcttccctggttcaagcgattctcttgcctcagcttccccagtagctgggaccacaggtgcccgccaccacacccaactaatttttgtatttttagtagagacagggtttcaccatgttggccaggctgctctcaaacccctgacctcaaatgatgtgcctgcttcagcctcccacagtgctgggattacaggcatgggccaccacgcctagcctcacgctcctttctgatcttcactaagaacaaaagaagcagcaacttgcaagggcggcctttcccactggtccatctggttttctctccaggggtcttgcaaaattcctgacgagataagcagttatgtgacctcacgtgcaaagccaccaacagccactcagaaaagacgcaccagcccagaagtgcagaactgcagtcactgcacgttttcatctctagggaccagaaccaaacccaccctttctacttccaagacttattttcacatgtggggaggttaatctaggaatgactcgtttaaggcctattttcatgatttctttgtagcatttggtgcttgacgtattattgtcctttgattccaaataatatgtttccttccctc

SEQ ID NO: 10870 - DNA, 105 bp, Homo sapiens
tggctgctttataatccttgtcagatattaataattccaactcctgattcatgttggtgttggcatcagttgattatcttttctcattaaaattgtgatgctcct

SEQ ID NO: 10871 - DNA, 329 bp, Homo sapiens
gatgaagtgagccgagaggagatcgtatcataagaatgcttctgtcgttagccgggtgcagtgctgtgtgtatctagttccagctacttgagaggctgaggcaggaggattgcttgagtccagaaagtggcagttgcagtgagtggagatcgcgccactgctctccagcctgggtggcagagcgagaccctgtctcaaaaaataaacaaaaacaaaatgcttctgtcagttaacaatctttattagagggtttttagtctttctttctcagctgtatgttaagttgattgacaaatgcaaataaacgtctttattatcctttctttctg

SEQ ID NO: 10872 - DNA, 823 bp, Homo sapiens
tcgtggcggtcagtggtgtctctcacctcaaattaggaaaagctttttaacttgttcccctgcatcctggcatgtcccttcaagaaggaaaaggtgacatcagttgtgaccagctcagaggatggggctgtcccctgggctctagaaagaacattctgtgtcaccagcacaggctcttgctgggtgcctgtgccccctttctggttgaagggaagccagaccagtggagtggaagctcttgaagcactttcttttcatgtcggaggctgcgtgtgagccggtggtggcggcagctgtctgtgtttctcctgttctcataccgcccttcgtgtccgctgcatcttcctctaggagcatctgtgggctgacgtttctggcatggtggatgttttcatgttgttccgccgtctcagcatccaggtgacgtgctgtcccgcagtagctgctcgccacacaggctgttgaaactcagcacgaatgcttgagcctgccccagccccagccgtagcccttgtgctcaggagctgctcctggagagtggctcccttgtgggaagtgagaaacacgtttcggagtcgcagggagctctgtctggcatcggtggcacagatggtgaacttgtttcaggaagtgtgagcacgggcctggctggcacccggtttacagggaggtgattgaggacgtcgttatgatttgatttgaccttggcacacactgcagagccacagggatgttgctgaatttcaatcaccgatcagcaaggatgaaccttctcaacttcctaggaatgtttagcagcaaccgaatataccaggcaaaactc

SEQ ID NO: 10873 - DNA, 186 bp, Homo sapiens
gtctgtttctgtcgactgtggaccacttatgtgcgatccgtggaccacttgcgtgcgatctgtcggccgacgatgagcttgttcggatgtagctccatcgtaagtcgaggagcatctgtgatttgtcctctgcttatgggatatgtttttccgctactgagtctgtgtagtaaatttttgactagg

SEQ ID NO: 10874 - DNA, 687 bp, Homo sapiens
agtccggagcgctgggcggtgcggagcgggcccgccacccttgcccacttctccttcgctttcctgagccctaaacacacgcgtgattggtaactgcctggcctggcaccgttatccctgcacacggcacagagcatccgtctcccctcgttaacacatggcttcctaaatggccctgtttacggcctatgagatgaaatatgtgattttctctaatgtaacttcctcttaggatgtttcaccaaggaaatattgagagagaagtcggccaggtaggatgaacacaggcaatgactgcgcagagtggattaaaggcaaaagagagaagagtccaggaaggggcggggagaagcctgggtggctcagcatcctccacgggctgcgccgtctgctcggggctgagctggcgggagcagtttgcgtgtttgggttttttaattgagatgaaattcaaataacctaaaaatcaatcacttgaaagtgaacaatcagcggcatttagtacatccagaaagttgtgtaggcaccacctctgtcacgttctggaacattctgtcatcaccccgtgaagcaatcatttcccctcccgtcttcctcctcccctggcaactgctgatcgactttgtgtctctgttgtctaaaataggttttccctgttctggacatttcatataaatggaatcacac

SEQ ID NO: 10875 - DNA, 145 bp, Homo sapiens
gccatgccatttttaccttatgtctgctagaaagtgttgtagttgattgaccaaaccagttcataaggggaattttttttaaaaaacaacaaaaaaaaaaacatacaaagatgggtttctgaataaaatttgtagtgataacagt

SEQ ID NO: 10876 - DNA, 2221 bp, Homo sapiens
gggcagccctgcatcctggcacggacactgactcttacagcaataacttcagaggaggtgaagacatctggcctcaaagccaagaactttctagaagcgaaataagcaatacgttaggtgttttggctttttagtttatttttgttttatttttttcttgcactgagtgacctcaactttgagtagggactggaaactttaggaagaaagataattgaggggcgtgtctgggggcgggggcaggaggggagcggggtggagggaacacgtgcagtgccgtggtgtggggatctcggcccctctctctgggttcgtcgtggttgagatgattacctcggacgtctacggaaacgagcgggcgcattgttgtccgcttgtgtgtgtgtgtgtgtgtgtgtgtgtgcgcgtgcattgattactatccatttctttagtcaacgctctccacttcctgatttctgctttaaggaaaactgtgaactttctgcttcatgtatcagttttaaagcagcccaggcaaagatcatctacagattctaggaattctctcccctgaaatcaaaacctggaagacttttttttcttattttagttgagaagtttcataaactgctcaaggattagttttccaggactctgcggaggaacggcaggaagaacctcagagagggcagaggtgacttcaaagtgctggggactccgtcctgagggtcacttggccctgagcccctgcgtgcccttgcggaagcccagaagcttcttcctgctgcacctcccgtttccgctgctgctgacgtttatgcatttcatgatggggtccaacaagaacacctgacttgggtgaagttgtgcaatattggaggctgactgtagggctgggcagctgggagacaggctcatggctcatggctcatggctcagggcggtgcctgccctgggccgggacccccctccccaccccccacctaggctttttgggttttgttcaaggaaggtaaagtgagaggtttaggtcagtgtttttaagtttttgttttttttttaaagcaaatcctgtatatgtatctacatgggagacaggtagacactacttatttgttacattttgtactatacgtttgtgttccaggtttcagcttccctcgctcctgttgttaagaagcgtccctgtcagcacaggtgtgcattgaggaaggggccccagggccttcgctccctcagcactggggtggaggcggcaggaaggggcggcccttacctggcaggtctgggcgcacctttagcaggtggactccgtggggctccaccagccagaagcctctggaaggcaacgaaggcaatgctgctccctgagtccagtccccgcccccaaacccagcccaggtgccttcagctacttcggcttcttaaaccctgcagtgttaaacagaggcattgagaaaggggaaaggcgggtatttttaaaagccaaagattgacccagttacttgagggtagggaggcgggcccagtgcaggaggctgcatccctggcctgctggtgcccaccgggggctgtgcctgtgccgggccgcagggaagctggctgcccccattcctgctgctgctgctgctgctgctctgtggctgtttcaaagactgggcgaaaggctgtccggagggcagaccaggtgccttgccgcagagaaaacaccaaagtctcctgttcgctcataaagaagtttttgggatgggagagaatccagaccatcttggggcagccaggcccttgccttcatttttacagaggtagcacaactgattccaacacaaaaccccttcccctttttaaaatgatttctgttctaatgccatagatcaaaggcctcagaaaccattgtgtgtttcctctttgaagcaatgacaagcactttactttcacggtggtttttgttttttcttattgctgtggaacctcttttggaggacgttaaaggcgtgttttacttgtttttttaagagtgtgtgatgtgtgttttgtagatttcttgacagtgctgtaatacagacggcaatgcaatagcctatttaaagacactacgtgatctgattgagatgtacatagtttttttttttaccataactgaattattttatctcttatgttaacatgagaaatgtatgccaaatgattagttgatgtatgttttttaatttaatatttaaataaaatatttggaagg

SEQ ID NO: 10877 - DNA, 561 bp, Homo sapiens
gtgtgctcggccaccagggttttggtgaaaatgccggtgtcccttctccccagatccctcatttgatactccaaaaccatcaccatgtaccatgtgttagagttggcaaaatgtgattgactagagatggacatgaattgatatgtatcccacataactttgtcttggaagtgagagtgcttgtaggtggttggttaagcttgccaaaggagaggccatgaaagaacctgtccttctggaaaagtggtccatgtctgtgctggctggaagagggcttgcttagggcagcttcttgctgctcagcagaccatgacctgtaggttcacctataaaacagggaaattgaataaccatctaccccattagtcagcattttcttgagatacatttctttgaaaagcaattcattctctctctagtaattgtaattaatccccccaaaatgcaagtttacttttataaccttttggtgaacctgctatttcggatgacattgggcattttagttctatattttttgtgcctcttttatttttgaataaagaaaatcagaagagttgt

SEQ ID NO: 10878 - DNA, 251 bp, Homo sapiens
tcctgactttggacaaggcccttcagccagaagactgacaaagtcatcctccgtctaccagagcgtgcacttgtgatcctaaaataagcttcatctccgggctgtgccccttggggtggaaggggcaggattctgcagctgcttttgcatttctcttcctaaatttcattgtgttgatttctttccttcccaataggtgatcttaattactttcagaatattttcaaaatagatatatttttaaaatcctt

SEQ ID NO: 10879 - DNA, 2193 bp, Homo sapiens
ccggagctcaccgcccagagcgtggacagggcttccgtgagacgccaccgtgagaggccaggtggcagcttgagcatggactcccagactgcaggggagcacttggggcagcccccagaaggaccactgctggatcccagggagaacctgctggcgttggctgtgatcctggaatgaggccctttcaaaagcgtcatccacaccaaaggcaaatgtccccaagtgagtgggctccccgctgtcactgccagtcacccacaggaagggactggtgatgggctgtctctacccggagcgtgcgggattcagcaccaggctcttcccagtaccccagacccactgtgggtcttcccgtgggatgcgggatcctgagaccgaagggtgtttggtttaaaaagaagactgggcgtccgctcttccaggacggcctctgtgctgctggggtcacgcgaggctgtttgcaggggacacggtcacaggagctcttctgccctgaacgctcccaacctgcctcccgcccggaagccacaggacccactcatgtgtgtgcccacaagtgtagttagccgtccacaccgaggagcccccggaagtccccactgggcttcagtgtcctctgccacattccctgggaggaacaatgtccctcggctgttccggtgaaaagttgagccacctttggaagacgcacgggtggagtttgccagaagaaaggctgtgccagggccgtgtttggctacaggggctgccggggctcttggctctgcagcgagaaagacacagcccagcagggctggagacgcccatgtccagcaggcgcaggcctggcaacacggtccccagagtcctgagcagcagttaggtgcatggagagggtatcacctggtggccacagtcccccttctcacctcagcaatgatccccaaagtgagaggtggctcccccggcccccaccaccctcagcagccccaccccactcaaccctgagggtccccagggtcctgatgaagacctccgaccccagcgccaggctcctcggagcccaacagtcccaagggggcaggagacggggtggtccagtgctgaggggtacagccctgggccctgaccagccccggcacctgccatgctggttcccggaatgaatcagctgctgactgtctccagaagggctggaaaggatgctgccaggtgacccgaggtgcactcgccccagggagatggagtagacagcctggcctggccctcgggacacattgtctgccccggggctatgggcaaatgcccctccttcttacttcccagaatcccctgacattcccagggtcagccaggacctgttacagccctggtcacttggaactgacagctgtgtgaggcctgcacttctcagacccagacttagaacaaaaggaggagtgaggactcaaggctacaatgaggttccagtacttgttacaagaaattggttttctgcaaaaaaagtccctacctgagcctttaggtgaatgtgggatccactcccgcttttaacatgaaagcattagaagatgtgtggtgtttataaaagaacagttgtcatcaccgggcattgattggcagggacaaggagctgcttgggtgtggaaagttggggcgttggaaagtgggctgtggtgcccatttgcagtgactgtgaagtgactccaggacggacctgcgggggcacccagaggtcctaagccccaggactgagggtcgtgcatcaccactcgggtgtcccgggaggtgccctgggcccggggacctcacaggcaggacggcgacactaatgcagggagagggagtctggccccagcttttcctatcagaggcgattttccttcaccaggggatgggcaggaaagaggcaggggccccagaagcttctgtccctcatgcctgagggcacgggggacacttggaggctgctgtcaccactgtgcgtccaaggccatgctctctgcgggtcagtgcctgagtctcgcctccctgctggtccctgaagccccctcagaagccctgcctgtcacgtcggcatttgtgagacctaccctgtaacgcctgcccctctcagcccaacatcagcttcctctttctcccttgctgtagacaggctggattccagtgttgggacagccatctccagaaacctgacttaagagagtaagatgc

SEQ ID NO: 10880 - DNA, 57 bp, Homo sapiens
atgagtcactatactgtgaagaaaaagacttttcctagaacaaaggcaactttcctc

SEQ ID NO: 10881 - DNA, 1254 bp, Homo sapiens
ccgcaggacctgaacgccgctccagcctccacggggaccccagcgtcttccccagcccccgggagctggagggtggctgccatggccgcagccccggccccacacaaaagcctccccggtttgccacatcggccgagggcaggagtgggtgttaggtactggctaaccggggcggtggagatgcctgtctacaccagtcctgtccccaggactccccttctgtggtctggaggttctaggctggcctgggctcttaaagggaggattttgcaggctgtcctccctaataaaagattttcccaaggttgatctggaggtgacgtttcccaaggcatggttgtgacagtcttcctgaaagcaagggccgtttctccacagaatgaggaggtcttcacggatggctttgccgattccagcccttggtccttggatagatttctgttgggcaagggagacttcgagaatgctggcacccatagcgacatctgccctgagctgctcagcaggcaggcagcagcctcccgcacccatgggagagagttttgttttcttggccgggctgggcaggtgcgccttcctttctctctcctgtgaagaactgcaggagggccctcagctgtgaggttgtggatgaacaggcctgttcgccctggggtccgggcctggcacaggaagcagctagactaggggagtccttggagcatctgagaggggttttctttcctctgggaagagtcgcaagtcttatgaggatgccacaatctgggcagtgacccgtggccctggggaccttcctagtgccccccaaaaccaaggaagcattcacgtgagatggggagtcagccttccagctggtgtgtaggaaagccaggtccctgggcccttgtcccatgtggggttgagatccagatctccatgagatattcccatcctccgccgagcggtgatgcgtgaccgtgtgtgcaggccgctgttctcccaagctcggggccatgccgtgccaccgtcaccagagccagctgcagcactggggcagccactgtcgccggacttggggaagcccagggtgaagacagtcactcatccgtgcaagctctccagaagggatgcaagctctccagaaggggtgtgatctctgagcagtggggagtggagtcaccactcgggacatagagggtggacagttcaggcctgtgtctgcctccttgggactgtggagtgggtgccctcagtaaagcgctttgttggaatggt

SEQ ID NO: 10882 - DNA, 1891 bp, Homo sapiens
ggccgcggctgcccggcagcaactggggtggccaggtggggcgggaccccagcacctcccccaactgaccctggacgtccaggtgggcccagcctagggcatcccgggcctgggcatcaggcagggtgcaggtggggccatctgcggccctggttcgggcagggacatccatccacctctgagtccttctgagccacagccccagtgacggtctggtcttgcaggcagaggcccagagcccctgccagtgctcgcccatctgagtgtcaagcggggatttcgctgtcaaggaaccgtttctatacatttttacctcaaacaacaggacctcggttcatgtccctgcggctggcctctcgccagccactcctgcagtgtgcgtccggccgcctgagcaggtgtggtgccgtcccgccattgccgccacctatttattgtgttttatctgaacggaagtgtatttatactgctctttacaaaagcaccggtgctcctctctaggcagcgggtgggcacagcccctcaccacggacacggacagaggaccacctccccatacagagagaggcttccctcccagcctcagtttacccgtaaatgcactagcgcgaggtcagaaatcacaagcctgggcatggcctgggtcgcaccccctccccacggccccacccacagggacctcaacttctgggcccgggattttttccctattcagcagcattttaatcacatgtcctccagctgactgggactcaggctgcgtgcctccgtctgcctgtgtgctggctgtcctagctccctggtaacagcatcctctgctggctctcctgtggtcatcttgtctctgcagctgggagagctgcttgtctgtccgtcacaggcagtgaggatgagagggggtgatgggcgcaaggccccaggggtcctccctcttaacccatgtaggtgccagagaaaccacccccactccatgagaagaggctcagacagcaggctccggggccacgcagcccagaccacacctgccacggtcttccaggaacggtgctcctgcttctgcaacacaaatcggaacaggagcgatcctcagagagtttacaatgtgctttttccgccaatcagaactgtggacaaaacttcctatttcctacaccgcagctgtctgttcaccttcagctcagagagcactcctgacctttcgtaatgaaatggaagcctccccttgtctggcaaataataaactcagtgtctacttttgccggctttgggaccttcgtgtttttccggggctcaggtctcactccagccatcgctgtggccagtggagagccactcccctctgggggcagtcgccgagagcctccttcccctccgtccagccagcaaggctttcccaagcgtcctgggcaggagggttgggccctgctttccaccaagtcactcagaaggtcccaatcacacatgattggcctcattgggtcagcacctgtgaaaggaagattaaaaactcgacaccccaattcactcaaccaagaagaaaaaagctgaaagctgagtcctgcaggaagctgcctttccctttgccctaagcagacagctgcagatgagagggtcagcatctccactagtggctgctctgtgtgccccttatctcatggaaagtgccaatttactgagcacgagataaacaggtaactgactgttcccacctgctccttttctcctgcagcatggagcaatcagtcatgtgaccacaccctcctccctctgccccctccagccggcttttccccttgactgaagccttcaacatcatcttgggagagaggcacagacctgtctcctgggtgcatccttagccttggcaaaataaacttctccattgatcgag

SEQ ID NO: 10883 - DNA, 117 bp, Homo sapiens
ggcctctgctcaggccaggagtccagctgctgatgggcacccgccctgggccagctgggctcagttcctgacctgggttaggtggcttcccccacctaggacgggtccccgtgtctc

SEQ ID NO: 10884 - DNA, 256 bp, Homo sapiens
tggccatgtcccccagggccagccgggctcaggccccacctccctgccagtccttggacctcccagcccacccagcctcagcacagctcagcacagaaggagcagccccagccacagccgcccagccccggggtctcagatgctcactggctcctctctgacctcccgccgggcgggcgagccctggcttctcctcacggtgcttcctggctgcagaccacaaccctccgctggtcgctggtcgctggttggggat

SEQ ID NO: 10885 - DNA, 27 bp, Homo sapiens
cgggcaggtcccgtttctccagagttg

SEQ ID NO: 10886 - DNA, 76 bp, Homo sapiens
ggcctctgctcaggccaggagtccagttgctgatgtgcacatcccccagggccaactggtcctgactcgggttagg

SEQ ID NO: 10887 - DNA, 119 bp, Homo sapiens
cagccctggatgtgatccggagtcccttcccaccaggggctgacctcccagctgccccagcaagctctgccctctctggctttgacaccctcagaagatggggcaggctctttgtctta

SEQ ID NO: 10888 - DNA, 63 bp, Homo sapiens
gcaggtggcctcctatgaccctcgtaggtgcgaggtcagaagccagcaggctctctgaactcc

SEQ ID NO: 10889 - DNA, 256 bp, Homo sapiens
gcatgaatctccagacccgctgctcccagtgcagatgaggccacacctgtacactccctggatgagtcctcagttggtcttctgcacatggtgcaggtgaaaagcatgctcagttgaaccctctgaattctggattgagaatgtgacagaatgatctggagcccttgctgaccttgcccatccccccagggaagtctggggtcccagagtcattctctgaccccatgagagccaaataaaccagctttccccatgc

SEQ ID NO: 10890 - DNA, 255 bp, Homo sapiens
gcatgaatctccagacccgctgctcccagtgcagatgaggccacacctgtacactccctggatgagtcctcagttggtcttctgcacatggtgcaggtgaaaagcatgctcagtgaaccctctgaattctggatcgagaatataatagaatgatctggagccctggctgaacttgcctatccccccagggaagtctggggtcccagagtcattctctgaccccatgagagtcaaataaaccagctttccccatgc

SEQ ID NO: 10891 - DNA, 2336 bp, Homo sapiens
gacctggcctcgcacaggcgcgcacacaccgccaagcagctcagcattctcccccggcacacttagtgacagtgatgctctgtgctggtaccaaacaaggcagacttgcaagaaccatggcatcttttttttttttcaaacctttcctacttcaaacaggcttctcttctgaaatgatgacttaatgtcgaatattgacagcttactgcagttttacagtattcctcacaaagggcttcaggtagattatcagagctgtcagcactacctctccccgctgaaaccagcagttcatggcttcctgtggattccctccctccctggagtgttgagggggttgtacctgccagacttccaggggacgatggaatacccagaacgctccttctgaagaaatggggccctgtagctgcagcacaggggaagggcccggcaccctttctgggtccttcctggttccctgtgggccccatgaggagtccattacttcctttcttccttcatattttacaggcagatgcttttcttataatctaattacatcttttcatttgttatatattacaaaccatcacacttagaaatacttccaggaaatgcttttttgaagtgtgaattaataagaaatggggtaaatagaaaagaaatttattgctgattggccaggtgcggtggttcgtgcctgtaatcccagctctttgggaggccaaggcaggtagatcacaaggtcaggaaattgagaccatcctggctaatacagtgaaaccccatgtctgctaaaattacaaaaaattagctgggcgtggtggtgcacgcctgtagtctcagctactcaggaggctgaggcaggagaatcgcttgaacccgggaggcagaggtagcagtgagctgaagtcccgccactgcactccagcctgggcaacagagcgagactcagtctcaaaaagaaaaaagaaatttattgctgatcacaaggacagacagttttttcccgaccatactcatcaaagatttacgtttgtatattagtaactagtgcattactagagcaggtgcaggtgaggtctttaaagtttcaatgaaagtttcttctggatctacagaaaaaatttttttttttcaatctaaaaactggaaattctagggtttttgtacattttggatgcactgggaatttattagcacaaaatcattctttgcaactcaaaattcagaagggactctaccatatcttagctcagagcacagaggagtgccttatccccacacttgactgggctgtggaggtgggcatgtgggcccctgggcccaggctggggacagagcccttgttttgtgacttaggattttgatgtggttcccatgttctctaacagggccagctgagcagcacaggccaggaggccacagtgtaagcaataacagatctgccacatgcagaagcaaatatcaggcctgtcgcacacgggcggcatttaaataggaatttctatttttgaaataagggatggtctatgaggcatacagtagatttgatgtgatccttttctccctcccttccataatggatcgtggtctgtgtgactgaacccacacagagtgtcatgggtgacagtttctggttgaagtagctccacgcctggcttctgtggacagcagattcttttccttctcacaaggggctcatttaaaatttggaggctgggtgctgtggctcacgcctgcaatcccagcactttgggagactgaggcgggcggatcatgaggtcaggagatcgcgaccatcctggctaacagtgaaaccctgtctccactaaaaatacaaaaaattagccgggcgtggtggcgggcgcctgtagtcccagctactctgaagactgaggcaggagaatggcgtgaacccaggaggcggagcttgcagtgagctgagatcacgccactgcactccagcctgggcaacagagtgagactctgtctcaaaaaaaaaaaaaaaaaaaatggaacgcagggcaagaactcgtatttggaaggagatgggggaaaggagcggtattatacctatgttgtatttgcaggcaaatgagatggagccctctctgtaaagaagagtcatttgtgcaagtagacggggtctgtgggtgcaggccctggaggggcacacaattgcctggaggcttctgtgagatcgggagagggaggagaggcagtctcttgacaaaataaagtatttttattcatttgtatttattaaatgaaaaaacaatcccatggtgtccctgttgtgtggtggaacctaatgactgttgaaataaagttctgtgttttccctgccctgc

SEQ ID NO: 10892 - DNA, 1334 bp, Homo sapiens
agggcccgtccccagcccgggccgtccatcctcgcattgctgttgaatggtgagcacgtgaccatgccgaccacaaaggtgtctgcggaaactcgaggacattcaccacgatgattttcctctctttgatgtacttcaagtgcaactcaaaactatatctgcagggatgaatctgtaacttaaattgggccaatcagaattgttatctttgttcaggtaaaatgagttgcaagatattgtgggtacttttgtgtgctcatttgtgttttccccccctcctacaacatttttttaaccccaaaattatagcctgaatgttcgcttttagtctggccagggatctgactcctgagttggttgcctctcccctgctcactccagtcacatagagaattggtgtttcccgcagtggggatgcagctgttggacaggtattgggggcaaggttggtagggaggacagactgtcacttgctgttacaggcacaggtgattaaaatgctaaatattgcaaatttaagctttgtcagtatatggaaaagttgaagggaaaatactggaatgcttcttcaaaggttaaaaaataaccgagtcttttggtaatttgaccccacgtgctctctggccctcaagcatgtaacctcggggtctgaggcccaggacccacccccctgccacccctcccaccccactccctgctcagtacctggcgttggtacacaggcaaggattggcacaaccaaaattggcctttttctccctcttaatattgaagaaattcccacatttctcatttggtaatggtgttgtggcctcagatttcttctagtatttgcttctgatgaatgattatggtctatacataaaaaagtaagactaagtattgctgaatttgcagttatgttgtcgtgtataagagctacttccaagtgtggttacaaatgaacccatggaatgatgacttcatgttcttctcgtgggtttgtgccgtgctgctttccaaataggtattgaatttatgcattagtctggtgatttcagttctgtgaaatattttgggatctataccaattaaacattttcatagttctgcctattgtccttccctgaggctccattgctgcttggtggccattctctgcctttttacagtcacctgaacaatgacccatcatctcttgcttgcttgaaatcttgctgaaatgttctcatttcctgtttgctgtatgggctcgggtgggatgtttgttggctctgttgtgtttattcaccaatttgtacattatttgttgtcctttactactgtaaacagtaaatatagtttggtattctgtc

SEQ ID NO: 10893 - DNA, 1983 bp, Homo sapiens
agcgctccagcacatcagtcccgacgcttcctgtgaggtgcacgctccgcagcccagcccagccgggagaccacgtggccattgcggtctcctgaccttggccagtgaacctgccagccttccaggacaggcggccggagagctgcccctgaaggacagtcctctcgtcttgcagactggtgaccttctattccctgttcatctctgtttctagatttagtcacttgaaataagaaatctttggggtttgggcttttttatactcttctcagtttgtgaaacgctaactgcacacgaagccgcctgacggcacccagcgctgtggctgtcattctcccagggcagaaccctgcgtttctctctgtccactaacaagcttcacacgcaacacagggaagtcggtttgacttttgtcatgaggagaactgaccagccctcatcattccccataaaaccacggacagcgtctgtgtgcgcatcttgagtcttcacacctgttgactcacacggcttttgctgatgacacggggctccagtacacagtctgataaggacttaacgtcctaacctcaattgtattaaatagcattggggaatagctaaacctttttaaaaaaatttattggattttcctccctgcttaaaagatttcaccagaaaaccttcatataaaaattcaggccctttttggacaatttttaaaatttgtatctttactagaacatgagaatctttttcccttggaagcttgaattataaatgtggtgtttggcctgcctcagcagcaccagttgactgctcgtgtgccagcggtgtggggaggacggggcaggacgctgcagctctctccagccctgttggcatcctcagtgcctgcaggcctctcgctgcctgttgggctgtctggggggtggccatttagggatcgtggggacggggtccaccccaagaagaaagaaaggcccgtccacaggcccggctctgggccacgtgccccggaagcaggtgtgtccagagtcagctgagggctctccccacaccacccagcaggcgctggtgctccttctgcctcatgggaccagtccagcttccagccgctctggctcgagggtggtctgaccacttccttctgagtgggcttctctgggagctctccagtggcactgctggacctgcccacgtttctgtaaaatcaggatacgtggctttagtaagcagaccaagcgcttcgtggcagggaaagcagcgtgcggggaagtcactgaaaagtgctgcctaaggaagtttggaaatagtccctgttccagattgccttgaattttaaaacattttgctttgggaaagtaggtcagcagcacctaagatcaaggatgcgttccattttcacacttcacagtcatgaaaactgagaagactgtcttcagcgtgaactaaagttcacaggcagatcactgatccagaacacttcaagaactcgtcaaacagctcgataagcctttttgactgtgtacatctgtaccgggaataacattcctaggctgaaatttccacaaagaatagaacctgtacccagttcttcaggctgatttccctgacctcttgggcatttgtatttgtagtaaagtattgcagagattcctaagtattttatagcagccatcaaaattggactttgtattgtttattcataaaagacacttggtaatagacttcagtgaactctgtatgaatgcagtagtgtgtgtgcaaaatccgcttcctgagcgtagggtgctgagctggcgctagggctcggttgtgaaatacagcgtagtcagcccttgcgctcagtgtagaaacccacgtctgtaaggtcggtcttcgtccatctgcttttttctgaaatacactaagagcagccacaaaactgtaacctcaaggaaaccataaagcttggagtgccttaatttttaaccagtttccaataaaacggtttactacctg

SEQ ID NO: 10894 - DNA, 412 bp, Homo sapiens
gagcacttggtgaagacaaggccgtcaggacccaccatgtctgccccatcacgcggccgagacatggcttgccacagctcttgaggatgtcaccaattaaccagaaatccagttattttccgccctcaaaatgacagccatggccggccgggtgcttctgggggctcgtcggggggacagctccactctgactggcacagtctttgcatggagacttgaggagggagggcttgaggttggtgaggttaggtgcgtgtttcctgtgcaagtcaggacatcagtctgattaaaggtggtgccaatttatttacatttaaacttgtcagggtataaaatgacatcccattaattatattgttaatcaatcacgtgtatagaaaaaaaataaaacttcaatacaggctgtccatgg

SEQ ID NO: 10895 - DNA, 878 bp, Homo sapiens
cctggcaacgattccacgctcaaaggggcacccggggggccctgggtcggggcggatcagctttccctgggcacatctgcctcattccagatctccagggctcatgtctgtgacagggagggaaggctctgccctggccttccgtcagctctgccagtgcaggctgggcagcctgggctttagagctggcttctgcccacactttctccgtgaaaggaaaacaactatgagtctgccaaacgcatctcagatgcgttttaaaaaattctggtccccgctctctgtcccatcatctgcctcggggacttcctctctccgtggttctcaccccatactctgtcactgccacattttcacctgggcctggcctttgtctccacctgaaactcctgaaaatcttgaaatggatttctaggtcactggggactccggcagcacattcggcttcagaataaagggcgcccgcggtcccccagcacctgcccaagccacacccctagcttccctccctatccctgcagcctgagggtcccttcagccacccctaagtccccacctgggctcctgccccgcccctggctagcagcgccttctccaccggggcccctctgctcacagagccccctcacctccctggggatgaggggccaggccatgaccctgaaagcctagccctggccttgacctcccaggagcgccctccccgccctctcccggccccggccccgtcctctgctgctggcctctgggtcgtgccccgcagactgagctgcgcttgggggtcctggcggcctgggccgtcccgcaccgaacccaggcggtcggagcccggcggggaggcgcgaggtccttctgggggctcctccgacgcctgaggg

SEQ ID NO: 10896 - DNA, 84 bp, Homo sapiens
gccataggagagccagcccagctccctgggggttgggggctgtgtctctccatcccttagtaaaaatacagcaactcccaactc

SEQ ID NO: 10897 - DNA, 3522 bp, Homo sapiens
gtctcctgtagcatctggttcagtgtttccctgggctgaagttaattgttcatcttgcccctttagttctcatgcacagaattcctccatagcaggctgttggcatagctggcctcgtctcagaacctcttcttgtgtcgcattttcccatcattcccggtttctgcccctgtctgccccctgccctgagagttgcccgtgccctggacttgggcatgtccttgttgctgtgttgttgagcatccgtgagcgtccccgaggccgggagcgtgggccctcgtgtgatcattctcgtggggctgccatgagcgtccccaaggctgggagcatgggccctcgtgtgatcgttcttgtggggctgccgtgagcgtccccgaggccgggagcgtgggccctcgtgtgatcattctcgtggggctgccgtgagcgtcccagaggccgggagcgtgggccctgcgtgcagtcattcctctggggttgctgtgggaggtacgcctgggcctctgttcctccaaagacctgcctgcccatctgcataggagatgaaggctggggttagggtgaaacggtttgagttaaatggaaaatgaaagtagagggaatgatcttccccgtggttagcactgtgcacacgcgtgcgtctctgtgggttagtctgtctctctcctgcccgaggaatgctgagcgccctgagccggtgcctcttcacacatctgctatttcctgtggtgttctgggcatggtgtgtaagacccacagaggctccgggtgatgctgtctgctgggtgtgggtccctttccctgttaagcagacaggatgcagcgctgacttcttaggtcagggcggaggtgtgcaggagcccagttacgaactcacccctgcttctcaggtgtggccttgggattttgactgcgaccttggcggtgctgtctccgcagcccaggaagcctgctgtggggaggcttcgcactgagctctcagcctcctgccctcagctgcgcgaagcgctcggcccagctcactgaagctgccctgcctccgggccggcgcggcctgctctggcaggcccctgtgtgtggggtggtgagggtctccccaccagtgctgcaccccgcagcagcatacaggcctgtgtggcctgctggccctgtggctctgtgtacagcgctgtgcatgttacatttgctctggaaacatctctggggtttgcttgttcacgaagttcatgaagtgccgctggagagccagagaccagctgcgcaggagccggaggaacgggcaggccgctgacctgaggtctggagaaacccctggagaagggtgtccccaccagcccatacagcgtgtgtgtggagggggccttgacctccgtgatgtctactgtgcctcaggataaggacccgccatgccctggctagacagtgtgtggttagtaggaatctctcattgttcaccatgtgacccccaggaggtattcgacctgcactggcgtgcctggcctgggatttggtgacggagaggagggctcccagggggacatgcggtgggacaggagcgtggcggctgctgactgtggggtgtggatggggctgcagcaccaggcagagcccctcagggcgccgatgtcgagggcacctgagcgaggggtgccagcaagggggcggccggctggtgggtgctcgggggacggccgtgttggttccatgtaactgtggaactcatttcactcagctgctcctctcagttctccctgactctggaacctctgtgacgccagttctccctgactctggaacctctgtgatcctttgcaggttttttattggcacctcagtctcaacattttcttttcggattcatgaggaaagagaaatcctggggttggaccccaagacgacgtacaacaggttctgcggagaccaagagaaggcgtgtgagcaacccacccactggaagatcacctactgaggaggatcctccagggccgctccccggacccgacaggcgcgggtggatgcaggttctgtcgccgtggagtcaccgtctactgccagccgggagctgggcggacaggaccgtccctcgcagggtcccaggcccagaagaggccccacgcctctagagctgggctccgtcctcggcgttgccagccgccatggctgatgaagaggctccgctgctctcgggggtggcggttgttttcaggcagcgtctgtgaacccacagctcggttgccagcagtgcccgcgtggtgacccagaagcaggagtgtttgtcaggctcccgctctggcctttccagccacctttcatgtcttcatattttaagtgcattgaggatagatgcaggcgggtgagctgccctccgtcaggtggacccgggctgacatttccctgggagctggtgcaaggagaagcgtcattttaaatgtctgcagagcgaccaggggcctcatgaatctctccgttgccctccgcgcagcaggaggctgcctgtgtgtttcctcctgggatgcgtgcaaggcagacctggtgctgcaaaggaaagggcctgaggcctcagggagccccgtggagggatgacagttcaggccctactgctggcacgtcagagcactgggaagtttttcagtgacgtctctggggcactcagtggattgtctgtaggaaacttgcagctctgctcctcacaccaggcccggctggccacccaccctcgcccccactggccacccctccctcgccccgactgccccgccccaccctcaccccgactgccccgccctcgcccggctggccgtccctgccctcgccccggctggcaggtgcacatggggcctccaggtctgccattcgctattgagaactagaaatgaggaaggacagttacgctaactccaaaaggctgtctaggatgagctgctttatcagggagctccttgtacccattttacagaaatcatttttaggtctttgtgccaccaccacgaggggcatctgcaaagagggcaacgctagacacagaatccgtggaaggtgcagcagtgcctcaggggtcctcagggtcagggagcccccctcaccctcttggcccgttaccctttgtgactttccaccatggtgtcgtgtgaccctcagtcaggttggtgggggctgagtcctcactgagcagccactttccacatctgctagaggaacagtgacatggacacctgtgacagagagaggacagttaggagggacagacagctcttcctttcggagcctggctagtctaggacatcaccttgctgtgtcttctcaagcttttaaaattgaccctgaacgtgtgacagggtcctatggtgttactcaaagctgtgcagggtaaatgatgacatatttattctttttccatttgttctagaaacagtgcctttttcatcagttgcattttccaggctgagagctgtataaaacattttggactgtgaccatgtaccttcctttttaagaaaaataaactgctttatggaagttggt

SEQ ID NO: 10898 - DNA, 1640 bp, Homo sapiens
ggcctgtggttctgggagtctctgccccgtgcaagcgtgaccgtggccctcctcccatgtccagccgcaccaggccctgggatcccagatctggcttcacctttgcaaggggctcaaagcaagcacctatgggggtgggggcggcaaagccgtctggccaaggtcccttctctagagtgcctgtctgtccgtctgtccttgaggagcctgaggagtgcagggcaggacaggcaggcaccagctgacccggtaccgggcagggaccagtgcaggacctcgaggcagggctgggtggggtgggggtggccagagtctcctggctcggagcagacacgggtgagtggcacagactgtcctcacaccctcctgggacagaggtaggaatccgtgaccaggacagacacaggcaggactgggagaggcagagcaggtgcctgagcttggccacgcacagcttccaatgaggttgggccatccacagctccccaaggttccccgccactgttcaccccaccccagcacagccgagagctgtggtttctcctcccatggagtcctgcatggctgcccactgcaggcccagcccaagggcaccgccttctccaggctgccttccctgcacatgccacacctccagccccagaaggttctgaggaggggaggagctggggcccccactcgccctcctgttgccaggatacaggcccaggaaaaaatgccacagtgctggattaatgtctagacaacgtgacctttcccctggttctctagatataattgggacccaaattgtccggtgtcatgagctgacagcagggatgaaggaggggtctgttctcggtgccccgaggggactccgggagagggagagggcagcccactacctgcgtgggggctgcagggggacgagccagggtcgcccacaaaggcgctttctgtggaggggacgtcacctcttccatcagcgatgacgcagctctgagatcacagtgtcctcgcagtggctcccgttaactccctgctgcccgtcctgccaggctggtgccacgagaccctcggggctgggccgtgggacaggtgcctgcccagccctgcaaacacatccagcaggtgtcgagggctgccaagcacagacttctgctgccagccatgcacagtgccagctgcgacagcaacgcctctgccaggagactcggaggagaccggccctgacgctcctgtcggggggagctgctgcacactcaggcaggatgcaggggtcctgagggggaccctcggctcacccacggctcccgtggccggtctggtcctggtatttatctcaacttcattgttgtccagaagctgctttttattatttgtgaccatgaaaggatggaaacaaattcctgttttgagtcaaagctacctgcgtccaccgggccacagagcggggacacggccgtaatgtggagtcagtaagccaaggttgtgagaagattctcaggaggggggtccagggagggagaactgagggctggggttccgggggacattttactttttattccaggcagcgctgtactggctggggcctcaaatgctgaataatgctcctgttggacttcagtaattttaaaaaataaaactgtttaaaaatc

SEQ ID NO: 10899 - DNA, 943 bp, Homo sapiens
ctctcgggcgcccctgtggtaactttgcaggcggccctcagtgcatccccacgacccctgcctcgagggccgcctgccttagcaatgggggcctccgcttatcctgctagcaggccccctaggattccccctgccctgtgccgcactctggcggtggccacagcgtgctggcgacactcagggcagctgcctggccatgctgtccctgcactgtgccccgcgggctttgttgctggaagaggtgggtggtgggcttctgcgtccaccaggcctcactggctcatgccccttggggggcttgagacaaatcctttctgccccccagggctagtgaagtggcctcttggataccagctcaggggacactggccccacaggagttgtgagccctctagggcagggtgggagccgggaccctcaggtgtagctgagctgtgacattgctggtcatccttggtgctcttgcttttttgaaagatgctttttttttttttaactgacgtagaatgaagaactgcatgtggcttctctgtctctgtggaaaagccatctcaggttggcggcagacacattgtcatcagaggggagcagcggctctggtcctcggagctggttcctctctcccaccctaagggcagccctccatggtcctgtctgtccttctgaagtgtgtccatcctgacctgcgggtcctcagctgctcccacacttgtgccagcccggaggggactggtcccggtcaccgcggacgtgctggccttggtatgtgccaggcttgcctgggctgggcagccttgggggggctgcctttgtggtgggcgctggggaagtacgtcccagcggcctcagggtctaaggagcgctagtgccttgcccacaggtgcgggaccatctgatgtgatgtgaatactcttcccacatacattaaacacacttaagtgag

SEQ ID NO: 10900 - DNA, 724 bp, Homo sapiens
cggtgcgggaggcctctccgggctctgtggcccctccctcgcccatccccagagggcagagctgtgacctcggtggggacacagcttgttcgtgtggggcccggagggtaggtgggcaggcagcggggcatcgcctgggaatggaggcgctggcagggacagaaggcccctagtcccatgtgacctccagtaaagttttggcaccaaacctgtgttgtgtgttggcggttttgggggcagggctgagagctgagctgcgggtcttggggcaggagcaggacatatggtcagtggcccatgggagccagggttggagggaatggggttgcagcgtgaggagacagacctcagcgccagggtccccagacacccagtgcagcccacagtgggcagggtcacaggtattcagaggacctggggttcagtgcaggtccctgggctgtgaggccccttgtctgagggaaaggggccctggttctgtgcatgggacagaaaccccagggacagcaggaccttcgacgctggaaggatagcctcgcttcccaggtgcagctcccggcaggtctggacagttccacagagcacggtactggccctgtcctcagttcccgtccacccttcaaccagtggctcctgggagacttttcctccctgcctcagctccctgcccagccagcctcctgtctccagagaagttctccattaaaaaataatttagcaaatc

SEQ ID NO: 10901 - DNA, 223 bp, Homo sapiens
gccgccccgcgcccgccgccttgcctgcagtaaacgcgtttgttccaacccggggccgcggtgcctcctgcgcgtccccccggaggggaaagggccgcgtcccccgcgcgcgaggccagagaaggccccgctcccaccggtgctgggccccgaccgcagcccgccgctgcccgcacctgcggagtgcttctcacccctcattaaaatcatccgtttgcatgtc

SEQ ID NO: 10902 - DNA, 2657 bp, Homo sapiens
gaacatgcctacctgctgggtgccgtctgtgcgttccagtgaggccaaggggtcctggccgggttggggagccctcccataaccctgtcttgggctccaacccctcaacctctatctcatagatgtgaatctgggggccaggctggaggcagggatggggacagggtgggtggcttagactcttgatttttactgtaggttcatttctgaaagtagcttgtcgggcttgggtgaggaagggggcacaggagccgtgacccctgaggaggcacagcgccttctgccacctctgggcacggcctcaaggtagtgaggctaggaggttttttctgaccaatagctgagttcttgggagaggagcagctgtgcctgtgtgattccttagtgtcgagtgggctctgggctggggtcggccctgggcaggcttctcctgcaccttttgtctgctgggctgagggacacgagggcaaccctgtgacaatggcaggtagtgtgcatccgtgaatagcccagtgcgggggttgctcatggagcatcctgaggccgtgcagcagggagccccatgcccctgggtcgtgagcttgcctgcgtatggggtggtgtcatggagcctcatgcccctgggtcgtgagctcgcctgagtatggggtggtgtcatggagccgcatacccctgggttgtgagctcgcctgcatatgcagggtctgtcatggaacatcccaagtctgtgcagcagggagccccatgcccctgggacatgaacccacctgcgtggaatgctgtttgtgaggtgtctacagggtttatagtagtcttgtggacacagaaatgcacaggggacacttacggacacagaaatgcacaggggaggccgagcataaccaggggtgaggggcaggcagcagttgtagttactgccgcggggcactgctatgtgcagggacagccagcacccagcccatcaccactccctgggctggctggcaggtatggcaccctgggagcccggcatatacccagggcacccctacggctgccgccagtctcatgcccaggtgggtgctctgggctggagcgagggccaggttttgggccgaggcttccccaggcaatcctgtgagctcccttctagcctctgacccagtctggtctggcttgcatggatgtagggcttggggtgggaagttcaggtcctggctttgcctttgcctgatgtggatgagcagctcacatgctcagggccacctgagactgtcactgctctcccctggctactgggaggagtcactgagagcttcgttacccctgctgccttgcccagggcacaccctatacctccttatctgctcttcccctccctgccgccttctgggcaggtagcagtccctggcctctccccctggctgatcactctccctcaggcagtggagatctgcgtctggacaccctcagatcctgtcattgcctgcccagagtccttcaggggcacccctctgccttggtgtgcagtccagggctctcacccaggtgccgcaccctctggggtcttctgtccagctcccttgccccatgtgctgtcactgactctccttgggactcgcctgcctgctcagagccctgcagggcttggtcagctgcctgttcagtgtcaacacttccctgcacatcttaaaactgggctttattttcgctgaaggaactgtgttgggacccttgacatctgtcaggtttgcacatgctgtttttttttctcagcccacgtgttctcccccacgtggggtagcagcaggacagacagtgaatcacagagtctgccctgagcagaggctgctgtccctgggactcctagccatggtcagactgtacaaaacggttttccagaaatgaaatgtaaatccatttttatactgaaaatgttactgaaagtcacttttatgagcatctgccttaataaacagacattgattcccttatcagaagcctgtcacactgtgtttcgtttcatcctggggagaactgcagatttggggtttctggctgtcatacgtcacctgcctgtggggcgagtgggaggcccagcctggtttagggaacaagagtgacgtgaggagtagcagggtgcgtctccagttacctgagggaaaacagatattttaagagataatagcatagcctattttaatatgttttaaaggccataagcatatccaggaagataaataaacgtgatacaatgtccacataggaggaactttctttcactgcattgttttccttcacagtggccttcaagtcacaggacgcagcgattccctgccctcttcggtgttattacacaggcaggacttcagtgtcagtatccctgccttcagtcttctttagaaatcacatctgtgttcaatccattgtttagagggagtgtatttttcctgttccacgaagaggactttttgttcacaattggatcacaatgcagaggagtctgttcctcccccgtcggcttctcggtgctgggagggtgacctgtcccagatgactcatcaccctgacatgctcttgacaaaggacaccaccaagaggagatggcagctgtaccggtgcagcctctgtctgagggggatatttgcctcagtgtgattaaaaatcagtcatgaaag

SEQ ID NO: 10903 - DNA, 134 bp, Homo sapiens
gcagcctgacctgtggggagggggtctctcccgaagagtttctgtttttactcaaaataatgttattctcagatgcttgatgcactgttggaaatgtgattaatttaatcatgcagataaaccatttaaatgtc

SEQ ID NO: 10904 - DNA, 863 bp, Homo sapiens
gtgtgagtcacagagaccctggccggggcaccctccacccccaggcttcctcagggctgtgggctgtggcgggactatggaagggagcagggagagaccctgccaccacccggagtggctacgcgagtgtggactgcaggctcctcctggggaagctgggcaggctcgctttctggtcacggggccattccagggggcatcccttgctccgggtcccctgcagtgaggggcctgtgaaccccaccagggcaacagcccctcccagggacccctcctttcctgtagggcggcgccggcccacctgggagcctcagatccccctcttccatcacggaggtaaagttgaggccgtggacgccaccagcctgatgaaataaagatttcatccagaaagagtttaagaaaatctcagctcaggagccagaacagaaaagatcaatagctttagccacatggaagtgtgaacatcctgatggggaaaataccacaaagtctaatttaataactagggacacctgtgtccacagctgtggcacagactcccactaaagaagtaggggtgcatggctcatgcctgtaatcccagcactttaagaggctgaggcaggaggatcacttgagctcaggaattcgagaccagcctgggtcacatagcaagaccccgtctctacaaaaaataaatttaaaaaactagccaggtgtggtgatatgcgcctgttatctcagcagctctgggggctgaggtgggaggattgcttgagcccaggagttagaagctgcagtgagctctgatggaaccactgcactatagcctggaccacagagcaggcccctgtctcaaaaataaaataaaaaagtgaaag

SEQ ID NO: 10905 - DNA, 677 bp, Homo sapiens
gggcggctccccagggaccgcccagatcccagctttgagagaggagtgtgtgtgcacgtattcatctgtgtgtacatgtctgcatgtgtatatgttcgtgtgtgaaatgtaggctttaaaatgtaaatgtctggattttaatcccaggcatccctcctaacttttctttgtgcagcggtctggttatcgtctatccccaggggaatccacacagcccgctcccaggagctaatggtagagcgtccttgaggctccattattcgttcattcagcatttattgtgcacctactatgtggcgggcatttgggataccaagataaattgcatgcggcatggccccagccatgaaggaacttaaccgctagtgccgaggacacgttaaacgaacaggatgggccgggcacggtggctcacgcctgtaatcccagcacactgggaggccgaggcaggtggatcactctgaggtcaggagtttgagccagcctggccaacatggtgaaaccccatctccactaaaaatagaaaaattagccgggcatggtgacacatgcctgtagtcctagctacttgggaggctgaggcaggagaattgcttgaatctgggaggcagaggttgcagtgagccgagattgtgccattgcactgcagcctggatgacagagcgagactctatctc

SEQ ID NO: 10906 - DNA, 645 bp, Homo sapiens
acagagctggaggtcaagtccctgcgcttgccgccctctctctagctgtttcacttagcctagagggggcaagggcaggtggggccactctggcctgcctggtcctctgcgttgtagtgctacctcaatctcgggagaaacagccctatattctaacaagttgagcacagccttcttccccttcgtgtctacactcgttttcctttgtgggcacagctaccaggggcttttggaagcccctaaccacctacttttcaacaaaaatggtactttcgttgtattaattgcaggaccttaacaggtagtcacaatagaagggttgtttctgtattttaacatttctatttcacagtcaaactcggcattcttcagtcagcttgaggatttagcattgttaatcttggactccataacttatgagtcctagcactgattttgaggaaaaggaggatcagaagttcaagggaccgtgaaagccctcagagtcagcacctagtttgagaccaagcaccctttcgaatccctggatggctgagggggctgaggccggctctgactgggcagctcagcccctcccccagagcccagggtcttgcacacccctccctgtaaccaaggaacactctgaaataaaggtgaatggct

SEQ ID NO: 10907 - DNA, 1687 bp, Homo sapiens
gaggcttttcagaagagaaagacagaaggatgtaaggttggagttgtattggctggaatttgaacctccagcagctgtctggacatttgtggaacactctgggataattggggacttctgctcaacatggcagtggcatgttaggcatgttagggcttgaggtggggcattcacattcatctgactgtaaatcccaagggcctccgctcatgctaaattgagaatcttaggggtaaagcaccccctccaggaccgggtttctcagccttggcactagtgctgttctgaccattctctgtgttggggctgtcctgtgtgtggtgggctccacccactagatgccagtggcaccccctcccagagatgacaaacgaaaatgtctctagacattgccaaatgtcccgtgtgaacatcccctattgagacccactgctttagcgagagagggtttacttaggaagaattgggatagaaattcccagctgagagaacttagctgtgggctcctcagctactgacttcttagctcttaatccccttagaatttcatctttctcgatgagcaggctctgcacccactctttttttgccccccgccctcatcctggagtgtgagggtgctcgcccgtactctcagctgcctctcagggactgcactgttcctcttcacccccaggttcctgctaagatcccacgggcgagggcttgctctggactcagtctgtcaagtccccgaagcttcctgcagctccaccttgtaaaaatgctgcctttgggaatcttcgaaatatgtacacagagaaaatcacatgaaggagacctggggtccccacttgtgagtgcaactgcaagtaactctggctagagagacacatgtgtcttgtgtcaaggcaggaggataacctggatgaccttctgaggtctcttcagcccttttcgctagtggtcacccaccaccatggttacttgccagcaacatctctattgctggatggtccctgtctataaccttgggctagtatattttttccaatatgggaccttagtcttactactgatgagttctatgggtctcttgctagggggtaaggatttttattcttgggcttatagagccagttagatcataattcttatgaaatagagagtgtcctaaatatcactgaaataaaaagtaggaaaaagaagcttgaattttaagactgaggctgctctgcagattctagtttggctttcagagttcaagagtggtggcatcttcacctgaattcttcaatgccagggtaataaaccaaaatagtcctaatcagtatatgctagttgagcatcggcataattttctttcctctggctgatcccagccctaaaggaagggtagacccgtgtctttccagccctaaaggaagggtagacccgtgtctttccagccctaaaggaagggcagacccgtgtctttccatgcccgagggccacgacgtcactatgcagggcacacgtggcttggtttaaaaaggtcatcttagatttatcttagtaaatgtaataaattattttttagatcttgaaatttataataaaaatactttacctaccctgatcaccaaaacctgatgttttaaatgtgctttctttttgaaatttatgttttcaaataaaatctccctaaagcaatatttaaaaattggtc

SEQ ID NO: 10908 - DNA, 1365 bp, Homo sapiens
gggtccctgcgcaccacagcctctctgctcctcacgtccgtggccacagaagcagagcgacagagcgacacatccacaggcgcccctggggaaatgggaccagcctaatctcgcggagtgcactgtgtcttgctgcctgggtgccctctcctttgcaccctacttcggctggtcgcggtagatgatgtggaaacaaagcaggaccagcaggcacagcacctccagaacagtgccccggatgaccagaggccccttgaaaaggaggggtttggggacagggactgtgtccatgaaacattccatcttcttggtgaaggcaaggggttggttcttcaggtcaggatgttaatggagctggaagttcagaaaaagcctggtgaagtgacccttggcctttcacttcttgagaaacatacttctttgctgggcatggtgactcacgcctgtaatcccagcactttggaagggtgaggtgggtggatcacttgtggccaggagttcaaaacctgcctggccaacatggtgaaaccccatctctactaaaaatacaaaaattagctagatgtggtgcacgcctatagtcctagctacttgggaggctgaggcaggagaatcacttgagccagggaggcaaaagttgcagtgagctgagattgtgctaccgcactctctcaaaacaaacaaaaaaacatgccccacaggacagtaccttaattagctagagtagatctgagagggcctcttcttgcctgcactgtgctccccagagctgatctaattctgtatcaataggctgttcccatggtcttgccatgcgcttgaagctgcaggagccttctcactgttcaggctggggtgtggttttcagaaccaccgggttgactactgaaaaccaagtgagccttacagctcttatcgctgggtaaagtgatcttgcctggtgcctcttggtcttcagctcaattttccaggttgtcctggccaagtcttgctctgttacgctcagtgcctctgcccactctttccccgccagcccttccctcccgccctgcaaacttgtcccttggctgtttcaccaggttctgcctgtatccttgcctccttggtacacaccatttcaggttcttccctttctgtgtcccattgtcctagttatgttctgttgtttgtgtaatgcccaaatttttctgctcgtgtggccttgaaaagtaggccagcctcagaggctgctgagctgaaaatggaactgagtaatcaggtgagctggaagggatgtggggggcggggcagacgggagacatgggttttgaaggcagtgaacaataaaaccttagggaggtggcaccgaggccttagcatttgagg

SEQ ID NO: 10909 - DNA, 595 bp, Homo sapiens
atatataccttccccttggctgtgtctctttatttatgctgtgccattcaaagcacatgttcaagagaacagaacactctccccgccccagcctgattcctgccttacccaggaggagggtgcctggccccagtacccagggtggcacgactgggctaagtggacactgagcttcatcaggccctccctgggtaggagcagctttgtgtcactaaagaaagtgagggccactgtctccggcgggtgaggctgcagcccagtttcacatgcgaggaggcctaatcaggagtttcaattccagatcgggctgggtccagccccaaaacatggcctgctggctggggagtgggaacactcagagaaaggggagatctgggcctgggaagattccggggcaggggtgagcggacgttcacatgagtgggtctatagcccgctccgggcatcatctagacttagcatgcattcactcccccatcacatattccaatacacaccctgtcctaggcactgagagctggagagttggtgataagcgagacgaacacatttcctgccctcatacacacataaataaagtgaatgagatcatgtc

SEQ ID NO: 10910 - DNA, 578 bp, Homo sapiens
tggaaatgcccaaaaccttcagagattgacacgctgtcattttccatttccgttcctggatctacggagtcttctaagagattttgcaatgaggagaagcattgttttcaaactatataactgagccttatttataattagggatattatcaaaatatgtaaccatgaggcccctcaggtcctgatcagtcagaatggatgctttcaccagcagacccggccatgtggctgctcggtcctgggtgctcgctgctgtgcaagacattagccctttagttatgagcctgtgggaacttcaggggttcccagtggggagagcagtggcagtgggaggcatctgggggccaaaggtcagtggcagggggtatttcagtattatacaactgctgtgaccagacttgtatactggctgaatatcagtgctgtttgtaatttttcactttgagaaccaacattaattccatatgaatcaagtgttttgtaactgctattcatttattcagcaaatatttattgatcatctcttctccataagatagtgtgataaacacagtcatgaataaagttattttccacaa

SEQ ID NO: 10911 - DNA, 398 bp, Homo sapiens
ccacaggcagcagaagtctgggcagagttcatcttcttgacctttggccactgccttcccagctgcccgcagggggttccccctgctgaggagagaccaggtggaccccagctgcctgtcacccttcatctgggacttgctgtcaaaccctaggatagtctcataaaggggaggctgggccagcctgctgctgtctgcttcagggccaggcagagagtgaggctgggggttctcacaccttactccaccgggcacatcccaacctgcactggggcccactcgagcgcttgttctggtctcagccgctcccttggcagctgcagcccccatgcagaagaggctcccaggcccaagctctgtgtgacccagagaaataaagatgcctcagtgtggcccgc

SEQ ID NO: 10912 - DNA, 147 bp, Homo sapiens
catgacaatggccccgttgtgtgtggtgggggtcggggttggggggcatggtgcagtcggccttcacgtaaactaagtaggcaggtaggatctgaagaaggcacaggtgcaagtaaaattcgtcaattaaaccactattttgattac

SEQ ID NO: 10913 - DNA, 109 bp, Homo sapiens
acttgcaggctgctatccttaacatgctgcccctgagagtaggaatgaccagggttcaagtctgctttccacagaatcaggcatgctgttaataaatactggtttaatc

SEQ ID NO: 10914 - DNA, 131 bp, Homo sapiens
aatttgattcttccagaatgaccttcttatttatgtaactggctttcatttagattgtaagttatggacatgatttgagatgtagaagccattttttattaaataaaatgcttattttaggctccgtcccc

SEQ ID NO: 10915 - DNA, 2290 bp, Homo sapiens
cgctcgccgcggacacaccgtccgtctccgggacgccctcgcacccctggacaccagaccggactgttcccgacccggagacgcggggccacagcccccagctgaccctaatttattctcagcaccaccccctcccaggtcattgtgtctgtttccgaggggcctggaccgtagcccccgcccagctggccctctctgaccttgggggatcaggagcgaagttgggcgggacttcagagatccgcctcccttgcccttcccccgcccccggacggtcacagcacccaaaccgcaggccctgctctggcaggcaggcaaagctaggcagaagaggattcccaggatcctgggtctgttccctgccccagtgctgcagaacggacttgggagccctcctttgcctgctcccgcgggtcacccagcgagtgctgagaccccattttctgtcgaggcgggccgagtcttcccttatccccagacgcctagcgggcagggttgggctgaatcaaatgggagccctccagacataaggaggccagaggctgcaaggagcggggtcgtgaccgcttacaccccttctccacagcccggcccgacctggagggcccccggggcactgggcggtgagccacctcctggcaactctcggtgccgtcccctgccctcgctcgaggcctcttctccccagcaccgctgtggtgtgccgggatcctgagcctaggcctcccgatgttcccacccgcatgatcccttcccgccacacgatgctccgttttcttccgttgtgaatgccgcgtcctgtcctggtgacaggagaacaatgttggtgaacgtcgcagcgggtgtccgagtgctccgtgtgcccctgagagcgggtgggagcggaagcctgagcggcctgcggcctccggcgatagtgtgctatctgccgctgcagcgcgcgtccgcgcggcctctgggctatttctggccaggccgcagcactgtggtcggtgcgggcgtggcaggggcggggcggccttatcgctcggctctcccgcctacgcctcccgctgcagagtaagccgggctgccgtcttctcgccatgggctccggtgagtctggagtccggtcgggcccccggctgctccctaggccgacccgggttgagaggagctctggtcgtttggctgcagctgggagagacttgggtcagacttagaggggacttccagccggcgtgcggggtggtcagggtggagaggctggcgggctaccgggacgccgggcatcaggggctggatggagccgggccggcagtctgggtactcagagatgtcgcccaggtgcccgccgaccgctcggcttactgcggcgcttcccttgcagggccgcgcggggcgctgagcttactgctcctgctgctggccccgccgagccgcccggccgcaggttgcccggcgccctgtagctgcgcggggacgctcgtggactgcgggcgccgcgggctgacttgggcctcgctgccgaccgccttccctgtcgacacaaccgagctggtgctgaccggcaacaacctgacggcgctgccgccggggctgctggacgcgctgcccgcgctgcgcaccgcacacctgggcgccaacccctggcgctgcgactgccgccttgtgccgctgcgcgcctggctggccggccgccccgagcgtgcgccctaccgcgacctgcgttgcgtggcgcccccagcgctgcgcggccgcctgctgccctatctggccgaggacgagctgcgcgccgcttgcgctcccggcccgctctgctggggggcgctggcggcgcagcttgcgctgctgggccttgggctgctgcacgcgttgctgctggtgctgctgctgtgccgcctgcggaggctgcgggcccgggcccgcgctcgcgccgcagcccggctgtcgctgaccgacccgctggtggccgagcgagccggaaccgacgagtcctgaggagagaaccggtgcgtcctgaggagagaaccggcgctgggcaacacgggcctgcaaactcgacaggaccctgcccgaggggccctcgcgccaacctggaccggtccccgcctcctccgctgcccaatctctcagacccaccccacctgcaggcccagaccacgtgggacagaactcctgcccaccctaccccgagggaggcgaacccgcacttccaggcttgggaggaccatggggcacaatgcggtccagaccctgctgcgtctcccttccaaactctggtgctgaataaacccttctgatctggtct

SEQ ID NO: 10916 - DNA, 465 bp, Homo sapiens
cacgggccctgtcgcgctcccgccccggtcctgcacagccccgaagttcgccgggcccggccaccctgccccaagggcaagcaaggaatacgttcccccagccccaggggccaccgcggctctccccttccccagcctcgaagccatgggggccccctcgccacccccagccccttgggctatcgaagtatccggttccccagtccctggagccaccgcgggtccttccccggccccgagggccaagggggtccccgcccgccagtgccaaagcgcccggtcggaggcggaaggaagtgatatttattgttctccccgagaccgcgtcgcccgcggcccggccggcagttgcagtgtagacagcccgagagccccgcctgcaggcggtgtagatacatgtagatactgtagatactgtagataccgccccggcgccgacttgataaacggtttcgcctcttttgg

SEQ ID NO: 10917 - DNA, 274 bp, Homo sapiens
gtttcagagcccaagtcaggaggtcaagtgtgcatgcaagaggtggcaggggacagatgtgctgctgttcccaggccacctgcacagctggatggtggaagcagttcacttaaaggccatgagttactcgggaggctgaggcaggaggatcacttgagcctattagttggaggctgcagtaagctatgatcatgccactgcactccagcctgggtgacagagtgagacccccactgtccctggtctcttaaaagaaaaaacaaacaaacaaacc

SEQ ID NO: 10918 - DNA, 136 bp, Homo sapiens
atgctgaggccgggccatgggcacatggagttgtcgtgtttcccttcactttggttcatgtttgaaatttccaaaattaaaaaaacagtgacttgttcagtaaattccaatatgaataaagtgcatgttttgtaat

SEQ ID NO: 10919 - DNA, 269 bp, Homo sapiens
ctgcccccccggcccccctctcgggctctctcacccagcctggtactgaaggtgccagacgtgctcctgctgaccttctgcggctccgggctgtgtcctaaatgcaaagcacacctcggccgaggcctgcgccctgacatgctaacctctctgaactgcaacactggattgttcttttttaagactcaatcatgacttctttactaacactggctagctatattatcttatatactaatatcatgttttaaaaatataaaatagaaatt

SEQ ID NO: 10920 - DNA, 1262 bp, Homo sapiens
ccccacctctgggcctggccagtgggctcctggggggccctgccttgaggggcactgtggacaggaaaccttcctttgccatactgcattgcactgcccgtggcttggccagcatcccccggatcagggccctgtggtttgcgtgttacccatctgtgtccccatgcccagttcagggtctgcctttatgccagtgaggagcagcagagtctgatactaggtctaggaccggccgaggtataccatgaacatgtggatacacctgagcccactcttgcacatgtacacaggcactcacatggcacacacatacactcctgcgtgtgcacaagcacacacatgcaagccatatacatggacaccgacacaggcacatgtacgtgcacaggtgtgctacacatgtgcacacatgcacagttgcacagacacacacacacaggtgcacacacacgatgccgaacaaggcagaagggcgactctcacctctcatgtgcttctggccagtaggtctttgttctggtccaacgacaggagtaggcttgtatttaaaagcggcccctcctctcctgtggccacagaacacaggcgtgcttggactcttgacaagcagacctgctcctgcagaggagacagccacatttggaattgggcaccgagaagacctgagaaaaacccactctctcttttttttttttttgagacggagtcttgctctgtcacccaggctggagtgcagtggcacgatctcggctcactgcaacctccgcctcccaagttcaagcaattctcctgccccagcctcctgattagctgggattacaggcgtgtgccaccatgcccagctaatttttgtgtttttagtagagacggggtttcaccatgttggtcaggctggtcttgaactcctgacgtggtgatccacctgcctcggcctcccaaagtgctgggattacaggcgtgagccaccacgcctggccgaaaaacccactctcataacagaagtgcagactcattgctagattcagtgcccttgagtgtgccagaggtcctctgtgtttgagacaatcctgtgtgtgccaggaggctccgtgtgcaccaggggctctcagaatcccgcttacccagctggagaccatgcctctggcagccccatctcagccagccctgctctctccctcttccctccaggtgaggcaaacttcataggaatctgtacctgaatgtgagctcctgataataaaactctgaggctttggtgagcg

SEQ ID NO: 10921 - DNA, 1767 bp, Homo sapiens
gggaggtggcacgggccagggcgcgggggccgccagccgcacttctgaggagaccagcagtcatgcatcgtgcaccacagtgtcaggcctccaacccacgctccttccctgtggccaacctgtgggcccggccttagggtggaggctttagtgtacagggacagccatggccacacagcacacatgtggagcagcggctctccctggaaagctccaggcctgaatggatggactcagcgactgcaccagtggcagctggtgactgtggacagtggtggaccctgcttctgtgcacctgctgcaggctctttttatgaaggctttcatgaattttagtatgtaatacgcactgacgacacatgatgcttggatgacagatgagaggggatggctgagtcctgtggctggcccgtgatgccaggtggcccatgtgcccagggcgcctgcagggctgctacagggacctggtcaggaggtgcacatggtgccctgccctcacccaccctctgtgtttccccttctttgaaaaggtagaagagaaaggaatattttaaacctttttggcttaaacagaattttagcatcagaactagctttctgggattggaggcaaaccatcaaggtggtccctctccagtctggacacgatgccagcaaggatgacgtcctgccacctcctggagttaccctggcctcctagggtccctttttctgatgaagtcttaattccctaaaagcgcctctttggacactgaggccctctctgcctttcctggcctccggcaacagttttttacaaagattttttgcagtcgagtccatatgtccacccattgatttttaaagcttttgtgatattttagcattttgaaagactttcacagtgagagtagaaggtagatttggaatcatgcattttagcaagtggacttgttgaaacaggaagcaagggccttcagtgtagcccattcttgatccagagctgttgcctgtgacagcggtttctctggatgtcaaaggcagctgcctggtgcccagcttgcttctcgactggtggcccctatgggtgggtgtgcgatggaaatgtgttcctgccggagtctgaggcaccagggtgtgctcaaaggctggccctggtggtggactggcacctgtgcagagtgccgtgtgcttgtggtgcgccatctgaagcaagagtccagcgttctgccgtgtctgtcccccaccatgccccctacaggcggtactgatggcgcttttttttttttttctgtcaggaaaacaatgttggcctgtgggccgcccacaacatatccttccctcactacctgtgtgaccaaggttggcttctgttgacctttaaaaaagaaaccctcaactcaaattgctataattagacacttgcttctgtcttgcctcctgtctgcagctgtgaatagtcatttgactgtgactgttgcccttagccagccagatgcgcctgtgaaccaaagcttcgtgcacatgtgttcccctaaaggttggggagcctcgctgtgtcttgctgttcccaggcaccaccacagcaggtgctgccatactcttgtggtctctgtgcgccccccccccccccccacccgtctgccaagcatgggtatgaatcgtgcacacagccatgcttcaaggccggggcaggggagcctgtgctgatgccatccagggcactgggctgtgcctggaaggcgagccttgattgtctgaacacataaagcaaactgtccagaaggg

SEQ ID NO: 10922 - DNA, 129 bp, Homo sapiens
atcgtcttattttattttcttttcctctctttcctttcctttttttaaaaaattttaccctgcccctctttttcggtttgtttttattctttcatttttacaagggacgttatataaagaactgaactc

SEQ ID NO: 10923 - DNA, 1035 bp, Homo sapiens
ggactgactgccacacatccgccatggtgccacggggaccaggaccccacagcgcaccccccctccccaccaacttctctgccccagggacccgaggccaccccagcctggtgtggacccatcggcgggagagagtgccacgcctccacagcttgccccaagcgctctgcctgcccgtccactcatctgcccatggggaagtcggctcactgggacaagggccactgggctggtctgtgtctgggcctgtcccatggctggggcagtgagggggcccagtcagcctctttggggcaccctctctcagccaggcttggcccactgccatcacccagcaccccagatcaccgccaggccagcccccaatggtccccttacggacaggtcccagagatggacagaggcacccagggcccccaccgtccttctgacacagcctgtgggctcccggaccgagtgtcccccgccaggctactcctaactaacgcgttgcctttcacggaccccgctggaagcttgtagcttggcaaggctgatgcttctgccctggcctgctctgggtggtggtggataggtggacagacggccagccagccagctgtggccgggggcccggctccatgtgtcccgtgtctgtgtgctgtgctgccgcgccgtgtctgatgtgtcagtgctccggccgccgctgtccctttcatcaaagccttaacctttgctttatgctcttgtgggaggcgacgggggggcaggcgggagcaggcacgggggtgatgctgccacagggggctggtgacacccagagccccctccccagccctcaggccctccctgccaaactggagaaccccaccccaaggcatgccacgtccgcagccccggcctggctgcggtgctcgcgccgtgggaaagcacactggggaggggtcagtgcttcccttggtgtcagggacctgagagtaagcacatgacagcgtctgcttgcgttgtgtctgttttatgtttttatatctacatctatatatctataattttatt

SEQ ID NO: 10924 - DNA, 1493 bp, Homo sapiens
catgatgtgctttggtgtcagtagctgctttctgagctactcaacaaggaaagcaccctggtcctccctggctcctagatccagaccaccttcctccaggtgtgggagccttgccttatcacccccatcaggtctgcatgccagggtgcctcctctagttaaagtcagtcacctccccagaagggccacactccaggaggagtgttgagagtcatttgaggtagtcttgccacctgttttccttgatgggcctggaagttgttgacaaggggaaagatctttcttgccaataaaaagaagggatatcgttgggtgccatggctcacacctgtaatcttaacactgtgggaggccaaggcaaggggatcacttgagcccaggagtctaggaccagcctggacaacatggtgagacctcgtctctacaaaaaatgcaaaaattagccagatgtggcggcatgtccctgtggtcccagctactcaggaggctgaggtgggaggatcatttgagcctaggaggtcaaggctgcagtgagccatgattcacagcactgcactgcagcctgggtgacaaagcaagaccctgtgtgaaattaaaaggaggtatatcaactgttgtatcctcggacgggctcctgacacggctttaatcaggagtttcctccataaactattattttcagaataataataaaacaagaattatgactagcatcactttccagtgaacattattatattgctagagaggagaataatcttgggtggtgggcatttggaaaaagtgaatttcctggacttaactcatgtaaatagctctactgcagagctgtgtgtttagtgacagtgcagtcaggggcattcccacagctgtcacagcacggcccagcatcattgtagccagatcctaacatgccaacatcacctcttgccatttagcccctagtgagaaattgggagctaccaggcaggtgcccagtgcattcagggaagatgggcacaacatcaggatgggtgtgtctggaagctcctcttcactgaccagggctgggcagggccaccctgggctggtgaggctgccctgcagggcttctcactatgtagcaccagtcaccagcccaggtcacagaagaagcccctcccagcacccactggagaggggaagctgaagcccagggagacgggctccatggtggtcccacatggagctgttttgcaaaccctggaaaaggcggctctccctgtcccaacactcttcagagacaggaagacagagttaatcttgaatgaatgttatttctacttagtcctaagcaagaataagctgccctcttggtgatcatactttatacggagtgctatcgtttatgaaatgctttcagtatgctttttaaattatgcaggcaaaataaccacacttcagaaaatgtggacttctgaaaaataaaatccccataattcttaataaaactgccttttgcactttgatacatt

SEQ ID NO: 10925 - DNA, 927 bp, Homo sapiens
ccaagactgcagggatggcccgcagcctcatcggggccaaggacacacgcctcctgtcagacacttctaggtgttggcttccttagagagcctggggttaggttagctttcctgcttttatcttctgccttggggacctgccaaacgaaatcccacacctgtacagaactgggataggcgcagtggagcgggttgcttggggggcgttggccgacttcttagagaaggccctccatgtgacttcctcccaggagccagatgcgatcctcaggctgctctcaccgtggcctgtccacggtccaggtccatctcagcagcgtgagggtgcactcagggtgttgttagagcgtctcgtgtgtgctagacgcacccctactcgttcctatagaacacagaggacataggaaacccttaaaacacacatgggattctctggtcacagttttgggttcaggctatgctgctttgggcaggtggagcaccccccgaggaagcctgcaagtccagggcacaggctgccttttggagggagggctggcccataggtgctgctggctccccgccaccagctgggcctcagccctcacggcattcctgctgagcaccgtggggcacccagggagcaggggcgtcagggatcctgctgccggcacccctgtgccgctggcatgagggccgtgtccccactgtgaaggatgaagagcaaggccctcaggacccgtgtcctcagagcaccacacactgagcacccagagacagcgggcctggcagcgggccgggccatgcagggagcgcctccctatgttgcctgccactctgggcaccggccagcaccctctggtgagaagaggtcccccctttttatgtgcactaccccaccatctgtgattataataaatttattattcctgtgtttgtcagttgttc

SEQ ID NO: 10926 - DNA, 654 bp, Homo sapiens
aggtggaggtctaggtgtctgaagtgccttgggggcaccctcattttgtttccattccaacaacgagaacagagatgttctggcatcatttacgtagtttacgctaccaatctgaattcgaggcccatatgagaggagcttagaaacgaccaagaagagaggcttgttggaatcaattctgcacaatagcccatgctgtaagctcatagaagtcactgtaactgtagtgtgtctgctgttacctagagggtctcacctccccactcttcacagcaaacctgagcagcgcgtcctaagcacctcccgctccggtgaccccatccttgcacacctgactctgtcactcaagcctttctccaccaggcccctcatctgaataccaagcacagaaatgagtggtgtgactaattccttacctctcccaaggagggtacacaactagcaccattcttgatgtccagggaagaagccacctcaagacatatgaggggtgccctgggctaatgttagggcttaattttctcaaagcctgacctttcaaatccatgatgaatgccatcagtccctcctgctgttgcctccctgtgacctggaggacagtgtgtgccatgtctcccatactagagataaataaatgtagccacatttactgtg

SEQ ID NO: 10927 - DNA, 1984 bp, Homo sapiens
agacagacggatttccactctattgtgatgaaaagatttgaaagatctttttttgaacttccaagaaatttcatttactattttagtatgtaaattaatgtgtgtttgcaaatgttataatagagtaggtcttaagacatttttgctgttataaggaagtgtttgtcccacattttcctagggttaacacctcaccaagttcttccagcaaaatgcttattagagtttttgtctgagcacagtagcctggccctgcatatcttgggcgtttgattaccatgctggaataagaagagttgcatttctcattttaatgagcatatggaaagatgggaacagaatttcagtcttgcagccatgagcctctatttctcattcctaagccttaccatgagtcagagtgttaagggggcctgtgaaccagtcgtttggtggaggagggtccttcccacacctttgtttaggagtcatcattcacacacacacacacacacacacacacacacacacacacacacactctctgagcacattatctgtgattctttcatcctcccagaaaggatcagtgttagaatgggaaatagagtgtgccatcttgctcttttgttggcagatgtccccgcttccctccagccccccatccttggcatgtatattagtaggagggcttcacaccagcactgctcactgcgactcctggaaatgtgtggggaattgggtgagcccctcttccccacgtgctcccatctgtaactctccatctgtgatttgcaacaggtcttccactggctcgaggctgcgaggctgaccgacaggggcgcccaatagagtttgtgggaatggagtattgcacagatgcagctgcacaatggtcttcctccacccctctgggaatcaccattaggcaggcctcagtagggcaaaatgtttatttggtaccgggggtctcctgacctgtctagcattcccacccactcttctgcacttcttgcaaggtaacttgaatcatcacttatttctctgccacctggttttaggactggcactctataaatgacgctgactttgtatagaaggattttgctaagggggcaaaaagcccagataccattttaactggcccagttcattttctcctttcattttacaaaagaaatcatgcagaagcatcaattaaaactgatttatttatgttggtacatccaacaaaatagttggagccacaaggcccttgtctttttaaaaaaacaaaatattttgaagatggtgaaagtgactgattttaataatgagataggtcacttaaaataacagtgcctttgaccttaaaacatggcactggcccatgtgacctttgccatttcccagtacttccctttacagtctgcagcctataaacagtggtgtctcaaagcaaaggaaacctccacaagtgctgcaacagtgcattagtttttatgtagcaatttgtttataaaaattcccatcccataatgcatgaccttcctaaaaatatccacagcctccataggcaaggtgagctttctgtgctacccacttgttagattccagccacctcagggattctgatccatgtcattaacgaccatcccagggtgtgagggcctgattaaagcttatcgaactagacatttgtttattagatgagctcggcattattattttctcaataactggtagaagggaaattttaaacataacactcaacccaaacaaaactacttcgtgaggctttcagcaaaaaggctgcttaaaagcatgaacccgggatgcagagcagcttttgtgcacggttccacttactgtaattgtttctggttctttcctctaacaccttccatgtatgtcaactttttatcaccgtcaggcatagactcgtggagattagtcattatagctcagacctaagctaattatttaaaataaatacatgtaaaggccactgccacattctcagcag

SEQ ID NO: 10928 - DNA, 3756 bp, Homo sapiens
ttgctgttgccctgtttcctgctgctttgttgttctgcctgtcctagtctcctttgaagtgggaaagcattttctctcataggcaagtcacactgcattgccgaagtccagctttctgcagactggcagtcgcacacacatttggaatgcacacagcggctgcctcctgatgtttgtatcatagtcgtattgtcaaagagtagccgattttagagttcttttggatcataaactggaaatactgatggaagcacacaagtggagagaagttgacatggaaagggtcttccttctcattgctgcccgtttgtacatgggactgattctgttgtgttcaccagagaaagcttgaggccatggcgagatactgcatgtttgctgttccacaaagcagtggcttagctgccatcttgcttttctttggacaacaggaagtgaaccttaaggaagagagaattctgttctaaaactccaaaatctggcttttttttttcttttgttttggtttggttttggaaaactaattaattagacttgtgtgggggtttttttttgttttgttttgtttgttttgttttgtttttttgagacggtgtctcgctgcatcacccaggctggagtgcagtggcgcaatctcgccttcctgcagtctccgcctcctgagttcaagcgattctcctgcctcagcctcccaagtagctgggactgcaggcgcgcacaccacgcccagctaatttttgtatttttagtagagacggggtttcatcatgttgaccaggctggtctcaaactcctgacttcaggtgatccacccgccttcagcctcccaacgtgctgggattacagccgtgagccgccgcgcctggcctagacttgtgtgttctaaacaggttaagtagcaggttgggtttttatgatagtgcaaggaatgactcatgcctctgagcttctaaactgaagctgctgtaactaaaggaatctgaaaagaacaaccctgaagcagaggcctttattgtcttggttgccagtagtaccttgttttgccatgtagcagacaacacacaaaataatgcagttgtggtgtgccatgctatgtgcacagccccttggattactttgttttaaaaagcatcagagttgggggtactttagggaaacctttgcttaccttgttttgccagtgataagagcagtgggttggagggcacttggccagttttctgttcagcttttcagtgaatgtacccctttaaggttcagacttaaacttccttaaaaagtggcgttgttcatagaatcgttggactcattaatgaatcgttcaactccactcactgaagcccagacctccgtgcccaggcccaatctcgtcaggctgccagagaaagttggtgctgctcatactggtctcacagtctaagtaagtgtctgtgatgctcccaagcaaaggaaatgcaagctctggaaattcgttaatgtatttgatgtcttagtgttttagtgactagggagaccattaactagtttatcattaaccacttatcagtgtattgatgttaaagcatttccctgttagctaaaagaggcctgttcatacaagccaactggtatatacgtgtggttcatccatcatctgctgcacatagcagactagaattctgggaaccctgtgcaattcagtctgctctcccttgtggaccctggtaaagaaaagcctcagctcatagtgaacacagcagacctagaaatgtagcagcagcctactgagtagctttcatttactgatcatctgctgtgactgtggccctgtctggaggttcctaggttttgagatttagagcaatgcattctggagacagaaccagcagaacagccatttttcaatttttctttaaatcagtattccatcaggcagataactgctgtattcatgaatcttgagagtgttcctgagacagaattaatggtcatttgggaaaactatcgccatggcttcccatctgtggttttcctctaaaagccttggagattagcccttccttgccagtgagaacggtgaccgcctcctgctctgcacggtctgcggcagttgccgcttctggttaggtgtgtcaggttggcttattttgggttcaggcctggcgtagcacccacaagtggcagacatatcacaagagtccccagactctgcctagaaacagtgtttgccctttggccagtgacgtggttcatcccggcccatgttgagccatgagtggagtttccaacagagggaggaatgtgtgccttgttcaaggagggcacgacccttaggcctttttcaaccagatttagctgaagggcttgacacctttgaattacagcagttgactcagagtgcaagaagtctggccattttggaaagcaaggtttcctttcagccctgtctactgaccaataccccgactcaccttgtgtggcgcacttcagaatcagatatacctagagtatacctgtggtttggttttataattaatcagctcgttacttcagcccatgaaaatggcatccagggctgccaggagattcagagctcaaaacaaggcgagcttgagttctgcactccagatatgtgccaaaactagtaaaacttaacggacttacaaccttgtcagtttttttaatgaggcagggatactctgtttttcacactaaacatatgaatgcagcactgctgcctcagctcagcttcgtgcctgggttccccactggtctgggaagactgttgtgctccatagagcagtgcacatctgacccagagggtgggtgttcataactgctacttgctctgctctaccatgtttaaagaaatatttggatgttaaattaactcactatggtttttcacctgggaaggaaacaaattacgtactagagggcattgactggttaaaaacttgtgtatcccgggaaggacctgcggtacaggagtcagccatgtctgtgctgtgtggaaccacctgatgacatggttaacgaggaagacgatgtgttgaccggctgccgtttgaggactttggtcacccagactagacaccttctgtgctcatgtttggaaagctgaaagggaaggacagctgtgccctcctgggagctcatgtgtccctggcgctgtgctagctttcctttacagctgtttacagacaaggcaggcctgaggcagatggccactgctcttgtgatgtttgctcagaggaatatgaacattttatttttgaaaagggatgatgtggttttttgccaggtgtttataattaatcctttaatattatggttattaacctcttaaacatgaatgaattcttgattgttttaacacagtacctaagactaatgctttctgtggacaccactgagctctgcctcaactccaccctctgcgaccggaggactatgcccctagtaactgctgtcggtgtggacgctgtgctggttctgttttctaaaggagcagaaggacaggtctctgagacaggatcgttgtccctacaggaggaacagtggccttgcttcttagacggtcttcactgtgtgttttaaaacaacaacaacaacaacaacaacaacataaaactcttttgacctgtaacttaaagatcataaacttcaggcaataatattttctgtgtaagcttttaaaattatttttggggatcatagcttgttttattttgtgctataaaattaacagtattaaatgacttatattcttagaat

SEQ ID NO: 10929 - DNA, 329 bp, Homo sapiens
gctcacatgcagtagacttgggcaggcaaagggggcaccaagggcacaggccaagccttgggggcaggtgccaatctccagtcccaggatcccccagggcagaacctgagccctcccagtgcttgccttcagccacctggctcccctcctgggaggcctctgctggatccagaagatgctcaaccctcaaggcctctgctgccactgacagctggcactggaggcaggacaagccctgcctcttctccctctattgggactggtcccctgaagaaccctgcaacacgttaaacattaccgtaaaattaaaacgcacaaatttgcagatc

SEQ ID NO: 10930 - DNA, 1689 bp, Homo sapiens
ggccctgtggcgcctgcccattgtgaagaatcgccgtgcctgcctgccctgcctactgagaagactaccggctatgcgcatgcctatggcagtgggtgcacctgccaggccaagggtcagggtgcccagagcctccaaagagagctgaggggatgtggggccccaaactcattaattcactgaagacacaggtcccacagggagcggatgatgaagcagaccccctcctgtcatcaccctctcctggtgtagtgtggatgcgaggccacggctcagtgatgggctcaccacccagaagtggggagagactttgggcctcccacccagtggggcttggcctggcttctgtggcctgggcgtgttgtggactcaggcactggggcctgtcaccaaggctcctccaacatgcgggaggaggcttagcagacttgcgctgcaccagcgaatctgcctgggctgctcctgtcccacccaccctcactgagatccatgtaaggggctcctcttcccacctggaacttgtgagtggggacccatgatgtatgggtctcacctgacttgaggtgaattttggagtgaagggccctgaggtcagctcccaggtcggtcgtgctgggccaggcctggttttcacaggggctgaaggatcccagtccacctgtgtgcatgtcagggctcggccgggaagaagccagcaaagtcccccgtgtcccttgctgagtattctgtcacagacaagcctccattaaagccacagcagtgctacccaccacacacaccttgctggcccggccaccactgctggcttcagccccttgagcagcccatggcttagcagacccccagatgtaggtcagtggccttacctgtctctatccatgctgtcaactcctgcctccacctggggtcacccagtcacattgggaagggctgtgaaggcctccaggctggccccttccaggggaatcctggaggcctggggtgggctcctgccccttctgccctgccttgcccctgcactatgctcttggctcctgtggaaggagggctgccctcttgccctagtgagggccccatgtggatccactctagtgctgggagccagcgctcccttactgggaacaggattccaggacccctttcttgttgtggctgccatgaagccacagctccttggggaagtgacctgctctcctttgggtgtatgcaggtgtgtggggggccctgagtggcaagttgcttagctaacaggagatccataggcagcctgcaggctaggaagtggcctagtgcaagatgagctgggaacaagggaggagagagcaggagctggggcagaggctgagccgggaggcccttgaggtgaggacacagcaggcccaggaccatggctggggaggatatgtcagcacctggaagtggagtgcaggctgcagcgcccagccatgtgggccaggtgcattcactcagagtggggccacacacccatctacccagtttccacaagatgtggctcctgccacacccacagggcagcctcctccaaatccctcctggaggggcctacccagaagcctccttgaaccagtctgcaaccctgctctatgctgacccttgtcactgaaccctgatctagacttatatgaataaatgaaattacatgccaagggccctaaaaagcaaatttta

SEQ ID NO: 10931 - DNA, 2210 bp, Homo sapiens
ccgttccctgctggttgagagttgggggctgggaagggcggggccctgcctggggatctcaaggatgaggccccagcatggaggattgggggtagaattccacccttgaaccccagcagacagtccctcccctgactcccaccttggtagggtgctgcctcagggagccatagaagtcggctgtgttttgagacggcgacagaacctgacccgtggagactgggagagcccagcaggcacctgtattgcagggctccgactgcatgtggcaggggctcctgctgcgtctgggcctggaggtctctctcccagtgctctgtccccagtgttcctagcagaggtatgcttaccagctgtcagcacagaccctcctgctgcctgggtcctggccctcctcccccatctgcacccccatcataggtagagaccccaccctcccatcggtcctacatggggctgtgcagctggagccaaaaaggcaaggtagaaagaggagtgatgggggagggggattgtttcagcttctctggtgctgtgatgccccaggagagtcctaatctagggaatggggtggagtaggcagataatccacctccctatcccccaggcaagggcggagcatgtgtcttgggcccacacctgcttagtttatgaggaccggctgctttccagtggtagcccttttgccatggaggtctgggagagagagcagagggcggcagggctaagttggtgatcattgggttcttcaggaccttctatatccctcctcggtaaccccccagcccaaccccttggaatctttcctccaggcttcctgagagccctgggggtgggaggctgtgggaggctgtacatctgaaattcacttcagtccaagtcatacctaggaagctgtctgggcagctgctcgagggaggccctggctctgatcccaggctggatggagtggctggaaggaatggttccaaacaacaccaccgagatctccctcaggctggccaggttttgcagctggaattctcctcttggtcccagggcggggcagggaattctaagtgtccaccccagggaggcaaggggctgctttccactgtgggtacctggtgatcagggcaagctgtggagggccaggggtggggctgagactgggctgacatctagaatcacctgccacctggagcctcagtaaaatgcctggggtccctgctgcctctcaatctccagagccatgtccatggggaggtgggctctgaagggcgaaggtgggagagcagggcccctgaggcctgggtatccaaggaggggcacgtgcacctgattctccttggggcccagaggaagctgatgtcatggctggacaaagtcacggagtaaagccagcaaagccaccctcttcctgtgtagtccttacaggcatgactggaaagttggggggcatctatggtagacatggcacagccatgaagagaccagtggggtggtgcagggtggacttggggaccctacccctgaagactgaggccctgcagctaccaggtgggctagaaggtaactggaacaggcctgggcacttgtgcacccatgtaggagcatgagggccacactcttttcacctcaaagcccttgaagagtgggcaaagacagcaagagagctgcagcctgggcccgagctcagaaacagctgtcgcctcagtctgcgcacaggcatgcaccccagggtagtgcctgcagggatgcatgtgtccccgtgggggtgcctgtgccaggcaggcctcaggtgcatgccatgctcagaaccctgctgccctttctaggcagcctccttggggcccaagctctgctccctggatctgccacctagcagacgtggggagcctgaccccatgcctgtcatggaaccctccttgcctggtgtgtgtggctcccctcttcactgggcacctggatccaggcccacctgtgtccctgactcagggtggtcccaggactggcacctactctttagagagccccagcatctttgatgtggattggagacaattgcctggttccctggggcaggtgaagacttggtgccacaaagaatgccacagtggatacgccagcaggccacatggctggccaagcaattattattatggatcccttgggctgtgggccttcccatccaccccaccacaactgcccaggtagctggagctgatcat

SEQ ID NO: 10932 - DNA, 819 bp, Homo sapiens
agacgggagactccctcccggagcaggtggaggcacaggaccattcgctaccccatctgccggcacctgcgggggagcccaggcattgtttgtaaaccctcctgactacctgactcaaagaaaacagaagcatggaggccgccaagtattttcaagaaataatcccatgaacgtggcatcacttttttagaaagaggggcttggggcaggcagaggagagaagggagagcaaactgagagccaagtttccagacggtcctgcaggaggagaggatgcagctgcgcagagggaagcaggatcacatttaaggaagtgtgtggggtccctggatgacaccagcacccagtacggctctgtctggcaaccgctcccaaggtggcaggagtgggtgtcccctgtgtgtcagtgggcagctcctgctgagcccgcagctcactggggagcctgacagcggggccatgtgcctgacactcctctctgcttgtggacctggcaaggcagggagcagaaaacagagccacttgaaggctttctgtctgcgtctgtgtgcagtgtggatttagttgtgcttttttcttgctgggagagcacagccaccatttacaagcagtgtcaccctcgtgggtggcgaggacagaacaggagcctctgctctctgtacctatctgggcccggtgggctcccttgtcctggcttccatctctgtctcagcaaccattcagccctgcgcaggaacacgtgttgcttagaaaagccaaatccagccttgtctctgcctcctctggtctcatgatgtgcatctgttaccttgaaactgg

SEQ ID NO: 10933 - DNA, 4718 bp, Homo sapiens
aagccaaagacccgcgggcgccctctgccaccttgctccccgggaacccatggaaggagaagcgaggtgatgcagcagcaggggcaagaccctgggtccagtggaggctccgggtggcccctctggcccccactgcccacacccagagctttaatggacagtccgtaccaagcagagccgagaggagggaagccaggggtcccagcccgtctacctccccatcccacccaggcccccagctccccgcgggggccaccgcagggcctgtgggctgggtcacgtgggtctcgctgggacctggtccctttgttgcaggcggcttggagaaagggcagtgggacgctggccacggccagggtggtgtcgggagcaggcctcaccccgctggccgtgtctgtgtgtgtgcacgtgtgcttgtgtctgtgcgggcgcgtgcagccctggttctgcagggaacaggtgctgggggtgcagatccctccctccttgagccagggtggcactgttcactggcgctgggacagtcagggtgaccccaccgcctacctctctacatctaaagagccctctgggcctgtgttgctgttattcctactgatctgttcctctgtttttctttttgatttttgttttttaaaccaaaacagacaatagcttattttctttccgccccctccggggctgagcctgggtctgaagactgaatgtaacaggggccgctggcactcctgcgcgtcccccggctctggcgctgcaggggtgtcggcgcgccacctctccaggccccagaagcccttcttgcccaaaggcttccctggtccctgagccctgcctcggctgcctcaggggagagtgcttttcctgtagtttccaaggaatattctttgtttagaggtacttgttttttattaagagaaaaaccagtgtaacgtttatgtgactgtttgaactggaaggtctggggttccggggggtggggggaggctagactcaatgccggggccgtcggtactcttgttttcatttgtgtgtgcgtgcgtgtgtgtgtgtgtatgtgcgtatgtgtgtgtctatgtgtggtgtgtgccgtatgcatgggcagatgtttcgctttccctccttcctcgctgaacaaggtggagacttctgaccttttgctacctcttgaattcatgacaacgatatgttggtgactggcagtggaagcccttgacactcttgttttccttcgcttagcacctaggaagtcgtgtgcaggagccagcagggcgccaagtggcccagtgcctgcagctcacctgtgggttttccctttgagcctttggccacatccacctcgaggggaccctggcaccccgggcacacaaacctctgtggtataggtgaggggtgtgaggccccagcctggagccaggcactgggtgctgacaggggaaccatgaggagggtggcaggtctttgcagctcccggccagggtgaggcggaagtgagccctcatcctgccactcctatcctccattcctgcaagagttttaagcttgagagagctgaccacagggccccccggggaacagggatggcacttccctgagcagtcctggcccccggccactgtctcggggcccacctctcgcccctcatcttggtaattagccagcctcagatacttctgtgggccctgaagtgggctctcaaggtcagaccaaggttgctgatctcagtcccactgtcttcagccagctgaagctgtggggctgggctggcagcctttattgtcatcttgcttcaccatttttttttctctctcttttcattctattttaagtttagaccaaaaaaatacagagtcatcccctacccccacccctctagagaccctccagctaaaaacagagcctgagttcagggacccaagtggtgagcggcgtcttttgggggtgagggagcttgggtagatgaggctcctggctgagccctccctgtggtgatcccagcctaagatggcccctcttccctcctggtgggagacagaggactggaccctgggtctcaggttccagcaagtcaggctagggacctggggggaggagacccatggacttcacccatactcagtgagggggctcctgccgtcctgacgccaccccgccccatcagcacttaagccacatgacacaaagtctgtaccgcacgggaaatgttcacgcgcctggccgtgtgcatggcctcccgggctgtgggcagccgcatctgtgaggtgactcgtgaaagtaggtgattcctttgcagaacttcagggactgggagcagaggcccctcactcaacgacgtttgtgcgacatagtattgtatccaccttagtattgtatcgagccttttctgtgttttaatgagaaagcagaacactagtttcctatttaagactttaagggtttgtggggcggggcgggattaacacaacatttggctttgttttctttttcctttgatttccacatcaggtgtgtgcgagtgtgtgtgtgtggagatgttaagagcctcacaaggaaactgggttattggaggccaaggcggcttacagttctctgcgttcgtcacttaattcctgaatgtttcagagaaacaggaatcagaaaatagcagatatcatgtaggaaagagaggataaacaaagaaaaaagaaaaaaaaataagctcatacccaaattcacaaagcctattttttaaaccaaagcacattttgaatgagtatggaacctccatgggctcagaaaaaagatgctaatatatttatctcattgtttacataagcttttacagtttcagacctcagcagctgtaaggccagtccagggaaccctcccctgctgctggaaacccttctgagttggccctggagtggctcacgggcagagaagggtagccctggggctgggggagggattggaagcctccctggagtcacctgagccctcgtccccattcccagggcccctccaagcccagctggcaccaaagagcttgggcccgtgctgaccagcccccaaggccctctggccggaccatgctggtcctgaccagctagcctacgcggggatggccgtcagttctggccacaggacccgagtctgggcttgggtccccctgctgctctgcccgtgacccttggggatgggttgatgcgagggtcccactcaagccaaaaagccgggacctttgcgcagctctgtcgactctggtgggtccccactcctggggccccctaaccccaccccaggcagcggaaggggctgactgggtctggtccttaccaacatagacggtgcaaacactcttaacagtgttgtttttgtatcaatatgtttgtgcagtgatgaatgtatttatttctcagacttggggcgagtgagcgggtggcaggccgggctccgccactgcatgctcccgccggaccgagccccagcaagggctcctccaggattgcaaaaaaaaaaggaagagaaaagatgaacctttaagcaaataagaatctcagagactcgcagcatagccatacacctcagcctgtgaaatgaacgatccggaccctcaccaactttccccacctcaggcagccctgtgtgtttaccgttcatcaccactcgggggcaccgggccgcccacccactcccaaaatccgtcagtattcactggacctcaggccctgtgcaggagtgcgatccgggctgggccgctgggcaggctgaccccctgccctcctgcggccatcctgagttggggtgaggcctgggcagccggagggcagggctcagggagcaggaggctgcatccgtccacccccaggcgtgggggacaaaagccaaaggtgccaggccttagagcagacaagggctctcagccctggcatgccccctaaagggaccaaggtcctcctatttcccagaaccccgttggggcagatgttactgaacctgtgaatcagacgccaggagtgagggctggggagggacctaactggagcctcagtctgacattccacgccggggtgggggtgggcatgagcggtgggaactgaggctgcccaggacccccttcctaggatgccccggcttcagtcaccccactttaactttctaccaggaccccctccccctacctcaccttgctatttattgctgtaatttattgacctcaaaaatgctgcataacagacctcactggggcagggaggatccccagggctcccaccctccacttggcgggccccgtggggccaggtgctgaggggagcctctctaccccacccatcactagcttccctctgccctctcccaccccgggggggacccaggttgggcactggctcatttctcgcaaatacctcgaaggggaggggggagggatggggttatagctgttttgtttaattggaactggaagagggatcatgttttgttttatgcccttcccagaaggggggagggacaccgggatcgcactcctgtactggccaccgccgctgtcacttgtcacattgagttcatgtcccttgagagtttgtataaattcaggtcagagctgcagctacacagctgcccagtgtcatagaaaagcaattcaccaacgactgatctctccattcagaagtgtgcagtcttaaatgtacagcgataagaaactgttattttatgatcttttcattaaaagcttgattgaa

SEQ ID NO: 10934 - DNA, 2520 bp, Homo sapiens
taatccagtccctcatagcactggtgaatgacccccagcctgagcacccgcttcgggctgacctagctgaagaatactctaaggaccgtaaaaaattctgtaagaatgctgaagagtttacaaagaaatatggggaaaagcgacctgtggactaaaatctgccacgattggttccagcaagtgtgagcagagaccccgtgcagtgcattcagacaccccgcaaagcaggactctgtggaaattgacacgtgccaccgcctggcgttcgcttgtggcagttactaactttctacagttttcttaatcaaaagtggtctaggtaacctgtaaagaaaggattaaaaatttaagatgttctagttctgctctctttgttttaaaaatcactgcttcaatctacttcaaaagaatggtgtttcttttcttgtccaattttatccaaaatcttcaagttacatttaacccataaggtttaaaaaaaaggaaaaaaaacggttgtggttccctttcttccctacccttgccactcccactttctggcaccgagtttatttttcacttacttacttccccagaccccgggctcgcctccacaaaggagaaaagactgccctggcggtcctggtggcttttcttagcatgtgtggcactgttgcccagtgtgggagttggtttaaattctcctgactccagtttataacatccttttaaaaaatttaaaaacaaacagccacacccctcctccagtccttctcctcagttcttgtgtgaaactccagctgatgttaccacagtaacatcagttaattgggcaagccctgatgtcagtgtgtgtaactgacctctggcctggcctgcacagagaagccctataatcacaggtctgtggtggccccgaaatggggggcctgctagtcaggaggatgctgtgcacactgtgtgtgatgaatctcgccagaaaggctcctgaggtcccaggttggcacttctccctgcagccattgtagaagatctgctggtccttgcaggcaaagctacagccagaatgtccgtttgaaactcctagctcatctgtcaccgagcttcatccgaatgtgccacggagcttgctctccacttcctccgtgcagtggccctgccacagccctccctcggcacactttgaccctttgtaggattggaattagcaggactcggctatttaaagcaccagtctggggtcgcctgggcccctgctgaccccctcctccagagcagccagcccagcccgggaacaagacggacttcctctcccttcggactcacagcctttgcagagtcaagctccacttgaagctcactcagtaatatcctttcaatgtgttttatattgttttgactgcctttttttgtagaaataaaaattgaccttagaatttatcgtcagataaacttgtaaagatttgaatattaatgtcttttcaaggcaaatgggattgtccccgcactagtagagaatccatgtcgctctgacaccccaaggaagccgacgatccaaatgccgtgtgtcaccaaccccgcttctgccactggcggcttcccttcttggctcttgggggggactagatcctgtggagaagatgacttaaactttgctttttgttttaattttaattctataacttgagatctttccggggcctacaggcgtgtaagacagcttggtctggtctgtgcagaagtggggagtgatgggcaggttcggcagcctaacattgttcaggcgcatggcccctgcggtgtgtacacgaactcggcttcttttgtcctaggtacgccaagggcaggtttctggagactcccttgtgcccgggatggcaagggcaccgggctggcgtttccacatctgtcttcattagcagaaaagtgatgatggattttatttcactcacactccagtttgtaataaaatgccaaattctgtcagctatccaaacaagccaccatttgttcttgttgcttctctggatccagaaatgttgccattcttggaaactgtcccattgcttcgtatttctgccaacgtagctctgcctgcctgtcaacccctcactgcactctgctcatcacgggaggatacctgtgtgccggcagcccctcagggactctcagccctggcactggcaccccagggttggccccgtcagcagaggcttggctttcgagccagtgggtgtctctcctttgggcctgggcggcttgctcctgccagccatgccttcagggtaggctctgagcaagctggcgaacagccctggctgctccaaaaccaaaaagctgggtcctctggaggaggggcgagctgtggagcagccacccactgctgccccaagctcactcaggaattcacacccgcctggtttcttgaagtgtgctgggtccttccctctgctccctactccccaccacggcagagaataggctttctaagatgctgcgatcccgttctgctgcccgtaataaaaatgctctcagacactg

SEQ ID NO: 10935 - DNA, 256 bp, Homo sapiens
agcctcccagagcctggagaggaggcctcggtcagccactccgtggacgtgggccacggtgacccaccatgaagtccccactagccactcgattccctgctctgtcagagttgctgcacatcacaccagcccctgccaagagcaggagtcaccacaggctgaatgcccacgaggagctctgctgagactctcaagggagccagtgaaagaaatagaaataaagcctgtgttgctgggacacaggtttgctgtcctg

SEQ ID NO: 10936 - DNA, 123 bp, Homo sapiens
gtgtgtggatggatgggtggatggagggtggcaggtggggcgtctgcagggccactcttggcagagactttgggtttgtaggggtcctcaagtgcctttgtgattaaagaatgttggtctatg

SEQ ID NO: 10937 - DNA, 2423 bp, Homo sapiens
cagcaggttggccgctgtggaccttggtggggttgcagggctgggggcccatgtccacatctccatttccagcctttctagcctgccctctgctgccagccaataaattgcttgcctgctgcctgcatcccctttcctggcccctgggagcccacagccttcccatcccttaacctgttgccaagggccttggccctgtttccaggacctggcccagccagagcccactgctgggaccttcaagcacaaggcctgccctacacccaggctggtgcctcaggcctcccctctagtaggcaggccaggttagtgaggaaggactgtgtctccagattgtggtttcctctttaagacagggtcttgctctgttgcccaggctccagtgcagtggtgtgatcatggctcactgcagcctcgacctcctgggctcaagcaatcctcctgcctcagcctcgcaagtagctgggactacagccgtgcaccactacatccagctgtatatgtctggttttcttacccctacttctgtcatcttctcagggacagcctatttatacaaccagtgtggtcccctgaccaacgccattacctgggacaagttttcagaccccagacttactgagcctaagcctctgcagggtgggcttctcggtctgttttgacaaaacttcaggggcttctgaaggctggtgttggacggcagcattgagtttcctgccgtgccctgcctgagctctcagggccctgctcacctgctctggctgtgaaccacctgggcttcatctcaagcctgcctggcgtctctgtgcccctgtgagaatcttgaggggacccacactgggttgaggccagtgtctcctgctgtgagaacaagtggatgtccctctccccgccctcctgctgaagtggccttgctgctctcaggcccggccactgggctccaagactctgctcctcctgtcagtcactgactctgatggccttgggccagctgcatcagcagcccttaaagaaagacccctccctcaacccccatttttctgttaaatgtgcccctggctggctttttcttcgtcttcagcccaggccagtggtcagtgttctcatgtcatggactctccttgcctgacacttgcctcttgggctccctgttgccctcaggccaccccccacttctagttcttcacactaagccctaacttaggccttgttcttggttttctcatttttgttgccccaaatcttgaacctgtcagcaacttgcaggctgtacctctgcccttccttttctcatcaatcactgatgctgaagctgcaggcctgagccctttgtctccctggatgctgggtggcgcctcatctgcatctctgcctcaccccatccactgccacaggctgcctgatgaccactagaggtatgtctgcccctcgtcaccctgctgcacaccaatctgtggcccttcatcatgctaagaacaagaactgcgccatggctggctccttctcttctccagcccatccctctgcagcctgtcatccctgtctgtgaccattggtcgggcccctgggctctagagtgacttttgacgccctccatccctcccgccaggcactgtcctccgcaaggcctggtgcagccctggcagtaactggcttgtaagaggctcagacaccaagctgggcctgcagaggaggggcacagtaggacacagtgactgcccaggtgtccacacacctgtaggcctctgagccagcgtccagggtacaggtgcgggtggtggggatgaaggcctgaccagggagggagaagcaggtttggagaggaccctgtgcccaccctgacagacaccctggctggccctgactgactgtattctctggccacattcaagtcccccattggtgggggcagagaagtaggaccaggccatccttggctccagagctcgaagaccccaagacagccctctgctctcagcggcgccacagagagcctgggctcagccttctgcatcaggacatggcctcgtccactgagggcacgatttaaacatttgacatcagaagctttatttgtaaacctcacacagataaggaccaagggctggcggtgtggccagaggacaggggaagctgaaggccccgtgcttgagctcggcagtcctgctccttgcagtgaagccaccatgggtgaccgtccagcctcacccggtggcctgcacagtgagggaagggcttcagggccatctgctcccagggcaggggacaggccaccaaggacctttggcaaatgaaggtttacatttctgtagtttgtttgttttagagcttaatttgtagttttttagctattaaaaccatttgaatttttaacgacctgatgagggcatcaggtaaattaaaggattttgggaagattctta

SEQ ID NO: 10938 - DNA, 177 bp, Homo sapiens
actgaagacagcagaggcacgcatccccttggagagactgtcatggaagagggtggagccgccgcccgaagcgccgaggaggctgagccactcagcatctcctggtcctgcagtgttgctgtaaatccccattggagactgcattagggaattaaagctgcttgtcactttttgctg

SEQ ID NO: 10939 - DNA, 157 bp, Homo sapiens
gtgctccaggaggacaaggctgacaagcaatccagggacaagatactcaccaggaccaggaaggggactctgggggactggcttcccctgtgagcagcagagcagcacaataaatgaggccactgtgccaggctccaggtggcctccctgccctgtc

SEQ ID NO: 10940 - DNA, 1603 bp, Homo sapiens
ggagctgggcccggggcccgcctgcctatggtgaaacccacggggtgtcatgccccaacgcgtgctagagaggcccaatccaggggcagaaaacagggggcctaaagaatgtcccccaccccttggcctctgcctccttggccccacatttctgcaaacataaatatttacggatagattgctaggtagatagacacacacacatgcacacacacacatctggagatggcaaaatcctctaaaatgtcgaggtctcttgaagacttgagaagctgtcacaaggtcactacaagcccaacctgccccttcactttgccttcctgagttggccccactccacttgggggtctgcattggattgttagggataggcagcagggctgaggcaaggtaggccaactgcacccctgtcgcctggaggagggccagctcgctgcccgagctctggcctagggaccttgccgctgaccaagagggaggaccagtgcagggtctgtgcaccttccctgctggcctgcacacagctgctcagcaccactttcattctggacctgggaccttaggagccgggtgacagcactaaccagacctccagccactcacagctctttttaaaaaacagcttcaaaatatgcagcaaaaaccaatacaacaaaacgagtggcacgatttatttcaaactaggccagctgggattccagcttttcttctactagtctgatgttttataaatcaaaacctggttttccttctctgacattttttttttgttttgttttttggtttttttttttttttggccaaatctcgtggtgtttcgcagaaaaaaatccagaaaatttcaaatgcagttgagtattcttttttaaatgcagattttcaaaacatattttttttcaggtggtcttttttgtgtctggcttgctgagtgtaaaagttgttatctggacgatctgtctctctgctccaaagaaattttggagtgagtggcagtcctgcgccagcctcgcgggacacgtgttgtacataagcctctgcagtgtcctcttgttaatggtggggttttctgctttgtttttatttaagaaaataaacacgacatatttaaagaaggttctttcacctgggagcaaatgaacaatagctaagtgtcttggtatttaaagagtaaattatttgtggctttgctgagtgaaggaaggggagcaaggggtggtgcccctggtcccagcatgccccgcgcctgagactggctggaaatgctctgactcctgtgaaggcacagccagcgttgtggcctgagggaggccctgctgggaccctgatctgggccttcctgtcccagggcctatgggcaactgcgttgaaaggacgttcgccaagggccgtgtgtaaatacgaactgcgccatggagaggagaggcactgccggagcccttgccagatctccctccctctctccgtgcagtagctgtgtgtccgaggtcagtgtgcggaatcacagccaaggacgtgaagagatgtacgggggaaagagaagctggggattggatgaaagtcaaaggttgtctactttaagaaaataaaataccctgaatggagc

SEQ ID NO: 10941 - DNA, 2780 bp, Homo sapiens
ctggggcctgcgtggaaggcctccgctccctgcacacacacggacaggaatttccgtgactgtggtgtggagactggagcccaagctctgcagcgtgtcgccctcaagctgtaggcccatgttccagtccctccacccacccaccgggctcagctccagggcacagtcacttgtccgttgcaggttgggcactagaaaaggcccccactggctgcctgggagccccacaccaccgggccagtgcaggcactgtggtgatcccataaaaggccagtccatttgcagggtcatcagacagtcacctttggcctcaagaggcctcagaactgcaaactcctgcgtcggtctatactactcggccatggcccacatcagcagtcaaccctgcactctttcccagcgatcttggatgtgtccccaggatccgtcacagtgttccaggcaacctggacttgtcaaagtcagcacctgaaggagaggccacctgccattccccctgggagttttctgttgtcagcaggacttatggttctgggtctcagagcttcaggcctcactgtccttctgccacggatgctcaaggttcctgggcagaccagcacctctggaggacaatggacaaaatgtctcttagacctgttctggctgaagggctatctctggcacctctgagatccctaggtcctgccctcctggtccgtgggccaggatgtgcagaacaaccactcaggcctttctggcccacctggacagtgcatttacctgtgtgctgcgggaggcagactgcacagctgtcctagggtaactcactctgcagcccttgaacatggcactgccctcctctggcactcatgctgggcctgtgcccactgctgcctctccatccctctctcattggcctatacatctcttaggacctttgtaatggtgtccatgcacctttagaggacttcagaggccctgccaagtctagcatgttcctgtctccaacaccgcctcctgcacatgcagagcagacagaaataccccacacattccccagcctctctgcccagtatgctcatccacagggttttctcactgctatgaaccagccccacagccccaggcccctgtcacctggctatgcccactcatcccacccgtctcgtgctgttgcttcccgtagatggcgagcaccttgcaggcagccttctgatcagtactgctctcctagggcctggcacactgcagctgccctgtaaatgttcagctcagcgattgccaaataccagttagggaagaacactggcatctttttctattcattcccccttcaacatattttttgtagttttttatataaatgacttttttttttttttgagatggagtttcacccttgttgcccaggctggagtgcaatggcgtaatctcggctcagtgcaacctctgcctcccaggttgaagcgattctcctgcctcagcctcccaagtagctgggattacaggcatgcaccaccatgcctggctaattttgtatttttagtagagatggggtttctccatgttggtcaggctgctctcggactcctgatctcaggtgacctgcccacctcggcctcccgaagtgctgggattacaagggtgagccaccatgcccggccataaatgattttattcatttttatgttttcttttgggcggcgggatggagtctctgtcacccaggctggcgtgcaatggcacgatcttggctcactgcaagcttccccttccgggttcatgccattctcctgcctcagcctcccgagtagctgggactacaggcacgtgtgaccatgccgggctaattttttatatttttagtagagagaggtttcaccgtgttagccaggatggtctcgatgatctgacctcgtgatctgcccgcctcggcctcccaaagtgctgggattacaggcctgagccaccgcgtccggcctccataaatgacttttaaaggggttgtatgtttagtgtgaacaaagacagtacaaagcatataaaatacaaggtgaaagccccccccccgccacattagctgcgcccctgaagtgtctccagcagaagagatggatgaatggaaggacacacagatggacagagagcaggaaagactgttagctctgctaacagtcaggactattccttctggactctgtgcctttgcctgcacagctagtgttgatggcttgtttgttgttttcaccagagtgagctccttctggacatactgcctggcagcctgccttcctagggagctggcgccaaggcctctccctgatggcacacaaggagcctccttcctgtagcagcgcccagttttcatgtggatggattgtagttcatttgaccctccccatccgcgggccatccggcttgtgtccagcttttagctcttgccaatggtgctgcagtggccattcttgtagttatagctttgcgtactcaggaaggcccttctcccgactgcggcccccagcctggtccactaaatgcagcctgtggtcgggcagacagcattggggtccattaggaagaccaggtttgctgggcataagcttcacaggacgggagaacctgcccatggtggactgtcgttctccacagctcccttcccttgccccttcgggcctccaggatatgtttgcgggggtgggtgtggtgtccagctgttaccagcttctgagctagagctgtactgcctcacgtacacccccacctctgtaaatggtccttgattaaatcgtcctcatatt

SEQ ID NO: 10942 - DNA, 2514 bp, Homo sapiens
aggtcccagtccatctcctggaggcggacagatggcctggaaacctctggctaatcgggccatccgtagagcgggaaccttcctgaggtgtccttgggccacccccaagtgttgggccatctgccaagagacagcgacccaaagccgaaggacaggtggcctggaaagatcccgcccaggtctgggagccccaggctggcctcagactgtggttttttatgtggccacctgagggcgccccaagccagttcatctcggagtccaggcctggccctgggagacagggtgaagggagtggtttttatgaacttaacttagagtctaaaagatttctactggatcacttgtcaagatgcgccctctctggggagaagggaacgtgactggattccctcactgttgtatcttgaataaacgctgctgcttcatcctgtgggggccgtggccctgtccctgtgtgggtggggcctcttccatttccctgacttagaaaccacactccacttctaacagggtttgagaggcttagtcagcactgggtagcgttttgactccattcttggctttctttttctttccagaaggatttttgtgcagaaatgggtcttttgttgccatgttagtcctccttggaaggcagctcagaaggcctgtgaaatgtcaggggacaggacccccagggagggaaccccaggctacgcactttagggttcgttctccagggagagcgacctcgtcccccgatcctgaccgcccttccggcccacgctctcctgtttggcttccacaggcctggacttctctggcttctctgcccacacactccctgcccccagtgtccctgcccctgccccagcacaggtgacttcatttctgtcctctcagctcagtggactcgctcaacttttgtataagtctccacttggtggcagcagcttgctgatgacttgttttaaaactttcatcctaaataaccttttgatacttgaatatttgtaagttttatacatagtttctaatttttttccgaacagatccagatacctaataagatgctggaatgtaatccctggacaatccgtgtcctggcagcatttggtcttcctctaagcgcctggctccgctgttctcaggagtgggttctgaagtctctggagaacaggatacgtggagggttaggaaggggccaggcctagagacgggagactccctcccggagcaggtggaggcacaggaccattcgctaccccatctgccgacacctgcgggggagcccaggcattctttgtaaaccctcctgaccacctggctcaaagaaaacagaagcatggagaccgccaagtattttcaagaaataaccccatgaatattccatcacttttttagaaagaggggcttggggcaggcagaggagagaagggagagcaaactgagagccaagtttccacacggtcctgcaggaggagaggatgcagctgcccagagggaagcaggatcacatttaaggaagtgtgtggggtccctggatgacaccagcacccagtgcggctctgtctggcacccgctcccaaggtgggaggagtgggtgtcccctgtgtgtcagtgggcagctcctgctgaacccgcagctcactagggagcctgacagtggggccatgcgcctgacactcctctctgcttgtggacctggcaaggcagggagcagaaaacagccacttgaaggctttctgtctgcgtctgtgtgcagtgtggatttagttgtgcttttttcttgctgggagagcacagccaccatttacaagcagtgtcaccgtcgtgggtggcgaggacagaacaggagcctctgctctctgtacctatctgggcccggtgggctcccttgtcctggcttccatctctgtctcagcgaccattcagccctgcgcaggaacacgtgttgcttagaaaagccaaatccagccttgtctctgcctcctctggtctcatgatgtgcatctgttaccttgaaactggaaaccagtctatcaatgtctgtgccaattttttattccctccccaacctccttccccatacgactttttatttatgtaggatgtgtgctgtctaatgatgggatgaccacacttttccatgttctaaaagtgctcctctcccgcagggtcccagggctggtggttgctttgggtctacagctacgtcttacccacctcctgcctcaacagcctgtgtggtggcaaagccggtgtggggctggggaacgcagcgttctccaggagggggacctggctctccttctgcaatgcaggcgaaggcctagatgccagtgtgacctcccacaaggcgtggcttccagactccccggccggaagtgatgcttttttgccttgggccctgggtttgaagcagcctggctttctcttggtaagtggctggtgtcttagcagctgcaatctgagctcagccacctacacaccaccgtggccgacactttcattaaaaagtttcctgagacg

SEQ ID NO: 10943 - DNA, 288 bp, Homo sapiens
gctggcaacatcctgcagtggctgggaacccaccgggatgctggccagaacaccggctctgcaccatccctcacccagaccgtagacaccagggaaccacatctaggaggctggcagctcagctgcatcttgccctggatcctcatcaccaactgctcctgctggccaggatcaggccatgggacttttgtgagtcaggcgggagaccattttatgtttattttctttagtgtataagtaagggttttttcttaactttcgttaaaataaaattttaaaaaactattc

SEQ ID NO: 10944 - DNA, 928 bp, Homo sapiens
ctggggcagggagccaggtacagagcagatttggacatccacagagacacccagagtgggatcccttcctgcaggacagacacatatgatgaggggcagaccctcaacaccaactccacgcacatatacccccagatggaacacactgtaccctgagacaggtccccaccaccccacgggagtgccagcgcactaagggccggaatgtcctcaggcttcacagatgtggcataggggctggcacacagtaggagctcagtgcacaactgctggatgaactcaatgaaggcggcagcatggtgtgtgatggcacggcccacactgggtttgaagggcttgttcttccattctggcaggcttggggacctggcacactactgccaactagccaagttggactcagacccaagggggttagccatgacctctgccttgtgtgatcaggtgcaaacagacaacaacccagcaggactcctcttgcagaatctggaattgctgagaagttgcatcagcaagaggggcaaggtcagacaggatttgaggccgccaggggcacctaagctgtgggtgcagagaatgggatgcagaggtagagacaagaagggtagaggtggcaggtatccctgataagggggagaccatgggttcatcctgggattccaccctcagagtcagatgcccttgggatcaccgactaatgcctctccacctcactctggactgcccaaggaatctgtcctgtgctacccacagtgcagattgcaacagggctcctcctccccacccagggccctgattaaggggatggattgcacactgtagtgagacatccatcctgaccccacctcatcagccagggagctccctgaagacaggccatcgagagaggcacacaacaggctgtggtctaaaataaacttttaattgc

SEQ ID NO: 10945 - DNA, 771 bp, Homo sapiens
ccatggcttggatgccctcaggggtgctgacccctgccaggccacgaatatcaggctagagacccatggccatctttgtggctgtgggcaccaggcatgggactgagcccatgtctcctcagggggatggggtggggtacaaccaccatgacaactgccgggagggccacgcaggtcgtggtcacctgccagcgactgtctcagactgggcagggaggctttggcatgacttaagaggaagggcagtcttgggcccgctatgcaggtcctggcaaacctggctgccctgtctccatccctgtccctcagggtagcaccatggcaggactgggggaactggagtgtccttgctgtatccctgttgtgaggttccttccaggggctggcactgaagcaagggtgctggggccccatggccttcagccctggctgagcaactgggctgtagggcagggccacttcctgaggtcaggtcttggtaggtgcctgcatctgtctgccttctggctgacaatcctggaaatctgttctccagaatccaggccaaaaagttcacagtcaaatggggaggggtattcttcatgcaggagaccccaggccctggaggctgcaacatacctcaatcctgtcccaggccggatcctcctgaagcccttttcgcagcactgctatcctccaaagccattgtaaatgtgtgtacagtgtgtataaaccttcttcttctttttttttttttaaactgaggattgtcattaaacacagttgttttct

SEQ ID NO: 10946 - DNA, 337 bp, Homo sapiens
ccagcccatcagcacacggctcccacggagcatctcagaagattgggccgcctctcctccatcttctggcaaggacagaggcgaggggacagcccagcgccatcctgaggatcgggtgggggtggagtgggggcttccaggtggcccttcccggcacacattccatttgttgagccccagtcctgccccccaccccaccctccctacccctccccagtctctggggtcaggaagaaaccttattttaggttgtgttttgtttttgtataggagccccaggcagggctagtaacagtttttaaataaaaggcaacaggtcatgttcaatttcttcaac

SEQ ID NO: 10947 - DNA, 351 bp, Homo sapiens
tcccaaaggggtggccagagccaaagccagctactgtcctgtcctctgcttcctgccagggccctggtcctcactccctcctgcattcctcatttaaggagtgtttattgagcaccctttgtgtgcagacatggctccaggtgcttagcaatcaatggtgagcgtggtattccaggctaaaggtaattaactgacagaaaatcagtaacaacataattacaggctggttgtggcagctcatgactgtaatcccagcactttgggaggccaaggtgggaggatcaattgaggccagagtttgaaaccagcctaggtaacatagtgagaccccctatctctacaaaaaatttt

SEQ ID NO: 10948 - DNA, 116 bp, Homo sapiens
gagccgcagggacccacgctgtctgcgctggctccacccgggaacccgccgcacgctgtgttctaggcccgcccaccccaaccttctggtggggagaaataaacggtttagagact

SEQ ID NO: 10949 - DNA, 309 bp, Homo sapiens
agggtctgggatgggggccaggagattagcaacaaggattcattctgttacttacttgcccctttttatctttccctcttgccccagtcccttctctccagcttcatgtgaagctctgcacagacaagacactcagtgtccttggcagtgctgctactcctcaggtgcagcatacataaccagtaagagactaaatctgcaatatataaagagctcctacaaatcagtaacatgaagaacactcaaaaattggcaaatgtcatcagtgttttaaacagaataaagattccaaacactttgaatagagaa

SEQ ID NO: 10950 - DNA, 432 bp, Homo sapiens
ggggccactgcagccccaccgccacgccccaggggaccagccaggcctggaatgccccctgggcaggaccctgggcaggaccagaggcccacatggatgccactccccacacagcccccaggcctgcccagcccacctcctcatggcatcctccctgtacccaggtcaggctgtccacaccacatgggagcccagaggaggaggggcccgccttagccatgtgaaggtggattggtcgccatctgcacgccaggcggcatccttttctatgaagtgttgactttgtaaatctgcccacacccagctggccatatccacccctcgacgccgggatgagccggctctgcctgtgtcacagtggaggggtcctttagggccaggctcacccctcaccctttttttggttgcttttctaataaagatggaacagtt

SEQ ID NO: 10951 - DNA, 670 bp, Homo sapiens
tgggagcagcttggctgtgagcaccaggccaagactcctgagaacaggcagcccagtcctgcgactcccgcatccccaggaccagacacctgggacctggatacttgatacctgggcatttaaccccctactctgtcatctcagaccccaggcaggaggcccagtgttccaacacccaagccccgtgctagcagcgctccgtgctcttccccaaatactcacggctctaattccccaaacctgaaacttcataccctgggattctaatacctatgtcctgagccctgacactcccacacctgagcctcagattccaatagctcactccctagagcctgacgccggggcccctgacccctgagcctcagattccaatacctcactccccagagcctgatgccggggcccctgacccctgatctacggaggcctgctcccggaccgtgcgggcaccagtgcagtgctgccttggttcctggacccctgggcccatcctgggaccccagatggggtaaggagaggccccagaaccccaaagcagacagcgagacccccagcggcagaggcctccctcggcactccaggcttataatttcgaactcttctggaaggtcactcaggaacaccctccctgcctgtgcaaagagaaaacaagcgccttgtttccttc

SEQ ID NO: 10952 - DNA, 2625 bp, Homo sapiens
gcatgccgggaggagccgccccaatagcgggggtacccctccacagcgaccgagcgacaccgacgccattagctacgcacccctgtaaagcttccagcaactctgggctgccccacagcgtgtgagcctccagctcggggcttccgtattggaagaactcagccgtgtggcccacagctcccaccagggcccctcccacatgacccgtccattcaggtcatgtgggctcagcacacatcctgcaggccggtggctgctggagttttccttctgaagagaatattgaactacactagtgctccagggcaccaaacaaaaagggctcatgcacagctgaatttgggaaaagggattcagttctgtgggaaactcactagggttgatgaaggctcggccgcggcacttcctgactattggctggggtgggttccggtgctggtgagaacccagaaggagagtcagcgcctggcagttcccagcgccctgggcccttcaccgtcctagtttggaggagcatgttcaccacagacgtgggtcagctgccccacacctgacggggctgtcccggccgacacaatccaggcgtgttcagcctgagctaggagagtatctagagggcgtggtgcgggcacgccagggctggggtgctgctgctgcactcacgcggctgggctttctggcgggaagcagttacgggggccccttgcctggactcagcgacctgtcttccagcctggaaggggtttggagtcccagctctggctttagatttcttcatcataaggagtttttctagttaacatttttgttttgttacgagcaatgctggaaaaggtcgctcctgttctgttagtaccaaagttacattgtttcaataagcatagaaatctaaacaacatctgtacattagcatggtgagagcaaggaataaagcaggaaataggagaaaagtaaacaactttagggagcccaggcagtgtcatttaaactcactgagtcactaagacataattctcctaggccagagttaaagaaagtgccttaactcttcttgtgagggcagccactgccctccgtggccaaggcaggacctccaagactcagtggttgagttgtctcctaccaccatgcccgccctccccaggtactgggtccatgccccctgtgcccaccctccccaggtgctgggtccatgctgtttgaaccaaagccttatttaaaggtggtcactggagatgctctcaggccagaactcaacagctatttttgggaatagggatctcccgtgtgcctaacgcagtagctattggtttgaacaatgtccagacaagacctgtacctttgagaatataactgtgtttggcacctgcatagcaccatgaggaagaccagccaccagtggaagcggggtcactgccccacagactggatgcaatgaggggctcacaggaggcccagccagcccgattgtgggctgaggggtctgcattcaagcacgatgttctagaataggagtttaacgtgtctacgtaacctagaatgtggttattaggaaaggggctgtgcatgtgggtgcagctggcggcacacctggtcaccagatggccagaagctgcccatcagccctgcccagatgtcagcctgggagctcaggctgctgccgctggctggatgccctttggtgaaatgcctgttttcagctaagaaaggagaggccaggcaagcaaagtcatgccacaaagcatatcagagacccccgcagactcctggccccgtcccgccccctgtctgagttgtgtttttgttgctgttcctctgttgatggccagctctgctgttggcatgagccactgatgttcatgtgagaattactgtttttaagtgtctctccacttaggtgtcctcagttcccacttttgctctcatttgccttcacagaggccactccacctgtccggatccagctgtctggtcatggtttggtttatttattttgtccttcaggggctgttttgccctaagaatgagggggcttcccctggtctgcagttcccaactttatcccttgctggccatgcgagcccagccctggtgcctcatgggatgggggggtaggggtccccaggatcttctggaggaaggtggccatggatggatgggctgtatctgtgttttccctctgggagtctcatgggtccagcatcaggcctgaggtcagcaacagggaaagagggtgggcacggggagggcttggccccgcctatctagaggcttgcctcgggcccctccttggggaaggtttgcgtgcagagctgcaagggagagggttccagaagcattgccttttgcctcgtctaataggatccttaggacactgtgggctttaggaatgactatagatgctcacacgtgtttaaagtgacatttggagatgctctcagtcctgtggcatctggcacgaagtctccaagaagccactttgcctcttctcccttcaagcacaagctttactgcaaaagggccagtcgcgtttctatttctctcgatcccaggcttctgcggaccgacgatacgtttaaatgttgttctagtaaatattcttgaatgtattaaaatggctgaaac

SEQ ID NO: 10953 - DNA, 867 bp, Homo sapiens
tgattcatggagtttgccccttcctaagggaaggagatctttatctttctggttggcttgaccagtcacgttgggagaagagagagagtgccaggagaccctgagggcagccggttcctactttggactgagagaagggagccccaggctggagcagcatgaggcccagcaagaagggcttgggttctgaggaagcagatgtttcatgctgtgaggccttgcaccaggtgggggccacagcaccagcagcatctttgctgggcagggcccagccctccactgcagaagcatctggaagcaccaccttgtctccacagagcagcttgggcacagcagactggcctggccctgagactggggagtggctccaacagcctcctgccacccacacaccactctccctagactctcctagggttcaggagctgctgggcccagaggtgacatttgacttttttccaggaaaaatgtaagtgtgaggaaaccctttttattttattacctttcactctctggctgctgggtctgccgtcggtcctgctgctaacctggcaccagagcctctgcccggggagcctcaggcagtcctctcctgctgtcacagctgccatccacttctcagtcccagggccatctcttggagtgacaaagctgggatcaaggacagggagttgtaacagagcagtgccagagcatgggcccaggtcccaggggagaggttggggctggcaggccactggcatgtgctgagtagcgcagagctacccagtgagaggccttgtctaactgcctttccttctaaagggaatgtttttttctgagataaaataaaaacgagccacatcgtgttttaagcttgtccaaatg

SEQ ID NO: 10954 - DNA, 790 bp, Homo sapiens
ccggcttcagtgcctgccttggggtgaggaagacacctctgccccagtggattagcaagtgtggcaggcttaacatgtccaggttctccccaataacattgtccaggttggttttaaaattcccaggcagggggagagtggcatggggagtgacttcttaatgggtaaggggctgcttacttctggggtattggaaatgtttggggactaggtagaggtgaatgtactaaatgccactgaatttgtatacttcagaatgtttgttatgtaaattttacctcaactaaaaaaaaaaatgcccaggtactgcttgtgcaggtggatttgaggttaggcagatgatgctgtccatcccgtacaccagtgggaagagggtgagggctgatccagagaccctgagcctacagcaaggctgtggtgggtcggatggtctttggatgtgtcagcttagctaggccacagtcaccagtaattcaatcagacactaatctaggtatttctgtgaaggtattttgtagatgtgacagaagtccattcccaattgactaagtaagtgagattatctcagataatctgggtcagcctgacctgattagtcagaaggcctaaagaacagagctaagggtttccctgaggaagaaattctgcctgaggacagcagcccagtgcttggcgagagttcctgacagtctgcccttctgatagcctgcctcacagagtttagacatgactagccagctcctacaatcactgaagtcaattccttgcaataaatctcaatatatcccct

SEQ ID NO: 10955 - DNA, 564 bp, Homo sapiens
ttttctaagttgaacagaactttgtccttttttctttcaggttatctgagttcattggagtgggtgcttgtgcatatatgctaggtatcttttgccatctttctctttagatcaggggaaatgtttaagctaaataaatctggggggttttttgttctgttttgttttgttttctttgagaaaataaggactttgtgttcatttgaagtttgctttggctaaattttgacaccctgggggatgtcctgggagaatgccagtactttgaaatagcacagctattgatgagattttaagctgctgttcctggccagttgcaggttaagccccagaaaagttcaccttggagaagctccgagaacacacagattgtgtctcattcatcttcagacacaggcacatagtgtggcactttgttcagttaacatttgtggagctgtcatcagctcagctttaacaacacaggtgactctttcccttgataaagtcataggtaattcaggggctgggtgcggcggctcacgcatgtaatcccagcactttgggaggccaaggcgggcggat

SEQ ID NO: 10956 - DNA, 166 bp, Homo sapiens
gtgctccaggaggacaaggctgacaagcaatccagggacaagatactcaccaggaccaggaaggggactctgggggaccggcttcccctgtgagcagcagagcagcacaataaatgaggccactgtgccaggctccaggtggcctccctggcctgtctccccactc

SEQ ID NO: 10957 - DNA, 145 bp, Homo sapiens
aaggcacccagacttcaaggacccagacccaccctggggggctgcaagggcaagaagaggaggctccagggttggggcgagggccgacctgtccacccttccctggaatctgctcaataaagcctggggttggtcccccacccgc

SEQ ID NO: 10958 - DNA, 97 bp, Homo sapiens
tgccctccccaccatgcctccttcccaggacccaggtctgctgcccaggaaccctccagacctcccagagagtgaataaagtgtgacttgcaacttg

SEQ ID NO: 10959 - DNA, 138 bp, Homo sapiens
gttcccagcccccaccccacccacaggggcctggagctgcaggatcccaggggaggcgtctctctctgcatcccaagccatccagcccttctccctgtacccagtaaaccctcagtaaatatcctctttgtcaaccag

SEQ ID NO: 10960 - DNA, 6841 bp, Homo sapiens
cacccagaaacagggagggtcctcgaggaggacacaccagggtctcagccttttggggtgaacgaggatgaggcatctgatctattcgctaccgggactcctccaggctcccgagaggagtcgggacccttcggcttggggtcagctcagctccctgccttgtcacatttgtctgcattagaaactactgaagaaataaaagttctttttctttgctacacactttggtacctatgaacctagaacttgaagtgactcctacttatcacgtaaatttttatgtctgatatcaaacacatcttagactccccagaatggaatttaaagatgttcagtgttgggtaacagattgccctaagcattgccacatattctgtctagtcactgctgattttctatgtctttgctccatactgctgggggatgggagagccacagtgtgtttcttttgtgcacttcgcaactgacttcttgtcctggggttaaaagttgaagatattttctgatgatattaaaagttgaagatatttctgcacttgggccctcctctgggagccgcacccacatgactgccctgcctctgaccagtctgttccggggccccctcagccaggtgggaatgacggacacgtactatccaagtgtatgggattaactaatcattgaaggcattcatccgtccatcattggaaagatttacagtgattctgaaggacaggccgtggagttttaggtttcaggggcaagagcagttttcaaaagtctttgagtccagtgtgcacgagtcgacaagcagtacctggcatgcaggagcactcatgggtgagtccgtctcaggtctcgacaattagcagttgtgtgacagtcattctggttccttctgcctgaccctgggagacatatcagtaatggatgtacaaaagcaggtctgttttatgtcttagtataatttcagatgaattgtattgaaaaaatgctgaggaatgaatgtgtcaaaatgggttaactgtgtatattgactttcatgtcgtcatgcatctgtcatgaatgaatgatactttgcactgggctgtacgacagtgaggaccttagggcatgaagcctttttcctggtcccagcagcatctgccctgtgaagtttgttttctcccactgcctccaggccccactgatacccccaaatagatgctgggttatgagaaccagcgaaatcccccatgtcatcagtcttaaaaaaaaaattttacaaatccacgtatttgtcccattcttggagtagttttagtgtatgtctttacattaactactaacagtataaataacttgacatcgtaattgtctgcatcctgtccttgatatttttagcagttccaaatctttgtttttgtatttgtttgctgtgttcatgggcaaagtaagtactttttaatgcagttattttgagagtttggaagataattaccaaaagggtccattatttcataagagttactttgcaaaaaaaaaaatgtgggtttttttttttgtctatctcaactactagttggggtttaaattaacatacattttctactatctgttatttccagtgtgggaggagggatgtactacttacatgcattctccttatttaaaaaggaagaatagtattcaaattctgttgaaacacacacacacacacacacacacacacacacacactccagaagcagaaaagccattgttcttaaagagtgaatgtcttcccagccctggttaattatagctgtgactgatgccgttcccgtctgcatctcaagctcataggttctcagcatgtgcagttgaggatgcgctgggcctcatgcctgttctagatctccaggataaagggcctgctgttgactccaccagggtctgggcttagcgtctaatatctcgtacctagggcgtgagctgcacaaacgtgttcagaaagattattcaactttcccatacttgttctaaaattgagctgatccgcatctctttcaaaaactagaatttctgctctaagaatagaacataaggctccactcccttttagaaaagatatatgaattggaaaatgctctgaaagtccttttgcttcaaacaaaagtgtaaacttttacacttccccaactcacatttgatttgtaatgatatggttgagaagtacatctagatgtcatttattaaaagtgctttgtaagactagattgagctgtttctgagggcggtcaccagttgtgttggggtctggtttgagtgccttctgccaaaatgttgtgatggaggtgtttctgcgaccagacacaggataccgctgtgtctgcacccggttgcctgcatggccagaggaaaagtcagttggattaaacatcatggtatacttggctgttgtttttttttaattttttaattttttgggatagggcctcgctctgtcacccaggctggagaacagtgggatgatcatggctcactgcagccttgaattcctaggttcaagcaatcctcccacgtcagcctcctgagtagctaggactacaggtgcatgccacctttcctggctaatttattttttgggtagagatggggtcttgaactcttaggctcaagtgatcctccttccttggcctcccaaaatgctggaattagagatgtaagccaccatgcccagccatagtacttggatgttttagaaggttttccaagtattacataattcctagatgttcacccttattacactccaactattaaaaaggtcaaaattcagcctattttttttcattattttagattcctgtggttgggatattttaacattgatgagaaaaataattgaggttgatatttttacaaaatcatgcggtaataagtcttgatttcatgattcaaaagaatcaataaagcctaaaaataatagattactttaagctgctatgtaagatatatatggaataaattaaaaacctttgtgaattcaggtttattatttttaacctaaaacattctctttggttcattcatcccctcatgtcatgggggctcattggttttccttctttgtcatatttaagtatgatttttcaacaaaacttctagaagtcagcttattatgtcaccattcatgcaaagtgctcatgcctctgattggtccattcactgacgtgacaatttcaggtcctatgtttaaaaagaaggggctggccgggcacgatggctcacgcctataatcccagcactttgggaggccgagaggggcggttcacgaggtcaggagattgagaccatcctggttagcagagtgaaaccccgtctctactaaaaatacaaataaaaattagccgggcgtggtggcgggcgcctgtagtcccagctacttgggaggctgaggcaggagaatggcatgaacccgggaggcagagcttgcagtgagccgagattgcgccactgcactccagcctgggcgacagagcgagactctgtctcaaaaaaaaaaaggaggggggctaaatatccagtgagatgcactgaggaaaggaagcattttgctgaagacagcagcagcaacaaacaatggtctgtttgttgcaaacaagatgtagcttgatttctggtctgacatatgccatatacagatattagaaacgactgtttgaaggccacactggtcatctacaaagtaatgtttaccaattgacgacagggatttaactagattaaaaagatcaaagtgtggtttttctctgctttttaaaatttcactcggaatttgtagctgggccaattcaacacattttacttttcagtggaattgatttttctaatgtttcagaattttaacatatcaagaagaaaacaacgttctcaaagtctggcctctttagcatgatgtaaacctatagaaatgctttgaaatgtgctggtgtaagataagagttatcttgtatgatttaatcatatgcagtgttgtctcagttacgttcagggaaatgtttctgtgtcattcagagatgcttgatgaattaacacctcccaccctgagtgaggggttgacttgttgggagatgatttgggcttcactgggatctgtgacaggtgggggctgggctgggtgtcacaaagagaatagtggtagaaatcgggcgaaggaagaaagaagttactggtaaaaatcattacaccataaagcaccaaggaaataactgagttaaaataggtgaagtttcttttttcccccctgtaacaggagagttttccttatgataattattctgagacttggtcactttgtttttgaatgtggagctgctgaactcattcagaagccatttgctgcctatcaggactttctgaagaagttcttttgcctctgcctaccctctggcaccctcccatggaggcacaggggacccagagctaaagcattaccaggccatctccaaaacaccccgtgtgtgtgtgtgtgtgtgtgtgtgtgtgtgtgtgtgtgtgtgtgcactttgcagcccccgaggtggagaggcagtgtctggatcactgtgaatgcattgccccattggtcagttggggacactgttacaaatccactgaagtcctggtaaaactgtcaagagtaacaggcctcttctgttctaccctgctcacttccacggtgagttaccagcctgggcaacacagcaagaccccatctctacaaaaaaaatttttttaagtaattaaccgtttaaattttttcctaaagatttaacatgatttttccctcctatgtaaagtttactggagagacttgaattacttaaattcatgttaatatgatttttttttaatccaggtcacattttaacaaagtttattatgaaacaaatgaaatttgaactctaaaatggtactccttggcttcctcaagtcacaatgaactttatattttctttgtccttaaggactaagatagttgttttatttcagccgaatcacagagataaccactcctgcaggcccccacagctggcccaaaggggctgtctttctgacctggctgtgttagcactgattgagaaacgcaggctcccaaattttaaattgcctttattaaaaacacaaactacagaaaatgggttaagagtatacgcatttcatcaaacacatataggggaaaaaatccttcaatttagagttaaataactcagctttgtatagtagagttagcgctccagtatctaacaatctcagaatcatctctgaaaactggtaactatgcttccatttttaattttgtcctaaatatcagatgtctttgatgtaagggtagggaatggagaaatattttcaattgtgtatttgtattacaaagaacttgaaatttactttcttagttgattatattaaatgatgtatatattatatgtggtttataagctcaacactggccatttttttagttttattgttaaatggtatttttctatgtttaattataatagatctggctttttctggatagcataaagatcactgaactatatatatataagaaacaagagttctattttagcacaaaggcattttatattatttattgaatccataagtttgttttcgtcaaaaacattccatattatttctgctcctttttatttgtatagtttgttatttaaagaaatggcagtccttcctgttcttaatacaataaaattgaaataatgcacctagtaatgtggccgacatctcttctcaccaccatggactgttttcaacaacagttgatcttctggtctgtgctgagaggcgcatgcatgtctttcgtcacgtcgggcagcacacctgctgtgaaatactgctttcatctacctcttcagaaggcttcttgcttgttgacaagtaccgcaaaggctttattctggactggctatctcataaaaggatttctgtaagactttgcagtgtcattccctcagaacctaggtttgtttctaaagccacggtattgtccaggagcccctgtgtgtggggcaggtagctatccctcccatgtcattagtaatcctttaggatttaaggtacaactggacagcatcattccttccccttattgtgccaaatccccaccatcagccttgccattgccttaagatttgattattgcacccaattacctaaccactaaacagaaaggccaccttcactctttgaaaaaggcaagctgtgcttagaaacactgcttttaagagtagcacatttgagtgtgactttttccccccttcactatttcaaaatggttttgaaatggggtcttaaaggtaagcgccctcatacatgactgaaactttgtgagaggtcttatatttgaatggacccttaatgatttatgtgaaatagaatgaagtcctgtctctgtgagagaacgtgcctcctcactcatttgtctctgtctgttttcatagccatcaatatagtaacatatttactatattcttgaatacccttgaagaaagaaatccgttttctattgtgcattgctatacgaagtgaagccagtaaactagatactgtaaatctagatattgtacctagacaaaatatcattggttctatctctttttgtatctgttgtgccagggaaggtttataatcccttctcagtatacactcactagtgcacgtctgaaatagtatcccacgggagatgctgctccacgtctgaggtcacctgccctgtgtggggcacaccaccgtcagcaccaccgtttttacagttactttggagctgctagactggttttctgtgttggtaaattgcctatataaatctgaataaaaaggatctgtacaa

SEQ ID NO: 10961 - DNA, 599 bp, Homo sapiens
cctccttgaagctgcccttgaagacttcccgactctacaataacttggagacagagagactggccaggcctccccggtggccagagccagccagcatggccaccctcaagaggcgagatgagcccacagaggcatatcctgcggggatgctgggctcccagtgtggttggcctgaacaaaataaagtgttgactcctgggcatctgtgccttctctatggccttgctacctgggattccagagagttgatggggtgcagataggggtaggactgttagaatagaaccaacccaaactgtgtgtagtttggggtgtatacttctatttctcttcctacatgtctacatgccatgaccttcctcctcctcttcacttggccagtttcagctcacttcctccaggaagtctttcctgatatatcaaactgaaacaaatgctcctcctccatgctcccttaatccccatgcttgtcgattatattcctttgccaattcatttctctatcctgtgtatgtataagtgtgtacaagcattcaagaaactgatgaatgatgaatgaatgaatgagccaaagaacaaataaatgagcccacacaccc

SEQ ID NO: 10962 - DNA, 173 bp, Homo sapiens
agagagctacacttgagaaggggacttgtgaactcaaccacaatctcctcgagacattcatccagagaccatgtggcacttgattgaaaccccagaatgtcgactgtcttttgtttagactctttatcaaaggtttactgttttcttccctgtatttattatatttaaaagtg

SEQ ID NO: 10963 - DNA, 399 bp, Homo sapiens
gagtatttcccatgctggagtcggcgagaagggccgaggcggggcctgggcagactgtggtccggtccagtccctaccggtgttgtttccatgctcagaaacctgcctcagcggaaagctcttatttgggattttatatcatgtcgggtccctctttcccttggttattgtaaatggaaacttttcggcttgtatttccttagattttttttttttccttccaatcatttgcttcagagactcctttctggcctaacagcgcattcctttgattggtccttgagtgaccagagacttagtgcccttgtaagtctgtcttctgttgctacttgtttttttcagtgctctgaaatagagtaactaaatggttatttgtctgaatataataatgtaaaactt

SEQ ID NO: 10964 - DNA, 266 bp, Homo sapiens
actcgttgtgaggtactcagtgttggctgaggtagaagctgccaccagagactaaagggaaggctgctatggaggaactacagagaactcctttgccaggaaagaacatcaacttggctgtcctgttttgaggacgataccccacatgaggacttggtataaagattcctgccctacgtggcattgtcccattttacatccttccctcatgacctggcctgatgtggagtagctcctgagtaaagaagttacccttttgaaggtga

SEQ ID NO: 10965 - DNA, 181 bp, Homo sapiens
acaggggtgcggcacggaggagcgcatgcgtgcttatctgcaatggaggcgctctggaggctgtggtgtgttctctccttctgcctccccctgtaacctgtgtgaacccagcacccatgtgaactggtccgtgcacagtcagcacaaaaaactcaaacgaataaaaaagagaaagtctggt

SEQ ID NO: 10966 - DNA, 331 bp, Homo sapiens
ttgtggatagtttaaagtttaaaaaataaagttcttgctgggcacagtggctcacacctgtaatcccagcactttgggaggctgaggtgggtggatgacaaggtcaggagttcaagaccagcttggccaacatagtgaaaccccgtctctgctgaaaatacaaaaattagccgggcatggtggcgcgtgcctgtaatcccagctacttggtaggccgaggcaggagaatcgcttaaacccgtgaggtggaggttgcagtgagcagagatcacgcaactgcactccagcttgggcaacagagtgagacttaatcttgaaaaataaataaatg

SEQ ID NO: 10967 - DNA, 2964 bp, Homo sapiens
aaaccaatttctacactaaagttgtcaaatgttagaagaatcctgtgttcagttatgagactctttgcatagtatagggacttgaaagttttatgagacgggtgtaataatatctccacctgtgatttgggggtgggactcttattttgggtagccatttattgacttcacctttttgccaaggacgtttgtctcaagggaaaagcagttttctgtggggcttattaaaggaatgttggtttacattgtcttcaaagacaagtatagaagctgtatgtgtaagggtgacttaaatcatatgtcacattgtctaaactattcagacacttggagaatattctccttgaattaaaaaagatgattaagaaggatgctcctacaactgtatcctgacagttaagtcacagcttaatgtgtagatatgagctgtttacagtggtgactatatataattggggagaagaagggaagagagcagcagtagcttaagcctgttgctaagaaatttaatttcttagcaacttgtaatttagttatcaattcaatatagctctgttgattaaatagccgatagtattgtggctctcctctttgactatgaaaatatagagaaagttttttctttaaggcttttttgccttgtgccactgttgctccttggtttcccttgcgtaattgataagcccagttattcagtaatgtttacaaattaattgactttgatagttaaaagattatgaggtaacccatctgcaatttgcctgtgggagaagcatcctttagttcatcttaaggaagtgctttatcagctaaacccaacattgataactttggtaatttttttaaaaagttatacttgtattagcaagtttttttttttttcccccaccgcaacctccatctcccgggttcaagcaattctcctgcctcaccctcccaagtagctgggattacaggtgcccacctccacgcccagctaatttttgtatttttaatagagaccggttttgccatgttggccaggctggtctcgaactcctgacctcaggtgatctgcccaccccagcctcccaaaatgctgggattacaggcgtgagccacggcacgcagccagcaagttgtttttaaatgttaatatagaaaacagtgaaggattagctgaaaatatatgagcaggtgacattgaggtttactgaaatagccaatttgactggtgcttagactattgtgcagtaaacctaaaaggtagtggagaattgcttcctgctagcaggaagccttcatcttcttgagtacccaaaccaggcttcaggtgtcctttgaggatagccaggtttgaaatttttagtttctcaggaagagctcttctatgtggcaggggctgatagggcaaaataaaatgacaatttctttattgctacagagtatcctctataagttattaaacgagtgtaatggtataatgcccttccatcacacaacaggacaccaccccagttttgttttctgggtttcttccccctttgtaggaatcagataccttttgtagaaaaaaatggcttatgccacgtaaaggtgaatttttagaaaccaccttctaggcgtttttggaacccttactgaaatccctccccttgttacagatggcgtagaagtcacaagtctgttaattggactgttgcttctttgcctgttcctgctttctctttctgtctggatagtcaggaaaagatttaatgtttaatatttaaacaaaatatttaatgtctatacagtaaaattattcaaacttcaaaccagtattgaaagcagttggaaaccagctaatagtttcttaatctcagatttcgagatgaatgtaaactgtattcttttgaaatgtgcaagtgtttgattcatgccatttgataaacttctgccttgtagtcattgtttgatgggaccaacttgtaaagtatgagccttaaataaatctccatgctgaaaaatgtgttctaatgcaacacaaaaacatgaagtgactgcccagaggtagagttagtgtttaggtggaaagggagatgacagctttccaaagaaggacctaaaacacaccaagattgtcttctacaggaattgctgggcaggtctccgactaaaggtcttatgatgaaaaggaagaaacaagcccccaacacaaggctctgatactactggtaaatgtaggagagaattaagaatctgttaattaaaatccaaacagagcttatttcagtagtcaagttacctgacatgataattatttctgcaggataattgatgttttatgttcttttttggactttatcttcttgcaaaaatttctacaaaaattgttttcttcatccttgtggtgcttattcatctgagccgtctccacagtcccaatgcctctgctttttgttttacttttgtagcataaggtttttgcttttgctttgccttaagagttccctagggagttaccagggcttttcgttttgtgtagcttttgcagcatggatcaaacattggcttactgtgctaatgtgtgaagagaaaaaattctctaaagcaggtgagctttaatgaacaaatgtgtattttatctgagtttgagtagggtgcgttgtggattttgttttttgggttttttttttttttttgtaattatatgaagaaagtccagttctcataaatattgatcacttaaaaaacttactctttcttgaaaaggtacacatgtaaaatttaggaaaataactaaagtaggggctggaaccataagaagaatgtttatcagcacgttcatttattattttggatttggaacttggctttgtttttcaatagtgacaagaatggttcagttctaggaatgttctggaagatgctgttaattttactttaaaatgagaatctggtgttactgtattttatcgttttcaataaaacttcttaagtgtt

SEQ ID NO: 10968 - DNA, 652 bp, Homo sapiens
gggtggtggcggcccctgaggcagaccaggccaggcttcccctcctacctggactcggccagctgcctccagggaccgcccgtccatatttattaatgtcctcagggtcccttctgccatctaggccttaggggtaagcaggtctcagtcctggcaccatgcacatgtctgaggctgagcaagggctgagaggagaggcttgggcctcagtttccctctgtgaagtggggggaggcaggccttcaaggagggatagaggtacaaggcttcgtctcatctgctgtctgagcatccaggcccaaaggcactgagggagtcaggagctggggctcggcacatgcagagatgacagggcagggggcagtcttcctccccctccccgaccaaacctcggggagccctcctgtgcccctccctccttgttgtccagtgctgggctccccaccccgaggtcaggctgcccaatcctctgactggatcaccgggggcttcttgcctcagttcttccctctgagcccccaggccctcccgcatctcaggttggggatggggacatggagaggaaggggccgcctactcctgcaaatgcttgtgacagatgccaggaggtagatgtgtgctggccaataaaggcccctacctgattccccgc

SEQ ID NO: 10969 - DNA, 364 bp, Homo sapiens
atgcagagaccccgcagagctgcattgactaccagatttattttttaaaccagaaaatgttttaaatttataattccatatttataatgttggccacaacattatgattattccttgtctgtactttagtatttttcaccatttgtgaagaaacattaaaacaagttaaatggtagtgtgcggagtttttttttcttccttcttttaaaaatggttgtttaagactttaacaatgggaaccccttgtgagcatgctcagtatcattgtggagaaccaagagggcctcttaactgtaacaatgttcatggttgtgatgttttttttttttttttaaataaaattccaaatgtttataaagagtca

SEQ ID NO: 10970 - DNA, 1782 bp, Homo sapiens
gatgcaggaggacgaggagtgaggggtccagagggtgggggggcgtcagccctggcctgcatgatgggttgcctgtgcgccagagtgactcacaccctgggaaaagttcccgtgggtgggggcgggcctggcttcccatctccatggcaacccaaccaaaccaacaacacagctggggcgggccctgtggctgggcggcagccagtccagctcttgcttcctctggcccgtcctgggaaggggggtgtctagagcccaggaaacttcttcttccgtggcttttggggccctgggccgctggaggaagctgctcacttctccctggaagtccccaggacagaccgatgcccctgacagccccgtccaccagccacataccctgctgttcctctccctgcctgttctgcatgccagtccttccgtggtaccccatctgtctctattgtccccctgccccaggccccgggatcagctgcccccccatccccgctcccgccgctactccggggacagtgactcctcagcctcctccgcccagagcggcccccttggtacccgcagtgatgacacaggcactggcccccggagggagcgacccagccggcggctgaccacaggcaccccggcctctccgagacggcctcctgcctgcgcagccagtcccgagaccggctggatcgcggccggccccggggggccccaggaggcaggggagcccagctgtcggtccccagccctgcccggcgggcccggagccagagccgcgaggagcaggctgtgctgcttgtgcgcagggatcgagacgggcagcactcatgggtgccaaggggcaggggcagtgggggctcgggcaggagcaccccccagactccccgtgcccgcagccctgcagcaccccggctttcccgggtctccagccccagtccagagttgggcaccacaccggccagcatcttccgcacacccctgcagctcgacccgcagcaggagcagcagctgttccggcgcctggaagaggagttcctggccaatgcccgggcccttgaggctgttgctagcgtgacccccactggaccagcccctgacccagctcgggcccccgaccctccagctcctgactctgcctattgttcctccagttcctcctcttcgtccctcagcgtcctgggtggcaaatgtggccaacctggggactctggccggacggccaatgggctgcctgggccccgaagccaagccctttccagctcctccgatgaaggcagcccctgccctggcatgggggggccactagatgcacctgggagccccctggcttgcactgaaccctcgaggacctgggcacggggtcggatggacacacagccagaccgtaaaccctcacgtatccccacgcctcggggcccccgccgcccctccggacccgcagagctggggacatggcatgccctgcactcagtcaccccgagggctgagccagattcctggatgtgatggaccagctcagctgtccccagaccccatcccttctccttttcctttgtggccttaacccttctgcatcagggagccccctctgcctcttgagtaccagacctcatgggaccagaccccttgggaccacatggcacaatgggacctctgttgtacattccggttgggggatgagcgttgctatttaattactaatattattgaatgccttagaggaggccgggcgagcccggtgttctgaagacctgtggcccagcagagcctctgacagtaaagttttgctccagc

SEQ ID NO: 10971 - DNA, 333 bp, Homo sapiens
gcccccactgcaaaaaaacaaaaaacaggttaagaaaattacttgggtgggcagacttaggaacgctctactcggtaaaagcgttatacaaagtcataggagaaaaatatgggacaattcatgattatacttaatctaatttgattagtttataaattgagtcctaagtattaattattgccaccatccaactcattgagtcttatggttcacatcttgtttcctatagaaatattctgtattctgggatcaatttccaaatgcttttttatttctgtaagttcaaattaatgtattatagaagttatgagttaaataaacattggaatatca

SEQ ID NO: 10972 - DNA, 582 bp, Homo sapiens
ggcagggagaaaggaacatccggaacagccaaagaaactcagaagagtcccggagctcaaggatcagagtaacacaattttcactttttctgtctttatgtaagaagaaactgcttagatgacggggcctccttcttcaaacaggaatttctgttagcaatatgttagcaagagagggcactcccaggcccctgcccccaggccctccccaggcgatggacaattatgatagcttatgtagctgaatgtgatacatgccgaatgccacacgtaaacacttgactataaaaactgcccccctcctttccaaataagtgcatttattgcctctatgtgcaactgacagatgaccgcaataatgaatgagcagttagaaatacattatgcttgagatgtcttaacctattcccaaatgccttctgttttccaaaggagtggtcaagcccttgcccagagctctctattctggaagagcggtccaggtggggccggggactggccactgaattatgccagggcgcactttccactggagttcactttcaattgcttctgtgcaataaaaccaagtgcttataaaat

SEQ ID NO: 10973 - DNA, 3843 bp, Homo sapiens
ctcaccttgcagagcgccaagtcccgagtggccttctttgaagagctctagcaggtgacccagccaccccaggacctgccacttctcctgctaccgggaccgcgggatggaccagatatcaagagagccatccatagggagctggctgggggtttccgtgggagctccagaactttccccagctgagtgaagagcccagcccctcttatgtgcaattgccttgaactacgaccctgtagagatttctctcatggcgttctagttctctgacctgagtctttgttttaagaagtatttgtcttcctttgtctaatgtgggattcctgactcccttcgtccaaggcaccggtgtgtgtgtgtcttgcactccagagctgacctccaccgcccagcctgggaagtcattgtagggagtgagacactgaagccctgagaagccagtgccatcatccccaccccgcccagggttccggaacattcattcccccaccggtgaggacctggcatgcagcgaagcagcccagcccggcggatcccaggccagcacgcctgccggcttctcatcgtcagggagcccgcccagagctcgtgacgagcaagtgctgggtccccgccaggcaccccgaggcggcgctctggctggcagctggtggggaataggcagggcagctgtggctggggagagactttaggcagaagctgtgatgcaggctgactgccagccgaggggctgggtagtgccgtgcgggagctgatggtacagggcactcgctgtccccctccggccaccctagaccagggtccgagaggcaggcaggagccactcatgtcttccccattgcccgacgcccatagacgctccttcctgtgtggggctggggtactccctggtcgtactgcagtcagcacccgtaacccggctatgaccagggatctgtaagccctgtggctccacaggtgctgcttctcactggcccagactctgagctccaccggcccagtctgcacggcccatctgcttcaccttccctcccagccacgtgccagtggccacagcccacttcccaacccactgttgtacccaggcctcactttgctgttgcccttgtccctcttcgggccctgaattttctgttccctgggggccagccagggccctttgtgcccctcccagcacaggcctgatgcaggtgtccactcacaggtggcgctcacctaggctgtcacaggacccacctccatgccaggcaacagagggccacagaaccacccccacggctcactccttggtctggggccaccttcttgccctttctttttttttttttttttttttttccgagatggagtctctctctgtcacccaggtgggagtgtggtggcacaatctcggctcactgcaacctccacctcctgagttcaagcaattctcctgcctcagcctcccaagtagctgggactacaggcatgcaccaccacacttggccaatgttctgtatttttaatagggacggggttttgccatgttagctaggctggtctcaaactcacacctgggattacaggcatgagccactgcacccagccccttcttgccctttcttttctccatggctgatgctgctgtggccagccagggcccttgagatccttccagtttggctgttatgcaaagcaggtgatttgtcttaatcagataaaagatagaggctatgggggcctcaagatttttggagagcagaggtggtctctggcaattccatctggttttgagaaacttagcagctcacagagcacagagatcctgccttcttcctactatcaggctgacctaatggggttgggctgctcggcaactgcttgggtcaccttgccccaaggaaaccagccctgggtgccacccagccacttagggtctacagggtgggactccagacctagagcgtaagtatggatgttgtggccctgtgtcttcctagtgtgacccagccaggagcggaagcttcaggcgtttgtaaagtgaggtctggctctgcctcctccgttttttttttttttctgtttctgtttctgttttttttttgagatggagtctcgctctgtcgcccaggctggagtgcagtgtcacgatctcagctcactgcaacctccgcctcccaggtacaagagattctcctgcctcagcctcccgagtagctgggactacaggcgtgtgccaccatgcctggctaatttttgtatttttagtagagatggggtttcgccatgttagccagactggtctcgaactcctgacctcaggtgatcctcccaccccggcttcccaaagttctgggattataggcgtgagccaccatgcccggtctcttctcagtcttgaagcccatccctggatttccaccaggagttactttcctcctgacctgtaaatttgttctttaacaatggctgcaggtgggagcatatggtggtttataaaaacgctgtcgggctttgtttccttctttagctgccgtgtctacttctgaagtctgggaagtgccaagccacgcggcctcaagggagctggctggtgtttgagctgtggcagaagcacctggggctccagggagcaggctgggaactgcaggaccttgctcagccaggagcacttccccctccttgaggcaggaatactgaggtgcctccccacagatggagaaggtggagaggaggatgggcctcaggagcatctcaagccccagtagcaggagaaagaaagaaagagatgcctggttttcacagactggttcctgtggctgggatgactgcatccttttttttttttttttgagacggagtttttgcctttgtcgcccaggctggagtgcaatggcgtgatctcggctcaccgcaacctccgcctcccggattcaagcaattctcctgcctcagcctcccgagtagctgggattacaggcacgcacctccacgtccggctaattttgtatttttagtggagacggggtttctccatgtcggtcaggctggtctcgaactcccgacctcaggtgatctgcccacctcggcctcccaaagtgctgggattacaggcatgagccaccgcgcttggccagactgcgtcctttttaagcgaacattttagggcctgggagtttgtcaagtaaggaagtctcaagcccaaagagcagcgtcctgaccatggtggtttcattacgagcccttctgctggctctcaggcagaagccccacagcaccgggaccattcatgaggtcactgcccagctcatgatgtccgtgaggctgtccttttggccagtagccgtgtgcagctgtgtggcacagatggcttcgttcatcctgatcaaggccccacctcagccacagcagtccccccaacctgtgttgtccaccctattattcatgtacctgccaggccctgctagatagcaccccgtggcattacataacacttcatgagtggctgtgtcttgtaattttggggacaggtttctctctttccctctcttttttttgtcaaaagcccagagactgacaaccagctgcagtgtctaagtgttcctcactgacagggtggggcctcaccacccctggagggagcagcgttggcagggagacagcctggcccagtgaccctgggcccaagccagcccctccagggctttcagggaagcgccatccattttcaaagatgtcaaacgtcacttcttcctgtagggcccgagtcctgcctcctatcagggccagatcatagaaggctattttctattctggggaacgattataacttaaatgattgttttaataaaaattctaagctgg

SEQ ID NO: 10974 - DNA, 859 bp, Homo sapiens
gccctcaaagtaggttgttcccaggtactctctatgtggtgatggtgctgccctctgtgatactaacccgtgcatgagcttgcctgtctctgtcctcgggccacactgagcccttacgagggcaggtggtgcctgggtactggccgcagcatgctttgagtctaaaagtaggcacccaccctgtgaagccagaccagcctccagggccccagaagactgcctcgttccgaagagcatgtcatggggctgtaggaccagccattcttcccatctcgggtcattgttgggctggggaaggttatggcttcttgtccagtcaggtgtgtctaaaagtcctttgtcttggtggcatactcctagcatggaaatggggtcaatctgggcactttggagactggtgtgtttaactcaagatcaagaccttttatgcgttgacagcctctcaagacccatggtcacacctggcagcttctggtagtggggcaaaagggttgcttgtgctggctcattttcctttagagctttccctttctgcacacatcccttttcttttcaaataaagcaaacccagagcacagggtctgatatgtgagtccacggggagtggactgtctgttcatctgtgctcagccacctctgcttcagcttcctctccataggctgagcagagatgtggtcagagtgaactcacattggaacagtacactcacggcaccctggagaggagcggtcactggttgctgagtgaattaaccgaatgtttgctgcttttctcctgcaacagttcattattcctccagcatgcctaggcagtggagagaatgtattttgcccaataataaaatgacatcctgcctct

SEQ ID NO: 10975 - DNA, 2260 bp, Homo sapiens
acgccacctggatgccccatccaccgcatgcggtgcccgtggcccgccccacaccaccgccgcctgcagacctctcccttggccggctccctgggccgccatctgcgtgtacttcagggcctgggtatccagcgagccctccccacccacccacggtcctcacctggagctgtggcctggctgtggagggccgggtggtggctctgaggatggtccccagccccaccctgtccccaccctggcctgtaaggagcactcactcttcctaccatccaggggctcctgggaaattaaggagggatttgcacaggaacccccaggacccagtcgctgctgtggtcccttgggcaggagcgggcaccctgtgccttgagacagcagcctatctggggccacacagccaacccagccctggtccctgaggtctgcccagggcacagggcacaggcagggacagaaagccttctcctgggggagggtgggaagccagggtgtcctgggccttgctgcctggcatagcctgaggaggcccctggtcttctccttgggccccttcctctgaccctcgttggaccccaacccagacccccttttctccatgtacctgctgggccagcccatttcacaggtgaggaacccgaggctcagggccccgagacttggcctcagttcttccttccacagggattttcaggaaaggcagaagctcgtggaggatgggcatctgaggtggccctgcagccccccaccttctggccctcccaccagaggcccagctaccaaggccacattgtccaccaccccagcctagagcctagaactgtagtccagctgaggaaggaggcagagctggggcctgaaggctctgagcagcctccagccagggggctcctccagggctgaactttgggagggcccctgtactacctcctgggccaagaaactggcacagccccacactgtcagtgccaagaggctgcgccaggccactctctcagcccagggcctgccctcctgtcctcccacttctctacgccctcaaggttggagaccccgctcccatgccccagctgtgccatcccaaatacttgggcagcagctcagcatgggcagacatgggggctgtggattcttccagggcggggatggcagatggagcccttgggctccttgggcctagagccacttcttaccaggcaacgggcacagccaccctggcacaccctctgcctggccgtgctgaacctctgctggtcccaagggagaagggagtgagcgtgggtcacctggggaaaatctcatctgattccctccttgcccgacctctgctaggggctggagaacagagctcagagcacccagtgtagggaaacacagccagaccactgtggtgacagactttctttataaacatttggaagttttctcccccatcttcttaagaagcaggggggcaggtggaggagagtgaggggagagctgcccggtgcagacccaggacgagggctgcacttggtgtggccgtgtcctgagcctcagtgaggctgggcagatggtctcggagcctccatggggcgtagcaggaaccgggcttggcttcctattgtgactgatgagaaaagtgaccacgtgggggtcagtcgggggcaaggggctcagccccactggactctgggctgcagaggccaccccccaggtgggggtgcccgcagggatggaggcagctcctgaactggtggccagcccacggggtactggaagacagtggttctgatgggttcagccctagagagagagagagaagcggggagaataagagtgcactacagcccaggcttatgccacccccagcccacctgcctcaccaccctggctgtggggagggtcagctgcctgcatgacttttctggaaggcagagcctcgaaaataggcagaccgtttgagccagcgacctcacctctaggaactgagcccaaggaaatagcggggttgcaggcagacattgagctgcgagacaatgggaataaccttcgtgtccacctgtgggggactgattcaatacatatgcacgtccacagcagagaatgccatgcggcctgtgtaagaattaaggcagatttatatgcactgatgaggaaagacatactgtgtgatagggagaaaaagcagcttataaaataatgtatatagcatgatactatttttgtttaaaaatatataaaatatataaatgcataaaaaaatcctggaagacacagc

SEQ ID NO: 10976 - DNA, 736 bp, Homo sapiens
aagctgtggaaacacatcaagcacaagtatgagaacaagtagttccttggaggcccccatccaggccagaaggaccaggtccacccagcagctgtttgcccagagctggagcctcagcttgaagatgatgctcaaggtactcttcatggaccaccattcgctgttggcaagaaacggctttacttacaaaacagactctttaccttctgctgtgtttgaagtatgtttagtcagcatgctcaggaaataaatgtgaattgcccttgagacctgcttctacattggttgctttgttaactctacctgatcttcacttgtcagtaatttgagaccacttcaaagccctctgcaaacaccccaaaggcagaatctgctattttgagttttccattaacttccaaagaattctggttttcaaaacaggagccagagttggagatattacagtcaactttggcttctaagccagtaattccattcttaaatacctcactgtcttggccatggggaagcactatggcctcagctgggggaaagaccctggcctaggggtcttagccactccccaccctagggtatagttcaggggtatccaatcctttggcttccctgggccatgttggaagaattgtcttgggccacacataaaatacagtaaccatagctgatgagctaaaacaaaaaacaatggtttgtgcaaaaatctcataatgttttaataaagttgaagaatttg

SEQ ID NO: 10977 - DNA, 5067 bp, Homo sapiens
agctcagtgacctgggtgggcagtggccaagctgctgttcctatgacaggcccactcaacctgggcagaccgagaggcccgtgcactttggaatgggagcgtggaaccacctgtacagagtgacagatttgggatgcaccactggattgtagattgatttttctttcctgtccccctactccctccctaccttttccatcctcctcctctgccttcaaaaaaggaaactttcccttggttgtcttaattttttttttttttgatggaagaccaagggttgccaggcccactgtaactgccgagctgcctgctgtcacgtgacactgagggatggcttgtttcttccgggtgggaggatggtggtcagagccaggagtatggagatctgagaccgtgagcagggaagaaagccagtgctaacatgcaaccattcctcacgccaccgccacatcagagctggttgggaaccctttgctgctggggaggctggaagcatattccccaagagcactgccctgggcatcatctccctcctgcgaggagctgagccagtcccctcacagatggataaatgaggctgatgtttggagggagaggcacacggtaaatggcatccccttaggcgcctctttgggaaaggaaagtggatgctcctttgaggcaggcgaggggctgggagtgggtagccgtcatgttgtcccccgtgggatcccatttttaacttgacccagattgtcttgggctccttttactttcagggggctgctttcctgggccaggctgtgtagcacttcccaccctcaggcatgagtacagactggtcaaaatgtttatgcagtcaaggccaaagcctgccctgagcccagacacacctgggtccccattctggggcctggtcccctaaacaatctcttcctcagccagcacagggaaatccagactcagggttccagaaatcccccgttcccaaaccaaaccaatcatggatcttccctttaaggggtagaatcagcctttagagttacaagcccctggaaaagggagcaggtcccatacaatcagcctttctcctcttctcttcttgggacaggaataactgctgagcagtccccctttgccactcctggctgtctgagtgggcacttgtctggctgctggccagcagtgaagggccacttggtgacttcgtagggttccttagagaagtgacatggccttgaggagattcagggcacctttcctcagtgagctttgatatggtccaaaaacagccttaaatcaagaatatttgtggaggtaggtgtggggaaggttggagaagagttaggtttgtgctttgtaatcttggcatccatgttttgtgcctgccctccctcttggggaggccatgcttgactctgctgaaagctgctaactggtgacagggtggatcatggtgaggactaggggtaaggtcagggaatgcttaagctctggccctgccctgtattcctcttccccttggtagcagttccctgaccaagggcaaggtgtgtctcaggaaggtggttctgtgcatgcctgggtgtggttaaggcgtggcccagaaggcttccctggtgctctcagtccaggcaaagcccagagcatctgagcacgtctctgacttccagtggcaacacagtttgaacgtggtgaaacagggtgtagttcttttccacattctgtgtcatctagtcgtgcaggtagggaaaaagttggtctaattgaagattgtgcatttcctagtgacaggtgccaagaggttatgatacgggtttcttgggtctgatgtacagtgtgaataaatgcttgcagctcttagctcttttttgatcgatgaagcacttttttattaatattttcctttgttaaaggaggaaccgtaactctccatagctgtacatataacccttttctcctaaagaggagtcagtcagtgctcctatatttttcattttttgtcaaagcaagaagtaaatactttagaattgttaaatatataaataaagcaaataaagttgagtgttccacatggtagcatttgctaacacttcctaattctttgccctgtggtttatcccctcttcgtcccttttccctctcacacagaagtgtttgagggcctgctgggaaactgacctttggcaaaggaaagctacagatagccttccgactctagaccttggcaaggagcctcaccatgatgttcaagcactgaacgcatttcctcagtgattttgctcctaaaatctcccaggctaaaagagggcaaagcagtcagggatctgacctggcagctattcctccttctctgaagagttcccatcagtagtcattacaactacctctcgcctcaaggctccatttttagctgctgctctgatttcagggcagccagtactctggccccttcagtcggggagtggaaggagatgtggggtgggggtgagaaaatgcttctgcctgttgttcttgaaggatagactatgggtgggcagagagaactgggggcagaaatggaattagatgtgattgggttatgcagtcaactagaggtctccttcccgccctctctccacacagagaggaacctctgctccttagctcttacagcaggactgtggcatctagtcacttcaatactagttcttgctcttcacagaggtagatttttctttaccctacagcactgttgggcatccctcccatcacatgggtctgtgggtgagatatgttatgctgttcctccctcgggaaggttggtattgaggggtgccttgctccagaggcgccagcccagcatctgtggtgagttggctaagatccagagtgacctgctcagagctccccagaggccttcactctttggggcagtctctctagggtcactttctgaatgtaccttctacctaaagtatacaaacacaaagagccagctgagctggttctagtgtgaaagccgtaagtgccacccagcaggcgtttgaaaacaagaaatcattcttctgtggaaggagaatgtgccatctcagctaccctcagtccgccaggcagcccagtctgtgtattcatatgaagttgtgaaaaccatgagtgtgtgccatggccatcgtgtctacacacagccactattgttcctgtgggctagtctccagcaaattaaaacactggcatggcctaggaagggcgttgcgagctcctaaatggaaagcttctctgggggtagggagatgaagagccaagatgctggtgaagcaggtgcagtgaggatccaaggcaaggaattgccctgagggaggtggctgcatatggagaaaggcagttctctgtgggcaaggccagcttgcttcaggctgtagagggaatttggtctgaagcaacagggcatgaactgtgactttgagctgccaggttgtcttcatctcagaactttcctatcctggcactctcgttacctttcttctataccttggcctctgtaactgcagtccaaaacaagttacagctgccttaatccactgagattctctatgaggatgtacagaaaagttttcctgtaataattttgcttatatgctaactcttttcatgttagcaaagaatattctatgaattagaatgttactgtggtagatctaaaggagaatgaacagaaggtgctggaggacctgttaaacaatctctggctattaaaaaacatcaagatgagaattaaaggcatatcctgatatacttgcctgcttgcacatgaggctgggagatcccatgcctgttgaagttaactctagccctgacctctattgatcttttgggaatgagggctgatttgaaggtgctgttgcaggatttcatttagctgctgccagttcaagtgacctgtccccagggctgcagctgtatccacctgattgcagtaggtgagggctaacagcagaatttaaagtggaccctgggctgtggagcaaagtgactatccatttggacttttggataatgtggcaggagtcccagctgtttaatttctagtcacattttccagaaagttgttctaagttgagattactgacaagatttctcaagggcaggaccagatatgtgagagacttctagttcagagctgacccctctaagcctctgacacttaaacacgagtcctgctgtccccagcacacaactgcactgaagccttgttcctctcggctggtgtagagctcatctgcatgttgtgtgcagataccagtagcctccctgcttgaacaggcctctcctaggctaggcaggtgttcagaggcatgaaggtctgggcaggggaagggcgtcttctgaaatgggagttaccaggtttttaaatgctgctattgttttatttaccatttaaggtcttttctattatatctgagtaactagtcagtttttcttacagtgctcatagcagttgtatttgaattgtattttcagtgaaatttgttttacattgccatttaaaattggcctttaacagcttcccaactagcttataagatttttttttttaatgaaaacataacccatgaggctcagatgctgttgaagaaataaatggtatgttgctgctgacagtagtgcttgcctattgtaacagcattggttctgctgtagcctcggtgaccatttaagttgaataaatctgtcattttcacccacaaacagttgttgagcccctggatttgggttgtcactgtggttctcctgccagtgctataatccagtgtcgtaggtgcagggtatgaatcagctcagcctcttaggagagaggggctctcagcgaggagggggcggggggggggtcactatttatcttccagaggcagggttcatggattcctgatgtttagaggcggaagggaccttaggtcacctacttccacggttttcatactgttctctggggcctcgtggagagggagcctccaggcccattcaaagctttattagatttaaaagtaagatctggtatgaagaaaggttttgtttgtttcttaaaataaaaagtctgaaaatcactaa

SEQ ID NO: 10978 - DNA, 906 bp, Homo sapiens
aagctaaatattccttctacatttattttaaaataagtttattttgtaaaaacatgcataaactgtcttagcaggaaagtacattcctgttaccaaaacctttttctaaattttttgctcaattttttttgtcagttgctaagtgctaaattactggccaggtaggacgcgagtccactttgccataaggaaagcgggtcaatagggctgcctctggatagcattacttcaaagctgggttagagatgaggcaccttttatattatatttgtaaaagaaccacagcagctattttggaaagaagctgttgttctcaaaggaaagaaggatttttttgcataattaaactcttcagctatttagactactgtgaaatgttttgacttgttgtaacctgtatactggaatccctctctagctgtattaaaaattcccacagagttgcataggatgtgtggaggtgcttatccaggtgtgatttatgtgttaacctcagtcacgaggttgatcagctaattgtgggaccaaaatgtgccctgcctcaactctggccccaggccctgttctgttatccaatccgaaacacggaacatgctgcaattcaggagtctggctctcttcttaagacctatattaaatatttcccaagaagcacttcagtttatcagtctgtaacctgcaaatgatgctattagttccctccttattctggaagaatttggatagacttaattgatgattagtatgagatgaacaatagatgacttaaagtgttatttctattatttatataacatgagatttagtaacttataaaatgaggtttagtaatttaatttaaatggataggaccaataagttaaatattaagtgtgtgacttatggttaaataaaatgaaaatacaa

SEQ ID NO: 10979 - DNA, 82 bp, Homo sapiens
cctgtggcccagggctgaggctggatgggaggtggctggcagcccacccactgtaataaagccccagccattggcccacagc

SEQ ID NO: 10980 - DNA, 1431 bp, Homo sapiens
caccttctcctatagcaggcctggccccctcagtgtctccctgtcaatttctaccccttgtagcagtcattttcgcacaaccctgaagcccaaagaaactgggctggaggacagacctcaggagctttcatttcagttaggcagaggaagagcgactgcagtgggtctccgtgtctatcaaatacctaaggagtccccaggagctggctggccatcgtgataggatctgtctgtcctgtaaactgtgccaacttcacctgtccagggacagcgaagctgggggtggcggggggcatgtaccacagggtggcagcagggaaaaaaattagaaaagggtgaaagattgggacttaacacttcagggaagtcagctgccggggagaaacttgctcctaaatgaacacataagtttagatcgcaatgaggagtagcagggtagctggttgctagagttacggtggggatcagaaactcttccaaacattttagcactgaggctggggtagcttttggcttttcccaggtctcaggaggtggcctgagtcagcacacatcttcccactcggtagacaggctggcctctccctcactttgagactttggcaactcctgggccacacggcctgcctctttgattactaatgattgtcagtgactcagagcttcctgggacttcgggtacccacccgctgttctccatgcaaacaaagcgccagggaaatgacccacagggatcgcagctgcagggagggccagggaggttgggggtgggagtgaatgctaaaagcagatcgtccagtgcccttttcagtgctaccggcctctcaccaagcagtcctccatgtgagcaaccccgagacaaaaatgctaagtgggatcaagagagcagcactcggagagggtgtttgccagtctgagtgtcccgcggtgcccgccaacccgcttcctgactgacctgagcaaggtcttactaagcagtcccatctctgtgggaggcatgcaacgcgtgcagggagttcaggtgccggtcggcgtagccaggcctggaggccccccaggcaggaggccgcccaaaggcggggccggcgtctcgcagactaggggctgggggcggccacagacggcctcgaaaccacagcccttaccccaatcccacgagccccgccaacgaaccacaggtgctgggctttagagaacatgggaaggcggccccagacctgcgggaacgcctttccctcagagccaggccccggccccgtctgggaagctcatcttgcgaagctgagggagctcagggcaaaggccaggctagcgcggaccggaaggggccgaggctgcacgggcctctgccagaacgctcaggacatcccggcctgggtttacaacgctgttaggaaaattaaccaatgaataaagcaacgttcagtgcgc

SEQ ID NO: 10981 - DNA, 520 bp, Homo sapiens
tcatactctggtacctggcctgtgcatcggcctcctgcttcatgtcaacctcctactcctgccagggaatgtggacacctggctccctggtgtccaaagaccctggcacctgggtgggtttgagctggacagaagcttagagacaaaggcttcaagaagcagtggctgcagggagtcacagaagggcaggacctgaacgctgtctgcttccctggaatccaagatgctgagtggaagtggaccctgggtgggcccggccctgtctttttcaggaaaattacatcctcccatggaggatgagagactgaggctcagggagggcaaggaataggcccaagatcacttggcaagctgggcacccaggacccccaggtgcttgacagagtcaccccatggtggtatggctgaacaaggagcggcagacaactcagggagaaactcaggagtgcagtaccagggacacctcaggacagattctctggccaggcccttccctgacccaataaatcctgaagaggtt

SEQ ID NO: 10982 - DNA, 539 bp, Homo sapiens
cccctgagctccctcatcccagcagcctcgcacactccctaggcttctaccctccctcctgatgtccctggaacaggaactcgcctgaccctgctgccacctcctgtgcactttgagcaatgccccctgggatcaccccagccacaagcccttcgagggccctataccatggcccaccttggagcagagagccaagcatcttccctgggaagtctttctggccaagtctggccagcctggccctgcaggtctcccatgaaggccaccccatggtctgatgggcatgaagcatctcagactccttggcaaaaaacggagtccgcaggccgcaggtgttgtgaagaccactcgttctgtggttggggtcctgcaagaaggcctcctcagcccgggggctatggccctgaccccagctctccactctgctgttagagtggcagctccgagctggttgtggcacagtagctggggagacctcagcagggctgctcagtgcctgcctctgacaaaattaaagcattgatggcctgtggacctgc

SEQ ID NO: 10983 - DNA, 844 bp, Homo sapiens
gacctgggggatctcaggagccacctgggatggccctggcctgaatccagcctccgctgtggccatagaaggaatggagaacagggctgggcatggtggctcacgcctataatcccagcacttccagagtccgaggtgggtggatcacctgaggccaggagttcgagaccagcctggctaacatggcaaaacctcatctctactaaaaatagaaaaattagctgggcatggtggcgcgtgcctatagtcccagctacatgggaggctaaggtgggaggatcacttgagccctggagatcgaggctgcagtaagccaagatcgcatgctactgcactccagcctgggagacagagcgagacgctgtctcaattaaaaaaaaaaaaaagtggagaactggcagtgacctctactgggggccatggcagggaggggagccttctggaagggctgccttggagattggaatggggactcccagggagacctgcgttccatccctgcctgcctcacccctgccacagactctgcacaccactggatggtgggtccaagcctggcacagtccctgtgcttgtcagagtcattattatgattaatatcaattacgatgccaaaaattgctgggcaaactttgaagacctcaacttgttacaatgacgatgatgatgattcttggcggttacacaatccttcctcctgggggggaggcagctaggaggcccagcaggggggcttctatgctgctgggctcccctagggagttggggtagtctgtgccaactccaggcagctgctgtggcctcacccctgggccccccaattttgggtcatccatcctcaaat

SEQ ID NO: 10984 - DNA, 1485 bp, Homo sapiens
gcgccacccttgcaacaaatacaggcgcctgcacagcctggcccacctgttcattaatgcactcaatttagtactgaatggtctttctcccagcccattcccagcccttcctatttcctttcctattttttttttctccccacactttcttgggactcccaccttggaaggaggaagggctgacctgggttctctccagcccccaggtgcgccgggtcacccgtgccccttcattatggacctgggccctaccggaacccctgccccagttaccacaactcaggccggctggcccgggccatgggctgcgcaaatcaccagcccccaacccagggaggaactggcccctcctagggagcctcttcgacttttttagaaaaatgatctccatttctttccagccatgatgtttagtaaatatttttagtaccgcacttagcagacagctttccaagtgtgctttcttgccacaaaagtgtcctggcaagagccccttatttttaagacatcaggaagccagaccgctttgagttgggagaattttgtagctcaacatatcaagtcctcgatggtatctgagctgcccacacccccacctgccaaggccccacagagcccaaaacagaagggggctgccccagcccagcagagcacagagtttctggagctcccatccacagatgcaggagggggtactgatggtaacccccatgtggatttgagggcagcagtccctggcctcaccctagccagcctgggtggctccctagccccaagaggccaggaagggctggaaggcagggcctgcaggtgctccccgccctgagacccaggccccaaatcagcaataatgaacaaacccttggcccagcctgggctggtgacctgggcaccagagaccttgcatccctcctcatcctaggaggcccctaggggtgccccatctcagtgtcccctgaactctttatttgcctaatttatatatatatatatgagatatataaatatatataaaatagctattttgcttaaatttctacagtatgtaaaagtgaaaaaatgatgaagacgggtgcacctgtctgagtttggccctcatgtgagctgtgcccttccctctcctcatgcccccttccagcggcttctgccaaccatggggggctggaccaccatggccactgacccagcccctcagaatcccacactccaatcctttccatttcagtttagtcctaaaagttcatcacagggtctttctttctactccaggactggttttgtttttatatatataaaaaaaaaaagtgaaaacaccaatgtgtgaaatgccttacaatgcccactggagaggcggggcggggtggggcaggatggccccactggggctcctacagagctgtggaatgtacctctccccaacactgttttgttagcgagcaccttttgaccagtaataaaaaaccttggctttggagttttccactg

SEQ ID NO: 10985 - DNA, 308 bp, Homo sapiens
gatgctggtggactgtgtgcccctggtggaggtggacgacatgatgatcatgggcaagaagcctgaccccaagtgtgtcttcacctatgtgcagtcgctctacaaccacctgcgacgccacgaactgcgcctgcgcggcaagaatgtctagcctgcccgcccgcatggccagccagtggcaagctgccgcccccactctccgggcaccgtctcctgcctgtgcgtccgcccaccgctgccctgtctgttgcgacaccctcccccccacatacacacgcagcgttttgataaattattggttttcaacg

SEQ ID NO: 10986 - DNA, 277 bp, Homo sapiens
gggtggggtaggcagatgggccaaggtgaccaccattctgcctcaatcttttgcaagcccacctgcctctctcctgctgctcctccagctgtatctgcacctgcctctctgtcctggccaggggtggacaactggggtcccccaaaactcagtcctggcacctcaactgtgacaatcagcaaagccccacccaggcccccatctgggatgatgggagagctctggcagatgtcccaatcctggaggtcatccattaggaattaaattctccagcctc

SEQ ID NO: 10987 - DNA, 2428 bp, Homo sapiens
tgctgggctcctgcctacatccgtggcagggctctggactggtgacgtgccaccccaactcctggtgtttggcttcctggctaatcttgactcctggaatcagtgggatcagtaacacatcaaggagtcttgtttcttcatcagagctttggaactcgagaccagttggcgatgacccctgaatatcgccaccgctgtaaacactctataacttcaggccttggcattgagtcatctctcatgggtgacaccatgaaatcttgtttcagccagttctgcaggtcctgactctgcagagggaagaggcagaaagagagaaactgtcagagtataatttcacctgagtttaatattacagaaacaaagggatgcaccaaatggtatttctggaaattttcatgtctttaaataccccttggtaagttgcttctgaagccagtgggggctcctcagatagagaggttcccctttcaaatcccagtgccgctctgttctctttccttcccctcccactccccctcttcttcctctgtagagatgcaagaaattgctgtcccataaaaatcataattgcagtagctaaagctggggtcacttcgtgaattcaccagagactcaaagatcttttattggctctgggctgtgctcagtgtctttggcctcagagaacaacttgaatgacttcctggtttcctggcataaattattcctggtgagacatgtggcttaactcacaggtttcccatcagctttctccctaaaactatgttcatctgcctctctctgccagagaacatacagccgagaatactgccgaagctgagactgactactgtgcattaggaaagacctggagtcaggactttggtgggatttggagctccgaggcagtaataactgaacaagcagccctgtcccctaggctgcagaagcttgaatgcatcctctcccagaacctgccacaggaaactgggggctttgtcaggtcagcccaactgcatgcaaaagaccaccatcctcagaagccaagttgtcttttatgaagaggcaaggaaaggggaaacccacatgtgaccctgattttggtatggcttgatagagttccctgaaaactccttgtatgtgtgctaaaaccagggaagcatgtgactgccaagcaggcaacccctgatgatttgtaaagccaggtggcagggccttggggagccccagcacaatgatattgtgtggtcttccctcctgtggaatcgaggggaaattattcttcccaataccttgatttgattttcagtttcataagcttcttcctctgaatcttattgagggactatggtaccaagcaggtaggactgttcacctggtggaacagttcttgctctgccttctaggcttcatcccagaaatccagcctctttctggagaccccaaagctggagggagatgggctttcctctgggcctctctcctactttgccatccacactgctcctggctaaccccagcaataaccaacaaatggtaggaagccccatctattgctttttctcaattatgactgcatagtttatggaaacaaagatcttgaggaagatgagggaagccctcccctcttcacagtccccatctcttctcctttgtacctgtcaacaccagagttcagtgtttaaacagacaaaatataaagtattgagtaggtggttcatatgccgaatccacttggtaggaagaaaccaccagctttatagtgtgcctgatagattttaaacattcctgggcacccactcaagagtgctctttttatcaccttctggaaatccgcaaagttgcaggggcctctggagtgtctcttctctagagagaattggtgggacccccctcagtgcagtggccccaactagtggagggagagaggacttaagtcagatggactcaacagaaatgggtttccagaagaataatgaaaagttgtgggtaggaaaatgaatcatttggactcttcaatgaaatggagtgagcccaggagagctcagccaacagaggcactctgggaacctgttagtaaagccaggctggccaaatgccatttgattttgaacctcgtaggtccccactcaccctctgccaggagctaagtaaggcaggagagctgacttgggactcctggctcggccccaacagggagcccccttcccaccatccctcggcaagctcaccacctcatccttctgccaaggcagctttcctttcttttgtgtgttttctgtgttcttagcctccaccctcctcctgccacccttgtggactaggaccaggtcctgaccccagtcagaaaatgatgatatgtacagtggcacaccttaaccagtcactaattttcactgttgtgaaagtgatttgatttagaattaaacaaatggttttacattac

SEQ ID NO: 10988 - DNA, 1637 bp, Homo sapiens
ccctggcccagccccctgcaggggggtgttctacagccagcattgcccctctgtgccccattcctgctgtgagcagggccgtccgggcttcctgtggattggcggaatgtttagaagcagaacaagccattcctattacctccccaggaggcaagtgggcgcagcaccagggaaatgtatctccacaggttctggggcctagttactgtctgtaaatccaatacttgcctgaaagctgtgaagaagaaaaaaacccctggcctttgggccaggaggaatctgttactcgaatccacccaggaactccctggcagtggattgtgggaggctcttgcttacactaatcagcgtgacctggacctgctgggcaggatcccagggtgaacctgcctgtgaactctgaagtcactagtccagctgggtgcaggaggacttcaagtgtgtggacgaaagaaagactgatggctcaaagggtgtgaaaaagtcagtgatgctccccctttctactccagatcctgtccttcctggagcaaggttgagggagtaggttttgaagagtcccttaatatgtggtggaacaggccaggagttagagaaagggctggcttctgtttacctgctcactggctctagccagcccagggaccacatcaatgtgagaggaagcctccacctcatgttttcaaacttaatactggagactggctgagaacttacggacaacatcctttctgtctgaaacaaacagtcacaagcaaaggaagaggctgggggactagaaagaggccctgccctctagaaagctcagatcttggcttctgttactcatactcgggtgggctccttagtcagatgcctaaaacattttgcctaaagctcgatgggttctggaggacagtgtggcttgtcacaggcctagagtctgagggaggggagtgggagtctcagcaatctcttggtcttggcttcatggcaaccactgctcacccttcaacatgcctggtttaggcagcagcttgggctgggaagaggtggtggcagagtctcaaagctgagatgctgagagagatagctccctgagctgggccatctgacttctacctcccatgtttgctctcccaactcattagctcctgggcagcatcctcctgagccacatgtgcaggtactggaaaacctccatcttggctcccagagctctaggaactcttcatcacaactagatttgcctcttctaagtgtctatgagcttgcaccatatttaataaattgggaatgggtttggggtattaatgcaatgtgtggtggttgtattggagcagggggaattgataaaggagagtggttgctgttaatattatcttatctattgggtggtatgtgaaatattgtacatagacctgatgagttgtgggaccagatgtcatctctggtcagagtttacttgctatatagactgtacttatgtgtgaagtttgcaagcttgctttagggctgagccctggactcccagcagcagcacagttcagcattgtgtggctggttgtttcctggctgtccccagcaagtgtaggagtggtgggcctgaactgggccattgatcagactaaataaattaagcagttaacataactggc

SEQ ID NO: 10989 - DNA, 497 bp, Homo sapiens
gggtccccgacccaggcgaacggtggctcccataggacaatcgctaccccccgacctcgtagcaacagcaataccgggggaccctgcggccaggcctggttccatgagcagggctcctcgtgcccctggcccaggggtctcttcccctgccccctcagttttccacttttggatttttttattgttattaaactgatgggactttgtgtttttatattgactctgcggcacgggccctttaataaagcgaggtagggtacgcctttggtgcagctcaaaaaaaaaaaaaaaaatgatttccagcggtccacattagagttgaaattttctggtgggagaatctataccttgttcctttataggccaaggaccgcagtccttcagtaacaccagtgtaaaagcttgaggagaaattgtgaagctacacagtatttgttttctaatacctcttgtcattctaaatatctttaatttattaaaaaatatatatatacagt

SEQ ID NO: 10990 - DNA, 214 bp, Homo sapiens
aacctttcccttttcccatctgccggacgaaccacaacagcgttccccatgatcaagcaccctaccccagttctttctggttttggcagtcactggatcaggatccaggggagggagatggaggcacccaaactggaacttcatttgtcttaccttggtgtcaccttgtatgtcgaactgcataaaagatctggtaggctggtcagctacatgc

SEQ ID NO: 10991 - DNA, 129 bp, Homo sapiens
cgtgttcgcaccaggaacgcaggtgctgggctgtcggggaggcctcaggccacctccaggaacagaacacagttttaagtttgattttttttatttcaaaatgctttgcaattaaatgaattactgttc

SEQ ID NO: 10992 - DNA, 559 bp, Homo sapiens
agtgcagtgatgcaatcacagctcacctcagtgcggccttgaactcctggactcaatcgatcctcccacctctgcctcccaagtaactgggactatagcatgccaccacacccagctgattatcatatttttttttgtagaggtggggaagtgcagtgatgcaatcacagctcacctcagtgcggccttgaactcctggactcaattgatcctcccacttctgcctcccaagtaactgggactatagcatgccaccacacccagctgattatcatatttttttttgtagaggtggggttttaccattcccaggctggtcttgaactcctggactcgagggatccacccattggcctccaaaagtgctgagattacaggcatgaaccaatgttaccgcaccctgcctctattatactattttttgtttagcctttcttcatccatcatttaactgtatgcctttccatatgttaatggaaagcttttcttaggcctagggtcaaaagggtttatttccttatgatttccatttgtgccatatataaaacaacctctgtct

SEQ ID NO: 10993 - DNA, 517 bp, Homo sapiens
ggccaggctgcacctgtgctgggggaaggtgggtgagccactgccctcaaacccggggcggaggattccaggcaggctctaggagtcaggtgtccgtttgctgctatcagtgagtgggggccattgttttttgtttgtttgtttgtttgtttgtttgtttttggcccccacgacaagtcttctactctagaagaaagactttggaagcagctgctgctgctgccaccactcctgtcagcaagtgctcagagcaggtgggaggcacagattgtccgtgggagggctccagtgtctgggaagagggcaggcggcccccatgaatgtcctcggaagggggtggctcctggtagcatccttttccttcaccatctatgggatattaggggcagaatctgccacttcttgcccaggagtgtgcacagatgtaagataattttgtgaaataatgtaccatagactctcaccaactgtatatacctgtacatatcagaagcaaataaagagctccacgtgcatc

SEQ ID NO: 10994 - DNA, 810 bp, Homo sapiens
agatccttcaggtcccctggcccttccttcacccaccacccccatcatcaccgattcttccttgccacaatcactaaatatctagtgctaaacctatctgtattggcagcacagctactcagatctgcactcctgtctcttgggaagcagtttcagataaatcatgggcattgctggactgatggttgctttgagcccacaggagctccctttttgaattgtgtggagaagtgtgttctgatgaggcattttactatgcctgttgatctatgggaaatctaggcgaaagtaatggggaagattagaaagaattagccaaccaggctacagttgatatttaaaagatccatttaaaacaagctgatagtgtttcgttaagcagtacatcttgtgcatgcaaaaatgaattcacccctcccacctctttcttcaattaatggaaaactgttaagggaagctgatacagagagacaacttgctcctttccatcagctttataataaactgtttaacgtgaggtttcagtagctccttggttttgcctctttaaattatgacgtgcacaaaccttcttttcaatgcaatgcatctgaaagttttgatacttgtaacttttttttttttttggttgcaattgtttaagaatcatggatttattttttgtaactctttggctattgtccttgtgtatcctgacagcgccatgtgtgtcagcccatgtcaatcaagatgggtgattatgaaatgccagacttctaaaataaatgttttggaattcaatgggtaaataaatgctgctttggggatatt

SEQ ID NO: 10995 - DNA, 445 bp, Homo sapiens
gtcctaccttttgctgtagatttaccatggctggactcttactcaccttcctttagtctcgtcctgtggtgttgaagggaaatcagccagttgtaaattttgcccaggtggataaatgtgtacatgtgtaattataggctagctggaagaaaaccattagtttgctgttaatttatgcatttgaagccagtgtgatacagccatctgtacctactggagctgcagaagggaagtccactcagtcacatccagaaaaaggcagactaagaatcagaagccatgtgattgatgtctgacgtgagtctgtctcaggtagattccgggtgtcagtgtggtttataatccttgaatattgttttagaaactttggtctccctggttcctgccacttttcctgtccgtcctcctccccattttttttttaaaagaaagctgttttcccctc

SEQ ID NO: 10996 - DNA, 329 bp, Homo sapiens
gccgccactgcaaaaaaaaacagggtcagaaaattacttgggtgggtagacttaggaattttctacttggtaaaagcattatacagtcataggagaaagatatgggacatttctataatctatattctaatttgattcgattattgagtcgtaagtattaattattgccaccatccaactcattgagtcttatggttcacatcttgtttcctatagaaatgttctgtattctcggatcaatttccaaatgctttactttttcatttctgtaagttcaaatcaatgtttaaattatagaagttatgaggtaaataaacatttggatatca

SEQ ID NO: 10997 - DNA, 300 bp, Homo sapiens
ttgatttgtaatttcatttctggagctccatttgtttttgtttctaaactacagatgtcaactccttggggtgctgatctcgagtgttattttctgattgtggtgttgagagttgcactcccagaaaccttttaagagatacatttatagccctaggggtggtatgacccaaaggttcctctgtgacaaggttggccttgggaatagttggctgccaatctccctgctcttggttctcctctagattgaagtttgttttctgatgctgttcttaccagattaaaaaaaagtgtaaattac

SEQ ID NO: 10998 - DNA, 3663 bp, Homo sapiens
gcgccagaccctgccccacctcacttccctcccttcccgctgagcttcccttggacactaactcttcccagatgatgacaatgaaattagtgcctgttttcttgcaaatttagcacttggaacatttaaagaaaggtctatgctgtcatatggggtttattgggaactatcctcctggccccaccctgccccttctttttggttttgacatcattcatttccacctgggaatttctggtgccatgccagaaagaatgaggaacctgtattcctcttcttcgtgataatataatctctatttttttaggaaaacaaaaatgaaaaactactccatttgaggattgtaattcccacccctcttgcttcttccccacctcaccatctcccagaccctcttccctttgcccttctcctccaatacataaaggacacagacaaggaacttgctgaaaggccaaccatttcaggatcagtcaaaggcagcaagcagatagactcaaggtgtgtgaaagatgttatacaccaggagctgccactgcatgtcccaaccagactgtgtctgtctgtgtctgcatgtaagagtgagggagggaaggaaggaactacaagagagtcggagatgatgcagcacacacacaattccccagcccagtgatgcttgtgttgaccagatgttcctgagtctggagcaagcacccaggccagaataacagagctttcttagttggtgaagacttaaacatctgcctgaggtcaggaggcaatttgcctgccttgtacaaaagctcaggtgaaagactgagatgaatgtctttcctctccctgcctcccaccagacttcctcctggaaaacgctttggtagatttggccaggagctttcttttatgtaaattggataaatacacacaccatacactatccacagatatagccaagtagatttgggtagaggatactatttccagaatagtgtttagctcacctagggggatatgtttgtatacacatttgcatatacccacatggggacataagctaatttttttacaggacacagaattctgttcaatgctgttaaatatgccaatagtttaatctcttctattttgttgtcgttgcttgtttgaagaaaatcatgacattccaagttgacatttttttttcattttaattaaaatttgaaattctgaacaccgtcagcaccctctcttccctatcatgggtcatctgacccctgtccgtctccttgtccctgcttcatgtttgggggcctttctttaactgccttcctggcttagctcagatggcagatgagagtgtagtcaagggcctgggcacaggagggagagctgcagagtgtcctgcctgccttggctggagggacacctctcctgggtgtggagacagcttggttccctttccctagctccctggtgggtgaatgccacctcctgagatcctcacctcttggaattaaaattgttggtcactggggaaagcctgagtttgcaaccagttgtagggtttctgttgtgtttttttttttttttttgaaataaaactataatataaattctcctattaaataaaattattttaagttttagtgtcaaaagtgagatgctgagagtaggtgataatgtatattttacagagtgggggttggcaggatggtgacattgaacatgattgctctctgtctcttttttcagcttatgggtatttatcttctattagtatttgtatcttcagttcattccactttaggaaacagagctgccaattgaaacagaagaagaaaaaaaaaaaaagcagcagacaacacactgtagagtcttgcacacacacaagtgcccaggcaaggtgcttggcagaaccgcagagtgggaagagagtaccggcatcgggtttccttgggatcaatttcattaccgtgtacctttcccattgtggtcatgccatttggcagggggagaatgggaggcttggccttctttgtgaggcagtgtgagcagaagctgatgccagcatgtcactggttttgaagggatgagcccagacttgatgttttgggattgtccttattttaacctcaaggtctcgcatggtggggcccctgaccaacctacacaagttccctcccacaagtggacatcagtgtcttctctgtgaggcatctggccattcgcactccctggtgtggtcagcctctctcacacaaggaggaacttgggtgaaggctgagtgtgaggcacctgaagtttccctgcggagtcgataaattagcagaaccacatccccatctgttaggccttggtgaggaggccctgggcaaagaagggtctttcgcaaagcgatgtcagagggcggttttgagctttctataagctatagctttgtttatttcacccgttcacttactgtataatttaaaatcatttatgtagctgagacacttctgtatttcaatcatatcatgaacattttattttgctaaatcttgtgtcatgtgtaggctgtaatatgtgtacattgtgtttaagagaaaaatgaaacccacatgccgccattttcctgaatcaaattctgcagtggaatggagaggaaaatacttctaggcaagcagctagactggtgaattgggggaaatagaaggaactagtaactgagactcctccagcctcctccctattggaatcccaatggctcctggagtaggaaaaaagtttaaactacattcatgttcttgttctgtgtcactcggccctgggtagtctaccatttacttcaccccaagtcctgctgcccatccagttgggaagccatgattttcctaagaatccagggccatgggagatacaattccaagttctcgcttcctcctttgggcatctcttctgcctcccaatcaaggaagctccatgctcaggctctcagctctcgggccagtgctctgctctgtccagggtaggtaatactgggagactcctgtcttttaccctcccctcgttccagacctgcctcatggtggcaacatggttcttgaacaattaaagaaacaaatgactttttggaatagccctgtctagggcaaactgtggcccccaggagacactacccttccatgccccagacctctgtcttgcatgtgacaattgacaatctggactaccccaagatggcacccaagtgtttggcttctggctacctaaggttaacatgtcactagagtatttttatgagagacaaacattataaaaatctgatggcaaaagcaaaacaaaatggaaagtaggggaggtggatgtgacaacaacttccaaattggctctttggaggcgagaggaaggggagaacttggagaatagtttttgctttgggggtagaggcttcttagattctcccagcatccgcctttccctttagccagtctgctgtcctgaaacccagaagtgatggagagaaaccaacaagagatctcgaaccctgtctagaaggaatgtatttgttgctaaatttcgtagcactgtttacagttttcctccatgttatttatgaattttatattccgtgaatgtatattgtcttgtaatgttgcataatgttcactttttatagtgtgtcctttattctaaacagtaaagtggttttatttctatcac

SEQ ID NO: 10999 - DNA, 1692 bp, Homo sapiens
agattggacatgctctccccaaatgagccactttcctctccaggtgaaggcaggtagcagatgtgccctgggcctctggggaaatcgatttcacaatccaaaaatggcccacagcccaggaagctaccctgaacatgccagttggaaggctgcaccagactcaaaagcaaactaaacaataaaggacagctctcttctctcctggctaaagctgctctcctggttcagaagacaggctggatgagatctcaggccgagctctgaaatagggaggtaatcctccagcacctgtgtttcctctaacttgctgtgtgacctccagccggtcactcaccctctctggacctcatctgtaagaggagccagctggataagatgatttctgaagacgcttccatggtgggcactgaggcacagaggaggccaaggagaggttgtttgttcatgcatgcattcatccgtgacacatgagtacctactgaggactccataaacagaacgggatacagagataaacaatttgggttctgtccacgtttgtcaaaaggtggtgctggcccacctctgaaagcagaacacttgctcaacaaccttgctgttggcccaagtctaacacattctttatgactgtgagcatctcagagtgagagaaaaatgtagaaagttttttaaattctaaacaggatttagtgtctttagttatcttgctggatgggaaagggatgttgtcatttctggcacaaatgaaaagtaggacggaaagctcctttcattcagtttatctttccaggatatatgaaaagggaccagctggaagactagcctcactctgtcctcgaaagcctgagctttcattcaactccctatttccatgcaaagacgctgggcaaaccacatgttctgtctgagcctcagttttcctatccataaaatgaaggtagccaggcctgcctcaaagagcattcaggaggctctgagaggacatgagagtattttgcaaagtgagggcaaggcccagtgtggagtgatattgttattccaagattccactgcaaaagtggctgctttggatgccagcccaggatgagtagttcctgttctcagggaggtcatccgctgagcatcccttctgcacagatgtctctgattcttgtccttgcaggtggaggacagggcctgctcccctaagctgggaagcctggaatgacctcttgcacaagcctaaattccaggaatcttccccaaatcccagatcctctgcaatctacctgcacccctgacccacccaggagttggaccgggagttgggaagcctaggtcttagtcctacactccttctaatttgctgtgtaaccttaccattaatctctctgggtctcagttttctcatctgtattggaggtagcagtgctagctctgccttcaggcatgcaatatgccagaactacagacaacagcccacaggatgcaaaagtgctttgccatcttaaaaatgccagatcactcagagcctatgaatgtggatatcaacaccaggtctctagcaccgctggatgaaaggagaaggctagaggctgagggaggaaagagcagttaacaaacaaaggcagtagctcatcacttgggtagcaggtacccattttaggaccctacactcaaatgtgcaaaataaaatttctatcattttgctat

SEQ ID NO: 11000 - DNA, 2155 bp, Homo sapiens
cagcaaagaatcctgggacagaaaccttatcctacaccattgctggtttgtgtatatatgactgttgcagattccttcagtggcctctggctgtaggttttaaatttttatatctatacatacatatatacatatatatataatgtacaatatatacatagactgtaactactttgcttttaataattttatgaaatggcaaaggtttagccaagaggaaattttggcatgaatacaggcttgggattcttttttctcctgtggtggataaatctgccttaaaaatcaatgtaacttgggggctgggggcttgttctgggtgccaagcgcatctctttatggacagctaaaatgtgattattttccaagctcagttggacctccagacccatcactgaccatttgccttacctgtcttagtctgaaatgtaataggaaagataacgggaagatgccagttgactgaaaattcaaagcctttcaatttgaagtgacctaggtgggaggtgataaaatttgttccctttatagttatggaagtggcttaggtgaattgagtagagggttcattccaattcctactgtataggtgtctgtgtctcaaaatttattgtaatcattggtaccattggtggcctcaacagaggccaaggagttctgtgagccctggcagcaaaaaacaccttggggggtgaagctgtcaatgccaccagttggacctccatacattctgagctaacccagaatctttagtcggcagaattaagtgctggtgtctttcactggcagcatgaagttagccaccaagtcctcacaagccgtgctgcttagttgctcggtggttatggataaactttgcccagcatgatttttgggttcatcttatcagttcccctggtgggcagatacacagtgttctgcattccacatgtaagtgaattgcaaaaacaaaacaaaactcactctcttgtaggtttatttatgtgtgtgtgaatgtgtattttaattatgtgtatttaactctttaaaatctcttagattttaatttatcctgtaaatttctgtatatataatttaataacagaagcctccaccagcaacagcatgtggaagatacagatttgtcatttctcccttccgccctcccttctttccttccttccttccctgtttccttccctctttccttccttcctcctggtctgttccaaaaactctgaatcatctacattttaaggtattttacctcaaaaatgaatcattgtgttaggattctaattctttataaagaacttcatgggcttcaataatgtctagaaagtaaaataaagaggaatgttaccatccccagctgcccttatttccagagaaccagacgtttgtttcccagttggaaagaagacagttgagcacttcaggatggtttttaaatttggtatgagattctctgccaacaccaagctctgagttaactgtgctttcttctcctggccctgacagagcactacagcatcaaagtaaatctttggggacagtgtagcccatctgcatcctatttaatttcttcccttctccccaccagtgttgtcacagggctatgttgcttaaaggtagtctggctgctgaatccctttctcagctcagagcagttttaagatttaattgggaatacagagaaacaggattgtttgagaaccaaaatcaagaggaacagaaatcttaacttgatttcatgtgttagaacattgtaccatgcctcttctgtatctgtggaagtttcctgtttgacacagggtatctaggaggggcggggaagacatggatagtataggaagacattaatcctagcattgtcatttatatacattaatgaaatcctgatgaggacctgctttttgtttgttttcctttgaaacccagccctattgtatttgtatttaaaatttgtacacatttgtataataatctgtaccttgtggtatttggtactattagaggaaaaactttggattcagaccttcttgcagtttttatatcattgttttattttgttttttaaataaattctagtggtttgatccaaatcccattacagttgtataaagaaataaaattttgtacttatattattaaaaatcacatttttaatatttgt

SEQ ID NO: 11001 - DNA, 771 bp, Homo sapiens
gtgtggggtctggcaccctgcagcccaggtccccactgctctcacacccttaggctgggacctccctccctcctctggtgttaaggctgctttgggggtggcttgttacccccttttcctcctctttgaagacggagctgccccagctgtggctgggggtgtggaggcagtgggatgaactgggggacaggtctgcgctgcagtgggatctggctgctctgcctcctttcccaccccagctgaccatgagactttgctgagaagtggaggccccaggacaggctggctggctggctggctgcttgacccagtgtgactctccttcactgagtgataccctgctccgggcccatgccccaaggagcccttcagagcccacactgccagtcgaggcctggctggaggctggccacagtggaaattctgccgagcctcttgtcccttccctgctctgctgcatggggccccatggctttggctggccactgagggtagggtgtggaggtgtggaggccccctgaggagctgcggcggcccaggtacgaagctgcaactctgcgcgcagtgggcgagatctcatcagccccaggctgcaggtgaggcttcaggggatgctggggccccactgcccctccgctgccttgccctccatccttcctctgttccttctggccgggcaccacagcactggggctcacctcttggttgatcctcttgtactgggagaggtgccttttgtatccccaattaaaggtagaaaaccaccctgct

SEQ ID NO: 11002 - DNA, 603 bp, Homo sapiens
atgcaggcatgctggctcccagggccatgaactttgtccggtggaaggccttctttctagagagggaattctcttggctggcttccttaccgtgggcactgaaggctttcagggcctccagccctctcactgtgtccctctctctggaaaggaggaaggagcctatggcatcttccccaacgaaaagcacatccaggcaatggcctaaacttcagagggggcgaagggatcagccctgcccttcagcatcctcagttcctgcagcagagcctggaagacaccctaatgtggcagctgtctcaaacctccaaaagccctgagtttcaagtatccttgttgacacggccatgaccactttccccgtgggccatggcaatttttacacaaacctgaaaagatgttgtgtcttgtgtttttgtcttatttttgttggagccactctgttcctggctcagcctcaaatgcagtatttttgttgtgttctgttgtttttatagcagggttggggtggtttttgagccatgcgtgggtggggagggaggtgtttaacggcactgtggccttggtctaacttttgtgtgaaataataaacaacattgtctg

SEQ ID NO: 11003 - DNA, 247 bp, Homo sapiens
gtcgcgccgcctcactggactcatggactcgcccacgcctcgcccctcctgccgctgcctgccattgacaatgttgctgggacctctgcctccccactgcagccctcgaacttcccaggcaccctcctttctgccccagaggaaggagctgtagtgtcctgctgcctctgggcgcccgcctctagcgcggttctgggaagtgtgcttttggcatccgttaataataaagccacggtgtgttcaggta

SEQ ID NO: 11004 - DNA, 1964 bp, Homo sapiens
gcgagggatgctggggcggggcttggccagtgccttcagggaggtggccccagatgcccactgtgcgcatctccccaccgaggccccggcagcagtcttgttcacagaccttaggcaccagactggaggcccccgggcgctggcctccgcacattcgtctgccttctcacagctttcctgagtccgcttgtccacagctccttggtggtttcatctcctctgtgggaggacacatctctgcagcctcaagagttaggcagagactcaagttacaccttcctctcctggggttggaagaaatgttgatgccagaggggtgaggattgctgcgtcatatggagcctcctgggacaagcctcaggatgaaaaggacacagaaggccagatgagaaaggtctcctctctcctggcataacacccagcttggtttgggtggcagctgggagaacttctctcccagccctgcaactcttacgctctggttcagctgcctctgcaccccctcccacccccagcacacacacaagttggcccccagctgcgcctgacattgagccagtggactctgtgtctgaagggggcgtggccacacctcctagaccacgcccaccacttagaccacgcccacctcctgaccgcgttcctcagcctcctctcctaggtccctccgcccgacagttgtgctttgttgtggttgcagctgttttcgtgtcatgtatagtagtagaaatggaaatcattgtactgtaaaagcctagtgactccctccttggccaggccctcacccagttcagatccacggcctccacccgggacgccttcctcctctgctcccaaacagggtttccgtggcctgtttgcagctagacattgacctccgccattgagctccacggtttacagacaattgcacaagcgtggggtgggcaggccaggactgcttttttttaatgctcccatttcacagaggataccaccgagactcggaggggacacgatgagcaccaggccccacctttgtcccctagcaaattcagggtacagctccacctagaaccaggctgccctctactgtgctcgttcctcaagcatttattaagcacctactgggtgctgggttcactgtgtcctaggaaaccaagagggtccccagtcctggcctctgcccgcccctgctgccccaccaccttctgcacacacagcggtggggaggcggggaggagcagctgggacccagaactgagcctgggagggatccgacagaaaagctcagggcgggtcttctccttgtgcccgggattgggctatgctgggtaccaccatgtactcaggcatggtgggttttgaacccataaaccaaaggcccttgtcatcagctcttaacaagtatattttgtattttaatctctctaaacatattgaagttttagggccctaaggaaccttagtgatcttctattgggtctttctgaggttcagagagggtaagtaacttcctccaggtcacacagcaagtctgtgggtggcagaagcaagctagcgctgggcattcagtacataccacgatgtgctccctctcttgatgcttggcccctggggccttcagggctttgggacatcttgtcctcaaccctctccctagatcagtctgtgagggtccctgtagatattgtgtacaccatgcccatgtatatacaagtacacacagatgtacacacagatgtacacatgctccagccccagctctgcatacctgcacctgcaccccagccttggcccctgcctgcgtctgtgctcaaagcagcagctccaaccctgcctctgtccccttccccacccactgcctgagccttctgagcagaccaggtaccttggctgcaccggtgtgtggcccgctctcacccaggcacagccccgccaccatggatctccgtgtacactatcaataaaagtgggtttgttac

SEQ ID NO: 11005 - DNA, 8812 bp, Homo sapiens
atgttcctcaggacatggcatacaatggccttggaggtccaaataatatcaagtacatcttggagatgagggtgcctgtcctggacagacctcggcatgccttctgtttctccttcaatgctccttaaggcctatgtgctgggaaaagggtcttccctgtttgtttgtttgtttgtttgtttgtttgttttgagacagggtctctgttgcccaggctggagtgcagtggcgtaatctcggctcactgcaacctctgcctcctgagtgcaagcaagtctcctgcctcagcctcccaagtagctgggattacaggcacgcaccaccacgcccagctaattttggtatttttttgtagagacagggtttcaccattttggccaggctggtctcgaattcctgacctcaagtgatccacccaccttggcctcccaaaatgctgggattacaagcgtgagctaccctgcccagccgggtcttcccagttttaacaaagaggtcacagagccacaggcggagttaggaactaaattgtctcctcctcccaattcatatgttgaagtcctaaaccaaaatgtggctgtatttagagatggaccctttgggaggtaattagggttgactgaggccatagggtgaggtcctaacccgatggaattgacttctttataagaggaggaggaaatacaagagggcctccccacccctgctgcacacctacactgaaggaaggctatttgcagatgcagcaagaaggcagccatctgcaaggcagaagaagagagccctcaccaggaactgaataagtcagtcagtctgggacttccagcctctagaactgtgaaacaataaatttctgtggtgtaagcaactcaatctatagtagtttgttactattttgttatagcaaccaaagatgactaagccagacaggttatgtcactcgccaagtgtcttagtctgtttgtgctgctataacaaaataccttagactgggtaatttacaaacaacagagatgtatccagagatccacagttctggaggctgagaagtctaaaatcaaggcaccagcagattccacatctcgtgaaggctcactctctgcttcacagatggcactgtcttgctgtgttctcacatggcagaaggggcaaacaagcccccctgggcctcttttataaaggcactaactctatgcctaaaggcagggccctcatgactctatcacctaccaaaaggctccacttctttatactattggaggggtagaaggaacttcctttctagaccttgaaggtttaagaatttgaatctataaaacaagctgacaatagacagattaacaggagaaaaagcatatacattttttaatgtgggccagatggcagaagcttaaataacaccccaagctacaggaagtgaggcctctgatggggaggtagtgacacaggctgtgggagggggtagggggaggaagtctgtggtgagcaaagtttgccttattacactgataaagtgtaattacactaataaagctggatcacctgaggttaggagtttgagaacagcctggccaacatggcaaaaccctgtctctactataaatacaaaaattagccaggtgtagtggcagggcacttgtaatcctatctactcgggaggctgaggcaggagaatcgcttgaacccaggctgtaaaggttgcagtgagccaagatcatgccactgcactccagtctgggtgtcagaatgagaccccatctcaaaaaaaaaaaaaaaaaaaaaaaagaagaagaatacagtcatgtatctcttggtgacagggacgcattctgataaatgtgtcattaggcaattgcattgtagtgtgattatcacagattgtacttatacaaaacttagatggcatagcctactgcatacctaggctatatgggagagcctattgctcccaggctacgcacctgtacagcatgtgactactgaatactataggcaattgcagcacaatgggaaatatttgtgtatctaaacatatgtaaacagagaaaaaggaaagtaaaaatatggcataaaagataagaattggctctcctgtacagggcacttactacgaatggagcttgcagggctgagagttgctccagatgagtcagtgagtggtgaatgaatgtgaaggcctagggcattactgtatactactgtaggctttataaacacagcacacttagggtacacaaaatgcatattaaaacattttcttccttcagtatattaggcaataggaatttttcaagtccactataaatcttatcaaaccatggttgtatatgcagttgaccgaaacattgttattggacacataactatagttgaaagaataagcaaaaagtctatctaggtgtgctgtcttgagcaacttttaattattctcctgtcctgcaatatgagttaatcttctctgatcgatgtagattccaggaaggggtgtccaggacaattaccttccttctggagaaacttcccttaatcaaataagagaacttcaaagaaaatccctccctgtgctttggaagggaagggaggtgggcagcagtgggtcagagatagacctttgttctcttatttctgaggcccttcagtctcctttattcaaagcactcagcatgccaaagcaccctattttagggtatctttttctgagccctaaacactgtgttggggatgtcaactgtgacaggaaaatatcttggggccccagaatcactaaggaaaactcaagcttagggaaacttcttagggcaaacccacctcccactctattcaaagttatctctctgctcactgagatagatacatatctgattgcctcctttggaaaggctaatcagaaactcaaaagaatgcaactgtttgtgtctcacctatctgtgacctggaagctccctccccactgaaccaatgttcttcttacatatattgattaatgtcttatgtctccctaaaatgtataaaaccaaggtatgccccaaccatcttggccacatgtcatcaggacttcctgagtctgtgtcacagtgtgtcctcaaccttggcaaaataaactttctaaattaactgagacctgtctcggattttctgggttcacattttggaaaccatgaatggattctgggtggagatgcccctgacccttgacaaatctatcggtgcttggtaccagcatgagctaactttatggctcaaaccaataggacaatttgctgaggtctgagaggactccctccagaaaatccctgatctcttaaaatttggtagagatcggaagtttattttgctgtacaacacctctttttttggagttttacttgctcccaacaaggaaggcaagttttcctgctttcatgatgatggaaggcaggtgatgtttttatggagtttcagctttcttccaatgcacttagagcactcagaaattgtataatttgtgtgaccattgttagttttgcttaactgttttgttgtttgtttctgtcttagtcaaatctgaaggggaaccctaaattacggggtcaaggactctgaagtggtaggaaaacagccagcttaaaaaactttttttaaattttaattactataggggctttatttacataacacagccagctttttgctagccagaccaaactcaaagagcaatggctgtacttctgaaatagcaacactttgtcctagctgagatttggtaataagattttttttttaagtttttaaagaagctcagtggttgaaagtctgcttaactgaaacagtaacatccatgatgtgtgttttgtgcatgtttgtatttgaaaggccttcatgtttttgtttcttgtttgtttttctctcctaagaccttgtcttttttttgtagcaaaagttttttttttttttttccttttacttctcagttgactgaattctgttttcaccggattttttgactaaaatagctattgcaacagaggctactcttgggttaaggaagaatgtagtttcgttttatgtttaatatcgctcaaagaaaaataaaagcatctccctctaacaccaccagacttttcctctctgtaccttatcatgtaaattttgctatttgattttcacctgggttgtttcctttaatgtgcaaaaatttaaggctatttagctgacaactgcctagggttgtaaaacaggttatcaagaatctgaaagtctaagataggaaaaaaaagtgggggggcattataaatctataaaatgtacttctattggcatgcctaatacgtctttatatgtatgtatgtgttgtgtacacgatgttttagtgctaaaaatatgtaaaagagctctacttggcttaaagaaaaataaaagtgcttaaatcagatactaaaaaagaaaaggctagtcaaatgctttttcaaatttatgtaacttaagtaaaatctttaataaataaagtagctttaaaattattggtaaagtagtattagaaatgtcttaagaattgccagcatacatttttgtttgcattatattaatcaaacagttttatacttatccctgccaaataccagaaggtgtcaaaatttggcataggggttataaaactataaacccagcccaaaacagaatgatctttgcttgtgtaatttttaataaataagacattgatatgggtttaatgaaaacagctgcatcttgaatttagtaagattaccataacttctaatcctgtggctttaggcagtttagtccacagacaataaggaggtttgttttgggaaaggactgttattgtcattgtttcgaagctgaacttaaactaggttcctcccaaagttcattcggcctatgcccaggaatgaacaaggacagcttggaagttaagagcaaggtggagtcagttaggtcaaatcgtttttcactgtctcagttgtaattttgcaatggaagtttcataactttaaatcatgactatcacagtttttataaataatctaggtaaacaattaataaaataactaggtaaatgtaatgggataaatacttatagaccaactggacataatttagaatataaagtcatattaaattaaataatagataatttattatttgggtattttccaataaatatatcttgtaggaaaacattgttgcttaaaaaaaagtgtgtccttttttaaaaaaatggtgaacaagttttgtctaattcaaagcttattaaaaggttatatataaaacaaggtaaaaggaaccagaaaagaaaaaaaatgtaaataaagttataaaaataaagaattttttcaaggttaaaaagctgaaaaagaaataattttatataagaaagaattttatatggtaaatttagtcctaaaataaaataactggttgtttaacaaggagggatgttcaggacaaaccagaaagtccaagcatgtcatgaacattggtgtaagtcatgataagattttatatatatatatacacacacacacacacaccccaaaagcttttatataatcaagttgtcatattattattaagttttggtttgcttagggaagaaagagctaatttttaaaaaatcaaggttattacatccatgtatcttcctgtgtatgcttttaaagtccttgtaacattgagttacagggctttaactcctgtgtctgaaaaatcacaaacactgatgacaatcaaagcctcatcttaaggccccgtagaagatgccaatcaaaataaactgcattcctgaggcactaggcaagaaattaaagctattcaactcctcaaggcccagggactattgcggaagaggtgggcgcgtaagattgtaagggccgattttgaaagatccagtaagttcagtttctctatgaactaatcattcaagtcaaaggcacactgatgcaaaatcagtatatggacccctgtgtctgattagcaaggttttcttgaagcattaaccaactccttcataaaggttataaaaggcttatggaagttatattttataatcaagattaaatcttatagtttgtttacaaaattttgaaaatcaaatgtgattggcttcaggctgtttttattagggcttcttgtttagaaagttaagtcacctctctcaaagaatgaaggtttttgctttttttgaaatccttgaattatcacttggattaaataaatgactttacgatgacctgtaattttattttgtaatgtcaagtgttttaaaccttttgtatttgacaagctttccaaaatcaaattataaattatgtatttttctaacctaattaatcctttaagatcttagtttccctaaagtcctaaaatgacataatttggcttatttggtataaaaattatataggaagcattgtcaaatgtgaaatggtgtttggttttctttgggctgtatttgtataaatatgttattggtgtatgttccaaaattatgtgaaactcctataattctaatataacttagtgtacattatcagtaataatcataattgttatattaaaattattgtgtgccacagaggtaaaaaatttccttgtcagttttgtcttttgactatggctgccttaaaacttttttcttccatgcacaattgttgttttggtcctcttttttaaatatatttttattattatttttgagatggggactcactctgttgcccaggctggagtgcagcggcacgatcttggctcactgcaactgccacctcccaggttcaagcggttctcctgcctcagcctcccgagtagctgggattacaggcatacaccaccatgcccagctaatttttttgtattttcagtagagatggggtttcaccatgttggccaggctggtcttgaactcctgacctcaggtgatcagcccaccttggcctctcaaagtgctgaaattacagatgtgagccacacacctggcctattttggtcctctttagaaggtggttttataatcagctgtaaaactccaacaggtgctcttacatgcaggtttctgataactttggagattgtgacatcagaatagagggaaaagtttcaggactcatggagagctaaaatgttcatgagtatcaagcagaacaggaattaactgcatagactgaaccaatctttttgactttttgcttaaaatgtttgctgatcctttgttttgtgtttcagtcttaaaacttttcttttgagctattgacagcttttaacaatttagtatactcctatgacaaaatttggagcatatttgtttctctctacctgatttctccagaattcagaaactatttgtaagtattcttaacttatggtgatacagttatttgcataagtgcaataagaatctgttctaatttgtaacaggacacgattggagaaattggttgttttactaagactttgactggaatggtgtgcttttctttaaggaatcaaacttgacttatggaaccaataaagtccttggaaaaactggccccatattttgtgtacacagtctccgtacaagatttctgacctgtagtaagtaaagaatgtcactttctgacaggcacataagccccaggtttacctcagaacctcaagaggagaggaaattcacccaatttataagtatttgatggcacaaatccatggctgggcatggctttaagaaagtcttatctgagattcctcctgtggaacaaagttaattggttccagagattcaaagccagagttgctgtcagttcattggtagagatgccatcactgggcaagtgttctgaaaacatcttatctgaataacagcagtcctggagaacatctagggatctagcaaagcgagagatacatgaaggacataaaaacgtttttagaaagtccttggaaacagttctcatttcagacatgtaagcatgagctaggatgaaaagtgatttcatcctggtatctgcaattttcacattcattaggtttcaacatataaactttcaggggacacagacattcagactatagcaccaagctgtagaagctacatagttgtagaccagggtcagcaacccaagaagcctgacttccaagctgtgcttttaacttccccaccatgttgcacctaaagctttggagttttcctgtgattagtgtttttggtgttgttttattttttttcttacaggaactcttgcaagaagaaaggactatgagttcaactttagagggagccatggggactaaacaaaattctgaggccccctcaaccatctaaatggacttccttctgggccaggacactcgaaaattaaacctgaaagactggttcaggccatgatgggaagtgggagtcgaacatgcctcatcataccctccagcattaacatcaacacagaccttaaggctgataagaagcatttacaatctattctctctgaagtcttctacctggaggcttcatctgcatgataaaactttggtctccacaacctcttacaacccaggcattcctttctatcgataattactctttcaaccaattgccaatcagaaaattgttatatctacctataatctagaagcccccacatcaagttgttttgcctttctggacaggaccaatgtatatcttaaatgtatttgattgatctctcatgtctccctaaaatgtataaaaccacgctgttccccgaccacctggagcacatgttctcagggtctcctgagggctgtgtcacaggccatgttcacttacatttggctcagaataaatctcttcaaatatttt

SEQ ID NO: 11006 - DNA, 127 bp, Homo sapiens
ttggtcaccctgtcaccactgaaccttgatttaacagaggcaaaatgcaagtcttccctgaagaatactgggggtagggaaacttctagtggcaatgataaaaccagcagcaatgataatagaaggc

SEQ ID NO: 11007 - DNA, 1497 bp, Homo sapiens
ccacagggcagggcagccaccaggagagatatgcctggcaggggccaggacaaaatgcaaacttttttttttttctgagacagagtcttgctctgtcgccaagttggagtgcaatggtgcgatctcagctcactgcaagctctgcctcccgtgttcaagcgattctcctgccttggcctcccaagtagctgggactacaggcgcctaccaccatgcccagctaatttttgtatttttaatagagatggggtttcaccatgttggccaggatggtctcgatctcctgacctcttgatctgcccaccttggcctcccaaagtgctgggattacaggcgtgagccatcgcttttgacccaaatgcaaacattttattagggggataaagagggtgaggtaaagtttatggaactgagtgttagggactttggcatttccatagctgagcacagcaggggaggggttaatgcagatggcagtgcagcaaggagaaggcaggaacattggagcctgcaataagggaaaaatgggaactggagagtgtggggaatgggaagaagcagtttactttagactaaagaatatattggggggccgggtgtagtggctcatgcctgtaatccgagcactttgggaggccaaggcgggcggatcacgaggtcaggagatcgagaccatcctggctaacacagtgaaaccccgtctctactaaaaatacaaaaaattagccgggcatggtggcgggcgcctgtagttccagctaactgggcggctgaggcaggagaatggcgtgaacctgggaggtggagcttgcagtgagccgagatatcgccactgcactccagcctgggtgacagagcgagactccatctcaaaaaaaaaaaaaaaaagaatatattgacggaagaatagagaggaggcttgaaggaaccagcaatgagaaggccaggaaaagaaagagctgaaaatggagaaagcccaagagttagaacagttggatacaggagaagaaacagcggctccactacagacccagccccaggttcaatgtcctccgaagaatgaagtctttccctggtgatggtcccctgccctgtctttccagcatccactctcccttgtcctcctgggggcatatctcagtcaggcagcggcttcctgatgatggtcattggggtggttgtcatgtgatgggtcccctccaggttactaaagggtgcatgtcccctgcttgaacactgaagggcaggtggtgggccatggccatggtccccagctgaggagcaggtgtccctgagaacccaaacttcccagagagtatgtgagaaccaaccaatgaaaacagtcccatcgctcttacccggtaagtaaacagtcagaaaattagcatgaaagcagtttagcattgggaggaagctcagatctctagagctgtcttgtcgccgcccaggattgacctgtgtgtaagtcccaataaactcacctactcatcaagctgg

SEQ ID NO: 11008 - DNA, 389 bp, Homo sapiens
gcgggagttccagagagaggacatagctctgaattaccgggacgctgagggggatctggttcggctgctgtcggatgaggacgtagcgctcatggtgcggcaggctcgtggcctcccctcccagaagcgcctcttcccctggaagctgcacatcacgcagaaggacaactacagggtctacaacacgatgccatgagctgacggtgtccctggagcagtgaggggacaccagcaaaaaccttcagctctcagaggagattgggaccaggaaaacctgggaggatgggcagacttcctgtctttgaggctaatggacccgtggggcttgtaatctgtctctttctactatttacatctgatttaaataaaccattccatctgaaaggggc

SEQ ID NO: 11009 - DNA, 273 bp, Homo sapiens
gacccccaggcctagacaggcaaggggatggagagggcttgccttccctcccgcctgaccttcctcagtcatttctgcaaagccaaggggcagcctcctgtcaaggtagctagaggcctgggaaaggagatagccttgctccggcccccttgaccttcagcaaatcacttctctccctgcgctcacacagacacacacacacacacgtacatgcacacatttttcctgtcaggttaacttatttgtaggttctgcattattagaactttctag

SEQ ID NO: 11010 - DNA, 307 bp, Homo sapiens
agctgggcaggacacaggcgagctcaggtgatgccggccaccagcaatgcctggcctggtagctccgcttctgctttcaccaagagagtgtttcttcactcaactcaggtggcatttggggtgacatctcaaaggccaggaattccgttgacttgttggctgccagtaggggcgggaggaaaggcggaggcgagccctggaggagggaggccacaactccgagctgcccacctggtgctgagctggggccccgcctcctttctgttttatttttgaggaaataaaataaccaagtgctaaatcttgt

SEQ ID NO: 11011 - DNA, 795 bp, Homo sapiens
aatcctttatttttgtaccatggggtgggccccgggcctgagaaggaagaagcaccctctccccggcctcctctgtctgcacccgtggggctgtgacttactcctgcctccaggggcggggcggggcccccctgggacctcttaaggcccaaggtgggccccaggacctctgggcagagtggactgctcatggcagatgtgtggcaatgtctggctgtgtctctccggcacctgcgtcccctctcccgggctcccctgctgcatggtggatgtgctccttcctggcccggtcacattgcctccttgagccttagtccagggggtcactcctcccaccccacctacctcacagggttgttgtgagggtgcacagaggagcaaagtccctgaaggccctcaggcagtatataggggccgcccaccttcagctgccctgggatgggaaggacccagcccgacccctgggcataacactgtgtttgcaaatggagattcaggtattggggatgcaggttgtggggagctggcctggcagagtaggggtagttggcttggccttctctttggtgatcccacccccagccatttgcattgctggcccagcgcctggcctggggggcggggagaggcagcagaaggggctgggcaggggcggtggaggactcaggaactgcccggggagagtgggtatggcggctgagccaggggccctcctgtgtttgacttcccgggatgggtccttgcttctcagctgtgtccgaccccaccatgtaataaaacccaaaggaacagccc

SEQ ID NO: 11012 - DNA, 1828 bp, Homo sapiens
gattcctggaggtggcactgggggctggtcaccctgagagtcccatcgcctgcagcacctggagacccacctcccaccccagtgcactcttttgggccacagacatcattgctgttccccgttacctcgagctgactctagaggggaaggcagagctcaggagggtgggtgggagctgcagtgggctcagagtccagcaatgaggccccctggcctgggcacccagctgcaggcccctgccctacgtgcactacaggaaggggtgaggagagcagccagaggaaaaccagccccagaatgctgcaacttctcttctctctggacttcggtgtcctcggctctgaaggcgctctctgcacttagatgctgtcagccctcaacgtaggaggggccgtggggtccctaagtgattcttctccctggcaaggctcttccttttcagggatatctctgccaacccctcccctgtcctcgggttgggcttggccctctctgcctgagagagctcagcacacacacagctcagacccacggacaggaccccgggacagaaccccgggagcactgccctaggagcccggaccccacgagctcagtcccagctctgcctctgactcgctgtgtgccctctgccaagtcatgcccattctctagttcttgcaaaactgcagtgtttggactagaaacgtattggcccctgctagccctgtgctccagcttccagctggagatggcagccgttgtttgcggagcccaggctgactccggattcaacgttgctggggagagaaaagcagtatagactccaccttccaggatgtccatttcggggagaggagcaggtgggaccctcaagaaaatgacggagaacatcccagacagatgggactcaagcaggatgggtgctatatccaagaagccaagaagggagagtttcgtgcactgtggttaacaggagggctgcctggaggcagtggctgagccagaaagtaacacagagctcatgcttggagagagagagtcttggccatggctttcctgcaagaccactgacgagcagtcccatggtgataaagggcagcccggcgggtcccagcatctcgagaccctctgcagaagtattatcagagtagagctgacttccagtacccgggcagccagctctgtctccagggaggcctggcctggaggaggagtccactaacaggaaacacttctcaccccctcacacaggcccaggggagcccctggagggaaattccttggcaggggaacaggaaatgtggccgcctctgccccactgccagcctgagtgggcaaggaagcaggtggatcccccagaaggaaccgcagctcgcgaggcacctctcctcgtccccacccacccccacatttgcacaccttccacagggtcaggatggagtagctgccttgcgaggtggtgagactcctgtctctggaggtctgcaagcactggtagtgatattgcagcagacaaggtctgggttgggcgtctgcaggaggacaccttgtgggacatctgaggacatccgcagattcttgtcagcctgtgaactaggccctgcctctgtcacctcattggtccatgaaggagcagccaggggtggtggaaggagcactgggctaggggtcaggggtcagagattctgtcctgctcctgggatgcactggctactcccttagtctactcccttcccctctctggtcctcagcttcctccatcatggaggagatgggatcatggattttctgggcataagtggctgttctgggagtcattccaaagagagaataaaactcctgatcc

SEQ ID NO: 11013 - DNA, 581 bp, Homo sapiens
ggggctggggcacggtcccagggccccacctaggtgcagagccggcccctcacctaacagctggttcctaccagaccggagaggggagaagtcatgttgcccctaaacccctccccacctctgcaggacagacatgggagggaggacagggaaggccaggcttgctctgggacttttatgctcccagaggccctgccaaactgaccacctcccccgactgccactctggacctaatagctgttccttaggccccactccatgccacccccaccagctggaggacccagcctcacagtgtgtcctttgtgccagaccaagcggcccgtggggggtggggggcagggagtgtaccacacagggccattgtctcacctcccaaagggaccgcctgcccccagctcatcccagagcgtccctgctgcaaccctgacagccgtctcccaggccgcttccccaacatccccgccccagcctccctcttaccccagaaaggtcaggtatgacctcccggggaggaatcccacctgcctgtataccccagacttgcctctggggcctgattaaataaggctgttttgat

SEQ ID NO: 11014 - DNA, 1057 bp, Homo sapiens
ggttcttggggtccataaggctcttcagagcccaagagagttgtgctaagatggcccaggatggaggtccgggcctgccccaagggtcccaccacagccagcgggctggcctcccaccccagcatccatacacgtaggcctgttgctgagggaaggccctctagggtcatctggtccaggggttctttgcttcagctgcacatcggctgcctctccaggaagcgtgttcaacacatggaatcagggctccacccagacctgccgaggccacactcctggagtatctgcatccagagatctgcacgtttgtaaagctaaggggtggtgcttgggctcaggcctgaggttttgcatctgttcaatagcagaggagagaggggtgtactgtctgtggcccccagcatgggccacataccaacccaccatggagcaaagctgattttaagtggtggtagagatacagtttctcttttaatacttacgtgtttagttgggtgcagtggcttatacctgtaatttcagcacttggggaggccaaggcaggaggcttgcttgaggcaaggagttcaaggctacagtgagctatgattgtgccactgtactccagactggacaacagagtgagaccccatctctaaataataatcattattgttacatatttgttttaacatttttttctcaagtataactagtcctatgatttcatagatgtagcttaggataaggccaaggtaggtgttgcctatataaggtttttttaaaaaaggaaaaataggccgggctggtggctcacgcctgtaatcccagcactttggcaggctgaggcgggcagatcacctgagatcaggagttcaagatcagcctgaccaacatggagaagccccatgtctactaaaaataaaaaattagcgaggcgtggtgggcgggcgcctgtaatcccagctacttgggaggctgaggcagaagaatcatttgaacccaggaggcagaggttacagtgagccgagatcgtgctactgcattccaacctgggcaacaagagtgaaactctgtc

SEQ ID NO: 11015 - DNA, 852 bp, Homo sapiens
aacagaggggctggggagaggaaggggcagagggaccggtcactgtccagcctggagggaggcattggtggccaaggacaccctttgttgcccatggccattcacccccaggcctggtgcttctccccacacccctgtaggcctcaagtgactcttccccctcctgctccggccccgcccctgctgagccaaacccagtaggaggctgggcctgggtttgtgccgctggggtctccatcaccgggacctggagagggaggggctgtgtagccttggaagaacttgggtcatggggaggaagcacagctgttggggaagggccaggacctcaggcccagccccaaccccagctggggtggggtcttccccacctgtctcttatgccttatgggaaggcccagccataactcgggggccatgctggagctggggaccagcttaggcctcctccataggaacccagtgactggggggtgacgcctacacccccagctatttgcactctggtgtgtggtttgactctgcttttcttccggattggccctgtggtcacagcctcagggggccaggctgggggaacctcacctggcccgtactcctgggggtttccctttgccattgggccccctgagggactgtgggggctcaagggtaatgccagaggcccatggccccagcgaggggctgtggggcacctagagttctcggtgtgtctccttcattcattggcctctgctggggcctcctatgggtgtcttacgtctgtccatccatctgtccgtggtcagaagtggggtcagtgtgtgagtgagagcaggagtatttatgaaaataaaacgtcgtttttcctgg

SEQ ID NO: 11016 - DNA, 358 bp, Homo sapiens
gtggctggtttctccctaagcagccctcagcaccccctccctccccacctggccctcccaggacagctctcgccccccacaaaggggcatgggcctccagcctttgcccacaagtgcctcagtgcccactgggtcggcccccatggccaggagggctcaggacaatcctctatttcctgaccttttcctcgtccaccctgggcttggggacccccccaccggactctccactctccggcaggtcctaggggagccaccggaaggaaggagaggtttgcctgctcctacgggactgattcttctcttgccgacatgttttttgtaaggctggtaaataaattattttggacaaaactgg

SEQ ID NO: 11017 - DNA, 1061 bp, Homo sapiens
gcccactgcacctgcagccacaggcccacccctccccactccctgatcccgtaggtggaggcgatgggtcacgagccatgttaagcacaaccggctccttggtccagttctgcaccggggtggggctgggacccggggaaggtttgagggcccttgcaaccccctcccagcagtggctgggcactctttgctgccccagaagctggtcccctatggattcatcttggcctgacccagccaggtggccttatttcttccctgtcacctcccctccttgaaatctgggccctggtgcctgctgaagattccctctatccctgagtacttagtcttctcccccttccctggggcttctagagctctctctgcccctcaggtcctggcccttgggtccttgtcaaccagaggtctagggaaccacaacccttattgtcctgggtggaccaatccaaaggctaagtgatagtgactcatcaatgttgggtcctgtggggtaccagtttaggttcctaagtaatagtgaccctttcacgtcctggagcccgagtggaccaatcggaagcctaagtgacgatgaccctcgcatgtcctaggtccctgggtggacccatcaggaccccaagtgatagtgacccagtggtcttttagatcctcagtagaacagtccagaagcctgagagacagtggccccttgataatctgggtctcacgggaccagctaggggtccaggtttcagtcagtaaataagagtggtccacgtcctaaagacacctctcctttacaaagacttgtgatgctctggggcttctgtggccaagccccaccctttcctggtcatggtacccgtacagcgttgatggccacagctcgaaggggggctttcgtgtccccctgtgcggtcagtgttttcagtaccacctctctcccgtgcccacttggctatttacttatttatttattgtgtgccagtgatggtgggtgggggctgggccttccccgccacctccacccctgttgtgacctgtccttccgtacttaataaagtgcgcgtgggagtgtt

SEQ ID NO: 11018 - DNA, 51 bp, Homo sapiens
aatcagccagcccatggcccccaataaaggcagctgcctctgctccctctg

SEQ ID NO: 11019 - DNA, 2141 bp, Homo sapiens
gaccgagaacgaagcggtgccccagtctaggctgcggggacctgtccttgctcagcttggctgtccctgtagcccagcctgcacctaggtaatgactgcacagctcaaggttgggaagccaggacctctctggcctggggccagctgcctttgcctggggtcagctgcctttgcctggggtttgaattcccgaaggagcaggcagctgagagcaggcctcccccaggaagagccttcagagccacgtgggggcatcttcccaaatgtgcaccccacctggcactcatcagatttgtgcgcttgtgatttgtttgtccttgataccacgcacaagggcaggtttttggggtggtggaaatggccagggcccatgggtctgtctccagcagttagccctgtggctgcaataaagtacagttctccctgtgttaagatcctaaccagggttaaggatcagtgtgtccgttgctagaatccagagcccacctgctgctctgaaaagcaggctcctgaggccagtgggggagcagtgccccccatgcccttcaccgaggagcctctgtgcctgtcccttgtcctcggccccaggagtctcctcaactgacactgaagtggtggaagcagttgagtgccaggtcatcccccatcaccacactggggcagcgtccccaggcttccagcagctcccaggtgggtcccaacgtggaaggattaattaattctttctaaagcagttgcagccgggcttggtggctcacgcctgtaatcccagcactttgggaggcccaggcgggcagatcacttaaggtcgggagctcgagaccagcctggccaacatggtgaaaccctgtctctactaaaaatgcaaaaattagccaggtgtggtggcacacgcgtgtaatcccagctacttgggaggctgaggtggaagaatcacttgaaccctggaggcggaggctgcagtgagccgagatcacgccattgcactccagcctgggcaacgttgtgaccttgtctcaaaaaaaaactaaaaaataaagcagttgcatcttgactcgtacaaaagtagcccccaccagagtagaccctgcgggtgccagctagaactccacaaggggccatgtcttcacactccttccagatggatgagttgatggaaaccctgtcccttccttgtcccagcttgtcagtcctgggcaggagagaatttcaggttgtgccttggttagaggagctgtgttgggtcctaaacactaggaccacaaaggggagtgaactgtgttcccagggcttgctgacgcccgtggactatggagtcaggatgacaggacagtgcggtgaggggcatctgcgacaggactgcgggctctacccgccctgatgtgggagctcctggagtgggggtgagcagtgagccagggtctgcagggctgtcctctctccacagccaacagccaggccttacagtggggcaggcttagtgactgtgcctcagttatgctgtacctgggagtgggcaggccctctcccatgtcaccatcaaaacccactgatgaaggctggtgggagtctgagggctgcacccgggtatggtgagttcccctcagggattgtgctgagcgccttggcctggcttcttggctccgcccacctgctctccctgccaccaagttgtcttccccgggtggcatgtgccacttggctgcctcgtgcctgggcacagtggtgcctattatgggccctccaggtggctctggtgctcagcctgctgtgagcaggaacagctgagtcccaggggttcttgcacacagcagggctcgggtttgaatccaggctctgctgcttggtcgctgcatgagcttctgctgtgctgacctctctggtttgtctcgtcatgtgtaaggtgacaccagatacctacctcttagggctgccccgagactaaaataagaccatgtgcatgaaccacttaccaaagtgcctgttgctctccaggtgtgcctaccgcatgttgccgctgctgtttctgctgggacgtctgactccagttccttctcccctctccagtgacaaggtcatttacaacttacatttacaatttatagtgtttaccagtattaaattctcagccactcctttcc

SEQ ID NO: 11020 - DNA, 2773 bp, Homo sapiens
gtcccgcccagctgcagaccctccaggctggaggaccagccgccctccttccctcctggatggaagtaaaaagccaagctttctccccaccctctgtgggccacacgtgcacttgcacccaccacacacacacacacacacacacacacacacacagacacacagacacatacgcacacacgtgcacacatgtacacacggatacacacacacacacacacactgcatatctgagcgcgcccctcgcactgggtctcaccttgcaccttcttcaggattttatatgtgaagagatttttatatagatttttttcctttttttccaaaacactttatactttaaaaaaaaaaaaaaaaagcaattcctggtggctgtgtgcctccaaccctggtccccctctgtctccagccaccctctgcttgggcttctgagctggtggccctggcccagaggtctggcggaggcccaggcagcagccatggcggggtgtctctacaggggagaggcgggagcctgccaccctcttcctgccctacctcctactaacacttcctgccccatttggacccgtaccatggggctcaggacagagggagctagcagctggcctccatggccccacagcctccttcgaggctgtgctgggtgcagaaccgccagagccacccaaaaggtgtttctcttctgctccctgaacctcttaacttaataaaacgttccagcagctctggtgtcctagatggctggcagaacaggaatggagattggggtttcttgaagtggcttccccactcacaccctacccacaccccacccttcctaaagcagcggcctctaggcttctgagggtggggctgaaaatccaaggtctcccttagtacagactgtgacgcccccagtgtggcttgcaggctagtggcagcggaagcatgtgggaaatagcaagtccagtcccaccccaacctactgaaccagcgtctgcattttaacagggtgccccagtgattcacgtgaccttcaaagtctgaggagccctggagtagggcccagggcccaggcctgagagagaggcctggggctaagactagccctgaccatgaccttgggcaagtcacacccctcactgagcctcagtttgcttctccatcaaatgggtgtttttctttcagtcccagtcctctcctgaggcttttcccagaggtcatgcccagccctgggcaggggtgagggcagggttgtggctgccaggcacaggtccagcgggctgggagtcctcaccatggctggctgtgctgattatggttgcatggggctgggaagaggtcccatttctgagccacagaaacaggccacatccagtaggggtcctggaaggctgtgagaacccagaggagaccctgacccagcctgcaggtagaagactgcctttggaggcagctttgaaagatgactcttccagatggaagaatcaggaagggccttcccacgtggaggcaccagcaggagcaaacgtccctggtgtgttcaggcaaagagccacaggagagtgacctcgtggagtgggaagagattgtttcccattcccttgccagggattggttgaggaatggacaaggcttgcagttcacgcaagccagtgaaatgcgaggggaagtcttgggagtggggtggaggaggtcatctgggaagggtgtccttggtcttaaaaagaggcacaagaggccgggcgcggtggctcttgcctattatcctagcactttgggaggccaaggcagggggatcacttgaggtcaggagttcgagaccagcctggccaacatggtgaaaccccgtctctactaaaaatacaaaaaattagccagacgtggtgccaagcacctgtaatcccagctactcaggaggctgaggcaggagaatcacttgaacccaggaggcagaagttgcagtgagccaagatcgcgccactgcactccagcctgtgtgacaagggcgaaactccatctcaaaaaaaaagggggagggtggcgcaaggagaggacacctctctcctggccctgtcgccatcttccctcatcaatagctaaaaatggcaaagaagaaagagccaggaccccgtgccatcaaatcctccggccttgtgctgccctgtctcggcactgcttgccttaggagatcaggagtgttcctagccactgggagatgggatgcctgccactggcagctctgccgtccatcctcaccatcccaccgtccccccaagacagctctccatcccatcctctgcctcccttctagcctcaacctaactcagggctcccccgtctcacacctgggttgcaggaacatcctcttcaccaacccccctcccatccctcctcagggctgcctagggcagctacaaaaaccaggccagcctctgaaaggtgctccacatctcattaaaaaccgtgaaatcgcactgccccactatcagaatagctcagaggagaaggtctgccagtaccaagtgctggtggggatacggagaagagcagctcccaggcgctgctggtgcaaatgtgctttgttgcacccacggcaggaaactgaccagcttctcatcaagttaaatacgcatctaccctatggcctagcatttccactcttgcttacacatccaggagaaatgagtccttacatgcacaaaaggatgagtaccgtaatactcacatcagcaaataaacaatacagctgtgtgtcagtagtagaatgaataaattgtggtcgattcat

SEQ ID NO: 11021 - DNA, 425 bp, Homo sapiens
gcgagggtccggctgactgcagagcctgtgtgtgagtccccgtgtgacactctgcacttggacccttgccccggggaagtggggggctagtggccccgagagtcactccctgaacacagggaaatcctgccgaggcccactgggccaaggccccacacaaggaggtctgcaggacaggggagcctccagtagccctcagagaatgcaccgtccgcctaggacagcggttctcaacggggtccattttgtcccccttggggacatttggctgtgtctgggaatacttctggttgtcacaactaggacaaactaactctctagaaaaaacgtgtgtgtgtacacatatataagtttattataaattttaccaataaaaacaatgcttagtacacaatttacaaataaaaatatataattttattgtg

SEQ ID NO: 11022 - DNA, 1306 bp, Homo sapiens
caatgaagtcttttcttgcggacactccctcctgtctcctattttctgtaaataattttctccttttttctctcttgatgctcaccaccaccttttgcccccttctgttctgactttataagagacaggatttggattcttcagaaattacagaataattcatttttccttaaccagttgtgcaaggacagcaacaaccaatctaatgatgagaatgtacttatattttgttttgctattaacctacttacggggttagggatttgcggggggggcttgtgtgttttgttggcttgtttgccatgaaggtagatgtgggtggggagaagacacaaggcagtttgttctggctagatgagagggaacccaggaattgtgaggttagcaggaatatctttagggtgagtgagttttctttgagttgggcacccgttgtgagagtttcagaacctttggccagcaggagagaggtggtagggagcagccagccggcaaaggaaggagggggaaaaaaaccgccaccgggctgacttccacctcccagtggtgagcagtgggggcccaaacccagtttccttctcatttttgttagtttgcgctttcggcctccctattttcttagggaaggggagtggggtccaagtgacagctggatgggagaagccatagtttctcccagtcagctaggatgtagccattgggggatctttgtggcttcagcaaattctcttgttaaaccggagtgaaaacttcaggggaagggtggggagtcagccaagtgcctcagtgtgccctgttgaaacttaggtttttccacgcaatcgatggattgtgtcctaggaagacttttcttttcctctggatttttgttcctcctgtacaagaggtgtctttgcttggtttggtggggctgcggccacttaaaacctcccgatctctttttgagtcctttattataagtagttgtagctgcgggagggggagggggagtgggcgggcagtggatagtaagacttactgcagtcgatttgggatttgctaagtagttttacagagctagatctgtgtgcatgtgtgtgtttgtgtatatatacatatctagggctagtacttagtttcacacccgggagctgggagaaaaaacctgtacagttgtctttctcttatttttaataaaatagaaaaatcgcgcacttgcgcgtcccccccccacccccttttttaaacaagtgttacttgtgccgggaaaattttgctgtctttgtaattttaaaactttaaaataaattggaaaagggagaaactg

SEQ ID NO: 11023 - DNA, 178 bp, Homo sapiens
gctctgggtaaggacgagaagagccaaggtccgcctactgccacagggtcaaaggaggttttcgatcagcccagaccagaggctctgagccctgaaccaaagtcccagagctgggctgggacgtgacctgtgctgagggctgtgagaatgtgaaacaacagtgtgaaaattggctgtg

SEQ ID NO: 11024 - DNA, 25 bp, Homo sapiens
accctgccgcctggactccgcctgt

SEQ ID NO: 11025 - DNA, 166 bp, Homo sapiens
tgatattcacacacattcaggaacctgttttgatgtattataggcaggaagtgtttttgctaccgtgaaacctttacctagatcagccatcagcctgtcaactcagttaacaagttaaggaccgaagtgtttcaagtggatctcagtaaaggatctttggagccag

SEQ ID NO: 11026 - DNA, 1188 bp, Homo sapiens
cagcacgagaagccagttggggactgccccctcctggagcagctcctgggctgtgctctgtttgaagggggcgccctgctcccctcagatcagtcaggaggaagatgactaaggggagggatcctctgggtgatggcctcttcctcctcagggacctctgactgctctgggccaaagaatctcttgtttcttctccgagccccaggcagcggtgattcagccctgcccaacctgattctgatgactgcggatgctgtgacggacccaaggggcaaatagggtcccagggtccagggaggggcgcctgctgagcacttccgcccctcaccctgcccagcccctgccatgagctctgggctgggtctccgcctccagggttctgctcttccaggcaggccagcaagtggcgctgggccacactggcttcttcctgccccatccctggctctgagtctctgtcttcctgtcctgtgcaggcgcccttggatctcagtttccctcactcaggaactctgtttctgaagtcttcagttaagtttgagtttatgactgagtggcctgtactgtcagacgtgaatgggcctgacgggcaaatccatccctctctccctcacagttccaggagcggcttccctcgtctccccttactccacagggagcctcccttgccaggaccagggctgcgacggccatgctggggcaggtgagtgctctgttagctgctcccagtgctgtccccaggctgcagttctggtccctggttgtcaggtaggaagggtgcacttgaagcaggtgctcatctcggttccttaacgtttatagtctgacccctcacttaggctttcctctgccaccccggtccagggaagaggctcgctcccgcccatggtcatcactggtctgtctgctctgttgtctgttctttccctgactccctcccaccgaaggcctgatggctactcacccctctgggatggctatgggagaggaggagtgatggggaccgccaccttttctgcaggaaatgtgcccagcagctcttggtcaaagcactgttgctataagctatctctgggatgcctctaggcccccttccctctacacacctctgggaaaagattacactgtattaactctcgaggagtttcctcaccaataaacagacaacctcaactgccagtgccctgc

SEQ ID NO: 11027 - DNA, 84 bp, Homo sapiens
gctggagtcatcttcctgcccttgccccatgcccaattttcattctcactttatatgtgtaaataataaaatattcaactttcc

SEQ ID NO: 11028 - DNA, 568 bp, Homo sapiens
gtgccccgcggctgtggtgccgggggcagggtgcgtgggaggacggagcctgggagcggggcggggccgccgcgcaagggggcgacgcataaaggcctgctggcttggggcgcctgcctccctgctcctctgtcctcgcacagcgaacctgggctcctgcccaggacaggcaccagggtcatggcctgggacctggacactggcccctccaccctccctcccctcccggctccccggccagagggagagcttggtctctggacctgccttaggaaggagagggagggcaggaaggaaaagaaaggacttggaggtggcaggagtccgagccctgctccttgtgggcgctcacactgcccccggagcctgctgggagtggggccagccgtggacagctgaggttggggtcaatgcctcctgggcacccttgcctcgccccagaccggcccgtccagtccccatcacacctcggcggcctttatttattctgttcccccagctcggccacttctctgaaggagggctgggttctgggcctgtatcgaataaacacaaacctggatggcgc

SEQ ID NO: 11029 - DNA, 1627 bp, Homo sapiens
tgcccgcccccgccatgcctcagccacgcccctccggcctcagctccctccccaaagtgcctgagcgccgcctctgtgcccaggtcccatttctctgcagcactggccccttggtgcacacacattcccttcgtgggccctgtcttcctcttgcagccccccaaactgggaccgaatgaccctgggaaggggaacttgggtaggttggggatggggcagaggtctggatctgggatcgcccttggctgaaagtttagcctttttagattgagagatacagagccggcttagagaacagctgttgggggagaagagggcacccctcatcttggaaactgctcttattgtgccaatatgccctccaaaccctcccaggattcaaagctaggtttggctgtctgtgacttacgggaccgtcctgctgagaaattgcactgaagagatgcccccacctctggttgggcctgggggtgcctggccttccgaaactaaaagagtgggtgggaagactagtgaaacccagttcacggatggggaaacaggcctgaggtcacatttcacttagtggttgtgttgggaccaaaacctgggtgtcctcactgctgccctgagtccagccatggttttcagggggacagtggacagggactcagaaatgtggtgggagggcctccctggcttgggagaccgctctctgcaagggagggggagagaagcagagggagagagaaggtgacacggatggaagagtgggaaggagctggcctggctcagccctaggctgtccctgcagccagggtgtccgggggctggccagtcagagaaagggggccatggactgctgtggcaaatagggagacaaggagacagaccctgcagtcctactacagtctggagtggggtcctaagaagaagggtcccacctcaacccctgtcagtgtccactgtggggtgggggctgacccctgcctttgattgtcattctcctgggaagcccagtctcagtccctcccccaacactgtccacactgcccctccccactgtttatttattgcacggatctaagttattctccccagccagagcccgagctcctgctccctgggaaaagtggcgtatggccctgagctgggctttatattttatatctgcaaataaatcacattttatcttatatttagggaaagccggagagcaacaacaaaaaatgtttaagccgggcgcggtggctcacatctgtaatcccagcactttgggagtccaaggagggggatcgcttgagtccaggagtttgagaccagcctggacaacatggtgaaaccccatctctacaaaaaatacaaaaattagccatgcatggtggctcatgcctgtagtcccagctacttgggaggctgaggcaggaggatcacttaagcccagaaggcagaggttgtagtgagctgagatcgcaccactgcactccagcctgggcaacatagcaaaatcctgtctcaaaaaaaaagttaaaaaatattgcccggctcctagaatttatttatttcctgacttacagcaagcgagttatcgtcttctgtattttgtagactttctaaataaagtcaaattctttctttttccacagag

SEQ ID NO: 11030 - DNA, 903 bp, Homo sapiens
ggaccttcagagacagtctacgccttaacaagcacatgaaggaaactattttgaatgttctctttggcaacttatccataatttgggatcaaatgttaaaaccagaaaagtgtttagtgtggatttcagcaaaacctgatcatcccacccagaagaccttctcatcaatagatcgcccttaaagacccattgtaaggtcataaaaaacctcggccacctgcacaaagatggtgcctcactgcaacaagaaaccttaaggtgtcttaccgacgaaataaaaaacataaatgattgttctccaaggcctgagggcaagactcatgatgagcaagtcaaccccaatctggaacaatgtccctcctcttagaatgtcccaactaaagaccagttaaaatattagggtacgttcttgtgaatttccactttccaggtagatgaccaaatttaggtggtcaagatataaaggtgtcagctagttttaagtgtgaaacttatttcactttcacactgccttcaggccagaagcaaaccaaatttaccaggtttggctggaggagttttgtgactcatcttttactggtttgaattttttcaaaccagtggctgatacctgccttgtacttagtaccttaataccaataacctaatggtacttaggcgagtaccatttgcacaatcactgttttacttatgagcagatacagatatatccaaacccttacctactaggtatcctgctagggttttcaattccaattcttgtattaagttttttcctttcagttttaggtgcgaaagtaatcagtcaatccaatatcccccatctttgtcttgaaacaaaaactgttttaagacgtctacgttgaattattcagagaattaagcaataaaagctcacacctt

SEQ ID NO: 11031 - DNA, 107 bp, Homo sapiens
taagtattccagcagatacagatgtgaacagtcaagtctctgccatccacaatgcttgtgttctaatgcaagaagacaaatattttcaataaagaaacaaatgccat

SEQ ID NO: 11032 - DNA, 612 bp, Homo sapiens
agaccccagagacatttattggggagtaggatgtggctgagtgctttttttttggccagactagcggattcagtcctggaagagagtatcatataatgagacccacaggcactggcacccttgggttggcaatagaaggtgacatggaatggagaaaaccaagattccagatggggatagtaactagaaggtgcttcagatgcactgcctgcgggtgccagtctgaaaaccagaccgcacagaggcctggggctgctgatgagctttttggtgctctccacacacaagctcgcaaacacacatgtcccagaatagctctgttgggttgtgttgggagaagcggctggagttcattctctcacccccttatgttggtgtttggcgtgtgacagcagttctacagagctctgtgttggggtcatggatgagcggctctcttggctcttaaaggcaggcctctctcttcttgcctttaaagaatcctccttcctcacacctggcctcctctggcttcagcttctcagcagcaagcaccagccttccacaacaacactatatttttatgctactttcctgtttgcactactacttttttattaaacgatgttaaat

SEQ ID NO: 11033 - DNA, 917 bp, Homo sapiens
attgttattgctgtttgagctgtctcagtgggataagtttgaaattcaagtgtttgaactgctgataatttggatttttttttttttttaactttggcacattgatctatctaaacctggtggggagaattatccccacattgtctcatggaaagactcaacttgcaactgtgccctccacactatccttacttctgtctccactctgataccagagtgcagccatgcagatggttattccagctctggtcacccgactcctttcaccaaattgctcctaactggaagatctcactttccccttgtggggtaggaaccgatgccagtgggagggatgtgcccctgaccattaacgactgttttttttttttttttttaaagaatggagttgttggggcaggacatgcacacaatgtgaaacagacaaaatgcattacacctgtagtgtaaagtggccactatgaatccctatgtatgagaggagggaggcaggctgcagcttcagccacagaatggggactatggaagacagcaggagctcatttcctctgcacattttggctgttagacctgtgtgtgtgtttaaaaaaagagaagtcagtgctcactttttgtatttaaatattaaaaatgattccaactgaaagtgtcatcctaagtaccttgaaatgagaccacgtcagagacatgtactgcccctcacattttctcacctaaaccagcagcacctccatcttaacagccataggcccaaattgtttccaagtgaaaattcatttttagccaagtacttcatagcaatctttgccctgaatttaggcagtcactttgagatccatcagcctaaaacaaaggattgggtctatgtacttctttagtctataatgacactgtgtaattataaagtatttgtaggg

SEQ ID NO: 11034 - DNA, 2881 bp, Homo sapiens
accttcccctggcccaccctcaccacccaaggggtcatcatctctggccaccactccaccagatgggcagagcagctatgaccgccacccagccctcccgctcaggccacagccggagcctccgcattgcccccacccccattttccaggggggttgtaatttataagctgacgaaggtagccagacttccggaggactgaccatctctcactgtcctccccaccttcttcctcactcacacattttttgtacatctgggcccttagtttttattctgtttattatatgtctctgtctctctctattgtgtgtgtgtgtgtgtgtgtgtgtgtgtgtgtgtgtgtggtgcaggagtgccacccccagggccctgtcaacctctcttttctcctccatggctgtctgcctgcgtatctgtctctgagaatcctcggggcggtcaggggatgtcaggaggggaaggagccgccctccctatcttgctgctcctcttggcactcaggggcaccttccatggagccagaccgggtggaggggcttctgggatttggtgtctgctgctgccagagcaggaacccccagtctaggacttgggcattttaacagggagaaagtagtggcttcccttttctctctctcctcctttttccctttaagcccacagattcaggtcatgccaaaagctctctggttgtaacctggagacatgtggaggggaatggcgatgggattataggactctccccatctcgggccctgaccctgacccttgccaccaacccaaagacagctggtgggtttccccttggagacaatcctgcgtttgcctgggccggccctggctgccctcagctttcgctgatctgcccggcctggagcctcccatcaccccgcttcttgttgggcctcaggcactggttaccagaagggggtctgggtctgctcaggatcatgttttgtagcacctcctgttggaggggtggagggatgttcccctgagccaggctgagactagaaccccatcttccctgagccaggctgagactagaaccccatcttccccaccacgccacccctgtggctgctacaggagcacagtagtgaaggcctgagctccaggtttgaaagacccaactggagcgtggggcgggcaggcaggggttagtgaaaggacacttccagggttaggacagagcatttagccttctggaagaacccctgcctggggtgggactgtgcaggccagagaaggtggcatgggcctgaacccacctggactgacttctgcactgaagccacagatggagggtaggctggtgggtgggggtggttcgttctctagccggggcagacacccagctggctgggtccttcctcagccttgcctcctcctgtccccaaccctttcctttcctcctgcttgcggactgctggtcccctctccttccctccttccagctgtttctagttaccacctacccctggccgtggactgatcagaccagcattcaaaataaaagtttgttccaagttgacagtgtggtgctccctgcccagcccctccaggtggaggtgctgccacgggaacgcagttgctctgcctgccctggggcccctggcgacagctgggagcagggcagtgctgtgaggagcccagctttcccagtcaggcaggcatggcttccgtgttcaggctccctcaccagctggtgacacgggacaagcttacaaaccttctctgaacctcagttttctcatttacaagaggcaaagccatccatcaccttgtgtggattcagagaatgtgaggccctggggtgtcctacacaagggaaaggcttgctcagtgagcggtctgcacaccgttagccaccctgccacctctgtgccctgggcaggctccaaaggaaagctctggctgggactgccaggagtctcacacgctcctgttgacattcccagcagccgcccctgaggtcgatgtttgttctgtttttctttttcttttttgagacggagtctcgctgtgttgccaggctggagtgcagtggtgtgatctctgctcactgcaacctccgcctgccagtttcaagtgattctctgcctcagccttctgagtagctgggactacaggtgcacgccaccacgcccagctaactttttgtattttagtagagacagggtttcgccatgtcggccagggtggtcttgatctcctgacctcatgatccacccgcctcagcctcccaaagtgctgggattacaggtatgagccaccgcaccgggcctgttctatttttctagttaagggaactgaagctcagagaggtgtcaccagcaggtgttcattcccatgccagccttgccccccggcttttcccaggcaggctcctgcgtgcccactggctccagcctggtcctctgtctcttggctgcttcactcctgctctttgtcccgactctggccctgcttacaggggccactacctgctggtgcctccataacaagcgtctggcgttgagacccctggcatggcaggggctttggggtctggtttccacaaggcttagccatggcagaacctcgttttattttaactctttgcccctacaaacaaacagcagtacttgccagaaccattcttgggattcaggagctcgggcgactgccttggcctctggccgcacccaggagggtggggttggatctgtgtagttgccaggcccacacctgccagcagggggctgactggatccatgctttactgtgtttaatgggggtaacaggggtccctacagccctcccagctaaacatttggaacaaaacaccagcccttttgtagtggatgcagaataaaattgttaatccaatcacctcc

SEQ ID NO: 11035 - DNA, 674 bp, Homo sapiens
aggatgggcctcagtctctaaggaaggcagagacctgggttgagcagcagaataaaagatcttcttccaagaaatgcaaacagaccgttcaccaccatctccagctgctcacagacgccagcaaagcagtatgctcccgatcaagtagatttttaaaaaatcagagtgggccgggcgcggtggctcacgcctgtaatcccagcactttggaggccaaggcgggtggatcacgaggtcaggagatcgagaccatcctggctaacacggtgaaaccctgtctctactaaaaatacaaaaaattagccaggcgtggtggcgggcgcctgtagtcccagctactctggaggctgaggcaggagagtagcgtgaacccgggaggcagagcttgcggtgagccgagattgcgctactgcactccagcctgggcgacagtaccagactccatctcaaaaaaaaaaaaaccagactgaattaattttaactgaaaatttctcttatgttccaagtacacaatagtaagattatgctcaatattctcagaataattttcaatgtattaatgaaatgaaatgataatttggcttcatatctagactaacacaaaattaagaatcttccataattgcttttgctcagtaactgtgtcatgaattgcaagagtttccacaaacact

SEQ ID NO: 11036 - DNA, 333 bp, Homo sapiens
aggatgggcctcagtctctaaggaaggcagagacctgggttgagcagcagaataaaagatcttcttccaagaaatgcaaacagaccgttcaccaccatctccagctgctcacagacaccagcaaagcaatgtgctcctgatcaagtagattttttaaaaatcagagtcaattaattttaattgaaaatttctcttatgttccaagtgtacaagagtaagattatgctcaatattcccagaatagttttcaatgtattaatgaagtgattaattggctccatatttagactaataaaacattaagaatcttccataattgtttccacaaacact

SEQ ID NO: 11037 - DNA, 431 bp, Homo sapiens
ggggtctccctgggcctcatggtctgtctcctctagcctcctgctcatgctgcacgggcctcccctccaccctggacccgctctgtttctgcctggtcatcctgagcccctcctggcctcagggccattccacagtgctcccctgcctcaccgcttcctcctcgctcttccagactcttcctgcagaggctcctttctgcctccatggctatccatccacccccacagaccccgttcctccagcctgcgtgcccctaacctggcttttcccatctccccagcataaccaaatcttactaaactcatcctaggctgggcatggtgactcacgcctgtaatcccccagcaatttgggaggcaaaggtgggagaatcgcgtgagcccaggagttccagaccaggctgggtcacatgacaaagccccatctctac

SEQ ID NO: 11038 - DNA, 3273 bp, Homo sapiens
ggggtctccccgggcctcatggtctgtctcctctagcctcctgctcatgttgtgcaggcctcccctccatcctggaccagctgtgcttttgcctggtcatcctgagcccctcctggcctcagggccattccatagtgctcccctgcctcaccacctcctctccgctctcccaggctcttcctgcagaggcctctttctgcctccatggctatccatccacccaccaagaccctgttccctgagcctgcatgcccctaacctgccttttcccatctccccagcataacctaatattttttttttttttttgagacggaatttcgctctgtcacccagactggagtgcaatggcttgatcttggctcactgcaaactctgcctaccaggttcaagcgattctcctgcctccgcctcccgagtagctggaattacagacgcctgccaccacgcacagctaactttttttttttttgtatttttagtagtgactgggtttcaccatgttggccaggctggtcttgaactcctgacctcaggtgatccgcctatctcagcctcccaaagtgctgggattacaggcgtgagccactggcccggcggcacaaccaaatcttattaaactcaccctaggctggccgcggtgactcatgcctataatcccccagcaatttgggaggcagaggtgagagaatcgcttgagcccaggaattcgagaccagcctgggccacatgacaaagccccatctctacaaaaaaattacaaaaaaaaaaaaaacaggtgtggtggcatgcacctgtagttgaagctacttggaaggatgaagtgggaggattgcttgagccggggaggtggaggctgcagtgaactgagatcacgtcactgaactccagtctgagcaacagatcgagaccctgcctgaaaataaatcaataaataaactcaaccgaaatgggtatgaaagttgaaatgggtatgtaagttgaaaaccagaagttttgagaaacatcctttgttaactttcatcctacaaattgggtcattcatgtcctacgcagctaaaacagagcccaggagccagggaggaaaagcagtcaggccacacaccattgctcccaaaatggacttctctgcaagcctgactcctgaaactgtgcattgtaccctgaaaccagctttatccatagcttctgcaataaatggctgtaagtcttggactccttgctataatcgcagctattcagcaatggaacctcccagttcccaacccttcctagtgcccatgggctttcccataggacaagagaacatttctccttttctttttttttttctttgaaatggagtctcgccctgtcacccaggctggagtgcaatggtgcggtctcggctcactgcaacctctgcctcccttgttcaagtgattctcctgtctcagcctcccgagtagctgggattacaggcgtccaccaccaaaccaggctaatttttgtatttttcataaaaacgggtttcatcatgtttcccaggctggtcttatttttattttattttttgagatggagtcttgctctgttgcccaggctggggtgcagtggtgcaatctgggttcactgcagcctctgccgcctgagttcaagctattttcctacctaagcctcccaagtagctgggattacatgcgcgtgccaccacgcctagctaatttttgtgtttttagtagagacggggtttcaacatcttgaccaggctggtcttgaactcctgacctcgtgatccacccgtctcggcctcccaaagtgctgggattacaggcgtgagccacctggccaggcttaggctggtcttaaactcctgacctcaagtgatccaacctccttggcctcccaaattgctgggattgctggtgtgagccacagcgcctagcccatttctccttttaataggacctgttgctgtctctgttctcccaacatggtgaacaccacccggactgcgtgtatgtcccaaattacaattctttctttgcaaatgaaatgtgaaatttagaggcccttctccacactttaaatttgacttgacattttctaggcagatataagttattagagaatgagattctctataaaaatgatcccttcatgctgtggcctccacagaagatgccctgggccaggtgcccacatgaataatgcgggccacaggcaggcatttattttctcacagatatggaggctacaagtccaaggtggaggggtcggcggggttgtttgctctgaggccgctcctcctggatggcagggatcccttctggctgtgtcctctgtggcctttcctctatgaacctgtactgtacctctggggtctctctgcttccaaatatcttttttttttttttcagacagttttgctcttgttttctaggctggagtgcaatggcacaatctcagctcactgcaacctctgccttccgagttcaagcgattctcgtgcctcagcctcctgagtagctgggactacaggcgtgtgccaccacgcctggctaattttgtagttttagtagagacggggtttctccatgttgctcaggctggtcttgaactcatgagctcaggcgatccactctcctcagcctcccaaagtgctgggattacagatataagccaccatacacaacttttttttttttttgagatggagtttcactctgttgcccaggctggagtgctaaatagcagaatcactgctcactgcaacctctgcctgctgggttcaagcaattctcccacctcagcctcctgagtagctgggattacagatgcccagaaccaatctctgctaatttttctattttttagtagagatggggtttcactgaggaaggagaccacctctctcattgtctcctatttcagaaggaagcaaaaagttagaaagatgcagaagtaagatcaatggccagactgtttggcgctgctacctgggcctggtagttaaagatcaactcctgacctgaccgcttgttttatctaaagattccagacattgtatgaggaagcattgtgaaactttctggtctgttctgctagcccccaccactgatgcatgtagccccccagtcacgtagcccacgcttgcacaatctatcacgaccctttcacgtggaccccttagaattgtaagcccttaaaagggccagggacttcttcagggagctccaatcttcagatgcaagtctgtcaacgctcccagctgattaaagcctcttccttcct

SEQ ID NO: 11039 - DNA, 205 bp, Homo sapiens
agggccaggccacagcaggggctgaggatgcctggtgaatggatgcctgggagaatggatgccagaattcacgcatgaggctctgaacagggctgggaaaacttccaaacgaagggaagctcatgtcttggtgcactttgtgatgatgcttcaacagcaggactgagatggggacatttacaataaacagaaatgtatgggctcg

SEQ ID NO: 11040 - DNA, 321 bp, Homo sapiens
aggatgggcctcagtctctaaggaaggcagagacctgggttgagcctcagaataaaagatcttcttccaagaaatgcaaacaggctgttcaccaccatctccagctgatcacagacaccagcaaagcaatgcactcctgaccaagtagattcttttaaaaattagagtgcattactttgaatcaaaaatttatttatatttcaagaataaagtactaagattgtgctcaatacacagaaaagtttcaaacctactaatccagcgacaatttgaatcggttttgtaggtagaggaataaaatgaaatactaaatctttctgt

SEQ ID NO: 11041 - DNA, 298 bp, Homo sapiens
agtgtggatgttttagagaatgacttaagaagtttgcagcttggacccgtatcccactcattatcaagaagcaactcaagatgactttccctggggcatgtcagttgcctcatagcctgctggtcctgtaagcaagcactaagctccacagtgccagttccttgccccaacctggccccatccaagtacagaagaccttcctttcctcctttttccatattgctttctgttctaagtgggtgaataattttataattgaaaaaataaagataaagtctgtaaatccagccgggtacgg

SEQ ID NO: 11042 - DNA, 3660 bp, Homo sapiens
gccacagtgaccgcctgcccccgcccctccccatctgtcccctctctccacacccagcccctgctcctgcccaggctgccctgcccagcgcctcatcagcctctgccttgtcccactgaggtccagggtagctcggggcaggggtggggcagtccagtgttggggactgtctacgtatgtgcaagtatatcccagggcatgtgccccgcaggggcctagagggtgggggccaggggtatttgcattcatacattgtgtcatcaagcattccttgagcgcctactgggcatccggcctgtgctgggcatgggtggtgacattggcagaaatggccactggaaaggggagcgatgagctgtggaggaagccctggtggtaccagaggccagaatggtgggaaagacagatccagataatgctgggaagtgtggctacaccgtggcttggtcatagggtgagtgtaaacacccacaggacactgggggctgtcaccctgctctggcagtcctgctaagagtgtcagggccgtctccattttatggttgaggaaactgaggtctagagaggtcaagattacttgcccagaatcactcaggcagctagtgatagaggtggggccaagcccaggctgcccgactgcagaccacgtgctcttccctggccacccacctcctaccatccccacgcttggggcttccctgctcagtgttactgtcattctgggaggccttggggccctcagccccttgagacaccctgattctgctgcatgccaagggcctgttctgccccagctgttcctcctcccctggggacagccccacctccgggtccctccacccacatccccctggtcctacccctggcccttggcctcctccaagagggctcaccccgggtgctgctctgtgctctgcgtgtcccacagacgcttgttccagggggctccagcaaaccccttcgtggtctctcaaaggactgatcactgtccttgcctctaggaggggtcactaagcccttacctagggctgggtggacaacaaggcacagatgagggtgtgactggcccgaggtcacggtgagtgagtggcaaagctggccctgacgcctgggtttcttggccccagctgcccagcaggtgcctcgattccctgcccttgtgacctcccaggaaacagaactgatctgggacactatgtcacctctcctctcatctggggtcagtcagggttcgggggctgcagcagccaagcgcatgagaggtgtttccttggccttccagaaggcccactgtggagccagcctccctatgggaggcagagcggcaaggacagggctttggaatcagccaggtcggctcctgggctgtggccgtggagagacactgcccccaggatgacacaggcaagagcccctgaggcatgggaggcccagggaagaccatgggctgtaggggagagtgtggcaggtgacccaaaggcccaaagagggccgtggggcctgaggaggtcataatctcttctgagtgggggcaggtcgattcttgcacaaggtgggctcttcactgagccataagggacagggaggtatgggagagcgctgggggcccatccccctgtccacccagtgtccactggcctgtccttcagggagcagagcagagcaggtggtggacgggcccagtgctgggtgttttcaccaccatccccccatcccccatctaagaatcctaagaggcaggcgatccctcacctgcttactcactcagcagttacccggcccctgtgctggagataccaagggcatgggtggtccctgcttcgatggccccaaagctgggccagagttaagggaaagaggaggaagtcctaagcagagaagtagcaccattatccccatttaacagaagggaaactgaggctcggcaagcataggcgagttggcagtggaacacggatctaaactcaggtgtgtccaagtcctcccaaaggacagcagtgatggagaggaccccagccagctgtgtgacagctggttgttgctgacttcattttccaatccggagaaggggctctgtccacagtcccccgccgccaggtggcccacatgggaccagcatgggggcaggttatctgttggcctgaagagtgaaacctgtaccaggccaaaggtgagggcgtgagtgagggcaggagtgtttatggcagagtgaagttctgtgcccaccacaagaggctgtgagatgttctgaccctcacccactgtccaccaaaagcctctcctgctgatgggcactaggagacctcagggtactgcccatctgtttctcctcgggtgccagccagctgctggtgatcctcagccggagggcagggtaccaggtaagcttaactccatcttgggtgtttgtgacaggccctgcctgccaccctaggcagggaaagctgtcaagactcctgccaggaatggggggtgctgagtcatctcacgaagaatccctcactcttcccgggttcagcccagaagcccttccaggcatgatcttccccatcaggctgggctctggcagggacctgcccaggatggagatgagagagggtgagagatggagggcgagatttggatgggacccagggctcctgactctgccctggaaggttcatggggaaactcgctccttctgttggcagaggacagcccctggggaaccccaggcccaactctgtccggtatcccttttcctcccagctgccctcccctacttctcccttgctcccaaagctttccttggagaagggccctcctgcagctggaccctgcagggtggctccctcctccccatcaagcacaagagagggcccaggaaaaaaggtttcacataagtgtagagtcgcaaggacgcttagagtcggcagagtctggggtagggagacagcgacttgtccaaggtcaagcacagagggagaggttcaggagtcaggtcttctgccttctgagttggctcatcctgggcagtcacagactgtcctgcctgcacggctcctatccacctgggggtgtcgcagttgaggggctaattcccaggggactgacgttagttccctactccatccttccctggtgattcttgatcttcaaagcctcggggatcccaggtttccccatgtaactgagacaccctgcctgttagccctgggagacccctaaccttggcccaagacccctttgattctctaaggagcacgaaagggggaatgcccctcccaggagtttatgggagaagggactgggccggctgcctcccagcgatgcacttgacctgacactccccatgtcctggtgcgcacagcccttgtcggtgccccggcccctcccgcagcgttactgcctgtgtatagtataaatatatatattttctatatataagatgtataatataaggctccacaaatatatctgtgtgtgtgtgtgcgtgtgtgtgcggtgaagggcggtccccatcctgggcccccactctagacccccccaccacctggttaagtctcgagtgaatccagtggccccgtggcaccctcctttatgacatccatccatctgtggtgaaccaagtgaaggtggtgacttctggtgacatagtaataaagtgaagactcagaaccc

SEQ ID NO: 11043 - DNA, 690 bp, Homo sapiens
gcctccccggcttgcagaggccggcagccctgtatcacccctggcagtgaggtggcaggagcagcctagtgccagaaatgtccaagatgccagggcatgcagggcagtggaaggctggcttgaggaaccaattcaggttctccactgactcattcattccttcaccgcctccttcattgattcttcatgcgttcattcattcagtaaacatttattgagcagctgttttgtgcctagtgatgaattaggtggggtccttggctccaggagcccacaggctggggaggagaaaacaaacacatcaatatctcttccaaatggacagccgtggacagttaccaggtaggtagcggccccatacatgggctgcctagaggcgttcatggtccccattgctgagctgtgggtgcagagcaatagcctctcccttcacagcggtgtgaagagtgacctcactgtccttagggttagcatcctggccgaggatgtcacagggctcctggtctggctctgtcctcatgtgctatgtgaccctgacaaacccgtgcacctctctcagcctcagtccacttacctgaactgaggggtgataatggaccaacctctcaaggctgttgtgccaatgaaacaaaggccagcccagggcttagcacaagcatgctcaataaatgtaagctcttttgttcattc

SEQ ID NO: 11044 - DNA, 1658 bp, Homo sapiens
ggcagccggagaatgcagcccaagcagggcctggcatggggcaggacagggtccagccttttcctaacatctgcctgtgccacaacggccagcaggtgccccatcctctgcccacagcagactctgtcccatggctctccgggcagtagagtgtgtgagtgcagactggacctgtggttcataccttgtcaccacccgggaagctgaaggccacttcctcccagatggcctcagccaggaccatcgccctttctcagagcagagggccaggtatagaaaccgcagtgggcctgcaagccgcccgagcctccccagcagcctcctacagagcaggaagaggcgccctgtgaaccctgagtgttgcaggcccagcagaccctgctgtcccaagcccacccctcctcccaccatcacctccctcacctcgggacagtagccctccacttctccagcctctcagccctgtgctcctgcatccagagtggaacccaggctggtgtccgcatctgtccctgggccccacccctggacctgccttggttgtgtcatctgttgtaaacgttcaggaggaccagggcagcatctggggcctgggatggccacagaaggggcaggccaggtggaaaggagccagggggaagtggtctaagagacctggaactgccagaggatggcggcctgggcttccccagagccaggcgtgcgggagaggtgaggactggccccggtgggctgaggcaggggccgctgtcgtcaggcctgagccagggtgagctggtgcctgccttgcattttccttctggtgctgtgaagaccataggctggcaggcagctgagatgaactgtctttaccactgatgaggggcctctgccggctgagggtagcaagcaggggttgtgagtcaggctgggggacttgtttgaaagaaagaggagtggaaaatggttccaggagggaagaggttctttgagacacagtaccctgggaggcataggagaagggtcgggccagcccagcccagggcctgagttagactatttcccacatgttctctgccttcagtggggagggggtgccaccagggctgtcggccaggattgccactcctgtttcagaggaagcaggccgagagacttgcaccttggccaagccacacaatcagtggggcagccagagctcagacctgagccattttgtcagtatccaggaccccccggattctccacgccctccccatctcccagtctccctgccccccatgccccagaccggcccaccagggactagccgctgtcgcacagcctctggggtgcttggtctctgcgaagtcaaaggcctgacagctctgtggcctgggaatccattttcctgcggcagagcagggcctggtgtggaaccagggagctgtgggaagccacagcagaaatggaagaaaaacaggtctcagcccagggtcctcgctcactccctcactccccactttgaagccatctctgttctgcaggtgagaggatttaaagtcagtcacaaaggcttgggaacaaaaggaattctcttccaagaatgcctctgtggtgctgtttggtctctagaaacagggtcacttttttaatgtagtaaagaagtaataaatggtggcattacacattgtgatatt

SEQ ID NO: 11045 - DNA, 556 bp, Homo sapiens
gaaggaagcgcctacaccaaggggccctctgggagctgagatcatcctggggttttgtcgcctggtctgacttgtgcactgggatcttctcgtgccaggccaggccccgccccctccccgggactgggcagaccccctccctcatgcatctgtgtccactgaggcttccctcacctagaatggcccatccttcaggacccagctcactctcatcttctttccagggacttatcccccaaggctgtcctctgttctggtgagctcagggctcttggaacttggtctgcagtgactctggggttcctggttaggacccatgttctctaggtcccagcaccctgcacggggcagtgtttgtgacactgggcccagctattctgagagaaggactccaaccttccatcaggtgtggcccgagatgtgggtggccctgggcatggggcatggatgcattgtgactttcatgggcctcttctgcaaaaaaaaaattaaaattatactttatgactattggtagaaagataaatatattaatacattaaaatttctctttgag

SEQ ID NO: 11046 - DNA, 3245 bp, Homo sapiens
agctgcatgatctgatagggtttgtgacagggcgggggtggcggcggcccctagcgctatctccctgcctcctgccggctccttggttcttgaggggaccaggagtgggtggggagtgggggtgggggtagggtttccctactgaagcccttgtgaatcaagggtcaggcctttgagctcagaaaatatccctcctgttgggagagggcgcaggccgtgacgtctgggtggcccttatgactgccaagactgctgtggccaggaggtgccactggagtgtgcgtggtggtccctgggtagcgggggagggtaggcaggattggggaagagagcctgcaggatctcaccaggcagcctctggggggtggccaggccgggaaaaagcccaccatttggcatccctgggccttgggctccgtgtgggagaccggcctgccaggaggacccagggctctgtaagtagatgcatttgggtccaggaggaagcgtggacacctcgtagggaagagatgaaaaagccacatcctaccaagaggaggtgctgagggatgctttgcagtgtagtcagaagtgctgggccagatggagacagaactccaccccctgccgcaaaggacaggacctggctgccctgggatgctggtgcctgagtctgtctctgtgcacccctcaggctgtcgtgagccaacacaggggcctggagaaccctgaggagctttccttttggttctaaacccggcgttgacgttccttctccctttcacattgctgtcttgtggactgtgcactcagtccttgcaaggccaagagtccagttgtaggtgtggccttgagggggaagtggggaggagaagactgacatgagtcctctgcacggatccgtctctccctccccatcaccccttccttctgacacccagtcccagctgtccactgtcccaggtgcagtcactgttgtgcccttccttggggcaggctggctgggggccagaaaggggccatgaggctgtcttgggcccaaaaagggacaataaggccagttgtatgcttcctgttcctcatagcttgccttggtggggatgtctttgttggagttgattctgagctgctgtgattaggagaccctgaaatacagtggtttaagcaagatggaagcttgtttctaattagtctagattgagatggcccagagctggtagggcagctctgcgtttcttcatacgcaccttccaattctgggtacacagcggctgctccagcgcccaccctcctgtgtgcatccaagcctgggggaagcagaaatagacaagagggcacacccactttttgctaaaggcatgagccagaattggcaggctcacctctgctggcctctcattggctgggactcagtcacatggccacaagcagctgctagggaacctgggaagtgtagtcttcagcggggccgccatgtgcctggcctcaccttgggagttatcttattgatggaggagaagagaatggatatgggggaccagtagcatctctgggagagggggagggagcagcaataactcagtcgtcggatccagctctcattgtcagagtttccggaacagcttgctcctgtttccctcactgtgcagcccagggctgggggcagtgaggagcttgcagctctgtgggaaggggaaacaccccctcccctcggcccctcagacgctacccaatgatgccggtttgcagagttggcctgtggaatggctcatgtttgtgcgtgtgtgtgtgtatatttatgggcatgggtgcatgcttggtgtgtatttgtacatgtctgtattgctgtgtccctgtaaatacatgcttgtgtatggatggaagaggccaggcccaggcctggcctcttcctcgggcctgtggccacacctcctgcagctccccaaaatgactgaggcagaaagcccttggggagcctagaaagcaaagctaaaggggatgcagggtctgtctgtctgtctgtctttcagtctgaggaatgagaatcctgacctgagggctgtgcagctgagagcccactacctccccagcccctctcggccccagccgcatcatcccacctgtcccctcccccccacctccagtggggctttctccagatgtcttatggttgggggtttcctgatgggccaggagaggagggcatcttcttgcgacagcactgtctgggttaagtgcccagtgagggcatggtgtggggagctggcctcagaggagccgctggtgggcaagcgtgaagtgggctgaggggctctgagccactttgctcccatctaggggactgccccccatggaactcctttgaagtcacagcagccttcctttctgtttgctcttggggctgagaggtggctcaaacactcggggtccctatggctctgggtcaatctaggccaggctgcaccccatggacagggagtctcagggctcctgatcatgcccaggccctggcctggggcctccctccttggcagctttcccacccccacgcccctggcatcctcagttgctatgggatgcccctccagggcaccagctcagggctaagcgaaggaagataggagcagctcagagctgccaggctctgccttcctcacagacctggtggggcaggtcctgttcacagcagcaggagtgaaggcctggccatcggtggagagggcagctgtcagagggctgggggccagggcacaggattgaagagtttcacatatcatcacagcatacactgggaatttggtgggggcagaagaacccagggccactccctcaatatgaagggaaaccaagctgaatgtgaccaccggcacactgctgccatgtcccatgtccacctttctccccgggaataactggccctgagacccctagacccaaggaggcctgtccatgccaagcatccgggaagcatggctggccttatccacccatgggtcacgtcggttcccaggggcagcatgggagatctttgggggcaacagggagagtctgggtggggagacgggacttgtccaagcagaaggcaggaccctgggaaatgcataatgtaaggacatcaataatagtattattttttttgtaagggaaaatcaatatgtacattctgaaatcattttctctgtaaatggttggatttcatttcacccttaaagggatgcttaaaggagaagataatattaataataaaaacagctacaaagtctgaa

SEQ ID NO: 11047 - DNA, 3808 bp, Homo sapiens
ggcaggtgaaggccaaagcgggtgttggtggtcaggccctggattctccgttagatacacttggctacctagttggtgcctcacagggttcctgctgcctggtgtcttgctgatcatcaccctggtcacttcatgctgattagaatgacatctctttcgtctcctattttgttacccaactcttcctatttttgttaccaatcactgtgctctctgccgccccctggctccaggctaatttttctggaatgaattgagaaggtggcgtgctggcctgagctgatggaccacttggtgttttgcgttttggcccatgtttgctgcctctatctggtctgccttgcccgtttgcctgttcctattcagtgtcttttctattttttcctctctcgttcatgccttctgttttgctcttgtccctggagcatatctgcctaattaagatgttgccttttagttgaatgccactgaagagctgtgatagcatgtttcaaagctgaactctacagagcgagtgctgagacagtatttagggtttctgggagtgaggctggtagaagagttggcctttgaccacggttcctggagtagaagtccatcctccccccaacctcctgacccattcataaatgctgagaatgtctctcatgggaacactgttaatgacccacacaggataagctgaatgcaaagttatttgcaggttgaatttcttggtggctattagcagaagtgcagagtagggaaccagagctggttaagggcctagtgaagggtttgtgtgcccagtgtctgctcgtcatctgtggctgcaggggtcagacagacaaggatggggactgccagggcaccacttcatcatgaatgctggttttcacaccttttccttattttattgccaatcaggacaaggccttgaaggaacgcagccttagacatcaggtgaggatgatggaggtagacagtcgactgaatgtcagctggaaaatccagtcactagttggggtttggtggccatgttttctacccagacaggccctgcttttctaggatgtggccttagagcaagaacagacccaacagccagcccttcatcctccagcgtctgccataggaatgtgagaggggtgtttgctgagcgctccgggcacggccagagggcaagtgagcatgcacggacctcttccccctgtcctgtttctcacccagcacctggggagatcggtgctaccaaggaagagagcacacagataagacagaggggaggaggtgggcatttcctacattcctccttgtttgccgctgctgagattgcagtatttattgcaatgtaaatgtatcctgaaggtggggaggaatgtttaatctaccatgtccgtgtgtcatcttggtttgtgtttttccctgtttgtagcaagactctgatgataattctgtttctcatctgcccattcagtattttgttttccttccgtcaagttgtcttattttttcaatgactacctctccatcattgaggttctggtgaagctctctgcagctgtctcattccttcccaacgatagtaacaggaaatgactctttagcatcgatacctcaacatcaatttagggtagagattcctgcccctcttttgtcacagattaggaaattgagaactagggttaaccttgactatatttagaggtctttttgcctcttttccccttaacaaggatttcttatggtggtttcagtttcatttgcataaaggtattgagagggaacaaaaaacataaagctgagaatcttgagagagctcatctaccctgtctgttggtcagactcaaatgagagttaaaaaaaaaaaaaaaaatctgtatgcctgagtaccatcctggatgaatctagaaggtatggggtagagcttgacagggttcctgtgtacccactgggtatccgttagaggtaagggagaggagaggattgatagagtgttgcaaaagtatagattattcattgagataaaggatttggtttccctgccatgagtattaaaaaaatttaagttttcccaagcttgcatctctgaccaaatttcacataaaacattggaaggaggctgggtgcggtggctcatgcttgtaatcccagcactgggaagctaaggcgggtggatcacttgaggtcaggagttcgagaccagcctggccaacatggtgaaaccccgtctccacgaaaaagataaaaataagctgggcgtggtggcaggcgcctataatcccagctactcgggaggctgaggcaggagaataacttaaacccgggaggcggaggttacagtgagctgagatcgtgccactgcactccagcctgggtgacagagtgagaccctatttcaaaaaaataaaaattggaagaagagcttaaaaaagataagattttaaagagtcccaagttatttaagttgagtgtaattgtcatttaaggaaggcaaatgagtttatcatccttcttaaagagcatctcttttaactgttggacaaaaccataactttgtcattttacaaggaagaacctcttaagaagtcctcagaaccagaagcaatgtgaactctcagcgctggtcctggtgggtttgctgaccatgactgggcaagccgttctttttgctgccatcttcctcatcataaagtgtggaacataggcaattgctttgagattcttggatagaagaggacaacattctgcacctgcccccttttttaaatctttggggaaagatgagtaactttccccactactctgccttcctgttcagtaactcttacttttgcctgaagtaacagcatcttctacttctccatctagagatttttgtgtgtgtgccatcaaggttagcaaactttatacgtagcctaacacttaaaaaatgcactcattatcttaaacctaataaattccagagtttattttggttctcctctgttgcccttcctaaaaaatgagctgaagatgacagtatttttctttacatgcttggttatgacttttaaagttttatttaaataaatgttgaagctcaagtttaaagaagcgttgcagaggcccacggtctcctgggtcccggccacctgtccatattccacatttgctgactgtgctccctgcactccactcaagttgagagttcaaatagtcttgaaggggaatcagcttcaggatggaaggacccaggagaggccccgaggtgggagggttctgtaaatacagactactgcgagtgtccagagctctctgccatgatacttccttgggactgacttggctgagaacgtgttctgtcagaggatttgttagaactctgcccttttgtctgaaactcaaggccaaggagaatgataggagacttaggacagagctgacccttgcaccaggctgggaggctgcagcccttttagatgccacttactgtaagtggccagaataccagagaggtgggttccatggtcaaatgcacagtaggtgtttacctttacatttggatcaccttgtagtctttaaattcttggtccctgaggccaagtccacaacttgccttctagtcacttgcctgcccgcagtggtggtggatgtgttagctggtagatttggaatcagtcaccagtctttctgtactgtcttggttagctctatataagtaggggcagcttagccctgaggcccagagacctgctgtcctttttctccttgagggaggaaataaaactgcggaatacaatgtccttccatagcatgggaagaagaaaataaacatctcctttccaac

SEQ ID NO: 11048 - DNA, 83 bp, Homo sapiens
ttgaggatagtcaggagcgtcaatgtgcttgtacatagagtgctgtagctgtgtgttccaataaattattttgtagggaaagt

SEQ ID NO: 11049 - DNA, 3328 bp, Homo sapiens
gggtcgcaggggcccccggccgcccaccgcccgccccgtctcaccttctttacctcaggagccaggagcagacagcaatacttcgtccacacctgggatcgcgcagggcccgcagggcacaggcgcccgacagccgggctgagcggagtctgggttagccaggcctgcgtggcccatggtggcccttccagtgcatatacatacatatatatatatatatgcatatatatatatatatatatatatatgtgtatacacacacacatagacagacatatatatatatatttattttttttactgagagcttatgacttccagaaagtgctaaaggtgggaggtgggccagggcctggacggggcttttgtctgatgctctgggattctggccagacccaccccagggcacatgtcctgcgggggcgtcccagctgtgttttttgatgtctcctccctggttaagagtagcttggagaggaccctcaggcctctgagggcaccaggccctggagaagaggtgcaattcagggtgtgtgtgtgttttttttcctttaaagaagaaacgctgctaagatcccacgtggctcccacgtgtcggggtgtctgtcctgtcatcctgactgtctcgttattgtgaagtctttcgtagacaccccagagcacacacatccccttagtccaccggttagatgtctctctttagaaaaatcaggggtgagtagctgtgtttccttaggcctggggtaggggatggagagcagctccaaggctgagctggggctctggccccaggtgaggtccccagctcctgagcacttctgagggggtgggttccacccccaggagggcgggggtgggtggagcaggagtggaggcagcctgcagaggaagggtgcgggagactgagccggcagtggcttgcttggaggggctagggtacccgcctggtctcggctggctccagctgccctgcaggtgcccctgggctcaggtagttagttgttcagccactaatgccttttatcccccatatgggcgctgagctgtggctgttcctggacactgtgctgtccccgtcctgagcaactatgcccccgccccagtaggttcaaggcaaagcagctctgaccgaattctaggcaggggtgggggcacctgcctgggccctgggtccagccgcatccccatgcccagcctttcgcgtcacctggaggccacatcttcccaccccacctgccagcccctgtctctcctccccgctgcccctaactgcagctcagctttcactatagcagtgcttcccaaacgggttctagacttgggtgtttgatttgaagagttacgcatttatttcactatttattgggaaaaaaatgcattgaacccgtgatttcacagacattttgcttaggtcaaggctactttttaaaaagggagtgactttcatgaagtcagtttgaagaaggaggttgggagcatgttggtggcagtgatctggagaggctgcaggggccacgagtttgcagatgctgtacttcagcaataaccttgcctttgctaagaccccctccgagggcttcaggggggcctgccaagggggggccttgttcttgttcccaaactctgacttggaagaactcagcttgtggccgggctggtgagggtgtggggtgcgcccttcccttttgggctgagggagagggggccgggaggggttgtcaagcccacccgggaaactgagccctggagaggggaagcagccagcccaggatgcttcagggccctggcagcaaagaagctggggtggtgtggagggccctactccacaccctagagctgtgatgctgagcaaggtgcctgtggcggaaggaactgcccagtcctccctgggggcaggtagacctgtggggatggctcggtccaagcccaacactgcccgctccagagagcctcagccctgcctccctttccacagaggtggttttatgtggaacgaggtaccttgtctggggaagaagtggagctgggcaggcttgactgctcctggctgaccctgagctctcgcagttggagggaagcagacagacttgactttttgcaagtccgcgtgttgctggagggacacgtgtattggagcccagaagaggggctgtgtggcctgggaataccatgtggaaggttgggcttcaagttaacaggatcagacaccagtcaagcagcctcaggtcatcttgcgactccactgagcagcctttcctgttgtcacatgggttcagagcagctgagcagggaacacgtcctaggcaggtctgacgtgaaacctccccttaccctgaaccgtgtgactctgcaagcagacacctcgaggcaggtgttctaggcaaagggatgggcatgagcgaaggctccagggtccacagagcagggagtgtggagaaggtggaagagctgagctcagaggcagagaagctccttgcagggagcactgggagatggcctggcccgtcccaggctcctggaggccccacctgccgatcccaggcacttgaccttgttcctgtgggtgacagagatgagaaccagggaagctgtgatccactggccaggacaagtcaacatgggtgagggttgggcaaagggcccttccttcctccccaaccctgtggtctggggccatggcctcaggcttgtgtctatcacaaaagcacaaacttgccctaacccacatgggcctggctgtggggaaagtggggacccaggtccctgagctgtctgctgggctccgtagagcggtggtgggcaggcaccttggcatctgtgcagagacggcccagtctggccaaatcctcttcctctcccctgctctaccttctccggcaccaggcagccccttaaaggaggacaaagtgtgtaaagcccgtctgctgtcttcccccaaatcctcagctcagagccttccgcttccagggccaaccccagccccgtttgctgcgttgtgtaagggcttggggtcttagaagctgctctttagcccagatacacatactcttttttgtctttgtgcaataatcagtgttcctggcagagcctgggccaagctgcagcctactgaggaggcagaggccacctcctccagaaagccctcggcctgggccgccgccgtgactctagcactctcagtcgctgtacagtttctatggtgtgaatgaacttccctcctagttgctgatggcgctggtacctgctggcccatggcccgggtgtagagaaaccaagcggcagccaccaccagtgttgttttgaataaaagcccagaagcctatttaag

SEQ ID NO: 11050 - DNA, 296 bp, Homo sapiens
actcttcaggggacagaagctttttgtctggagctgcccacaagaaagagggcaaggaaaaaaggctggactccatgactatatatacatacatctatctacatctgcctgtgtacacacacaactttttatactagtaatttattggcaattgggctggtaattagttgatgcaaaagggaactcaggtggagaataatattgacacttgcttttctgcccccctcaggggtgtgtggaaggcagtgggggagttgggaggggggcagggaaatgaaatggagttttgtcctggc

SEQ ID NO: 11051 - DNA, 474 bp, Homo sapiens
gctgcgggatggtggtgggcaggacgtgtggatgcctgcctgccctgccctgtgctgtggagagcgcaggtcgcacactgcaccagtttgcacatcagacgccaactggccttctgccctgcagcctccgtcctggcctcagggacgctggatcccaaatgagagggtccgaagcatctcagtcacacgcctccaccggactgtcggtggctgggcaggggtcagtgccacggcctccttgtttacatgaagtggaagcttgaccagtgtctgctcgcctttgtgccccaccccctccgctgattgccagatggggtgagggcccattctttaaacctttatggggtggggtgtctggggcagctgcagtggcttctcctttcccaggcttcctggtgcttctggttccccacgccactccccacccaagagattggtggaataaaagggaagagggcagggccctgagcctgg

SEQ ID NO: 11052 - DNA, 12567 bp, Homo sapiens
acttagaactttcaactctgacctcgtgaccttttttggaacagcagcagcactaacttgaccttttcgttttttttttcaacttgcaataaatacatttttaaaaggaaaaaagaaaacggagagaaaaaaaggtgggtcattgacagactgtctgagcacatagttgcctcccttataacttcagttttttcgtttggaatatgaatccaaaaagagaacatatcactcttgaaatacttgaatcatgaacgccaacctagaaagacaatgtgaagcaagtacacataccatttaaatttaaacacaaaaaaattaaaaaaattagtttctagtttttcacttttttcatgttatatggaagttgttgctaagaaacatatatactgaaaaaaaatagctttttaactttgtttgcactgggtgtgtttccgtccttaggtctaccatgtttgggagggagggaaattcaaaagaattgttgggggaggggggagggaagacttgacggagcctcactttaaaaacaaaaacacaaaaaacctaaaaaaaaaaaaaaggaaaaaatttgtgattggctggttgataaataccagtgtgttctggcacatgtaactgcccaggcatgctcgttctggtgtgtgtgtgcacgtgtgttcatgtgcattcgcgtgcatccttctctgtctctgtgtgtgtgcctgtgttcttcccttctcccctgccccaccctgacttctcagaaagctgcatcgctgacagtctgcaggctggctggccggcccatctgctttttattttatttttttaactatgagaacacacaggcccggagagccactgctactaaagcaactccattgggctgcattaagatgaacagagtgctttttaatgatgaaagcagggagctcctttccatttgcaacttagcctgaatgtggggtttctctggctgttcttttgacctagcagtagagtggagcactgccaagtccaaaaaactagagcaggaggtacctcttggagcaacggtgtgtttatttctgtttttttttttttttaagtgaatggccaccaggcacatctgagtatctgttaagtttcatgcaggccttttcgttagtttgaaatgggaacggaagataacttttgatgatgcgatgtctcaaaaacagagaaactttgttccctctttccttatgatcaggtttgagaaattcttcaaaaaattaggtgaagttgagttacatatttctgttggttggttctctttttcattttatgaaaacagaaaagaataagtggtgagcagcctcctgaaagcatctgcagctactccctctgctcctttctcgccgagcgttacctgtgccaggccgtggcgcgttacagcaccaggccatcactgacagaaacgtttacttaacgaatgttcttaaaccagtgtgtacttcaagcgtttccttttgtttctctgtgttgtgtatttcctgtgtatgtggttttgcttaggcaggtataacttagcgaagacttttaagtattgcacctttttttgatttttgacctcttccccccaccttgtaattttgcttttttaatttcggtatttaaatacttttttttttttttaagcatcaatgtagtagtactctgggccgaacaggggtcaacgtttaatctacagttatcaccaacatgtatgtacttatgtcggaatcaaaatgtatcaaactgcttattgtgaagagaattatagcagacctgaagggggcgaaaaaccagatagggtggggggatggatgccggtgacgtgctagcacttgtgtggacatcccagtctgcattatgctgtttaacataaagtgccgacattttgtaccagcaaatacctgcccattccaacccttggtgggagcagacctctactgtcctctgtaacttgctgctattgaggacaagggagtttttctttctttagcgtcttcagtgaaggatacaatacaacaatgcctaatgtatttgactttttagcttgtgtctgtgtgtaggtgggtgggtgggtgtgtataggaaaagcctaaaacaagttatttgcatttcagtggttttgtgagacaaagaatgggaaattctgtagcccttctggcttaccctgttgattataaacctagcctcaaaagagattgacaggcatgactcaagtgagtgttcacatatacaagcctgcatgagccctctgtgggtaggtggtcacacttggcatctgcagcattgacgtggccccgctgggtgccttgagcatgccctcttcctgctctgcaatttgaatcaccaccgtgccccttccaccactgttccccatgcaaaagctctgcttccagcagcccccactgaccgctctctgtgtggagcaaagtgctgtcgtgcggtgaccaccaggtgaagagcagcttgtattcagacatctagagaaggttaaatcttagtgtccctgggccaggagcatatcccaaggctcctgcgagccagtggcgaccctgtccactgccgctcttggttcactgctgtgtcctgccccaccctcctctcctcctgcctgttggttccttgacctgcactatgggttagttgagttccttacgatactacggtgaaagccgggtgctagagcccctcttgtttacaagacataatgagggatttgaaatatgtaaaaataaacatgagaagctaaaatgttcttccatcataagcttaaagggaaaaaaactaaaaactttaaaaaaaaaagaccaaaaagtgcgtatatatatacatataaatatatattttagatgaagactaactctgggagcatttaacagtgttttttgtttctgtttttaacatttgttttcctgctttaaaatttgcaagcattctcaggaattctagggtaggaagccagttttttgaagatggtttatttaaccatatcttatcctagagagatggctgtttctttcctgttaataaacttttacaagttcctgaaacttcagaaagtttaaacaatttttacttaaaaaaatgtaaaaagaaaagtctccaaacattattgtcatactggggatcacacattttaaaacacatagaaatattttttaaaaattatcaatttagcagcaacaggtaaattcattatcttaaaaatatgggagaaggattaagctttgtaagagctcgatcatggattcttttgaaattgtgtgtagtttaatgggagagtgtttggtgtatatagatgagaatgccatcactttgttcctttccatttgagactgaactgaaatctcccctagtaatttttatttttttaaaggaacccttctccttgtccccacaaccccagcaacaaaagaaaggaaggaaggaagaaacaacagcttaaaaaaaaaagtaatctgtaaaatagtacagttggattgctgagaatctatgtaaagagttaggaaatataggttaataatttttggaacaaattttaaatataggcattactagaggaaaattatctatggactgtcctattaatgaagaatgtctgtcttacctccgtttgttttgggaggaggagaaaatatagaagaatctaataaggaacaagtgattttacttttttagctcccagctactgttgtgctcgttttaattgctgttttgaagatctgctgcttaattatccccatcccttagccggagatgtggagtgtttcctttcagtttttggtgatgttgaattcttttgtattccctcctggggccaggggtcagaattcccaagcatgaccacagcttcttttaaacattaagcttcccagtgggaaggaaactccagctcgacaggtaaagggagtgggtggggttgctgcctgcaatttctctaaaaccgctttagtgccttcgtacatacacccagacatcctgagcaagggggacgcacatgtgtgtgtgtgtggtccagtcactccacagatgtaagatactcacccataaaggaaattggagtggttctggacaggccccaaaggcagtgggctgaatttaaaataaataaacaaacgtcaagcaagttaatatgcttatgtctcagtaatgtagaatgccaagttccttcctgtgtcgtgtgccctccattactgtgcattgattcctccaggtgtgtaattgtgacaactgcagtgatttggaaagtctctttgtcttgggcaaatagaaggggttcctgttgttctgctcttgtccttcgtctcctccccttttcccccagacctcccccttctttttgtcaacttgctgggagctttgctttattggttggcagtgacctaagaacaggatatggtgaggatgtcatggaagagaagagctctttccgtggtattctttggcaagagccatgtctactaagaggttagatgacttcagtatacttataaaattcagtgagagtgccttcttctcttctaccacactctggcatagatacaggcttgctggtcacctctcattacatagatttattttaaaaacattttgattatgttaatttgagctttcccttttttttttttaactactttttaaaacacttgattactagtggcttagaggtgtgtacatctcctgaacatcacaaacttggtttctacctaccacacgagtagccaaaagaaaagaagcactaatagagaaaggggtgtctcacaccagacagaggacctctgctgtcaattagatccagtatcatgacctaactttaagtgtggaaaagagttcagatctctgagacactgtgaagaaatggatggctcatgtaacatctctgatccctcagtccccaaccctggacgtgtttcatttacaacattcataggagttaacttagcagtgttgcaagttaaggttccaaaccaaattatttaatcagtgtccccccaataaatcacttatccatttattgctagttagttttatttatagcaacttgatttcctatgagtatggctcctgttgtaagaattttcccacctcttctgacatgaatgtagcataagttagcaatcggttcttccaaactcctgtgggttgaatatggtatagaaggtatgcaagaggaaaaagaaaggaaaagataaaactcctgcctgagaatttggaagcacctttattaacacatatatctcgcagaaactagaagctcataggctgttaactttttgcaactattcactcatttttaccacttttttttttgggtgagggggtgatttttgtaaggttaacagccagattccattttgacctcagatgctgtgtactttttaatttcattttttatattctgccatcttgactcttctctaaaacagaatgaaaatgtctgcatgctgagcaaaatgcttacgccaagcctgtttttctctgcagagtaaacaggatgttttcagcagacttggctctaatagccatctctaagattagggaacaattgagtctttatgtagaaaagatccattttttccccatcctcagagttaaaattcaacatttaaagctttatcggttattgttttagatttgagatttttgtttttaagtatctataagatctttagaagtgagataaatttttcgctggttaaaaaaaatcaaactttcctctgcagtgtttttgccaagttttgtcacacttcatgtgtatgcattaactatacttcttagtgttactgcaaaaaaaaaaaacaaaaacaaaacaaaaaaaagccttgttctttaattgtgtttttcctcctgtgagtggacaactaaagccgcgtgatgatgcggatgaaaatattctggtctgtgtgtatacaatgaattgtcagtcttcagacctcatggtcgttaagaaaatagggaactcacaaaccctgctgcgcactacatttacttctttatctgcaagtacagggagtccatacagtcaagaaacacacagatacacataatgctattgaggacattgtcattctgtaagaaaacagaatattatctagatttccagagttagtgcagaccctgtgataacagtctgtgggtttgtggccagcgccaaaggtgtgtgtattttcagaaatggtccctatttgtcagtgatagtgttttttttttcttaagtttgacaaagggggtggtaatatcacattctttagatttgaaataattatcagctccaagaatctgtgaacatagtaataacaataaaaattcaacatcgaccctccctaacctgctcaccatacctccccaccccatgcctctgaagaaagaggccatgaacctacgaggtggtaaagggggacacaggtcagggagtggagagctactcctccagcagctcagcacccacactgcccgcatgcgtgtggccaccgggaccagatcccgagtgattgtggcatacccctaatatttgagtagtttttaagctgtcagtctcttgtcataacctcctaccgccacccaaaaaagtaacgaaagttgcagtaactgccagtgtttgcctcaccaaatttaaatcgttcccttttcagttagctatatacctgaatttgtttttaacaagaaactgtacatggccaggaaaaatggtactaccttggccaaagggtctttgcaaaaagctcagtcttcagttcttcactgtgacaaatgcttatcttgttcatgggaggggaaagatcagataaataggcaagaagtactctgttttaaataaagaataaatagtgtccgtttaaagcactttgtgcctcaacttcatttttaaactgtaaatcattgctttggaaataaattcccaattataattgacccatatctagccaatatcaacaagttgggatggtttttgtttttttcttttttttcaaaaagggaaattcctctttactgctcacagtaagctgcaaaagaaagttgtcaaggtggcttatgatgctgttgtagcagagctgtgaaaggaagtgctttgctttctctcccgccttccggaatctggcgttccttccccttcggctactgaaaggtgtgtacaactcccagaggggtggctgtaaaagttgactggaggcaaagtggagtggccttattgccaggactagccctacagaagagctttacagagaggaggacagtacatcctatgtgtgttcgccaaaaatgggaaaggtgggtatttaggcaaaacaaaataaaaacctttggaaccctttaagaagttacataccttttaaaggtagtatagtttctcaccaagtgatgcattttagcatgacacttcttgccagaaattttgggataagttggaataaatgtgtttaaaacatcatccaccgccctttttaaattttgtctaaggaattacttaagtatagtatttctgaatgtgcctttgtgagtacagagaccgtccgttctaggaagaagctatccgttggatacaaacaaacagacggtcagctttagtcattagggaagtcaaagttcctcctggaagtcccaggagcagctgttgagatttcattagcatcaatattgcacagtgtagagttgagtggaagagattctgggacttgggagaggagacaggggaaggtacccaggcgacgcagacccacgttagtccaagagcgcaggtttacacatctgcattccctagttttctccgtctgtatgtttgtgctcatgtggctttggctgttttgttttttgtttttctgtaagcactggagaattggaatatggtgatacttgtgacacattcatgcatgtaaacaaggcattttccagcttctgccgtgtgcagagcgggcagcacgcttttaccctttgagtctgtgtcctgaggcggccattacattcccacatgggcgtcacatcacgttgctgttgatgcaaacagggtattacacacaaggaaaaggggttttgaagagttaagattgaagtgtttgagaaagaaaagagaaaaatctgaaatcatattttatttcttcagagctattatagttgaacacagaaatctgcagtgtctttatttgtttttatgttttaaacaatttcacctcttctccccactcctatcttctaaagaaatatcaagcaaatgctaagggccatttccatgattcctcagagctcccccaaagaggagaacagtccctcccactcgattccttcagcttcattcaggaagacacagggaggagagatgctgcttctgcgctttgctctcattcctctctcatggccttgaaatgtattattatgcaaatgtgaattttgatactgaatttaagaagaggttgttggatttttttttttttttttttttttttcaaaaaaaaaagtcccacatgtggtcatcgtcgcttctttatgttgtaaggtgaattgtaactatgcattctgcaaagggggtggggaggagagggcagaaaggggaagggagtagcgttgcatccttgttcttcagtttctgtgtccatggtgtccccgtgtcctggaggggaaggggagtgagagacgaatgtggtaaggtcagcacagtgagatagagacctctgagtcctcttgccactgttgctggcaggtctgatggccaggtaaattccagggggcctgcagttcctgtcaaccaatgtggttcaggattcttgatcctagccgtgcagtgttaatccagtgcagcaatggaactccacaggctccagtgttctctggaaaaagtactcatcctttcctgaattcagagcccttcaagctcaggaaaccacgcttcactcgtgctgacctgaaagttaatctttaggtcgattttgaaaaactccgcctcctctctcctttttaatatttctttcttcctttttaatcatgtttaagtgaacttactcttagttataaggaactgtcctgctttgtggggaagagggctgttgcttgtcaggcaaaaaagttttctcttcctacccaccatccctctctctgcttcccttgcatttggcaggctgtatgaagccaatgagctgcgaggtgttttgacaggggaggtctgcatgcagcctcttctttgtcctaacaattcctttgttgatcttgcctgtgatgaatcatagcgcctgcattgctctggtctaggcattatttgcaacacacagtatcgtaagcgagagattgttctgcctatattcagtgttttccatgcagcaattcttcttgttgacgttcacagtactgtaacgagtaacagacttgatcacagtctcctcgtgcctgtgcagggctgcacaggcatgatcttatcagggttccaatctgttagattgcctttaaacaaaaaaaacaacaaaaaaataaaatcctgacgtttcaactgtctcacacaaaataatacctcgaggtacatttccccctgcaatgtaaacccttaactcctctctcctttctgacatcagtggattatcctttttaaaatatgaacatgtaaatagcaggataactttaaaaaacattttctttgctgtgaaagtaaccctaaaatatgttttcttcttttgtatttttttggtttttgtttttaagccatcagaagtttcagatctttactctttcatgtttaagaagaaagagcagaggaggtcgggggagccggtttgcatttgtgttggaggggtgttatctccattgcctcccacacagtgacagcagaccagtatgtaaaccctgtcttggctgggcgcggtggctcacaccagtaatcccagcactttgggaggctgaggcaggcagatcatctgaggtcaggagtttaagaccagcctggccaacatggtgaaaccccgtctctactaaaaaattagccggacgcagtggcgcgcgcctgtggtcccagctgctcgggaggctaaggcaggagaattgcttgaacccgggagacggaggttgcggtgagccgagattgcaccactgcactccagtgtgggcaacagagcaagacttcgactcaaaaacataaaataaacaaaagacacacacacacacaaaaaccctgtcttaaatagctgccatctcttccagcaatctagtgccagggtaagaagtgtctgaatttctctcttccagcagatccatcccctgcagggactccagaatgttctccacacaatacctggagctctcaacctttcttggttcagacacacacatacacaccccttgagtaactcagtatcattttgtagttcacagaaggatgtagtccctggcattttggtttgcactgtagaatccatagccttgtcactttgttatgctctggaaatgtactgatttcttacttgggaggaaacttgtgtaaggagatgtgcaaaccaccctgaaagccatgtgcatcctcacctcttccattaccccctccatgagctcgaagcgacattaagtagagggaaatgcttttaacaaatgctgctcatgtggatctgtcagctattgcttgcctagatttgggcacccatgaagcagggttggaatggatcattttgaattgcttctttgcagacacccccttcgcccccatctttaagataaaccctttactagtcaagaagcccttttcagttggatctcactgatcttgtatagtgacgacttcctttgaaggaagaagcttgattataagtgcatgcatattatccacccaccttctgatttgggcactgttcaccttggaattttatttattttgtttatctggaggccctttttctatcagtctctgatccctcatgggttctgcctgcccttgtatctcttgtacaatgctcccaaagggctttgctgatctctgcacttctttcctgggacactccccccaccaccaccctttgcacacaccagtgaccaaagtgtatgcagtgatctcacagaagacatcaaaaatggtgcatgcaccgtgaatgtgctcacagagacacgtgcacaagattctgcacccttggccttaatctcagtatgacttaaggtgcaggaacatttttaacaggttttaaaaaaacaaaaaacccttctgggaggaaaaaaataaaaagcagatacaacagctcaactgttcccactcctaactctccactatgtgcttataacttcacattctatgccctccccgccacccacctcatccctgttctgcgtaaccaaaaaacagacaacaaaagcaacctgaggagaggtttctggactattttatctgtctccatttagatggagatataaatgctgctttgggttccataatcctagggggctatgtttacatagtaaaatacatcctaccaaatcaggaaacagtgaataatgggagtcacttcacagagacgcaggaggacctggggggcgtagcagaggaggataggtagagaagtaccattttaattatttgtgacttgtggcttccttcctcctctcctcctccctccacgtctctctttgccccctttagacagaaggtgcagaaaagggcatcaaaaagaggctggattttttaaaaggcagctttccaactttgcacacaaacaggtaacaggaaggtacagcaaaaatcctctcatctgaaacactgtcagcagaaacaaaacctgtaaaaatgactaatcagctgcacatattgatgctctctgcaagttacctttaagtgttttttttttcttatacttgaagttgcttttacgatattattttggtggctttcttttctctctttgatgggcaatagaggaagtagataatgggatttaaggacgcctgggggagaaaagggaggatgtggcattgtctttttttttttttttttttttttttttagcatagaggtttaatcaaactcccatatgttgaaattgctcctcatattactggttttacatggacacagaaactaggcactttagaggtgcacttgcatggcaggctgggcccccttttctatattttattttcctttttagtatagtggtacttaaaatcactggttcacttaaaaaaacaaacaataaaatgttaaactctactaatgtacaaataagctgaaaagttgcattttatgtgtattttttgccatagcaggtactgtatttctcatgctggatttcaaaaaaaaaaaaaaaagtatcaaaaacaaaaaaaactaaagggtggtgttttattggattgtgacaggttgagtaataaggaattaagtcgtcgtcatttcattaaaactgagagatgatgtaatgcatatataagagttttctgaagggttttttttgggcttttaaacagcttatttttgtttttgtttagtttttttattttattttattttggaaagatatgattgtattatgtgcaactcagttgcttacattataactacaaaatatttttgggttcctggaaaaaaaagaaaaaagactaataaatgtgtttggctgctaagca

SEQ ID NO: 11053 - DNA, 225 bp, Homo sapiens
agttggaagagaattaaacgaaaatcattgttaattgctgaggcatgaaaattgtgttactataatgccttattttacctcgagaattgttaccttaaattagtacagcactttcttcttcccatggtgctttcctgtttctcagtctcacatttctcaacaaggcaaaaacaaagagcgttgaagttgactctgctcttgcatagtaaatgtagttcatacttg

SEQ ID NO: 11054 - DNA, 530 bp, Homo sapiens
ccccctcctccccagcccaacctcgggcctgcgtctgaggtggcccaggaccccaagctgcagagcccagggaagagcagctccagagccctggccggggccgcgggatatcaatatcaggctgccccactccacgttccccagcacatcccaggtggtgggagcagagggtaccctgccccaccagggtccttagggatgctctaggccaaaccacagtttgtaccaaaaaccttgtgaggaggtgggggagccatgtctgtgctcaggaagagggaaggggatgggggtggctagtaggctcctggcctctttggtttataaataaactgtgtctgtctttgagaaagcacctacctgtcttctgtgcagctagggctgcagagctgtattcaggtccaaggttctgcccttccttgagtggtctagaaggcactgcgtggcccctcagatgctgggacacaacagacccgggacccagctgtgctacccaccccttccatggactgaataagatggactaacaggcc

SEQ ID NO: 11055 - DNA, 885 bp, Homo sapiens
tacttcccctgccaccctgcacacctccaagtcagggcaccacaacacgccaccgggagagatgctgagaaaaacccaagaccgctcgggaaatgcaggaaggccgggttgtgaggggttgttgcaatgaaataaatacattccatggggctcacacgttgctggggaggcctggagtcaggtttggggttttcagatatcagaaatccccttgggggagcaggatgagacctttggatagaacagaagctgagcaagagaacatgttggtttggataaccggttgcactatatctgtgagctctcaaatgtcttcttcccaaggcaagaggtggaagggtactgactgggtttgtttaaagtcaggcagggctggagtgagcagccagggccatgttgcacaaggcctgagagacgggaaagggcccgatcgctctttcccgcctctcactggtgcgatggaaggtggcctttctcccaagctggtggataatgaaaaataaagcatcccatctctcggcgttccagcatcctgtcaatttcccttttgctctagaggatgcatgtttatttgaggggatgtggcactgagcccacaggagtaaaagcccagtttgctaggaggtctgcttactgaaaacaaggagacctggggtgggtgtggttgggggtcttaaaactaataaaagctggggtcggggggcttttgcagctctggtgacattctctccacggggcacatttgctcagtcactaatccagcttgagtgtccgtgtgttctgcatgtgcaggggtcattctagtgcccggtgtgttggcatcatctttttgctctagcccttcctctccaaaataaaatcaaataaaggaaaatctccacccac

SEQ ID NO: 11056 - DNA, 1439 bp, Homo sapiens
ccttcactgcggcccacatgcacctcaggttcaaaatgggtgtcttctggcagccctgcacgtgtgctttctgagtgtctctgtgtgtgcattaatatatgcattccatttgggagcatagcagctgtgtgaatgtatgtaattgtgtgtggggggttttttgttttaagtagttagaagtctgggaaaatgaatttttgaatagtatgttactgcagctttggtaacattaattctatagaattaatgatcagagcaagtttaatttttaaacataaaggtcttggttacacatgtccatgcattccagttaacacatttaaacatatagaaaattcacttcttctttcaagtccttccctttctatacttttgctgagatcaacccaatatcataagaagtttgtgtgatgcctgtatttttagctaattaccaaggtctctgcctatgcaaaaattcatctttcggtgattgtgggcggccaatacataccttctgtaactcctccctacctattctagatcctgcatatctactggagccatatgagccctcaggggcactggtgtcctgcagtcttactagtcagccacagtccaggttccagcaacactagctacctaccaaacaaaacacttctgagcttttcttgccatttggttgcctgggacctggaaagtgtttagattcttgataaagatggaaatggaagagaaagaaaattatatatgtatatactaaagatccagacatcagggctgggcacagcggttccgcctgtaatcccagcactttgggaggtccaggcaggtggatctcttgagaccaggaggtcaagaccagcctggccaacgtggtgaaacactgtctctactaaaaatacaaaaatgagctgggtgtgatgatacatgcctgtaatcctggctacttgggaggctgaggcatgagaattgcttgaacctgggaggtggaggttgcagtgagctgagctcatgcgactgcactccagcctgggtgactgagcaagactctgcctcaaaaaaacaaataaataaataaaatcctgacatcctgccatcttttctcttcaatttaaagttgatttcttaatgatgacttcaaaaattaataaaaagaaaagaaaaaaatgatttctggccgggcgtggtggctcaagcctgtaatcccagcactttgggaggccgaggtgggcggatcacgaggtcaggagattgagacctcctggctaacacggtgaaaccccgtctttactaaaaatacaaaaaaaattagctgggcgtggtggcggatgcctgtagtcccagctactcaggaggctgaggcaggagaatggcgtgaacccagaaggcagagcttgcagtgagccaagatcgcgccactgcactccagcctgggtgacagagcgagactccgtctc

SEQ ID NO: 11057 - DNA, 174 bp, Homo sapiens
gaaaagacttcttccatcaagcttaattgttttgttattcatttaatgactttccctgctgttacctaattacaaattggatggaactgtgtttttttctgctttgttttttcagtttgctgtttctgtagccatattgtattctgtgtcaaataaagtccagttggattctgg

SEQ ID NO: 11058 - DNA, 1118 bp, Homo sapiens
agacaccttgtagtattttgggagcaaaaaaattattttctcttaacaagactttttgtactgaaaacaatttttttgaatctttcgtagcctaaaagacaattttccttggaacacataagaactgtgcagtagccgtttgtggtttaaagcaaacatgcaagatgaacctgagggatgatagaatacaaagaatatatttttgttatggctggttaccaccagcctttcttcccctttgtgtgtgtggttcaagtgtgcactgggaggaggctgaggcctgtgaagccaaacaatatgctcctgccttgcacctccaataggttttattattttttttaaattaatgaacatatgtaatattaatagttattatttactggtgcagatggttgacatttttccctattttcctcactttatggaagagttaaaacatttctaaaccagaggacaaaaggggttaatgttactttaaaattacattctatatatatataaatatatataaatatatattaaaataccagttttttttctctgggtgcaaagatgttcattcttttaaaaaatgtttaaaaaaaaaaaaaaactgcctttcttcccctcaagtcaacttttgtgctccagaaaattttctattctgtaagtctgagcgtaaaacttcaagtattaaaataatttgtacatgtagagagaaaaatgactttttcaaaaatatacaggggcagctgccaaattgatgtattatatattgtggtttctgtttcttgaaagaatttttttcgttatttttacatctaacaaagtaaaaaaattaaaaagagggtaagaaacgattccggtgggatgattttaacatgcaaaatgtccctgggggtttcttctttgcttgctttcttcctccttaccctaccccccactcacacacacacacacacacacacacacacacacacacacacactttctataaaacttgaaaatagcaaaaaccctcaactgttgtaaatcatgcaattaaagttgattacttataaatatgaactttggatcactgtatagactgttaaatttgatttcttattacctattgttaaataaactgtgtgagacag

SEQ ID NO: 11059 - DNA, 1019 bp, Homo sapiens
gccttcctgcctccagcctggcttctagctggaagccagcccagcgtttctctaccaccaccaccatgcctccacctgactttggcttggagactgatcctctctgtgtaaattctgcccggtgctgtgaaggctggacggtggaggacctgctggggtctcctgggacccgcctgttgcttctgccctcccctgtggaaaggtctatatgacgggccgcctgaggccccagaactcgtctgtgaaccaccttttccagccagagttcccaaagctggaacgctagctgcctgctcttccttaagatggcctccccccgacccgccacggccctcagttgccagggatggggccaccactgtcacactgtggaatacaagacagtgaactctgtctgcctgaacgagccatgtaaattaagttctagagcagctctctgagcaggataaggtcccctgacagtgagttgtgtggtgggggcagcctctgcctcaaaaattcaccaagcagaatgcctctcagcctcatgtgttggtcctctgctcctcctagctccccagggatgttggggacccagcttgtctcggcagctaagaagcagtgaccaggatgtggattttggcgacctgtgtggtggccttgagctgctttctgtgtttgtgaggactgactcccatttcctaaaggaaatgcccccggggaggacattgggaggaagatggcctgagtgtgcactttggctctgctacctgctcctgaagccccgctaaaaataattcatccaagattcctttgtagttaaagggtccagttctgactggagcctctagagagctgggcttgtatgttcttttggccttttgttcctacctaaatgaagaaaccatgcctggaggggccgtgaacacagaaccctcaagacaaggatgacagagctggaggacacatctagctgccattgcaacctcactgggctccccagactctgtgtgtgagaaattaaaccccctgcttgcttg

SEQ ID NO: 11060 - DNA, 2717 bp, Homo sapiens
ggccaggtgttggccgtgggtgaagtcctggggtcagggggtggggtggggccagaaggcctgatagaagggtcagggcaggccaggggggtggggggccgccctcatcaggcagcccccagccccctgaggccctgtccatcttctccccaccaccgccccggtgtgcgtacccaggcgcacgtgctgcagcccccggaggccccgctgaaacctgggctgcccttcccccacccccacggctctcctggttgaggagggaggggcctggctgacccctccagcttcagcctccagctttaacttctgtctgctcctaatgggggcccaaagctcagggctggggagcctggggtccccacttgaatctccagcaggagggtccttctctccctggcccgtcctcctcccaccccctccccctgggggcaaatcaggacacaacagagggcagaggccccattagctttaaaatgtagccccaggttggagctgggaacactgtactggccacttaccctctggggcctcagctttccctccggaaggctgggaggaggtgggctagatgatctttggagcttaaggagtcccagccctttctctgatgccaccacctgaaccctgctccctcgtgggccagtgaaaatagactgtaggtcctcagagccttcagagatgatccagcccaaaccccattttgcagagaggaaaactgaggcctagaagggaggagtggtccacccacggtcccagcacaaggcagagctgggatgaaaacagggctgaaaagactcagggccaattattggctgagcccacggtcccctcagcagggatgcgatggtctctgaatcagtgtgcagctggggtcccaggcagcgctgcctgggggctggggaggggaggcccagaggagggctggccatgtgagcaccccatgaagggaccgccccctcccaaggatggtccctttgggtgcagcagcagaggtcacctcctgacatgcgctctgggaaaggtggcagagggcaggacaccatgagctcaggatctgtgtgaggtgtgggaggtgggaagggtgagggtctgggggaatgcggagaaaagggaggcttgaccccgggcaccatgggccactccaggatgggacacggcccctctttcttggggacccagtatgtcctctcctctagacccagacatacagttataaccgtctgtcctagcccctccctaatccctggccctcccagctgtctgggacttcagtggacccccagcccctgcccccactcaccaaggcctcgctcgtccctctcgtctgacatgtctgtgtgcacccccctcctctccaccctaccttccatcaaccagggcagatccaccgtgccctggttccccagacattccagaatgccccacatcattggcacaggagtggggcagccccggaaggaaccagggattaggctgtaggggggtgagaaggagagaagggaccaccccattcttctcaagcaaggattgccagcgcgcgctgacacagtgatgggctgcccagggctggaggggacgctgttcctcccgccgccactgcccaacctttcctgataatcgtggcatgcgccctttcctcttccctgccccaccccctggccgcagcaggccagcactgcagagtttgggtgctggtggtgtggctgtaggggaggggagaccacacccaaggtgggggctgtggccatgtgtggccgtgatgtcgatgatactcgttttccctgatccgtggtgttgcagtccgttgtcaccagccttgtttctagtgtgtatatatgtcgcccccgtgatgcatatatacacaggtattaaatatatcgctctatataatattatatatgtgtgtggtatccaaggaatcacttttatgagggctaaagataaagaatttggccagaaaatgcagccatccttgtgtgattaggagggtttcaggggccactggactatttgcaaggtgacagggactggagccatggctcagaggtgattcgggcagccagggacaggagccaccctccccaggcccaactctgctagcttcccagaccacccccatcgagtgcggagagagtgggagtgctcagggaaagaaggtgatttgtatttgtctccccgctgaaaagaacaggattcaagtccagagttttcatcttcagcctgtgatctgtccagggacccttgggatctggggcttcctggcctggccagagctggagcccccacagggtaaggaagagagagtgggaggcagagtgtgatggggaggagggacaggaagacccttttaatgatgagggtaactatttcagttgtgagccttctagggccccaggctgggaggctcagaggactgaatctgggacctgtgttccccccggcaggcagggacaagatggcatggcaagcatgggggcggggtgggtggggagggatgctgcatttctcagctgggcagtaatcaatttaatggtcctttaaaatgtctgtgtattaaaaatttaagaataccacactttaatattaaatattcataaggtctagtatcttgataataatgtagatgttttaataacaatttttgtccttcttaaaataaaatgaaagaaacttgcttcccttagcctttgttctagaaaataaacttgtgcactttg

SEQ ID NO: 11061 - DNA, 3364 bp, Homo sapiens
cccgtgccccccgcccgggcggggtactgcctgcacctcagacctctgcctgggggctccctgtaacccctcacacgcgtggagacttatgactcgtcgtgggcgcatggcggcgcacctgctgcaggagcggccacgtctcagcttcattataccatggcctgcgcacgtggcgacgtccctgaggggccagtctcctcactggtggggaacgcaagagaatctgcgtagatgggtgactcagccttagtttctattcttggatgtcccagttgaatcagaaggggacctctggagtacacacctctctcctgggcgctcagggtccctggactctccctcagtctccagcctgggctgccgagggctatctctgcagaatgagttgtgatcattgtcaccctatgtcttctcaggtagcagggcgcgtttccacttaaggtgtgtctgtcacgcacctcattctccccagacagtctttgagtaacatctgttcccatcttccttggaagcaggacacaccagctcctccgtcagtgtctgcatgggtagcaggctgcaggagtggggtctctgcacagcctgggatggggcttggggctggggcctgcagcagaagtgtgcccagcgtttctcggctcccgcaccccttttcccttatggctctgaggccatcggctgtctctgcatttcattggctgtggaggagagactcctaggatggctgctgtctgagccatgagtgccagggctgagagaggcctcttcatttcctctccaggctactcagaggccatgtgaagctcgtttgtcccactagaccaggcctctgggcctgctctttctttccacccaatgtccagtcttggatcatagatttaaaaggaaaacccctcttatctaggaggctttaacttcctggaccccaggattcaccttcctagtggtgtttagaaaatgcctccacagcccccttccaccatgggcatgagagctggggtgtgtttcttgagaagctcccttttttcttgctctgctcaccggtgtggcctgggctggagtgcactctccctgggggcagctggggcctcgcaattcttgcttcaggatctctcccatgcgagctgcccggagggtgtcagcagggcaagacacctagtctagagtcaccaaggtcacagtgccactttcacgggatagcaggctcttgggacttttacacaggcctagggtcccctcagtcttggtcccaggagatgggggccactcgtgaggctggccatgctgtggcttctcacagctgtggtctcccctgcctcacaacgactcctttctcttgtgtggcgggactcgcccttttgctgtgctcagaagattcactgaggaaactcatggaagcctctgctcatttgggtcactgggacacccctgagatgggtgtgtttatttgctcagggcgggcagcctatggtgaagaggagacagaggcgatgggcgtgcttcgtcctccgtaacactggctttatttaccgtggtggttcagagtcccaggccctgacctctaaagacttttcataacagacgttaagaccaagccgtggacctcaccccaggggaatgccacggccctttggggacctgcacacccacctctccgggggacttgacaaggggccctgaggccaagggaggtcactcctccctccaggcccctgacttttactttgtggttctctaaaaaccatgtacacactttcactctattgtaaccacacagggcaggcgcatccagcatgtcagtgtcctgccccgggcagctctccctcccgggcacgctccctctggcctggtggatcaccaagagggcggttctcattttgttattagtggaagagccttgagcttaaaagctcttcattttctttgccggaaagtatatggtttgtgtttttgcagttttatttttttaaggatggacactaaatctctggtgtccatgttccgagcccggtggctgggatggtggctcgatgtgtctcctctttatcccgccctctgcctgtttggtgccctcccttctttcccccaggcagtgggtatcgggttctttcccaaagtgcttacttggaaagagtgtggctgctggactcttttcgaaatgcccctctgagtcaggagcctggtggggacaagatggaggatgtccacagaggctgacctgtgggggaaaagaagtgctcaggtaaggttgtctcctctcctgtcctaaaaaaatccatgcttgcaggagagggttggtgcctgctcagtttctgtcgagggaatgggagtctcctcggctccctcctgggccctctgcttcttggaggccgaccgctggagactgcggctcctgtgcttggatctttgacatctgtcagtcactggaggctagagaagttgactttaccttggctttctgtgggttcccgatgggcttggaagtgccgtctacttcctaagcatcctgtctaaagctttgtggcaccctcagtgcaacctcagaacagacaaatcatgaatgagctggaactttgcaagaatattcatattataaatgtctcatctgatggaggaacgtgtgcatttagagagagggagagttttcaaggtttatggcaactttgtggaggacctgggtaactcttacccttggccaaaggaagaggttttcctgtctggcttctgaggttggagggggcacttagcagtgaaccttaagtctgggtacatgtaaccctgctgaggggctgtgcaggccgctcctacggtcctttggcctgaggcagggcgggaggcatgcaagccagtgggggaaaacccctctgaagctgggcagccctctacctgggccccgggagccgtgctccttggaacgcaaagggccgaggagcatctggttttcatggcaaagctctactccagagctcctttaacatctgctaattaagtgcaataaatttttctagaaaatggcaaagatgacttccaggtggatattgctctcttacggtgttggggatgccagaacaccacttggttttatttttctaagtgcatgtgatgtgatagagtgtgtggggctctgtgtccttccctgggagctggcattccagcgggcccctctctttacctttgttgggggaaggaggcaagagagaaattccttcttcccagccagagagggcagaagcagaccgtagcccattggccttatgtgcgtgtgtgcgtgcgagtgtgtcactgctggtgggccggagtgatgtggtgggagggaagccgggaatgtatccttttcagacaaaattaaatattttgaaatgag

SEQ ID NO: 11062 - DNA, 375 bp, Homo sapiens
gggcagtgcctccccgccccgccgctggcgtcaagttcagctccacgtgtgccatcagtggatccgatccgtccagccatggcttcctattccaagatggtgtgaccagacatgcttcctgctccccgcttagcccacggagtgactgtggttgtggtgggggggttcttaaaataactttttagcccccgtcttcctattttgagtttggttcagatcttaagcagctccatgcaactgtatttatttttgatgacaagactcccatctaaagtttttctcctgcctgatcatttcattggtggctgaaggattctagagaaccttttgttcttgcaaggaaaacaagaatccaaaaccagtgactgttctgtg

SEQ ID NO: 11063 - DNA, 1771 bp, Homo sapiens
gctgagtggttcacaggccagctggccgggggttggggagccacacagggtgaacgggcagcagccggctccatgccccactgccctggctgatgagtccttcggtggcctcagtgtgcacgtctgtctgtccgtctgtgcttgtggctatgagcgtgtgcctccacccaccccacgacccgtgactactgtgcaagctggccaggaggtaggtggagggcaaggccaccagacctggcttcgcgctgtccactgcctctctcctcccctccctgccgcagacacgcaggacccgctcgccctcctgcttacccgtccccacggtgactgagctgcgagagcctgcgctgggctcactccctggcctccgcccctgagctgtcccgtgtcagtccctggcccggagccaggctctctgtgctacttacatctccctcccttggctgaggtcccccgccacagcctggacccttccctcagaagcctggccgatgggtgcttttggggagcctctcagcctctggcaggggaggaggactgacacggaggcacacaggcctctcactgccgaggccagccttccttcctgctctgctctctcagtgccatggagaggcaggaagaggggcctgagggcggaaggggtttggggctcccatttcgccggccagtccctcctcctcagcctggcagtggcgctgggctccttcccctgggctgtactgagccgagcccaggggtttgcagagggtgggggtccatctctccagcttggctgcagacctcctttaccctgactcacaagccccactgatgctctgggccatgcccggctgacggctgctgtggatgccgcgagggacggacacacgtccggggcacccacgaggagggcccccagcctgggagactggccctgcggcctccacgtcaaactctcttcccaaagccctaacagaccagtggccgaggtgtggctcttattgcatccatccctgaagatgtgtggctgttgctgtcacctggagtccttttggggccaagatgtgtgtgcacccggggtcgtggccattcactcccaggcaggggtgagggtggcctggcccaggaggccaggaaggagggccctgtctgcctccacctctgggtgcaccccctgcctaccaccctcccttctagagagcacatcgcctgaccggggagaagtggggccgtggttcgagggagggctggccaggggtgggacccttatgagactcagtctgtgagtaaaactgggggctcaaatgcccaggatgaggggatcagtgactgtctaggaggatcccttgccttgtaggtgccccaagaccgcagggtagaaatcagccgggatgcctgcatcccacccccggccccagggcccaccacataaaatctgggagcccagagctgctgaggtgtggtcagctcccctaaaatgggcacggcccagcctgtcccatgaggaataaaggcccctggcccccttgagagagggcttgttggtgagggctgactcctgggggcccccaaggctcccctcctgtggggaggccaccttttaaggcaccactagcagtcaggatatggtggcatcagccctggggcctcctgggtggcaggggggcagcagctctcctccccactcacaggccctgcagtgctcatttggaattcctcccaagacccctggccacccagaccccccattcttcctaacactggcaataaaccctcaactgtgacccac

SEQ ID NO: 11064 - DNA, 233 bp, Homo sapiens
ccagaggccgcgcgtccagctgcccttccgcagtgtggccaggctgcctggccttgtcctcagccagttaaaatgtgtttctcctgagctaggaagagtctacccgacataagtcgagggactttatgtttttgaggctttctgttgccatggtgatggtgtagccctcccactttgctgttccttactttactgcctgaataaagagccctaagtttgtactatatactgtt

SEQ ID NO: 11065 - DNA, 476 bp, Homo sapiens
ccctggagcagctcagggctcagggggccacaaggaggcaggtcgggaggaagaagaggtggaggtgtggttgtggtggagagcaccagctagccccttccagaaggggaggccacatttgcccggccccctggagctgggtctgagccccagctgaagggactgagcctcagatggctggattttctctcaggggcctcctgctgaaggggccttcagaggattttatgctggaaatatgaccctgtgcagactgctgggggaggcaggaggatgcctgcctggaccctgttggtggctgaagacctctggccagctggcttccgcccttggtggggaagcagcagaactaggttctgagccacgggtcagggtgccaccctgctgctggccccactgtgtcacagagctgcctggcacaggtcccagcccctctgcagagacacaataaaagccagcagaccctttggaccgac

SEQ ID NO: 11066 - DNA, 709 bp, Homo sapiens
ccaccaggctcagcccacccctccacctctctctcgatttctctctctccccctcagcatcttcccgctgagagtggtggggaagagccttgtcttcttagctgtcacctgccgaggcttctgggccactcaggccagtgcacccctgggcagagccccttaaagctgctgtcactagatgcccatggtccagggcctggtgggcgtgagaggataggtggcagggcagaaactgggcagccctgacttgatagcagcagggggagctcccaagctgccaagcccctgcctccagccttcctgagtttctctctcctgaaccctactctctcctttttgcttcctcagtttttatcaggctttctctgggggacagcagtctctgagcaccagggagcagttgccctcaggcctgtgcccagcatgccctcccctttttatacgaatgttttctaccagtgtgcttgggtttgccatgatgcgaggctgagttgctgtagcgtcttgattctctccctgggtctgcgttccctcccctgggcctgactgagcctgctcattgtttttccctttattacacaggacagccaggggaggaggggggcccagccctgggaggctggtgggaggcagggggcaggcctgcggatgcatgaaataatgttggcattattttttaattttttaaaaaataaatggtatcttattt

SEQ ID NO: 11067 - DNA, 3463 bp, Homo sapiens
cgaccacttctctgtgtcatcacacatacccacttcacacacacacatcccaaataccaccaccaaccaccttcttcctctcaactctgtcccacaggcctgtctggtatttgtggagcatcttgtctgtgtgtgtgtgtgtgtgtgtgtgtgtgtgtgtgtgtgtgacagagagagagcgagagagcctgtgtgtgtgcatgcaggggtgaggtattttcactgccctccctggagagtcccttgtaagtttggctcctccatgcctgtccattatctgtctcctttccttgtgtcccaaaacaaagctgtttgcctcactcaggagatctgggggaggtttcatttaaaagtgctgggagcaggtgagccacaggcaactcttctctcggaacctgcacacaaactggggctatagagattctccaaggacagatggcagtggagctagacctgagtagggggcagggagttcaggacaaccctcctgtaagttgggggtggtctgggggtaaggctggggcttcctgggaaaaggaaggccatgagaaggcagagaagtaggccagagctgggttcttgcagaaagcatcagtgcctacaaatggagctccacccttcagtctgtgtcgtgttcagtgtcacaaagctaccacctgtcaccagagcctactgctgctctccactcaactggcctctgctgccaggccactgcctgtctctgcttccgactttgtcttctttctccctttccctccttccctcatacattgctttctctccctctcctgcgtgtctctgacatctctcacttccttttagatgaatctactttaggttcattcctatatttagcatttatgcccagtctacttccagaaatgactttagactgcctttcacataaaatcacaaaactacaggacagtacaaacagattgccagagaaatctgggtcaaagaaaggaataggaaagaaagtttctgtagtcaagcacctgaacaggccctgagctcacaggcagccaatgtaaagagggaaacacagtgagttatgcagttcccagtgtccagttaaaggaagcacacatgctagtcatgtgagacaaccttttattgggacatcaggttctagaactaattctaaagaagtatcagaaacaatatacataatttgtctttcttagtaatttggcttcaaagacaaatttttgaccacacctccgttttctccgtcagacttctctcccttctaagcaggcttctctgttgctccatttgcttcatacatacttgacctctcttttctattccccatcacttttgtgctgaagctaatcatatttatgtctgtctttctctacttttccctaattccctctcctcctgactcctgtagacattcccaatgatacccaccgtcatacatttaggcttttcttgcctttccctgaagccctgtatttattaatgcatatatttcccctgcttgttgtacaagtaagttactcttttcctttaatctgtaagattcatgaaattcggggccagggaaacagtttagccttagggaagggaaaacactaagtgaaactgtttacaataacctcatacaaccttctgtcccatctcctggttcagcctaggtgtttcactggtcctctatgaatcccagcacttataatcccagtcttttatcactcaggtgctaggaaaaaaaacatagactcaagacccaagattcaatggaccaggagaaaggggggcggtgatcaggtcaccagtgaccccaacctatgctctcggtctttcctggaggctgccaacccagccctcatcctcccttgctcacaaagttacagggtaggcacctgtcaggacagaacagcagcagcgctacagcccagaggttatacatttcaacagaacagggatccttggctactgtagaagcagtcctgtatggagaccttggaccagcaggggaagatctatgggcatgggaggtgggcgttggaaaggctgagtaggaatggtgcctggcacccctgaaccatgatctgagcctccctggagaaggtattttatatgtctgctgccagctgctggtctccacaccctcaaccgttctcaacccccctgcagggagaaggcctcctgggcactgtccttccacctgtgccagccaccccctgccccactgctgaatgaaggccatttcaagcgctgcttctcactccattcctctcagctgttattgctgcagggccaagccctttttagtgctgtgctcgtccagctcaccaccacagcccctctcagccctcagtaggtgggaggggccagctgcctctttaggccagttgcatcctccatttatccaaaccactcctctcctcccagtggagtggggttctgccagtacagccctactgcatcatctgcgtcagccggtcctagcccatctgcagggtgaaagaactcatcaagagctccttctgcccttgtaagcccatcccagctacttgtaaccatctctaagggcaatggcattgctccctacccattcatctgcatgagctactcttggcttccttaaagggtcaagaaagcaatttttctgcttactagattcattgagatcagctgtgtgagccccaaagtgggacaagggtgtctccttcattacttaaagatattcatgagggtgggtcactacagatgttggggagcaagggctaggatcactttttaaaaaatcaccacttgtggctgtcccagagtgcggttgtacatcctccccacctcataacgcagccactgaggaagagtggttttcctaagaagacattgctggagttgactttcttctgtccaaacaaacaaacaaaaactaaacacacacacaaacccccagaaacccacaatatgtacacgctaaggaaaaactagcacccttctgtccactcagcaataagagggatctcttcccacctaccctacctactcctacccccaacccccttccccattaatgtgagtaatgaattagcctgaccacaggtggtcactgtaggctaatggaaaatacccaagggagggcaaagccccccatcagatgcatgaatgtttgcgaatgttgactgccactgccccacacactgtgtctttatagaattcccctttgcccaccctcttcctgtctccacctggacacaacttgctcaaaggctggtgacttgtgggccattcatctacaaccaagtcctgatggagcaagaggcccacgcctaggggatgcaagaacaacccgtttcttaaatgttaccagtcccagccaatcttacggtgacattacagttaaatttcccaattgaaaacaagcaaacagacactcaaactggtcctgtaattgttgctagactttatgtgttgtacaactaaacattgctgtttgaacagt

SEQ ID NO: 11068 - DNA, 1290 bp, Homo sapiens
ccttctaagatgtaaaccttgaagactcaccaagcaaagaggtaccctaaaattgaagtcaggataaggaggacgactcaggtatgtgatcacaggcttctcgcaggtagttgttccaccctttggaagggcaatcttatgggggaaggtgaaactttacttctgtgcctagattttagaagcagaatcaactcttaaatagctggctaaaggaagaataccattgtggggctaattccccagtaatttggttgacattgggttgcatttttaaacataactttttccacactcgcattcaaggttcctgtcttcccatcctcattcaagaaacatttattatgctccgtttgctaggcactaagatgcgtgctaaaaacgtcatgttgaacacttagttgtttgagaaagctaaattttcaatagtaagagtgttataaattacggtggatccacaaaatggagtattatacacctgttgaaaactatgtctagaggtagagaaagccttctttgaggagaccaaaaccaacaaataaaagcatgataaattgactatatcaaaatttaaaacttctctatgacagaagttaaaagataggcaacagaataggaaaaagtgattttcaacatatatattaatttatagtcagaatacgtgaataactacaaatcaattctccccaaaatgacagaaatatgaattgccgaataaccaaggcaatagcatggccagaaaacgtttgaaaagatgttcagcttgactagtgttagggaaatgcaacctgagatgagaaaacatttttatctccaaagatttacaaatattaaaactcttgatatggcactttcacattttaaaatatgcctgcgagaaaacttgcatgtgtgcacaaagatgcatgtgggaagatttcattatattcattgtttctaacagcacaaaattagaaataacctatatgtccattaataggaaatatatgaataggctatggtatgcccatactacgtatgcagaaatttctaagacttgttgataaggagaaaagcaagttgtagggagcatatactatagtgattttcagcctcatcagactgaatgccccattttataacaaatatttatattttataacaaacgtttatatttgtatatttataacaaatattttgtaatgtctccttcacttcaatgaagtttgtagataattgcatatgattccacaccatttcaaccaaaattaataggccataaatgtgatagaggaaataaaaggagtttgtagt

SEQ ID NO: 11069 - DNA, 1364 bp, Homo sapiens
gtctgggccctttgagtcaggaaaccagggccagttctttttcaggagttaaatgtttacccatttccaaggttgcgttttgggaggggacatgggttctctccttcctgctatttaggcattctccaggttcgagatccacccgtgtgtctggaagggactgcgggaccattccttccatcctctttatttcctgaggtccagagaaggaaggagacttagcagccacagagcaagaccccaatctcctgactgcactggcctgactgccccctcccaggggatgttaatgaaatgaaggaagtggggaatgtcacccgagactgtcacaggcttgccatacctttggcctacacaccgggctctagagccataatttccaacctggggagtctcctgtgcacttaaatccgaggtaggctgcagtatcggcttgaagctctgacactgtcagagaaagtggatttattgtgtcataggagtttctgggacccagctcttcctgagaggggtgggaagattggggatgggatcctcactcagcagtctgggtagggccctttgaggcagagggtcttcggccagtgaagagagatttattctgctcagagtgctggggtcccatcctttctccctggctgccctgttaacagatggtgctggaccttgccccggaaggggcttgtagcttttttacgtcaacgaaatgccctcctgtactctgtcttcagcagccaactcctggagctgccaagtgaggggttaaagaagaggtggggaggcagtgtggctccctgggaaaagtctgttgctttggttctcagtcctgggtattctaggagcttggacacgggattgcgtttcctgtgctaaaattctctctcctggctgggctccggtaaactgaagctgctcgagaaatcacctgggaactctcatagccgtttgtcacccagggtgtacttgccaggacctctccttgctactcttcccaaagtcgggaggcaaagcggctgggtcaccagagcctgaccatactgacgctccagggggaagacgcagaggccgggaagagacaccccctcccaaacacataaaacttgccccttcctagcctcggctcccctcactggggccttgggcaggaccgacccgcatccaactaggcctaaggggtaggctctgagcctcttacccctaagaggcggagatgcgcccaaggcgggcgcccggcctgttccccagccctgcctggaagccccgcagccactgcattttgtttaaacacagatagcacgggcctttctcttattgctacagtgttttgtacacggttaaaacactagtaaagctttttcgttatt

SEQ ID NO: 11070 - DNA, 1165 bp, Homo sapiens
gaattacagaaaggagaaagcactaactgaagaaatggtgatgctctcagtttctctgccttccctatcagcagaaaggctcggggaaggccctcagcctcccagtctggtgaagcttcctgtatggtccatgaccgtattccaccccaggctctgggaggctccctgagatgtgctgtccactaagcactgcacaaacaagcaatcaaattatgaataaacataataaatatcagccgtgcgtgactgagtgatggctgcagtttctcagtatccctaggttctagttggtgcagttgtctctgctgtcctttatttatgggagaaacataggcccaggctatccaggctgcagtggagcctggtgaactattctgggggccctgggaactattttcattgtttacaaaagcccaacagaaactgtgcattttcccttaagaaagcttcatgggctaactaaagcctcatgccattctgtgttcagtgccagtcatgacagctctgcttgttagcatactacttaaatataactagaatgattcaaaactcgggttctgtgatatgaggatatagataggttttcatctatttcctggcttataactcccaaaacccttgttttaggcttttgttataatgttgggcacttcgggcctcagaaaacagcaggctgtttctcagatcttctcctgacctcctttcacctgctgctttttctccccaaggcaggccatagaaactaaaagtataatcttcctttgcccgtcttccagttggccataaaaagaatcctctgacctaccttgtctgattttaggtcatgagacccccatttcagaagggattctgccccatacctgagaggaagaaatgtagacaggccttgttggacttccccactccatctgtattagattatgcctcttttgtccaatcccatttctccagtgttgtccatgcttcaatcatccctatccaatgaggtctccataaaaggcccaagaagacaggtttagagagctttcggagaacagaacacttggctttgcaaagtggcacgcctggagagaacttggaagctccacgccccttctatacctcaccctatgcatctcttcagctgtatcttttgtgatatcctttataataaaccagtaaacgg

SEQ ID NO: 11071 - DNA, 442 bp, Homo sapiens
cggttccagtttgtggaagtcccaggcaatcactgtgtccacatgagcgaaccccagcacgtggccagtatcatcagctccttcttacagtgcacacacacgctcccagcccagctgtagctctgggcctggaactatgaagacctagtgctcccagactcaacactgggactctgagttcctgagccccacaacaaggccagggatggtggggacaggcctcactagtcttgaggcccagcctaggatggtagtcaggggaaggagcgagattccaacttcaacatctgtgacctcaagggggagacagagtctgggttccagggctgctgtctcctggctaataatctccagccagctggaggaaggaagggcgggctgggcccacctagcctttccctgctgcccaactggatggaaaataaaaggttcttgtattctc

SEQ ID NO: 11072 - DNA, 326 bp, Homo sapiens
ctctgggcctggaactatgaagacctagtgctcccagactcaacactgggactctgagttcctgagccccacaacaaggccagggatggtggggacaggcctcactagtcttgaggcccagcctaggatggtagtcaggggaaggagcgagattccaacttcaacatctgtgacctcaagggggagacagagtctgggttccagggctgctttctcctggctaataataaatatccagccagctggaggaaggaagggcaggctgggcccacctagcctttccctgctgcccaactggatggaaaataaaaggttcttgtattctc

SEQ ID NO: 11073 - DNA, 406 bp, Homo sapiens
ggccccggcggctcagggcggggctggccccacccccatgaccactgccctggaggtggcggcctgctgctgttatctttttaactgttttctcatgatgcctttttatatttaaaccccgagatagtgctggaacactgctgaggttttatactcaggttttttgttttttttttattccagttttcgttttttctaaaagatgaattcctatggctctgcaattgtcaccggttaactgtggcctgtgcccaggaagagccattcactcctgcccctgcccacacggcaggtagcagggggagtgctggtcacacccctgtgtgatatgtgatgccctcggcaaagaatctactggaatagattccgaggagcaggagtgctcaataaaatgttggtttccagc

SEQ ID NO: 11074 - DNA, 250 bp, Homo sapiens
gtgcccggcccaccagggactgcagctgcaccagcaggtgccatcacgcttgtgatgtggtggccgtcacgctttcatgaccactgggcctgctagtctgtcagggccttggcccaggggtcagcagagcttcagaggtggccccacctgagcccccacccgggagcagtgtcctgtgctttctgcatgcttagagcatgttcttggaacatggaattttataagctgaataaagtttttgacttccttt

SEQ ID NO: 11075 - DNA, 1186 bp, Homo sapiens
gtcacttgaggaggcgagtctagcagattctttcagaggtgctaaagtttcccatctttgtgcagctacctccgcattgctgtgtagtgacccctgcctgtgacgtggaggatcccagcctctgagctgagttggttttatgaaaagctaggaagcaacctttcgcctgtgcagcggtccagcacttaactctaatacatcagcatgcgttaattcagctggttgggaaatgacaccaggaagcccagtgcagagggtcccttactgactgtttcgtggccctattaatggtcagactgttccagcatgaggttcttagaatgacaggtgtttggatgggtgggggccttgtgatggggggtaggctggcccatgtgtgatcttgtggggtggagggaagagaatagcatgatcccacttccccatgctgtgggaaggggtgcagttcgtccccaagaacgacactgcctgtcaggtggtctgcaaagatgataaccttgactactaaaaacgtctccatggcgggggtaacaagatgataatctacttaattttagaacacctttttcacctaactaaaataatgtttaaagagttttgtataaaaatgtaaggaagcgttgttacctgttgaattttgtattatgtgaatcagtgagatgttagtagaataagccttaaaaaaaaaaaaatcggttgggtgcagtggcacacggctgtaatcccagcactttgggaggccaaggttggcagatcacctgaggtcaggagttcaagaccagtctggccaacatagcaaaaccctgtctctactaaaaatacaaaaattatctgggcatggtggtgcatgcctgtaatcccagctattcggaaggctgaggcaggagaatcacttgaacccaggaggcggaggttgcggtgagctgagattgcaccatttcattccagcctgggcaacatgagtgaaagtctgactcaaaaaaaaaaaatttaaaaaacaaaataatctagtgtgcagggcattcacctcagccccccaggcaggagccaagcacagcaggagcttccgcctcctctccactggagcacacaacttgaacctggcttattttctgcagggaccagccccacatggtcagtgagtttctccccatgtgtggcgatgagagagtgtagaaataaagac

SEQ ID NO: 11076 - DNA, 148 bp, Homo sapiens
ccgacacccctacaggagaagctctgggactggggcagcagcaaggcgcccatgccacacaccgtctctcgaggaaacgcggttcagcgattctttgactgcggaccctgtgggaaaccccgtcaataaatgttaaagacacactccg

SEQ ID NO: 11077 - DNA, 543 bp, Homo sapiens
cgggggagctgtggatggtggcaggagtgtcccagcaagaaaggcggcatccgtctgtgccctgtgcctttccagggagccaggcgccatgggcttctggtccaagctgtgttgactgtcatccccaccccacccctacctcacgcctgccccaccccctgcctcttttggttgttgttcttaatctcctctccatgtagttcccagtgggcaagagcctttgaaaatgcaggattctaaacactcgtgcttgcgtttgaagcctcgcgtcactcagtcgcgtgggatgatgagtccgttgttgtctgccttggccgaaagatgaaaaaaagcctgaaccccaacccccagctggttgagagcaccctgcattctgcctcatggtgcagttagcgatcacaggccttcagaagtacaacatcagctcagcaggaacgccggctccccgaggacccaggcttgacgattcaccggggatctcctgggctgggctctccttggaagtgaggccttttattaaaaataaaagggttttgcagtttg

SEQ ID NO: 11078 - DNA, 228 bp, Homo sapiens
ccctcactgcctccaaagcccagagcctgcctgtcagcccagctggagggcccgaggctgcagggtgtcctcccacagtcccgctgtttcctgtgcattcgtgacccgcttccctcccaccctgtctcctgtctccatcgttggattatctttgaacccccttgtgtggatcattttgagccgcctggccttgctcagtttattttaataaaagtatttctgggaggg

SEQ ID NO: 11079 - DNA, 311 bp, Homo sapiens
agataatgatgctgttgctcccggctggaaccacagcagtggcgatgagtgaacagccagcagagtggagcggccacactgatacaggtgaggctccagcactgccgcagcccagggccaggcaaaaccgccttcctatcccccgggagccgaggcctccgagatcggcgctgggaggtcgcacagtgcaggcaaatcacacggacctcagagcagggtccctggccgtgaaaactcaaaagacacagtctttaaaataaggacagaaaactgtatttagtgccacaataaagctgtgtcacaaactaccc

SEQ ID NO: 11080 - DNA, 434 bp, Homo sapiens
ggcctcacagctggccttgagtttttactgacacgtccctgtgtgcgggggtgtccatgtggcgtgtgtgtgagtgagacttttttactgcgtcccgtcccgccagccctatcggcctcgtcactggccttggtcactttgtatttctgtcttggttggaaataccatcagccttccttgctcggcccaggtctgtttcaggcatctgagtcggcgtttacccaggggccgggccagagacgggggtcggccgctcgctcccacgctcctcctgccccagccctctggtgtccacacctgcccacagagaatgtaaacccagtgggctctgcccacgccgggccccaaagtgaccagactccagcacacctgtctcctcctgcctggggtggccatggggatggaagggggtggaataaaacctgtcaacctgg

SEQ ID NO: 11081 - DNA, 187 bp, Homo sapiens
tgttgcgaacactctgtatatttcgagctacctcccacacctgtctgtgcacttgtatgttttgtaaacttggcatctgtaaaaataaccagccattagatgaattcagaaccttctaatgaaaactccatgcctctggtccttggactcttgtccatggttcctgagctgtggaccgggatagaat

SEQ ID NO: 11082 - DNA, 3352 bp, Homo sapiens
acacgcaaagtcggctgcagaattattgccaagttgctgctgcttccaccgccccttaaagttagtcagtttttcttctcttctttgacattctaagaacttatagataacttaaaacttttgtgaggaagattaatgtggccaataaaacctttaaatgttaagtgtcaagaaactgcactctcccttcttaagaactgcctaaagtgtaaaatacatttgaatgcaatttttggaagattttttaatgttcgtttattaaactaaccctaagtgatttcttcaaggactgcaatcagggtatcaatttgctttcccaaaggctcttccaacccgtgggttttggggtccaccgccaccacgagagaggcttttgaacaggtgcctggctgtgttcagaaggaagctggcctgtgtgcttctctccggtgggctcagccgacgtgtgagacttgttctgttaccaaatgaaccgggctgccacgctgtgacaggcgtttgtcctctgctttatttttactttgaagctcaaatgcgagtactaagtgttcacctcagcgttcgaatcattggcctgtaaccctgtgggctgcttcacgagaattcaggacctgcattttcattctaaaaagaaatgaacagcttgtgaaggagttttttggcttcatagtttctattcatgaggtagtgttacttctttatccccctaaagacaaaatgaagataaagggggattgccaggaatgggtttaaaagcacaaatgtggtagcttatcatctacaccatggagagtgaacccttacgaaatgaaagtcaaatgagaccatccgagaaaaagatgcgcataggcatttgtaccatgatcaaccccacgcacatgaaaactgtgaccaagtgacgtgcctgggagctttgacacacgagccgtgtgaattcactaggaaacatgtaataaagtcatggaagagaaaatcgtgtgtaaactttgcctttaactttagaccgcagtatattataatacatttgatatctgaaatatctttacttttttaagagtaagattccatatgtctgtctggaagggagccatggttattcacacgaatatccctgtcacttctccagaggtgtcaggtaactaacacgagcattctttgaagactctgggcacatgaatgatacacagaattgaatgtttaaatttccactgagtcctcatgaatcatttgagactagtaccagctgatcttgtgtacaggctcagggtcagtgcccaagggctcccgcgtgtgtgttctgatcttcagtgcgtagcacattctccatttagaaaagagtggtcagaataattgtggacggtacagtggctttttaaaactacagtctttaggtgtaaggtttggcgccgggagcaattttatgatcaaatatgatgaactcctaagtcactgaggtgtgattgggccaatgttggcatgaggttcttgctctacttccagtgttttgattccactgggagaatttggcctagtgtgtggctttggatgaatccgtgtagagagaggtgagcttgtcctgttacagatgctgtcagacatagcgatagtaggcacctagggaggaagtggccgttagttttacactgactttttaagaatggagaatgcacgtgggtttctgttgcggatgattcatagtaagcaagcggttgatgctgttaataccggccccacccgattgacattaagtttattcagcttttaaaaagatgaagaactaaggggaacaaatttaagtttgttgcaacttagccacacatgcttccctggtaccagctggaatcagcagctcacaggcatcttcaggacacttcagtgtatatgacacagtactttgttagcgtctgcgtgtgtatggaaagttgacaaaaaatggcatgaaaagatcatgattggattttcttttaaacctgcccttctgtaaaaaatagtttatatatttttaaattagtaggtatgtgtggcttccttttttcctaacattcccagcaaatttttgctgctaagactatcactgttaaagtgaaaattacagggaaaaatgtgatgaatataccgtaactcaaaatgtgatattttcttaaaatcactcttttatgctttaggaactggttggtctccactttgattattagtgtaaagagcctgagtatacgtggatttcattgtaaaatttaactccttgtcttttacttggggcacggggcccctggagggcttccctactttccccactatgttaacaggtaattctgatttatgcgtttagtttgacttatttttaacaaaatattagaagttatgctttaaaatgtttaatgtggactgaaattttcatcttttgtttgagaatctatgaagtgtatcatatacgtggcctaaagcaaggtgtgtattttgttattctgaaattgttttgcatctggacaaatactaaatatcccagtggcctttttttttttttttttaaaacctgtgtatccatctcatccttttgcgcattcctagtaagcaaaaaaatttgttatgccatcttcattattcgaattacagactgaaaaaatatggccagtttttaaagaagtttagattatgttttccatggaaggacaagtctgactgttcataggctgattttctttaagaggattattctgttttacaatttcaattctagatcacattttatatatgctgcatgccaaaaaaaaaaaaaagagaaaactgccttttctggtgtggaggggaagaaaaactaatattctaccttactagtagagttcaaaacaagttttcactgagagccttttcagtaaaagttaaacaagtttgttttttgagcatttgtcagttattctatttcagaagagtcaaaattcaagcacgatacattttgaaggctttgcaaactcctaaacccctgatgagtcctctcattctggaagtgggaatttgagtagatactgatttgtcccgtagtatggcagatgacagggaggtcttttccaagcaggcactcagaacacaggtcaccgtatgttctcagccagtaacaatcatactgaggacgaaggactctccgtttgatgcagacacaattgtaatggagatgtaaaacttcttagcaatcagatggataaattgtttgctttttactttaaataggaaattgttttctaaaactaaaatacttgaattgtcagacaatataatctcagcttgtattagtttttgaatgctcccatcgaggaagtgtaacaatccatgaaatgtgaataaatgaaaagtaaac

SEQ ID NO: 11083 - DNA, 154 bp, Homo sapiens
gcccagcaccacccctgggcagcagcatcctcctctctggccttgccccaggccctgcagcggtggttgtcacaccctgacttcagggaaggtgaaacagggcttgtccctccaactgcaggaaaacccttaataaaatcttctgatgagttct

SEQ ID NO: 11084 - DNA, 355 bp, Homo sapiens
aatctttacagtaaaacctgcaacttgaaaactagccttctgtaaccacagtgcccaaacgaagaggaatgtatggagaactccacgtggatctctgattgcgaaaccgtcacatacaccaagagagccacatgggcatgtggccctcaaggctgggtgagagggctcccctgtgtgttgaactatgcaggagggtgacgcggacacatttcaggtggactttgcaaggactgatggatagctacctcagggaccagaatccgtgggaagggatggacctggtgttcccgttcccatctgacaggctctcttttgtcaaggtggtatttttcgtaataaaaggggaagagtaaag

SEQ ID NO: 11085 - DNA, 59 bp, Homo sapiens
tgaggaacacacccttgttcccgtcattcacgtataaagagtggctaccttaaagagtc

SEQ ID NO: 11086 - DNA, 709 bp, Homo sapiens
tgaggaagatggacctggacagacagtcagctccacaccttgcgctgagcagctgtgattgtgccacgggagcatgagcccttttccccacggcccttgccactgtctcctggccctctctctgatcatgccaggtttgcaccagcctcgagtctcccatgttgtagtacattctccaagatgcagcccaggagcctctctgaaggaccagtctggttacgatggtctgagcttccttagaaccttccatggttgtcttttcccagcagatgaagcatagcctccttggaatggcatgggaggcctggcctgatctggcctctgcccaccctttgagctgcacctgccccaccccagctcatccatgtgcttgtaccctggccccacggggaggcttgcccttccctgaatctgccttcttgtggctttagcatgtgccatgctgtccccctgcagactgccattctccttgcagacttggctcagaagtcacctcctcagtgcagttagcctgagctcccctggccccaggtgcctccatcagagcatttaccccattgtgttgtggctgttccttaacgtccccactagccaggctctttgagggcagggattgtgtctggttaatttctgtattctctgcaactttgcaatgtttggcttgaagaaggagctcagtaaacatctgaataaacatgcaggttgatgg

SEQ ID NO: 11087 - DNA, 688 bp, Homo sapiens
gggctggtctgccgcacagccgcaggtgcacctccaggccaaatcattgctgccagtgactgtggtctgtacttgtttataccctcagacttttttaatgttaggtatttgtagcattaggccaacatgtattaagctgagccagatgaataagtccatctgatgtattttcggtgtttaaaaaatgagcccagttgctcaactgtttggttgaaaaccttgctcattttttaatgcgaaggctaagtgtcaccccctttctctgcctctggctgggccttgctaagggccaaggaaagaaagacattttttagggggcagccagtccaaatgccaaaagaagaccagttcttgccctgattgtatgaaatttgacattttggcactttttttttttttttggccaatcagattttctatgttctaaggacatggctgctgtagaatagcacagacgtggatgataaattatccccagaagcagcatgacagaatgcctcggggagcacttggaagggaaattgcagttctgttgaaatagaggaaaatcccttggtaaagacacagcctgttaggctcgtgtgggcctccagtatgttcaccaggggaatggctgggatttctcggcactctgcatcatccatcttttcttataggtgggaaaataaacaactttgtgatcctcctg

SEQ ID NO: 11088 - DNA, 637 bp, Homo sapiens
tcgtagggaactctgcatgaggccatcggtgcaggctggagaagagaaggcaagttggcaggagtggagaccacgggcatttgagccacttcctcatgtaacttaacttgtgccttcaggacctgctcaagcccgatcacgtatataccacttccatttgatgatggaatgctgctgttcatgaccaactttatggctagatgggtcagaaagcacccagttcatgataggcagttcaggtcatatggtgacttgatgacccagagtcaaacattcagtttccaccaaagcccagtaacaggccaagagctgtctctcaaaaggagagtagttatctgcagaagatggcagggccttgctccgaaagcctagagaccgccactgtgattcacctatgggggcctgccaaaggctgcagccagcatccttatctgccactgacacctcaagcaacattggatctgctgggtcatatggcccaagtggcagagcaacttgcacaacagcctggacctgtcatagagctttctcctgttctggaccccactcaaaactggcagcctttcaggtcactcgataaatgtgctggagtaacactcaaacgaggaatgtgttgcctccaaaatccaataggccc

SEQ ID NO: 11089 - DNA, 95 bp, Homo sapiens
gcactcgcttcgcgtcgcggggtctccctcctgttgctttcctaaccctgccctccggggcgttaataaagtcttagcaagcgtcccacacagtg

SEQ ID NO: 11090 - DNA, 1278 bp, Homo sapiens
atgaactacatccaaatacctgaatttttggaatctgtttcatggatttttcatcttctaccgtatgtgaaattgcaagtgtttgaagatttataagtacaaatttgggaacatacaaatcttttaggtagtagagtttaacgtgtataagctaaaagtgaaagtaactgagtgttctcttgtttctttgcattaatgtaactgtgtggtttgcctttgtccccctggatagaacgtgcatttaaagaatatattgtacttactgtgacagcagataataaaccagtctcttggagggcacaacccttatttgacaaaacttggatgttggcttgactgtgtttgtcccttcagatggcaagtcagcatcattctttatattcctcttctcattgggttttctgaactctggcaggcggttgaagtagtttctcactgtgattaattctagcaatctcttttcacccctctgcctttccaaaacattgacaagactcatttccagttaattaattcgagaaccctccctcttcattttgggtactgggctgtcttgtcactgagccctatccctttggaatgtggcagggagtgaggttggtgagagaacatgtgggcacttaactcttcatgttccagttcatcccagaagtagacatcccaggacccattctgtgtcaaggtgaatgcctgtgtcctccccagcttcatgcctctgtcatgggggaaggaatagcttatgttctgctctggtgcagtgccgtagattaaaggtacatttctatcttctttgatttaaaaagcaccagtctcataaaggtgccactcagttttagccatgtcttcactgaaattgcaaaagtacttttagggagcaggagtttatttgacatctagttatctgtctgtctgttcatctatctatctgtctgctgtatgagaggtaggactggattaaatgaccactgaactcactgaatccagatcattcatatcatcaacaaaagctctagggggaggtcacgttgtgaatgcttaaaacatattattttcttcaacaaccatatcgctaaactaatatatccagagattttgcacaattcgtgttgaaccttccaaaacaaaaataaagacctgtccaaaagttttgacaaaaatactgattgctcccaaataaagtgcttctaagctttgtgtagacatagtttaactgatttgtaaaaatagcttaagcatgttgagaatgaagtaaaagttttcccatgtgctgtctaatgt

SEQ ID NO: 11091 - DNA, 8376 bp, Homo sapiens
gttccttcagatcagccacaccttttccaggagttctgaagctgacagcactacaaaggagacgggggagcagcacgattttgcacaaatatccaccactttaaccttagagcttggacagtctgagctgtaggtaaccggcatattattccatatctttgttttaaccagtacttctaagagcatagaactcaaatgctgggggtaggtggctaatctcaggactgggaagattacggcgaattatgctcaatggtctgattttaactcacccgatgttaatcaatgcacattgctttagatcacattcgtgatttaccatttaattaactggtaacctcaaaattcgtggcctgtcttcccattcaccccgcttttgactattgtgctcctttataattctgaaaactaatcagcactttttaacaatgtttataatcctataagtctagatgtatccaaaggtgaagtatgtaaaaagcagcaaaatatttatttcaaagacttcacttctgtttcctgaatctaaagaaagacaacatgctgctttttaatcataggatggagaattttaaagaactgtttgggccaggcacagtcgctcatacttgtaatcccagcactttgggaggccgaggcgggtggatcacaaggtcagcagatcgagaccatcctggccaacatggtgaaaccctgtctctactaaaaatacaaaaattagccgggtgtggtggcacatgcctgtaatcccagctactcgggaagctgaggcaggagaattgcttgaaccagggagttggaggttgcagtgagctaagactgcaccactgcactccagcctggtgacagaacgagactctgtcttaaaaacaaacaaacaaaaaaaaaatctgttagataagctatcaaaatgcagctgttgttttgtttttggctcactgttttcgtggttgtaactaatatgtggaaaggcccatttccaggtttgcgtagaagagcccagaaaacagagtctcaagacccccgctctggactgtcataagctagcacccgtggtaagcgggacgagacaagctcccgaagcccgccagcttcctgctccactcagctccgtccagtcaacctgaacccacccagtccagctgtctgtgggaatggtggtgttcttagggacagactgacaccttacttgtcagtgttcctccgggccccatttggcagctcccgtatcttttgttatgttgcttttaaagatatgatgttttattgttttaactcttggtgacagtagatgctctctggagcgcagacgaggcacatgtgtcttcatagcctgggctgggtgggagccagtcaccctgcggatcgagagagggggtagagtcttcttcaaatggcagttttacttcaaatggcagatttcacaagagttggttattttttacaatggtttaggttgttaagtctcctttgtatgtaaggtagttttttcaacatctaaaatttttgttttagccttcaaaaccaacttaccaacctcagtccagctgggaaggcagcgttgattatggtagtttgtcaagaatatatggacctggaaacactttctctctctgtccacctggtagataaattgtcctgttgagaatttttagatctggactggaactgccaggaccaccgcctccagggagtcgctgggcacctggaggtatcgtcgatgcctctcccccatctttagaaaatttggctcttctgaggtcattattattttaagaatgattaggattgataagggtcccatgaccagcattatgaaaatgcgagagtgggaaggacacagtgtgagacttccactagaaaaaagtgaaagttagggttaggacatccttttttaaaaattacaaatttagtccgttttggtttttgtaatcaggctaggcacagtggctcacacatggaatcccagcactttgggaggccgaggtgggaggatcacttgagcccaggagttcgagaccagcctaggcaacatagcaagaccctgtctgtacacaaaatttaaaaattagttcatcggggtggcacacatcagtagtcccagctactctgcaggctgaggtgggaggattgcttgaacccaggaggtcgaggctgcagtgagctgtgatctcaccactgcattccagcctgggtgacagagttagattccaccctctcccaccccggcaaaaaaaaaaaaaaaagatgcaatcaaaggggctgttggccagcaatggcagcagcagcggcgggcagtctgcccaagtgtcttaggaaccaaaagcaaataaaagtgtttccatatatgccaccagccaagtggccatcctaattcagaaagaagctagcctttgagtgtctgtcatggtgcatccgtttcagtattatttcctaaaatgagaagcccctgtgtcaacaagatccaggggctggagcccaatgccaagcctgtgttgtccccagcgaccctgcagctgctcgctctgatgtaccctgtgccattcaaggagatgtggtccaggaaagtgagcctcatggttttcagagaagtcattgttctgtttacattttcataaaacctgtttaaaatagctccccgtctcaggctttcagcagtaacagtgagctgactggcaagttcgatgttagctcccgggacactcagcagcgatggtgagcattttggtttccttaaggcccagcaagacttccagggacatctctggtgaagccagaatggagacacccgtgacctcaggctgaaagtcactcgacattggtctcttgtgttgatagggaaggaaatcaggcattcctatttctttaaataacaaaaccactaattgccactcaatgctggaatattttgggtcacctaatcatagatttctcagggcatcaatactcaaatataggctgattatgccccagttcaaatgggaactattaacagagtgcatttcttgcttgctgggtttcaacagacatcagccaaaagaacaaaagagatgtcaggacagattccaggagtgtcggagcacatgtgtggcacccgctccctctggcagcgaatgtaggaagtcgccaaatttacccactcttcaacaagtcattgtttaaacacggtttttcattttctcaacttttaatagcaaaaagtgccaaagtcctcagagacctaacagccttggtctaccgtgctgaccagggtgaaggcacggcgagggactcctcccagacgtgcctcttgtgtgccagctggctgtggctcgggagcagacgcaggcctctccattgtccaggggagcctggcggcgcatccctcctctcccacctcctggcacttccagctgggtgtcccacatgttggattccgtccccaccacacttccagagaccggagaactgtgcagggcctaaggccgtttggatgaattgtcaaaacaagatgcttccagttacagcggcaggagcgggactgggagcacgggctgacggctgctggtgcctttcttcccacctcgcttgcctgtttccgcttgacccttcctccagctccgatgagaagagtataaagcatcttcctaacgggtgtgtttgctatacgaacataatggacgtgaagtggggcagaaacccagaactcagcattcaaggatgcccaggagagctgtccctgttttaaagagctgtgttttgttttgtttcgcatttagagagcagacaaggcacccttctgctgcgctgatacgtttcttacactgggccattttagacccccagggaaacagccttcctggagcgttgtctggaggttccagggacagggcagcctcccagagccgagcaagagctcaaggtacaaatgagagatttgctataccgtgagaagtcaacaacttagccaccacttccccgcaatggaccatgtaacaaatacctcagcaggccctgcaaaaggccatgctagagctgaggcgcacagcctgtggcctctgtagttagggcaggtgggatggagactccttgagtgcacacacctgagcctgcccacacacaggggagcagcatctcgtatgacgtctggaaggaacttcggttgtgtaaagggagccttgaagatacgtgcaaaaggtgctaccccaatttggtgaaactgacattgggcacgtcttgggcttaggagaagcggccgatggtcccggcctgcagtgacaaacccccctccccgcaccgcccccagcaccccctctcctcttcacctcttcctgctggccacgaggaagccacttcctcagagagaccctaccagatgcggatggaaacagatgcaccaaagcaagccctgatgaaaccgcgacttcctaaggtctgtctcctctgaacttgcacctgggcctctctgtgtttggttccaagcacttcccacctcaaactcccattttcaaaccactgtatctctgcgcacatctgctacttaccagccgcatacatgatggagggttttttggtcctgatccagtggccacacctgtctttgaaatgtctcactgaactccagttttaaaatagattcattgcttcaacacagcaagcccaatgcacccagctaagactggcttgaccgacagcctggcctttggtggggggcttcctggggcctggggaaagctggccaccttcaacagctggtacctcttcaacagtgtggcctttcaaaatgcagatgccaccaggagaacatgcccacagctcaccacctatggatgccatggctctgggcagctttcaaagcaggttcctgtggtctcctcagctgtttgagggggtaacagcaaatcagcctccattttaaaatgaaaacaccagcctccagatgtagggcctgctgggtgttgctagccgctggtccccaggcacggtgcactttctccacctcctgcagcctccctgttgtttctagactcttgcacctggtgagtgcaaggataggtgacccaggggcctgcagccttgtcctcagctcccatctcctggactgccagcctcaccctctgcagttagcatggttggcctgatgcagggatcccgagggattactttttagaccttctttcacattcagaaaagtagtatagattcaggagaggcaagaaaattatgctgtccatagaagtcacccatgaagactgatgccaccacctgaaggctcatgattgttaaaaatgtccacgggaacctctcgtccacaggaggtttgtctcaacacttcccatttttacggcattggcattgccaagcatggggaagtatctgctcttctcatgttaaaagtggcccagcttttcttaactcagtccaagctgacttgtttagctgcactggaatttcttaccaaccaaatatttgcatcgagcaaagggggctgtgtgcacctccctaatggcagcgatgatggctgctgtcattcaagcccatcttcagacgtcacagtctggaagtgaaatgtccacaaacatctgtggcagaaaaggctatacggaccacccagttgtgctgcagctttacagagcaaggaagggttgtggcaaataaatgattaacctgcctcgactgtgctgagggcaacaaaggccatctcaccaaaggattattcgatgccattaaatcatcccgtgaccttcctgcttccgagtccatggcctttgcccagggcatgtactcccctgagaggccttctgcctagaaagatctatgactgggttccaaagttgaggcctaggtttttgctgggatttagatattttcaggcaccattttgacagcattcaggaaaacggttattgaccccatagactagggtaagaataaaggcaataaatttggtctgactcagaatataggagatccatatatttctctggaaaccacagtgtacactaaaatgtgaaattgaaggttttgttaaaaagaaaaagataatgagcttcatgctttgtttaattacataatgatttccattacgctatttctgtgaaatgcagcaggttcttaaacgttatttcagtggcatgggctggaagcttatcacaaaaagccatgtgtgtggccttatcagaacagaaagagacaggctggtgcccaaggctgctgcctgctccaccttttgccagctctggacatctgaggacgtcccggcagatctggaatggggccctcaactgaccatttgcttctcagaatttcagtttgagacatgagaggtataatcagttacttttctccccccagagaaacccttttgtgaggggagaggagctatggtatgtggttcagctgaaacacatacaactgcatccttttggagtcctttgccaacaaaaacagaccaacagaccagatggtgtccatgttcaatatcatgtcttgatggacgcagctgatgacctcaaatacttgagtggtctcatggctgttagatggattatttgaaaaaaaaaaaaaaaaaagagagaaaaaataattgatttttacatcagagatagcaaactaagacctggggaggggggtcagcttttattttattttattttttttaagtttgctagttgggtcaaatgtgaggaggagggagtctacctgccacctcttctcttgcccctcttctgcccacacatccagcatccaaaatccattcatttaatgaattgataaagtgccgtgcaaactggtgcacaaacaggcccccagtccacgcagcctggctcctaggaaaagtggtgaccgggcgtgggggggcatgccgcagccctgggacacagtcgggcaccttccccggacccccaggccttggctgtgcctcaagtcagagagggtcagccttcaggccccggagacgagtgactggccgatcatttcacaataaaatcactcacttttggcaacttcactttttttaaggcacagtcagttccttttctcatgtacctcacaaaagatgaagaccatgtagtactctttttggtaaagttacagtgttcatgttaaatatcacttttttctacattgtgtggtaaaaagaactacgttaatagctatatcttaaatactgtgatttgactttttgaaaaatatcctaatacaaatattttactaacttacaatcactcatttaataagaaacatttggattcttttgaaatcagtgttaattgactcatattcttaaaagcctggctcttgaccctattggaaacacaaaggaagctgaaatcaaacatctaaaatacactgcgtacacgtgtgcgtgcacacacacacacacacacacacacacacagctcttcatttctcctgagccatgcagaatttactttcaatgtggaaatctgttccctttaccacactgtatatgcacagagcacaagagaggctatctctagtcacttccaccagcgaggccttagactccgtattagaggccaccgatttcatacaacagtgtttcgctaaagacccttcactattcttgtttagtaaatagctgtctgctcttcagggaactgttacctatgggttattaccaaagaacgctggcaattggaaatgtcctgatggaaattctttgcacgtgccggttctctggcatcctccaggtggcccaacccaaagcagaaagcagaaaccacagaccccgtgagtctccccataccttgtttccaataacttggcaaaacttcttggtgcatattggttacaccctctgggattcataatgccattaggctaaaaccctaagagagagggttgacagaaacacacgcgagaatgaggcagatcccagagcaaggactgggcccagactctccacatgtgctctactagtgagtgccttatactctcagtattttggggcttacagcttcttatttgtgctaaaaaggtgcagttccaaagtaggaactgccacacaggccccagcatcctctctccaacttcatacctctctcctggtggggggagcgggcatccaggacctccggaatcaaggatgtgcagagaagagcgaaagtaatttttctagtcacatgaactgattggttccaggcaattagaaaatggctataaaataaccttaattttaaaaaaaaatcttgggtcttcgttttcctattaggagactgaactgaccacatgtattgatttatatcctgaatatatgggaacttctgtgtttgggatgtcctactgtaagactgatgaatgtacagagttaatttcagggtacagttttgccttaatggttttaaaaaataaactattttttaaaatttt

SEQ ID NO: 11092 - DNA, 1122 bp, Homo sapiens
gccagcctggccgcctccaccctgcagaacctcagtggtggcgtcactgcgtccagtcagctgctccaccgggttagggtcaggagacggccagagcctgtttgttagggctgttagagggtgatcttcagttttacaggaagtgggtcacgggttaattttaaatgtgattccgaatctcctttcagtcctcgagaagggccaatgagcatttttcagcagtcacagccagtgtgagtgctgctctttccacctgccttgcaaattctgtttcccaggggaatgtgtctactgcctggtggttcaaaggttggaaggcagggcagaggtgggggctgattctgctgggacaggtcttccagaggcagcctccccccactgcctgtccccgtccccaccaggctgcccttgggatggaccttttcattcttttctttatattctagacagtctctgttgtctcattgtgttgctgtcccatttttcaggtgagggtaccggggtaggggagtggcctgcccagggtcacactatgagaggcccccacctgctgcctttggacgcagccccctgctgctgcatccaccacccttcttacagatcagcgcgcacatggggtccttctgctgtctctggggcgagtcttggagccccctggggggctctgttggtgctgatttggacccgtttctctttttaaactgcacatcataacagggcttcatgtcgagcatgattttaatcataaatgcacttctgaggtgcaaggattgagctcagagctgctctgttgtggcaaaacccaaagtgctgtgatgtgtggctgtgacaagcctggagcgggtcctgtgagcgccgcctctgtctcctgcttccccactgaacgcctgctgaatgtgccgctgactcagctgtgctgctttcagccctcctgtgaggggcggtcccagtgcacagatgtttttcaagttcctcagtttgtactgaaattagggattcatcagggcaggaagcaggcaggcctctcagaagggagaggaggcctccaaatctattgagtccccacagtttgctcaagcccaggcaaatttctgtgattaaaatgaattcatcagttcctcc

SEQ ID NO: 11093 - DNA, 615 bp, Homo sapiens
gccctgtgacctccctcctgtcttgcagctcctcctggcaccagtccccagggctctcctgttggtagttcctgcttttcttcttggaaattcctcgtggacctcgagatctttaccctaaaatagttctgttgaatttcaccctggcaatgtaaattgatagcttatcttcacagatgccagacaatggacaactcaccatcagtcctctgctcacctgagacaaatgcatgtctgattgcttcctctgccctattgtttatgtgaaaatgcagattcactgagccagactaaggcatcagtgactgttcctctacctgcctctcacatggagattgtgtattcagtgaaaggctgatcaaagacccaaaggaatgcaacagtttatctcttatctacctatgacctgcgagctgcccaccacccccagttgttgcgcctttccagacagaaccagtgtacatcttacacgtattaattgatgtcctgtgtctccctaatatgtatcaaagcaagctgtgcctcgaccaccttgggcacatatcctcaggacatcatcctgaggctgtgtcactggcatgtccttaaccttggcaaaataaactttctaaattg

SEQ ID NO: 11094 - DNA, 333 bp, Homo sapiens
cagagatggatctgctagaaggaacctggagagcaggacccatggctgggcggctggtgagcagtccaggtgcccaagggccagcttgctgctgcccaaagcagaggaagccgggctggctgagggtccgaaaagcctgcaggggcccggcgagccccaggaagagcctcagctccaggctggggctctggctgctggagcatctgctggctggtggggtggcccgagttccccttcaccgcccccagggagggtttcccacctcagagtacaccgaggggacctgcagagggggctgtcgggacagcgtggaataaacattatttcaaggac

SEQ ID NO: 11095 - DNA, 2539 bp, Homo sapiens
tattgacttgcccaggacgttgctggaattttctttttctttttctttttctttttttttttttacgatttggtagtggaaacaattggacatcctcatgagcttttgcaataattctcctggacctgtggttctattgtgttgacctctgcgttttatcgaccaagaaggggccagggctcacagggacgggggtgcccctctcccacagggcacgtcaggtgcctctgagggccacccgcagactgggggagggggcagaggccctcgggggcccgtggagaagacacacaggacccctggccctgcccttctccgttccagcctggacagagaaacctctccagccaccccaagaggttctcgcaaccttgtgtcccgctctccagaggccagaagctcgtccaccaccaaagccatagctgaagagtgcggggcccttcctcctggggacagaaagatgtcgtcaaggagggacatgggggcctttcaccaaccaccgagaaacgggcctggcggccctccttcctcttacatgagaccctcctgtggcatttgcccttggtgccgggctggggccgggcgcagtgaccctgcctgcgctccacactcgctccacgggaacagagagggtgagaagggcccacccctcgcctgccctcagtgtctttggtggcaccttccttgctggcctccagggcgctcagcaccgcgtctgtaagggcctgcctgctgctctcggcctgacacgccggccaggaggtctgtagctggggaccagtaagggcacaggatggtgcaggtaaaagcacatctttctcacactttgctctttggaaggcccaggagaacatccgcgaaggctgttggaggtgctccgagcactgtggcatgtctggcacatggcccccaggctgcggttgcctgggttggttgggggaggaagtggggaggagtgttccgggaccatggtggcccaggctgcagccgcctttgggccatccgagaggctctggcagcccctgtgctttagggagcaaccgtgagccgagcccagaggcctgggcctgcactgcctgcagccgacatgcgacagcgttccctcccccgcgtgcctagccggtgccggtccgggcacagacccccccagcccccgccctgccccagggaagcctgggcttcccgggaacaaggtggcatttgtggagggagcgcccgcaggcctggtctgctggggccgcctgcgctgggctgaagggagggaaaggcggcttgggcctcctggaaggaggtggccaccccgcgggcctgcgtgtctgctggggcggatcccgcagctccctcagcttgtcctgagtcccttgggtgtcgttgagattgttgttttttgaagaaacagaagattctattttttacagcgagcaagctggttttcttatttttgtatcctttttcagatgtaatttttatctttgctccgatcctcatttgctggtgtgggtgagggatccggcggcatgggctggtttcacccccttcacgaggggccgcagagtcacacgctggtgccgggggtgctttggggggagctgcgccgatcaccagattaagcacatgtcctatcccaggcggtggagcggagcccccgtggctctggactgcgcggacgttggcgtcaggatgaccacacggcggcctttcccgaatggggacagaacccgctctgagccgtgggtctggctcctgtaggggactggctctcttggtgcaccaggggagggggacatatcccagtgaaccccaccttggcgcctgaggcaacacagggtgggcactgacccacccccaggggcggctgcagaggcagtgcccgcagacaatggccacacctctctccccagggcccggcagtgcccaaggatgggtccggggcctcggggccaatgagcgcctcttcctaggtgctgggattcagtccccaaacacagcgggaggggtccctggggcagatggggctttaccagcgtcgggtggtttagttcgagtcccttttgtggagaaagggagatgaaaactgaccacgtgccaggtgtggccgaagcccccagggagggccacattcggggagcggggggtcgggggagggccaccgactggctctgctgccagcacaggcccctccctggaagtcctcgggagcggagcgcggatcggcacgggctctgggctccccgtggagagaagctgtagtttttaccaaattgtgtacatctgggcagatgtttaatttctgtgactaatcactgaactagacgaatgttaaattttttatgtctgaagcctgagtctattttggatctgtaaataatcattgccagtgtgacttttgttcaacaaaaggattgtactgtattaagaaccgatgaaaaaaattctcctgtaacatttttttaagaaaactttgtttgtttaaagaaaaagtattgtataaattataatttttatttaaataaacctaaaatgctttgtgctaaggctc

SEQ ID NO: 11096 - DNA, 453 bp, Homo sapiens
gcccaggcccacccgcagctggcctcactgtcccgggtggcgcgccccacctgcctggctggtggtaggcccctgtgagctggtcccgggctgctaaaaggccttgtgaggtggccccaccctccaggggagctggtgaagatgggccacagacctggtctagggctgacaaagacagggacagcctttgttttctgagataccaaagagagccaggggagggccccgggttcggcggccagaggcaggtcaggggtcccctctccctctccctgcaatgtccttgccaaatgactgcctcgtgctgcccctagtccggggcagcctaggaggccgaccctctttggagtcctgctgtctgggtgccagggccggaacgaggtagtggccatctcatacctactctgaaatgcaaaacttctattctgttgagtgaaagaataaaatgtagac

SEQ ID NO: 11097 - DNA, 2085 bp, Homo sapiens
caaacacagcccctgaggggccccgggagtggccttggctccctggagagcccacgtctcagccacagttctccactcgcctcggacttcacccgttctctgccgcccgcccactccgtttccctgtggtccgtgaaggacggcctcaggccttggcatcctgagcttcggtctgtccagccgacccgaggaggccggactcagacacataggcggggggcggcacctggcatcagcaatacgcagtctgtgggagcccggccgcgcccagcccccgccgaccgtggcgttggccctgctgtcctcagaggaggaggaggaggaggcagctccggcagccacagaaggctgcagcccagcccgcctgagacacgacgcctgccccaggggactgtcaggcacagaagcggcctcctcccgtgccccagactgtccgaattgcttttattttcttatactttcagtatactccatagaccaaagagcaaaatctatctgaacctggacgcaccctcactgtcagggtccctggggtcgcttgtgcgggcgggagggcaatggtggcagagacatgctggtggccccggcggagcggagagggcggccgtggtggaggcctccaccccaggagcaccccgcgcaccctcggaggacgggcttcggctgcgcggaggccgtggcacacctgcgggaggcagcgacggcccccacgcagacgccgggaacgcaggccgctttattcctctgtacttagatcaacttgaccgtactaaaatccctttctgttttaaccagttaaacatgcctcttctacagctccatttttgatagttggataatccagtatctgccaagagcatgttgggtctcccgtgactgctgcctcatcgataccccatttagctccagaaagcaaagaaaactcgagtaacacttgtttgaaagagatcattaaatgtattttgcaaagcctaaagttatatatttaacagtttttatatgttgtatatttgtagaaaatcctatttaacaattaacgtggcagtcccggccgtcctgagagtcgggccgagccccgtgtgtttctgaagactctgggggtgggacacggcggggaggtggtgccccgcggaccccggggtgccaggcacggaaggcgggactctgggagaagcgtgcggaggaccgtggcgtcggcgtcccggatgtgtcggtcgtgcccggggaggccgggttcccctcgctgcgggccaggcttggctcctgattccctctctggtccctgtattggtcaacacttgagcgtacaatatcttgaacatgcttcttccaatgggttttgtttcccatttcctgcccctttcgccactcacggaccttgaggccagttgacggcccttctccccacgcctgtgtccccgcgttctgagaagtcctctgtcttcgtgtcactaggtccagaaagtcgcgccgggcagaggcgcaggcggggccggcagggccgaggaataagcgacaattctggtttttctcccctggccgtcgttcgccagcctccttcattttcctgagttcccgctgaagtatatactacctatgagtccaattaacatgagtattatgctagttctatcctactaaaaaaaacgtaaaaaaataactatatagaagctgttccagcaaccatagactgaagatacgaaagaaaatccatttatttaagacctgttccggtatccatgaggacataatttacctttcagtcaccacaaatttataggcatttgtatcctggactaaaagaaggggctgaggttgggtttgtcatcacagagggggtgggcctggaaagggtccttcccaagctgccccggctccggcggcccgggccggcagcctctgccagccagcgtcctcacggcctccccctcgcctgtttcttttgaaagcaagtgtagacaccttcgagggcagagatcgggagatttaagatgttacagcatatttttttttcttgttttacagtattcaattttgtgttgattcagctaaattatgaaaaataaagaaaaactcctttgataa

SEQ ID NO: 11098 - DNA, 2900 bp, Homo sapiens
aactcacgacggcaccactaggccagaggcgtggctgccccagcgttagcagcctgtaccaggtctatgacccgctctgcccacggctgtgtacgacatcagaccaggcactctcagggccgctctccagctcaccacagtgtctccacgtgccttaccccttctccttcaggccaagtttcgcggggtgttttattaagacgtccactagaaatagcttgtcctgtcaactatgaaatatggtgactagattttaattcataaccgtaaagttttttaaagttttgggttagtaatttgttttactagaatgacaaagaagatgtaaaccattttattctgtaggctttttactcaattatgtacaaaccacaaatcaggtactgtattttagtgaagcattgctttaattgcaacagaatagcttttgtggctatcaaatgaaatctgtaaataggaggtggagggcaagccatcctgactgagcagtttttaaccgcaggttctaaagtgtcccgcggagtacagataatattctggaaggtaactgtttactacgacagagacgtggcatttggaaacgaaacttagatgtttcatggagcttattttgagaactttcccatttcaggtttctgcattcaggctttacatggtcagttaactcagagataccccagctgtttatcatcagctcctctgaaatgtgatccctttgtaactgtgctcatcacttcgccagtgcgttcaatgacacgctgatggcaggtggtccctgctgaaacccccacgcctccgcttcagcatctccacgctctgaagctgtctttcaaaatgtgtgcactgacccccttgtttgatcaaatttgtgtaaaatttttttagaagagatggcttattaacagggaagaagcttgttatattccagttgtaagaatagccttagtgtttagatttttttatgatagggaagatgcggccatcactgggatattttcaaatcccaaggacatcagagtgaagtgtcagttgtcagatgattttaaaagttatgtcttcagagaaaaaaagattcattttctcattttaaaccaattaaatattctgagtgagactaatcactcatttgcctacgaccttttagaaaagttgttttgttgaaatactgtacgtacgcttaatctaaatttgcattgactatgttttagtgtatttataaatggtgaactcagtttctgaaattaaacttcttatttgcaattttctagtgctggcagacactggctttttatttttaggataagaaaacaggcatattctttgtggtccattatctagagcccatacttgggcagcatttgaaatttcaccttaaccccagacagggctccagggaagtggagatgtaattcttacaacaacagttctgatcatggccatggtgatgactttccaggtctcgtgttcaagtggtgccagaatgcaggagccggtgggcagccctgaggggttgccttggccgcagcctctgtgcacgctcttcctggtgtcctcttacccggtagctgtgcgcttgttcccgtgagaacagcctgcttccagagtgcccaggagtgctggtcagggacagtgcccgtgaggctgcagaggaggtggggtccatggcccacccatctctccctcgccagcagccctggccagtgtcatcctggtgtagaaagggttgcgcacaggataggagggagccacagttcttgcttagctgtgctcacgaccagcttgcagtcctgtgtttcttaagattgtatttggaatggtaatatccttagaattttgggatattgagcttcatggattttctctccaaaacaagccagcacaactaactgtagcagaattgtatccactcattcattcaactgagatgaagtgccctcccttttccagggcctgggctagttcctggaatgcaacagagatttccgtggacacagtctctagtctcacagagcatatagtctagtccacgattggcaagctgcaaccacagacccagtccggcactctgcccatttttctaagtgaaattttcttggaatacagtcacagctgtttttttaacatggtgtcttggctactttcaggctgcgacgggagaactgaatagttgtgacagagaccacaggcccactgaaagggacaaacagggctgaaaatactcactgtttggccctttccagaatagcaagtttgctggcccttgagctagcctgcctttatggggttttttttgtttgtttttttaagctttcagcttcatgctgctgtatttttagttgaagtgttctgagtaacagtcagtgtataaaaggggattgcagaaaaaaatgagggcttgctttactcaacagaaaatatggcccttcctgaatgacactaggagagtcattttatctcatacattcccttcatttcgttggtggacatttgttgaaaccggcactcaatggtcaaaccgtctctgccctccagttgctgacagtcctgcaggaagatggacaagaggcccagtgctgacagtcacacgactctcactacttgaatgaggggactgtgggtgcaactagaaaatatgttgattcttagccattcccaccttgcctctccgttcagaaccccagctgcgagctgtttgtttccctgcctggaaatgatgttttaggcaggttccttaatttctcaggtctgtctcagataataaaaagctctttgtatgagcctcagaactgtctcttcagtgaatgaaattaccagtcattatacgaagggactttaaaaaatttgtggaaatactgaagtaaaagatgataaaaaaataaaaactttatttcttggctggg

SEQ ID NO: 11099 - DNA, 219 bp, Homo sapiens
tgtgccggacttaccctttaaattattcagaaggatgtcccgtggaaaatgtggccctgaggatgccgtctcctgcagtggacagcggcggggagaggctgcctgctctctaacggttgattctcatttgtcccttaaacagctgcatttcttggttgttcttaaacagacttgtatattttgatacagttctttgtaataaaattgaccattgtaggt

SEQ ID NO: 11100 - DNA, 237 bp, Homo sapiens
tctgcagtggctgacagcagggaggccatgtgctcagcctggccacgttgccgttacagtctgctccgtggctcctgtggcctgcccttgtctcgcagccaggcagggtcgtgtgtgggtgtggggctgccaggttggacgcagctgctgctgccctgactttggcatatgccagcctgttcctgccacagggcagtcactgccgcctaccctgaaataaaccctcgagtgaccccc

SEQ ID NO: 11101 - DNA, 1030 bp, Homo sapiens
gtactgtggagttttgagggatggcaccgtccaggccgccgagagcccctctgcctgtgtcgtgtggcctggccagcctcccggtggacaccagccctgcgtggacgtggcctgtgcttcgcccgcactgcgcgcatccccaacctctgtccgcatgcctggggccttcgcccccacgtgctcgacaggggaacccgcccggacggcatcgccaggcactggctggggtggggaaaggtggcccagtggagccggtggccaggaaggctgaagcccgcttcccatgctcctgcatcaggtgcccagccgtgggtgggggccctgaggtgaagagtttatttttttagtccgtttcgtcctggccccgggctgtggcgagacagcccaactcccccagcccagctcccccagcccagagccagggaagaggaaggtggggccagtcccaccagtggggtggccacgcccatggggtcacatgctcaggggtcaccccctgcagggacctgatgccctcgggtgggagggaccgaggtccaccctcgggtcaaaggtcaacgtgcactttctccttgtcgcctgacagacattttattttactaagactgctgtaccgaacaagcatatttatcatcaggagacaggatgggtttaaagcaggatggtgtgtgtgtgaacgggcatgagcagaggtgagcgtgagcgagcgggtgtgtatgtacgagtgtgcacgtgtgtgcgtgtgcacagagggtgtggtgccagcttgagtgggagtgtgtgagtgtgagcaggcgggcgagtgcgtgagtgcacgccagcgcgtggcccatgtatgaggagtgaaggggcccaacgcaataaccacgtcccccacccgggccccccgccgcggctgaggccacatggcttcctgtgggagccccggccggcacccggctggtcccaccccaaatacctcagccatggagaccatgtcatgcagaattaacaaggtagcaccgagcatatcaataaatattattctgat

SEQ ID NO: 11102 - DNA, 1079 bp, Homo sapiens
gagactgctccccgcccgctcgggcccctgaggagccagtgcccccgcggcacttctgggtgccaggtgcatcctagcccgcccgaggcccctgccaccccccatgggggtctgggcccggcctcgcctgccctcctgggccagtcacccctcccccagcccacccaaataaaggattatttaactgtctgagctcaggcctcccggcagcccctcccctcccacactgcaggggccgttccccagcttctggacaagacacccagctccgagggggcaggggcttataggaggggccgaggcgtgcgctgccctctcagccctggtggcaggcgggggacaatggccactgtccctacctcactgtgccttcctgtgctccggccacaggagcgtcggcccaggggcggctcctgggggctccagggcaggcgagactgggaaaggcccagccctggagctccagccgaccccaccgtgcccctggcatcctggccctggccgccacctccctggcaccgtctgcctgcagggattctgtgtttttggcttttttaatgtcttaaaatcttttactcaggtaattttaatttcagagagaaaaactgaagtaaatgtcaaaaaacaccagccttaaatccaaagggagagaattcgtgttcttgggtctgtcccgagtgggctcgcgtgcagccaaacatcagctctgggtccaggcgtggcctcagctgggagcctgtgtcctgagcccccggagcgaaggggtgcctggggcatcttggccctctctgggcagacaatgtgtgcacctatgtggaaggccaaggacatgggctgtggccaggcctgtcccgctcaggccccctgcccggcggccgtctgtgtgcggggcctccctcctggctgtccaggacacagcccgtgcagccccagcctggacccaggccatctctggttgtgtctgtgccgactcggtgttgaatcaaatcaggtgtgcgtcaggagccggctgtgtccttcctgccacactcggggattcattccttagaaactgaaataaattctaattttggaaactc

SEQ ID NO: 11103 - DNA, 246 bp, Homo sapiens
cggcctcggcacgctccacacccctggagtctcccgaggcccccatgtgctgctgagtggccaagatgatgccaggctgccctatacactgggggattctgccctggcccatgcacacccgtctttccatgatggcagagacatccagtcaggacctgacccgtctctgtctgaggccggctcagcagtgcagcctggtccctgggggctggacccaggctcctaaataaaccagcaactccctcg

SEQ ID NO: 11104 - DNA, 838 bp, Homo sapiens
tgctgctgccgcccggccacggcccaccctggtcaggctgcctccttaatcgagaaaactacctggtgatgcaatcttttttttttttaatttaatttaattttaaaataaatgctgcattggtaaagctggcagttgaaaccagttggacggcccagcttgcgtctcttctgcctgagtgggcctctcaggtcactcgtgccctgctggaggacagaggggcacctcagccgcccccaagcccagagcacagcaataaggtcggcctgcaggagccggggtgggggtgggggtggggggggcaggaccctgagatgccaccaggacctgatgggccaggaagggcgtggacatggaggctgtttttacagttttttttttgttgttgttttgtttttaaagaatacagaaggagccaagcttttttgcactttgtatccagctgcaagctcagggcagagtcaagggcctgggttggaaaaacctgactcacaggaatgcataattgacccttgcagctacccaatagcccttggagctggcactgaaccaggctgcaagatttgactgccttaaaaacacaaggccctctaggcctggcagggatgtccctgtgcccagcacagggtgcctggcagggggagaccacaggtatgcaggtggggggacatggtgtggcactaggggctcgaagactggtttctagcactaccggtcacggccatgtcgtcctagaagggtccagaagattattttacgttgagtccatttttaatgttctgatcacctgacagggcaccccaaacccccaactcccaataaaagccgtgacgttcgg

SEQ ID NO: 11105 - DNA, 3532 bp, Homo sapiens
ggtggggccgggccacacccctgcccatcccagccagggtgctgtgcccccgtccagagctgcagctgagccccatctgaagcccagtccctcggagctgcagacagcaggtcctgcagcaacaatacctgcacggctttgcacacgtaaacctaggctggtctacacgcagtgctggtacgtcaaggagcctaaacaccctgaaattgtgaccccctgggggacagctgccagacacagctggcggcagcaccagatgctaagcgcttcagagaggaggtgtctgcccagagatgtggagcagaagctgggccctgaacacacggggccatgtctggacgagcaggggagagaggctgaactggccagaagtggcccctccgctgctggtccagtcagactgaagcccggccttgtgcctgggctgttcctgctctcatgcacaaccagcccttccacgtgcctgcctgtgggacaggagggggagcgtgggatgctgtagcccccggggttgggcaagggaaggatggtggccctccagaggtcatgaagggacctctgtggctccagctgccaaccctggagcccagaccgaggtggccatggagactccacctggatcccctgtaggaggccagggaggggaactcagcagttcaggagccaccccaaaccattctgggacagggacacccctttctaccccagggcagggcagggctgggtggggcaagatcccccagcccgactagacccacctcacctgaagggggtgagacccttgttggcagccagacaagggtggggctccacaggcagcacaggcgccccaccaccacccagtttggggacccagtgggaccaggtgcgggggcagagggtgacttaccaagagccagggagggcagcccaggcccaagtgacagcaagaacaagaaccactgccggcgtgcacagacttggtgtgtgtccttccctggggggacgggggactcacatgtgcctgccactggagcctctcaaccgtccagcagaacacggggttcagaaagggctccttctgctatttagcgaacactgagcatttaatttacaaatgtttgctagggtcaccctctcggccatcccacgagggtcgccatgatcaccccaactctagaggccgcagcagagctcaggacattcccccacagagcttgcccctcagttcctacctccaagggggagggtcctggaagcgcccacccaggcgccgcccctgtgcttgctccccgagctcagggattgccgagtccacgtaactgacctgtactccacgaggccctgtgggaacggtccaggctggtcctgccctgtggaggcctccgtgcactgagagatgtactaggattgcagcaaaggtggtcagggtgatgggccgcacagcgaggcagtcaaggccagctccctgggagaagcactgggtcaggtgaggtctgaggacagcaggccttccctaggggaaggagctgggagtgccaaggccccaggtgcacaggaggcgtggctgctgagaggctgcagggtggaggggcctcggcctcagagtcatgtgccctgtgaccactgaagggtgtcagcagagcacacggcatgaggacagagggaggggcacggggagtgaaggagggggccctggggcaaggctcgggggtcaggagctcagcgtccgctactcagcccagccaaaaccctcccagacgtctcctctcctgcctgggcaaagtccagcttggcaccccgtctggggcctgcctgtggtcagggccaagtgttccctcctccaggaaagcctttaccctcctcatgccctgtagtcaggaggccgcctgctgtaaccctccgtgtcgcctcgggtgcgaaatcagacccacctgacaccatcacgcggaggcccagcagcacctgcacccacttccagctgctctggccaaaatctccgctcggccaggccccgtggctcacacctgtaatcctagcacattgggaggccaaggcaggcacatcacctgagttcaggagttcaagaccagcctggccaacatggtgaaatcccgtctctactaaaaacagaaaattatccgggcgtggtggcacatgactgtaatcccagctactcaggaggctgaggcaggaggatcacttgaacctgggaggcggaggttgcagtgagctgagattgcgccattgcactccagcctgggcaacaagagcaaaattctgcctcaaaaaaaaaaatagtaataatacaaaaattagctgggcgtggtggcacatgccagtaattccatctactcgggaggctgaggcaggagaatcgtctaagcccgggaggtggaggttgcagtgagcccagatggcgctgctgcactcaagcttggatgacagagcaagactccgtttcaaaaaaaaaaaacctcctctcttccttcacaccttcctctgaatcccacccggtcccacctcctgaacctatccagacaccttctcctgacccaggcaccacctgctttcggggcgatggccgtagcctcctcccaggcacctgtctgcatccctctggccagtgcatgctgagcacgtgacctacccgtgttgggacacgtgaggatacagccttgacccccaggggctgacattctagggggagatagaaggagacaaacgtagaaggtagaataagtgggtggtggagtggcagggagtgctgagtgccacaggaagtcagacaaggaaggagagtgtggggcaggtgccgtttaaatggggggcgctggggtctcctcacagttgcttctcagctcagctgtgccaggatcttgttgagtcaggtcagctgcccacagccctcttgcctgacccctgaagcccagaactctgatcttcacagccctaggtatggccccagcaccccactgccctctctcctgccccagccgactgctgttcccagacttccctggccacgctccaagacgccagctctgccgcgggcactttgttctcacggtgtcctccatgcctgcagggcccatgcatgggaagttgcgttggcggcctgggtgttggcggttccgtgcctgctccaactctccgtgaggcccctctcccagagcctgacacactctgtggccgaactctaggcaggtgcccctgagtcctttcctcgacgaggcctgaccccatccccatcctcgctgggcccgccgaccccggtgttagcaagaatcctctaaatcagtttatggagaattacccaccctcgatatctgatcccattcctcatctcccacccttgatctcatcaccctgccggcctcctgcaagatcctcattgagccactccagtgagaatccccctaccctcgaaggccgccctaacaacttcccatccgctgacccctccaacgccatcaatctccagctgtggttgttgaactcggaggtgagctcctctcaccactctcttgaataaagcttttctcaccatttt

SEQ ID NO: 11106 - DNA, 465 bp, Homo sapiens
ccctcctgccacccaagctgctgctggacctaggcctggccctccgcctgcctggagaggcctggccctgggcaaacagccgccatcagggttcacctcggtgggggaccccactcacccccttagggtcgccacccctcacggcaacttgtgcctggcgtcaataaagacctggaaggatgttgtgcttctgaagccccactgggtgttactgcagcagggcgtggcccaggccgagggatggtgccagcagggtggaggccaagtcccaggctttcaggtgtgtgtgtcccaccacactggccgtggtaaacatctgcccatcctcccagctcctgtgtcagagcctgggggacgagtcacccagctcacccccacatgctcaaaacagtcaccaagtcctctgggctccgtccccttaaaaaataccccaatagctaaaataatacattcatagaaaacaac

SEQ ID NO: 11107 - DNA, 403 bp, Homo sapiens
actggcaaccctggctctggggccgagtcaccttgcacaaggaggacagtggtatggccttggccccagaccactggtctggggcagaagcccacctgtcttgcagcccgtcctgcaaccagcccttttgaagagcagcttctgtgttcctcccctctctgagcagaactgatgctcctcagagtagtgggctggcgtccaaggatttgagccctgtcgagctcacggcaacctgggatggccgccggttgccaaggcgcctctctgcagtcgggctggtaggagggagtgtctggaggccattgctgcctccctcaacccccggggtcaactgtacccagcctagagccaagaaatccttcctttttattcattaaaacaaaatcaacctgatgcatacaga

SEQ ID NO: 11108 - DNA, 109 bp, Homo sapiens
gtggggagcaccgaggcaggggtgggggaatgtgtactgaggagccgtgtgtctgctcctggctggcccggcctaataaagcagtgttgccatctcatcttccccctaa

SEQ ID NO: 11109 - DNA, 161 bp, Homo sapiens
gtggcaggcagagaaccaaagctgcttcgctgctctccagggagaccctcctgggatgggcctgagaggccggggctcagggaaggggctgggatcggaacttcctgctcttgtttctggacaactttccccttctgctttaaaggttgtcgattattttg

SEQ ID NO: 11110 - DNA, 771 bp, Homo sapiens
cctgcccaccgctctgtctcctggccgtctgctccaggcgcagctggggctgaggatgtctcaagaggccaccatggctttggcaaggactggattggggggacatgggaccttacgcttgtgggggtctgcgggctgggaactctcgtcctcggtccccagggcgcagctgttggggctgcgggggagtggagcccccgtgcccctgcttttcctcagatccgttctttctctgtgttgtcctcctccttcccttcccagtctcccttttctctctcctggtgtctctgcccctctctgtgcctgcaaaccttatcctctattcttcactttggggtcagaacttcgggggtgtggaggaggtgcggctctagggacaggtaatgtcggcttccaagtgatgccctcctgccactcccctgcgatttataagggaattttaatttttatagtgaatctcaagggatcatcccatccttgaccacagggacaagaggggccccctcgccccagccccaccccacatggagctcagggggaagcagggaggggttcccaaaagagccctgcggaggctaggagtggttcttgatgctcacctgaagcccctagacgctgctaggagggggggccctcctgggcccccaatacccctccgcttgccgctgctagcgcacccctgcagtccagcgtgcatccaccccacgcacgccccgtgctgtgttcctgggccctgcccatggcctcaataaactctctgcttggtgtgac

SEQ ID NO: 11111 - DNA, 92 bp, Homo sapiens
tctgacctggttctcaacagacccagtgagcccttcactcctgagaaaaaggaaagatgaaataaataaataaacatatatatatagatata

SEQ ID NO: 11112 - DNA, 118 bp, Homo sapiens
tgataccctcaataaaacagggattgccaagaagggaacaatcaccccaaaaatgaatgtttgcctttattccgtgtttggtacttgattcactttctttaaataaaaacatgaagga

SEQ ID NO: 11113 - DNA, 196 bp, Homo sapiens
aatatacatatatactttcacagaacaatgagtaaagatgctgaatgtgacttgttaagaggctcttaaatttaaaaaatatacacagcaaaatcttggaagtggtttctaataaaattcatttatgttctcctgtgaacgtgccttagtaatttttgttttcttaactataattatacaattcattaaataaaac

SEQ ID NO: 11114 - DNA, 794 bp, Homo sapiens
ctcgggccaccaaaaccagagtggggccaggacagtgcctcagagctgctccgccacactctaaagctctgtaatatcagggaccgcatcccttacatagagagcagaggcctgatcaatatacatcctttgcctgcttggggcccacctgtgcctttggctggccatggtccccaccttcacccccttgctaggagcagttgccagcaagcatcctcagtctcttcctgcccctcagacccgggctcccaacagatttccactctcacacttactcatggtcctcagcctcttccttctagcctctgggctgtttccctcaatcctggaacatgaggagctaccttgctgacccggggacccaaggcccacaggccacagtggacatggaccttttcagccctggcattttttggtcaggggagaggcaaggccatcaaacgttggaatagttgagaaggaaggttaaaggtggtcttgagaagcaaaggaattagatccttagaccagcagggcagctgatacctgcaagggctcccactttcagactgaggccagagtatggcagctgctcccgggtgggagaggcagagagggaagggcaaaaggaagggaaaacatgaagacgaacagccgaaagccacaagaagcagggctggagctccagagactggggtgacaaggaccagggtcagggccccagaaatccggagctgcaggctggctctgctgctctttgctgatgccccttggggggcccttgcctgcctaagaaggcttgatctgagctgggc

SEQ ID NO: 11115 - DNA, 3091 bp, Homo sapiens
gggtgaagggcacgggtccttgtttttgggttgagagtccccaacccccttgtcttctaccttctgtcacctagatttgatcagggtctatttggaagaggtaacccttttcagggctaagggccagggtgttcttctgcaccctggggtgaggacggcttggagggagaccagcagttaacggtgagggaggtaggtgcacttaccctctcctctcttctcctatcctaccccaatcctgacctccaaggggctggtacctctgcttcttgctttgcccacctccactctaattcccatccattaggaggagaggggtgctgggccttggaccttctcccttgcttagaagtgccagcctcttttaggctgtggttagtggccattgtcccatgccttgaaattgacccagaacccactttccactgatgtgtctcttggatttcttccaggtgatagatacaaagtgtatgtctctgtgtgtgtagtgttgttttctcgtgtccaccctgtggccctttgcaatgggtaggagatctggggaggccctgccccctacaccatacttatcaccaccctcctcttttctgcctggatttgtgaccatgaattcccaggaagagctgggcccctgggagctgcccaggtactccccttgaagggagaatctcacccaggatcttcctcaatactgctcctctcttctcagctcagggagaggaggggatccattctctaaggaccaaactgcaccctttcttgggtgagtgagcatttctacctccgtgctttcaacttttgttgcatcatgcactgatgctgcttgcaaaaaatgaagacaaaatactcagaagttgcatttgccatggccactggctccagctggggtttggtgccagtgttattacagggtctgcggagtatcagccattggcttggcctctctctgttcctccctctgcacctagaactcttatccttcctgtggtttggtgccgactgggtcggatctgggcttagagtaatagctttggtgggtttcctggatggatgtgaagttgggcctcccatgggcccaagggagtaggaagccccattccccacctgtccttcctctaggaagtgtagatcagaaagtgaggtggtgacctcccacctctggtctggttaagagtctcactagggccaaggcaggctgcagaactttccctcttcctctcattgagggtgatgacaagagacatccggggactgtgcacttacagtcggtgtggaatgtcactcttgcagtctttgaggcaggataagtatttttacatattttaagggtgcaggaggacagcagctaacaaggccaggaaatactcacttccctccaccctcaacaggatgtggtgggggtgaaacttgaagaatttttgtttccccttctcccttcttacgtttgggaagttttatgtagtgtaacaaactctagacgagttaccagaagatgtggattctagttctgattctgtcactcattggctttgagtgacatatttttatttcctgggcctgttttctcacattaaaaaagtagaagttagatgagtgatctctaaggttgaaggtaatttcagctctcacattcttttgagtttgtggctcttgaaagccctggtcctgatgctccctgtaaaggtggctgggagagaagccagccaggctgcacttgcagaacattccctgctctgtactgggtgtgtgaagccccagcagagaaggccggagggagggcttgggtgcctgggctgggtgtggggcagggcctggcacagctgcagagtgcacagggagggtcagaagtgccaagtcactggccgttaactcagcacccaggccaagcccccgcctcccacttgaagccccctcttacaactgttttgggggcttggagcagaagacacccttgtagacagacataagaggggcagaaggcttgaccagagttctcttgagcctcctcatgctctcagagcagggaacagcgggggaaaatgtttacactccatgcacaatctgtgcttccagtccctcaccctatgtggcccaatagctggctggatttcacacttaattggtatttttttctgccttcttcccctgcccccactgactcctctcctctccctttgattgtactcaaggttctggggcctgggccctgggtgggtaccaacagctgctcgctgttcccatgtcctctctccagctttgctgtgtttctctgctacctaatctcagtgactgtgaaaggacattgtgtctgagccatggccagccgctggctggccccctgatctgccccccttctattgtttggatggccatctcctgctgggcctccctgactgtaaaatctctgtactgtttgttaggtttttggtgggaggctgtgataagttccaatgagctgccacttccctggatatgtcaagaagctgatggcaacttggccaattctggcagatatcaggcccccagttcagccccagtcaccctcttttacacatgtgggtcaaccactgtgtgctcagagggtcagtcccttcctctgctgtgtttttcttgagtccttgcactcacttcccctgccccagtcacgatgacccctaaagcttcctttgcccttgctttctagggcatccctagtgaaggggcaaacctgagatttctccgtggacctgacagccaaggcagggcactgtctcctgaggccagtgccagcacgtgcatggttcacagaaaaggatcctgggctcagaatctcgagaaccgcctgctcctaacaattcagcaagtcaggggcttcctctctgttagtccccaaatccttacttattttaaaaagactagaccctctctaaagactgttccattttaacatgtcctgattctgcatccgtgggttttgtgaaagagagctagctggcggttagagcctggaagaaggagggaagtggcacctcactagcatttatcacttttttccttctctttttaaaaataaaaccagactctgttctgaaaataaaaaacttgagacttg

SEQ ID NO: 11116 - DNA, 500 bp, Homo sapiens
gggcagtgcggtggaggtgagggggtgagcctggacctgtgggcgagtcccattggctgggctctggcctgatcactgggctcaggtcagggcttggttcccttgccacccttcttgctgccccatgagtgtggcattactggtcacttggaagaagacagtgactctttttccctgctgggtagcattttgtatggaacggttggaattttctgggcccagttcccacgtgcctttcgtggcagtctaacctcaggccattctcttcccctgtgtgcctcagtgtccttctcatttcagtagggacttctgaaatgggggaggcagtgtggaatactgtggatgtctgtgcagagcctttgccggcactgaaggcatgcagcctgtcggcagagtgtcttaacaccagatgctactttttactgtattgtagtttattgcccggagatgtggggctttttttttaaataaaataatcataataaatgttcatgatgctg

SEQ ID NO: 11117 - DNA, 2181 bp, Homo sapiens
ggagaagctagccagccctctacaagctgtcttcttgcacacgctgtcacttcctctcactcgttcttgaatcagctccatgtgcccatgaaatcaatggcctctgtatggagcgaccctgtgagaagcacttggctggctgagcaaattcatcctctggaaatattctctctcagccacagtgacattgaccctcttggttttctcctgtctctggccatttcttccagtttccctatttcagagtcttctcctctctctgatctctgtgctgtttcctcaggactcagtcctgggctctcttctattctggtctctttatttttttatttttgtattttttcgagatggagttttgctcttgttgcccaggctggagtacaatggtgcgatctcagctcagtgcaacctccgccacccgggttcaggcaattctcttgcatcagcctcgcgagtagttggaattataggcatgtgccaccacacccagctgatttttgcatttttagtagagacaggttttcaccatgttggcgaggctggtatccaactcttgacctcaggtgatccactcgccccttggctcccaaagtgctggaattacaggcattagccaccatgcctggcctattctggtctctttaactctctcctctttatttctcttctctctctgtacacttttcctgggtggtctcatccattcctttgctttttcataccatttatttgttaatgattcccacatttatttatgcacttggagagctcacaggaatctcagaaactgatgaggtacaattctgaaccctcagtctcttccctttaaacctttctttttctctactttaatttttctaaagagtgtcttgctatgttgcccaggctggtctccaactcaagtgatcctcctgccgcagtctcccgaagtgctgggattactgacatgagccaccacactcagccctttaaacctttccctggcctttcccatagctggtgaaggacacctccatccattccacgcagttgctcaaagcagaaattttcagtgcaagtcttgatgctgcgccgtcccccactccctacatcagaacgcatccctcatctggactccagcggtggcttcttgatgctgcgcggtcccccactccctacatcagaatgcatcccgcatccagactccagcggtggtgctctacctgcacgctgttgccaagtccaagctaccatactcctgcctgagctatgacaacagcctcctcactgatctcccctttcttccctttgcctcctccagctcatttttcacagtgtagaatgacattttgtttgtttgttttgttttgtttgagatggagtctcgctctgttgcccagggtggagtgcagcggtgcgatctcggctcactgcaacctccacctcccgggttcaagcggattctcgtgcctcagcctcctgagtagctgggattacaggcatgcaccaccatgcccggataatttttgtatttttagtagagatggggtttcactatgttggccaggctggtctcgaacacctgacctcgtggtccacccgcctcggcctcccaaagcactgggattacaggcgtgagccacccggcctggcctagaatgacttttaaaagatcaaattaaatcaggtcactcctttgcttacaacgcagtgcgtttagaggtacaccccatgtctccacagggcatacagcatccgatttaatctggatccattccggcgccttcctctcccagtcacccagagggccccaaccccggcggccctttcttcctcaaatgtcctcggctctataccgtgcctgggtcttttctctttctctctgcctggaagattccttctttccccttttgtcttgcccactcctgtttacccttcaagtttcaagttcatgtcactgtctcagagaggttttcctgtgctcgccctgtttctctcaggaagccttgctcttttccatcatgcctctaatcacagcttataatcggatatttatttctgtgtctacagtcttgccctgccagactgtatgccccatgtgggcaggcgctcatgattgtttctgattgtttcacgcatgctgctaacccagagcctgggcccaaagctagttagtactcaataaacaatgcattgaatgag

SEQ ID NO: 11118 - DNA, 536 bp, Homo sapiens
gccttcaggaggtggagctcgtcgtcagctctcctgctgtgatgtggaagcttctgatatttgaagaaacacgaatgtctctgtagcttcctcttcactgccccagtattgctctgtatttatcagcgatgcccctctgtcactcatgccttgcctaattgttcacaatggtggaaagcttcatgtaatatgatcaggacccacctccagttcttctgaaagtgtgacagtgtccagccggttctgcagcactaggggagggggcagatggtggttgcatgggcttcctgggtctccactctccgtctggcctaaaggtgatgtatttggtgtttggccctgcagtccccactcttgaggcttaaggcgcatgtggcacaccactccttccagcagtagtcgctttactgttacctgtttaggcctagaagttttccctcatctgtaaatgtgatttaaaatctaagccatgaatatgctttatttattaaaagagttatgcggatttaatgtgatttctagtgtaaggcactaca

SEQ ID NO: 11119 - DNA, 1440 bp, Homo sapiens
acggacagttccagaagtgtgactggctaaagctcgatgtggtcacagctgtatagctgcttccagtgtagacggagccctggcatgtcaacagcgttcctagagaagacaggctggaagatagctgtgacttctattttaaagacaatgttaaacttataacccactttaaaatatctacattaatatacttgaatgaaaatgtccatttacacgtatttgaatggccttcatatcatccacacatgaatctgcacatctgtaaatctacacacggtgcctttatttccactgtgcaggttcccacttaaaaattaaattggaaagcaggtttcaaggaagtagaaacaaaatacaatttttttggtaaaaaaaaattactgtttattaaagtacaaccatagaggatggtcttacagcaggcagtatcctgtttgaggaaagcaagaatcagagaaggaacataccccttacaaatgaaaaattccactcaaaatagggactatctatcttaatactaaggaaccaacaatcttcctgtttaaaaaaccacatggcacagagattctgaactaaagtgctgcactcaaatgatgggaagtccggccccagtacacaggggcttgactttttcaacttcgtttcctttgttggagtcaaaaagaaccacttgtggttctaaaaggtgtgaaggtgatttaagggcccaggtcagccactgtttgtttacaaaatcaggtaactaactgcatacactttttctctttccatgacatcaagactttgctaaagacatgaagccacgggtgccagaagctactgcgatgccccgggagttagccccctggtaatagctgtaaacttccaatttctagccatacgctcagctcatccatgcctcagaagtgcatctggagagaacaggtttctaagcataaaagatgaaagagcagttggactttttaaaaattcagcaaagtggttccctctcttagggacagtcaaaaccaagtcacttaggtagtaccaaaataaataaggaaaagcttagctttagaaacagtgcaacactggtctgctgttccagtggtaagctatgtcccaggaatcagtttaaaagcacgacagtggatgctgggtccatatcacacacattgctgtgaacaggaaactcctgtgaccacaacatgaggccactggagacgcatatgagtaagggcactgacggactcatgatttcttcttaccagatgctttcctgttctttaagagtttaaaatcatcagaaaggaaaaacaaactctatattgttcagcatgcaatacataccacgctagggctggctcaattgaaagtgggcaaaagcttacaaatactaaaaagaagtgctgccgcgcagtgtggaggccactgtttggaaataaatcttcctaacactac

SEQ ID NO: 11120 - DNA, 393 bp, Homo sapiens
cacccgccagcacacccttagcctccagcaccccccgcccccgcccaggccatcaccacagctgcagccaaccccatcctcacacagattcaccttttttcaccccacacttgcagagctgctggaggtgaggtcaggtgcctcccagccctgcccagagtatgggcactcaggtgtgggccgaacctgatacctgcctgggacagccactggaaacttttgggaactctcctcgaatgtgtgggcccaaggcccccacctctgtgacccccatgtccttggacctagaggattgtccaccttctgccaaggccagcccacacagcccgagccccttggggagcagtggccgggctggggaggcctgcctggtcaataaaccactgttcctgc

SEQ ID NO: 11121 - DNA, 2583 bp, Homo sapiens
acggcctggcctgtaccccaacggtctgggagcacctgtctgttgtagaaaacaccggtccctggggagacttgaaaggcccctgtcccagcctggacgccacgcactgccgcacgtcactggcgggctcgcgtgtgtacatagagaccacagcccgccttctgccaaaagaagtgatggcctgcaccgagcttccttgagggcttcagaaacatgcatagctttggatcactgtcttctcctttataaatggcagaagagtgacaaaattcattcagaccgcacatgttagaggcagggaatgaagaaggtactgtgggccatggccacacctgatgcgtttttggtgggcttacttggtgcagtgtgctgtccagagagacctgctgacccagtctgggacaggcacagtgggagctgccacagtgccccttgctggccgccctcaggagggggcctctggaccgtcagtgtggcgtaggcagtgggtctgcttcagggaggcagcctcttgactttgtcacaacggttgcactgaagatggcccccacaagcccagttgtgaatatcaaggtgaccctgcccctggctgggagctcccctggggctctggaacctgaagccctgagaaggagagcttggaaggaggttgagctcttcactgtgtctttccatctgggctctgcagcccagctctgtggcaggaggcctgaccccaccccatcagtccctctcccagcattgctgtgcatggctccctcaggaagaagctctggagtggggccgaggccccagatgctctgctggggtctggggactgagctgcctcctgtctctccactctggagccctgggctcttgcctcctgttgaattgcccctgggcctgcccccggccccatttgtgccataaagggttgcttcattgcaggaggggtggctgaaaccaccatcctgggctgcatctatctccttaaagtccactccttacatcaccgccactactgcagctcagtgcccagcggccgcatgcacacctcccggcccctcctcagcagcgcaggggctgggggcccttcctggcacccttttgcctgacggaccctgttgcctgctcctgggcagtggttttgttgcctgacacagggcctttaacatttctgaggtttggagattaagcgggttctgtgcgatttttagcacatccatatcttttctacgttgaatgtctggatctttcctttgtatgtttgtgtctctgtgtgtgtatgtggccaagcgtctgcaggtgagggtggcacatggaacttcacgggtcactgggggcccactcttccagggtcatcgatgcatcctgggctgtgctgaggcagtgctgtctcgctcagtctttccagaccagcggggcagcacctgggaggcctgtctgaagcatgcagttctgtggtgctgctcggggatggactccatgcacagtccacttcttgacacattctcacactgtggctggagacccattttttccatcccatgtggaatgagaatcttgagttgcccacagacagacttgacctttgtgccagaactgtccagagctgtgagttttgttactgaattgcctgtccctgagcttggcctgctggagcatgatgctggaggctgtgtgcgggcaggcttgtgctccccttggagaagggctgctacttaacaaggaagtcctggccacaggagtcccctactggctgcagaggacgaagcaggaagcatgccgtggatcccacatgcactggggcagggcagccaggttccagagcagcaggcatgtgcattatgggtgccaggtggccagtgagggcccgaggaccacgcagcagagtcccccacgggcctgagcctgagagctcagaggattcctgccaggcctcagaactgtgtgtgcgggacagggtggctggcacgagatgtgtgggactgggacgcttcctttggggaccagaggaacattaggggccggtcagacacgtagggggcagtgaggaaacggggtaaagtggaccatgcaggctgcagagggtgggccttgggctggccggggttgctgggtggccccttccccatgggcctccacaagcactcaggccactggcacgttgggccaggcagaaggtccacatggcagggctgcctggaacaccgctgccactgtggctccaggaggcccttgggagcatgaggagagctggactcgctcatctgttcttgcaccaccatccagaatgccccctttgcaaggcctgctgcagtccccagtctgaccagcaagtcccggggtcacccttgctgaaccttgtgctccaggggtcctcctcctctaggaccagcttgccacggtttctcagagcccaggtgccctctgacctgccatgcggaggtgggatttgatactgtacattgtcttgatgcctgtttttttatgttttcattaagggtttttagtttttggttgggttgacactaacttttcttaagatgctgtgagaatcatttcatccaaatgccaaataaacttgtgttccggaagagg

SEQ ID NO: 11122 - DNA, 3917 bp, Homo sapiens
agccaggcctgggctgggctcatagacgcttcacagagcctgcagggcagctgtacacccagcagaggactccagccttctcggggcccaggcctgggccagaagctgttgaccataccaggagtcactggagaaaggggctgtgctggggccagactggcacaaggcactcgtgcccacaccacaccccagggccttgccaagctgtttgctgtttaattggccccttgaactgtcattaaagaacacctaggtacagtctggggggttgcctctccatcttgctccccacacgagccctagccttgccctggggcctgcatcacgtctcaggactgcggggcttgaagcgaggggccccccaggtgaggaagctgcaggtggggcggctgtgggagcaccgggtgactggcgttgctttctgcggcactcggaacctgtgttctgagttgagctcacatcctgcagtgctttctgcttctctggggggatatgaaggagaaacggagcccttggaagttgtacccttaggttcccctgcggttctgggcccaggtctgcagcctccactctgggcttgccggctgtgaggtgcgctggttataggactgtgtgggggctgcatatcaggtgatctcagctatcaccttctcccagcacctggcttccagctcatggggtgggactatcccactcacccctctgctataggcactgcccatcttatgctgctggccctggcctcacctggtcacttccaccaacaggagctcccagataacagtgggttgctggacagatcaggctgggactcttaaggggtgggggacgtggggccttcagtgctttatcccctaggaaagggtgcacgttatcccaagggagcccccaggaagtggggagggaggggggaggagcatgtctaggtgctgaccacctggagcacttggccagcaagtgggccgcatgctttgggagcaatgggtgacccagcaggaagcacaaaagaccggccagtgtgccatcatcaagggctgctgagcagcttgaagagccactgggtggggagggcacacggggaggtctcagctggggctgcccctggaggacagggcagggaacttgagggctgaggacagaaatctcacatgactccaggaaatagaggaagaggaggatgctgagcgagggattgtgagggagtgggggtaggtcagagggggctgaactgcaggaagccagggggagtcgtggaccactggagctggccagccccagggcattggggacaaggccaggtcagagggagacagtgtgggcctggtgggtggaccctggcagaggccctcttgtcccccacaaggccaggccacactgtgattctgcctgtacctgagcatctgtcctgtgctcctaggccggagaccactgtgtgtcaggtggggcggttggctgagtcccagagaaaaacactcctcactgggcactcttgatgcttgcacacaccctgtggtttatttggtggtcagtaaggaacgtctttgctgctaagtggaagaaagctaatggaacgtaatcaaaatagtggtttaattgacgaattttacttgcacctgtgccttcttcagatcctacctgcctacttagtttacgtgaaggccgactgcaccatgccccccaaccccgacccccaccacacacaacggggccattgtcatgctaggtgcttgctttccccacctcagctccggagatgtgatggtctttggccctggaggtctcggccagcctgtcctccatcctgttctcgttctcgggcaccaccagcagccggtgctgggttttggctccaagcttgtggtcgggccggtggtcgggcctcaagcctgtcttggtgtccagtttgcactcagcgcggtacttgccctccccctccctcttgaaggaggcagaagacgtggctttgggcttggggggctgcagccacgagtggctgaggatctcatcgatgtggagccgctggctgacgtcgggctgcagcatgcggtagatgaggtccttgcactcgcaggtcaggttcttggagcgcgggaagtccacacggtgctccttctggatacgcagcatcttcctgatgtcggagtcgtcatagggcatggagccgcagaccatgatgtacaggatcacgcccaggctccagatgtcatacaccttgggctggtaggggatgctctgcagcacctcgggggctgcatatgctgccgacccgcagaaggtcttgctgaggatgatgcgcccattgctgtcccgcaggcagcgcttggagaagccaaagtcagacagcttgatgttgaagtccttgtcgaggagaaggttctcgcacttgaggtcccggtggacgatgtccaggtcgtggcagtacttgacggcggaggagagctgtcggaacatcttgcgtgccacgtcctcatgcagggctccctggcacttgatgaactcgaggaggtcgccctggacgccaagctccatgatgatgtagatccgtccgtcagaggtctcaaagatctcgtaagtcttgatgatggagccgtggttgacagttgccaggatgtccatctcccgaggaaggaatctctccacaaagtcagtaggtgttttcttgcggtcgatgatcttgacagccacattgaacttgaggcgctcagagtaggcagatttgacttttgcgtaggaacccttgccaagattgatgcctacgatgtaacccttcttccttaggactgtggcatcgtccatggtgccaggagcgactggcgccgctgccgtctacatccccccgtcatgtgggccagcaggcattgtcctcatttacactaccggaggcgtctggctgggctgccctgggctgggcttcgactcaggggtggaacactcagcattgtctccgggtgacttcagccaatgaactcataaagccaaggagtgggggcggggactgggctgagggagaacagggtctctggaaccgtggaagccaggctggtctggcaggagcacccactccccgcccgctggaaggaagcctgtccccaggacaggactctggtggccctgctgctgctgcattggtttccctgtcacaagtcaagctggaggggaggcggcccacgtccagcctgtttgcatcacctggctgtggggactgaccctgcattggtctttgtcccactagggtgggtttcctgcagcttctttggctatgaagaaaagcacccccagggctgtgtccttggtgtggtaggacagttgtccctgacagtcacccagacaggcctgcatagcaccccagttacacagacagatttccacagcactgccttaccattgagcacatagttaaatctagggaaatcagtgcccagacatcaaagctagaaatgaaacatggtcagcaggagccttgcatgggcttctcttttgctggagcaagccaaaataataggaacggttttacattcctagtgccaggacccatctcgggtcgacaaaatctgaagacaagttaagggaacaggcagctgtttgaatagatcaattggatagtctaaggcagctctctggaccaagctgtaaaggagatacaatcgaaataatcactccggtaccacagtagacaggccttgaaggcactgggccccttttaatcggacttagcaagcattttttttgcctctgaccttctccttggaacaaaattagttaccagtagacttaggtgattgctgtactgcatgtaggcacataaccccaacctatataaacagtaagaaaattgtagcactttgagttggtctgctggaattatctccagccttctccctgtatccagttacagtgataaactcccttctttccta

SEQ ID NO: 11123 - DNA, 548 bp, Homo sapiens
gcctagagaggccgcaaggggaccgccccaggcaccgccagagtgtcctgctacctttgtctcacgattccagtgcagtagtgccaaaaggccccttcccacgtccctcgagctctgtagcctggtctgtgcattgtggctgtcaaatccatgtgtcccccctgtggtctgtgtgtgacaccaccactgtgtcccagtgtctggcccagccatggctggatgtgcatctggcctatgaccctgtgcctgtgtttcatgttctgtgtcacgtgaccctgtgccccgcctcccggggtgcccgtgtggcctgggtcctcggccctgtagccctggcccggtcccagtccggtgccttccaccctgccctggcctaccacagctgcctccgggcctcggcctggcttcaccgcattccaggggctgcagccccctgcttctcccgccattggccttaactggccctcgggccctctctccgccccggacagggtggcacccaccactctcaggaccaccctgccaaggcagaataaaccggatcctgttgc

SEQ ID NO: 11124 - DNA, 494 bp, Homo sapiens
gccctgccgtgggcccagcccctgccagcttcccctatggatatgcctctgctcccaacttcgccagcctccaatgtacaacttccgcgtgtagtgggcgttgtcaccacccaccctacctgcagagttactaacttctccaaggagcatgtcactccagcagcacaggggacgcaatgggaggcagggacacctggacaatatttatttttgctgaaacccaatgacggcaacctctgagccatcccagagcctggggaggccagggtagaggctgacggcgcaagaccagctttagccgacaacagagactggactgtgggccctcctgctggagccaggccttcctcctgggcgcctccgactggctggagctgccccctccaggccagtttgaagactacatgaacacgtcttgtttggaggtaccggacctcataaaaggactctcagcctcttggcaatcataaatattaaagtcggtttatccaggc

SEQ ID NO: 11125 - DNA, 739 bp, Homo sapiens
cctgccccagcctgccctggctgcagcaagggcagggccacactctcgccgctgatgacatgcaggaccgcctctcacctgaccaggctgtagggggaggagacactggcaggagatgtgctgtcctgcaccagcgccagcccagctccctgggcagatgtgccctgtgtcctgggtctgacattgcctcaggagggggaagctcatccctccctccaagcccccgatgcggagctagggctggagctctgcccaggtgccctggggccagcaaggcagtcccaggcctgccgtctccagcacggccccaaggtggacactagcccctgctgctgcaggcaccatgctgcttcagcagtgacgattgagccatttgtgagagagaatccggaagcgttaggtattacagcagactgacctaagacctatgtaaaaggaaagctgttccaacacacggactatttttgtactagaatttgctaacttgtaatattgaatttcctttggccgataatcaggatttccctataagtcacttggacattggtcacttgtaggaaatttaaactctaattatgacagctacactgaaaaataattgtactgaaattaacttgtctatcttcatttggttttaatttttaaatgtttgtaaaaagagactgttttgggggaatggggcaaaggggtgggcgatttcttttgtaagtgtaaaataaatgaacacgcattgaatacc

SEQ ID NO: 11126 - DNA, 892 bp, Homo sapiens
caagcatccctgccattggcctgtgcagcttcctcagtctgtttcaagttgctgttgcacagccctggggactgtgaccagcctacacagtctggtgggtccctgtgagctcttgctcacaggaacatggagcaggacattgctagccctacttgcccacccctcacctgcatgcaggataccctgacactgcgatgttctgcaggacaattgcaccgctttagagcttccaggaggccaagcattatggcaggtacttgtgagcagccaggtcaggctgggcatggtagcataggagatggcggtcctgaggtctaggcttctcaggtaaactgaagggtagccctgacctgtgtggacacacaggtgggtcataatgaggtagctaaacagttgtgccactgtgaatgtctttcctagtccttgggaaactgcctgccacgtcccaggtttggtgagcattgtgagtgctcacactctgctccactcgctcagttccactgcacatgcaggcaggtgtgccgagcaggtagggcttgctggcccctctgcaccagcaggcttcacttcttaggctcccaggtcggcccctggagactctggtttttaagaaatgcacacagctacagaacacacaaccttgcataaagagggtttgtggactcagctgaagaaatccaagtccaagacatatggaattaagcactccttccctcaaaatttcccctggtggttaatgtatcaaaagctatttcatctgatttcaaatagaagctgaaaattaagttcacacttgttagattttgtgtgtaacagtgttgtacctggacagtattagaaatttgtatgcttattctcttgttaagtgttttaaaatgtatgaaccaccaaa

SEQ ID NO: 11127 - DNA, 491 bp, Homo sapiens
gtgaggactgttggctgattggaaaataataaaagaatcatttgcaacatcttggcttttagttactggcactgacagggacgagcctcatcagagaatactctgttacttaagatttatttagagttacctaagaattattaagtttgacttggaagtggagcagcaggactttgtagttgtatgcttgatttggggaaagacaaagagctgtccctgagggcctgtagatagctgcctcctcacctcttcacgctttcagcttgaggggagctcccactgcctcagcaggagcaattctgcatccctaattctgtcaaaacctatgaaggtgactaaattgtctaacatgaagtgttctttctttttcttcatttatcctttcttttcctacatcaattgcataggtgtcagtctttggcctaaaaaaaggctttaaatagacatgtgttctataagtagtggctgtcccactactgtggctgcaattt

SEQ ID NO: 11128 - DNA, 572 bp, Homo sapiens
gggcgctgggcacggccgggcccctcctgccagccacgcctgcgaggcgttggataagcctggggagccccgcatggaccgcggcttccgccgggtagcgcggcgcgcaggctcctcggaacgtccggctctgcgccccgacgcggctcctggatccgctcctgcctgcgcccgcagctgaccttctcctgccactagcccggccctgcccttaacagacggaatgaagtttccttttctgtgcgcggcgctgtttccataggcagagcgggtgtcagactgaggatttcgcttcccctccaagacgctgggggtcttggctgctgccttacttcccagaggctcctgctgacttcggaggggcggatgcagagcccagggcccccaccggaagatgtgtacagctggtctttactccatcggcagggcccgagcccagggaccagtgacttggcctggacctcccggtctcactccagcatctccccaggcaaggcttgtgggcaccggagcttgagagagggcgggagtgggaaggctaagaatctgcttagtaaatggtttgaactctc

SEQ ID NO: 11129 - DNA, 5029 bp, Homo sapiens
acacagcccaggtgggaacaatgctgcccctcatgatgaagtggcctgtgtggcttgagcgccccatagtccccagtcagagcagagtggtgtccccagatgacttcagaccccatagctgggcaagatgcgcttgttttggactctgcgctgagcagaaccagctcccccaactccagcagagcttgacctccgccctgtgccctttccctgctgctggctctctgctgcatccctgcccgtcttctgggagtgccgtctcacccaggcctgctcccacgagggggtcgttttgtagatcaactctcagcagatagttgcatcatctttgtcacctccacccccataaaacaccccccttggtgtcttccacactggctgggactgaactgggtctgccacgtctgccctgttgggacctcgttcctgtatggggtttctgtgtctgtccccctagccccaccctctctgctccctgtgacttctgtcccagctggaatgtgaggaaggctgcctggaggaagtggccactttgattctgggggatgagtgggatagcatcttggcaaagaatgatgtttcctgtgggattaccagcagttctgggcagctggaaggtttggatgcaggaaggtgggatgcaagccccttgccaggctcagctgcaggcattcgccctttgtgtgttaacactgtagctctaatcgtgcctggtgttctgaagcaggctcctcttccctgctgctgtgctgccatcccctgctcactccgcactcgcatgcattgcggattcagcacttaagccctagtgtgtaaatgacttggatctccctcctggcagactgtgaccctcagcacaggggctctgtcttagtcagctctgtggcctggtacacaattggtgctcattaaacacgtgttggattactggctgaggtggtgcagtggctgcctaccagcaagtctttgtttcccattctgtcaggagcagaggcctggccatgagcattccaggtcagcattgcagctgtggtttctggcaggggctttgagggtccaagggtctgatcaaagaagctgggtggggctgagtagggggtgggtggctctgcaggtagagaactgacttccgagagctgtaggtgaagtgaggaccaggcagcagtccagagctgtgaggccccaggcccagaggaatggaatgaagaaagacctgttccacacaaggaggggttttctagtggaagctgagcttggaagctcctggagccaagtttaccacaggataggcaggtacagccgcccagtgtgtgcagtgtgtgcccactctggtgcttggacaagaagttcaagtccctttcaggtttacaattgtgaaaacaacaaaacaacaccttcctggaaagtaggaagaaaaagcagaaatgtgaattggaaatacagccaactattttaggaaaaactaattagcaagcatctgattaaacttattcagaaactggccgggagcagtgtctcacacctgtaatcccagcactctgggaggccaaggtgggtggatcacctgaggtcaggagttcaagaccagcctgaccagcatggagaaatccatctctcctaaaaatacaaaattagccaagtgtggtggtgcatgcctgtaatctcagctacttgggaggctgaggcagaagaattgcttgaacccaggaggcagagggtgtggtgagccgagatcacgccattgcactccagcctggacaacaagagtgaaactccatcccaaaaaaaaaaaaacaacaaaaaacaaaaaccttatttagaaaaatataaattgttgggattattttatggtaactatcactagaaaaggctctgggttcagatggttttatgtgtgagttatttcagggcacagataccttgtaggtaaaacaactggaaaccttggaaataggtgggaagctatttttagaaagcaggtatagccctggtagcaaagcaagtgagctggcagaagaaacccattttcagtcttgattctggtcagatgtgagaagtccctggatgtcctggcccagccccatgcttctgtgccaggtcacagctgccctccgtccgatgactcaggccccatccccccttttgtgggttgggtcagactgctccctgatgcctacctccagtgcactgtggcctggctcacctgtgggtctggcagtagaacccagagttgctctctaggatggacagcctagtcacccagctgacctttaccctgtcccacaggcttctggacaggccaccttccccatctccctttagtggacctgaagtggatactccagcctgggattgctgccttctcttttgaaccctgtcctattggggctttggggcttttgtgcccttgggacccaggcagctcctgggggtgtgtgagttatggtctgccgtgtgtctgagggccagtcatgcagcatccacctaggcaggcttgagagtccttgggagagtccaggtgacctggtttttaattaaaacgcgtcctgtttattgtggttgggctctgcccagaaaggaaggtagggccttgaagtggtgatgtccaggtttcctgcacaggtagggtggaggcaacgatggactctggcatggccttccagacaggcagtgcacacagctcctttcagagtggctttgttgccagctgctgcagcacctgctttcagacagatgatgaccaagctgctttcctgctgggggaaggaggcattccccctgggttgtttttctcttctggcccccacacactggcagacccgaaggcagggtgctcaggagctgcagagcctggcagggtttgctggacatgctcagggacgggccatggtgctggctctgctttctaatcatggtgtcagtccttcacttcccttggaaatacccagagattttatttcctgaagataggacatgatgggtgctgtgagatggtatttaaagtacctgtctgcaaggaaaactttaaaataggaagtactaaggataaggtcctatgggatattggaatattttataaagccacaatagttaaagcacttagatgtggacagatgagcagagaatagaggactttgaaacgggccaaataaatatggaaatttagtacaggctagaggtgtttccaattaacgagtaaaatggattattcagtaaaagcagttggccctctggaaaatagtaaagccatgtatgtgcctcactctttatgccagtacatattccagattaaagatttcaatgttacaattatgaaagtactagaggaaaatatgggtgaatttttttttttttttttttttgcctatgattccaggattttaaaagttttagatgcccagagttgtggaggtatggagaagtggaccttctcatactgttggtgggaatacacaataatataatttgaccacgtaacaattctaggcacatgcatgctgtgactacttgctaggtgcatgaaggctcttgccaggggtggtcatggttcggtaccactacatgggggtttagagcagggactggaggttggccttgcctcctcccctccccgcatgagctgagggtccttacctgacctttttgagctgtgaccagagtttttcctcatggggtggttagaagggttgaatgagaatgatgcccatgcagtgccttggctggggtctgggccctctaacacccacctcatgggtgtcactgttttttgaacagcagaactggaaaagcccaaagatccagcaataaaggagcaaggcaaataaagctgttaccctgcaggatcagtcagcatgagccagattgtgctgcagtaacaaagatctccaacagcgcagcggctacagttggcactgcttatttcttgcttgcacctgtgggccaccgtggctggggcctgtcagacctgtgctgacgacagcctacctggacatatttctccatgctcactgaggcaggggaaaggccacagcaggccacaagtaatgtgtgtcaccccacttccatttctgtggccaaaggaagccacagagccacacctgagttccataggacggcagcagctgatcatcctatgggctggggtgctcagtatggagaagtacaagcagccacccagcgtggggctggttggtgctgctgaggatgggaggatgggaggggcctgcatccatcccagggcaacatacctgtttgtctgctggggctgcctgacaaaggaccgcaggctaggggacttaaacaacagacatttcctcatgattctggagctagaagcctgagatcaaggtgtgggcagggttggtttctcctgaggcctcgctccttggcctgcagatagccatcttcttgccgtgtccctgtctgtgtctgtgtcctaatctctcataagctcactagtctattggatcagggcccaccctcatgacctcatttaaccctgaattacctctttaaagaccctgtcttcaaatgtaagtactaggggttaggacttgaacataaaaatattgaagggacatagttctgcccacagcggtgcccgcgataggcttctctggttttgtctttgctgttcctggcagcgctatattgggcaggcttctgtggtctccacatgcctgtgtgcagagtcccccaggccctgggttctggggcccatactgaggagtggggatggccaagccttggctgttgagtaggcagtgcccagttgtgctgtatgggatgctgtttctcacttaagaaatctttccctacctggggggtacaaaggcattatcctgtattcccaggttgtaactttctgcctttgacattcaaccttgagtccacctgtaagtgtaactgcggcagaagggaggggtctgctgtcatccttgatagcctgtgatgagcagagcccctctgccgaccgcgatgcacatgtaatatgagcaagaaataaatttttgatgtgcgaagccactga

SEQ ID NO: 11130 - DNA, 298 bp, Homo sapiens
ctcacccactcccttcccgggagacgaggagggcgggcagggaggtgggcatcaggccccagccttggcctgaaacctcaagggcctctgaggaccagcaagtcatggcccaaggaccatggagtccccgctgtcttcatgaggttggtatttccttttgtggagtgcctcatcacaggacggtgactctgggggccagccagagccctggccgtccgaggcctgcaggagacgttggcttgggcctgctgtgttgccagctgagggtattttataataaatttccattgccaagttg

SEQ ID NO: 11131 - DNA, 291 bp, Homo sapiens
gatggctgcaggccaggtttggggggcctcaaccctctcctggagcgcctgtgagatggtcagcgtggagcgcaagtgctggacaggtggcccgtgtgccccacagggatggctcaggggactgtccacctcacccctgcacctctcagcctctgccgccgggcacccccccccaggctcctggtgccagatgatgacgacctgggtggaaacctaccctgtgggcacccatgtccgagccccctggcatttctgcaatgcaaataaagagggtactttttctgaagtgtg

SEQ ID NO: 11132 - DNA, 846 bp, Homo sapiens
ggcccaggcccagcctcttgttcttagggcttggatcgtggaagaagggccaccctgagcagatcgtgccgtggagcttggagccccctggcggcaggggttggcagcgcctcgccccagccaagcctgactttggggacaccctcctgcccccccaccccactccccccatcctacctaactccctaggcctgagttagctgtttactgacatggtgctgtgtgtgagcgagtgacagaaggcccgaggaggccgactgggctgctggggcagggcccagggaggtggcagggaagggtgcctggctgggctttggggctggtgggataggagggtgcccctgggaacacagtgccccagtggtgcgggccaggtctggcgccaggggcaggcagctaggcagggagggggctgggaaagaacttggacttctaaaggcggagggtctccctgggcaccctgcaggcaggcagaccacggtgtggggggtgccccacaaggcccagccctgggcaaggaagctttggaagcagcaaggtgggggtcaggctacaggtgccccacctccccagagccctgcagtcacgtgaggcccctgtgcagtagagagcctttctccagcccatgctggctggggccggggctgccgcatctgcctggagcctgggcagcacctccgggactgaccttcggcagtggctgggggactgctttcagtgcctgctgttcgtgactcagaaacagaagaaaaacactgagaaaaagcattaaaaataagccaaaataagactattggtaaacacctaaatttttgtaagaaaatttaaaaattaaagcagcaaagg

SEQ ID NO: 11133 - DNA, 688 bp, Homo sapiens
gcccaggacccattatggggacaggagctgaagggctcccagggccccaggggcggggaaggcatggcttgctggccaggatattcagaggtaggcagccaaagggcacagaaccctgtgccccaccaggattggcctgctgctaggggccaggggccctgaccaggaagacaggtgggttcctgtagcctgttgcccatccccagggcctttgtggactagccaaggctgtgagggccagaataaacaactgctcaacaaagggtgtttctgtgatgagagccaggggtctgaacacagggcctgggtgccagggaaagggccaaactaggcctaggcagctctgcaagcctctctgcatggctgggggagtcagggcagagcttactttaaaaaagaatgttcgatttgatacttaaacttgaggagaggcagagagaggtctgggaactgcaccagctgggggcatggggtggagaacactgggcagagttggcccctctgtggccagcctggccctcagcccagcagagagggcatcaaccaaggaaggggccatgctggggtgctgctcagctgttacaaaggcagggtccagcctgcagggaggccccaggaggggatctggccagtcaagggtccacagggtgccagcctctcaccctcagaataaagacatcagccattc

SEQ ID NO: 11134 - DNA, 294 bp, Homo sapiens
cccccagcggacacaagagcgtgctcagcagccaggtgtgtgtacatacggggtctctctccacgccgccaagccagccgggcggccgacccgtggggcaggccaggccaggtcctccctgatggacgcctgccgcccgccacccccatctccaccccatcatgtttacagggttcggcggcagcgtttgttccagaacgccgcctcccacccagatcgcggtatatagagatatgcattttattttacttgtgtaaaaatatcggacgacgtggaataaagagctcttttctt

SEQ ID NO: 11135 - DNA, 399 bp, Homo sapiens
ccacaggcagcagaagtctgggcagagttcatcttcttgacctttggccactgccttcccagctgcccgcagggggttccccctgctgaggagagaccaggtggaccccagctgcctgtcacccttcatctgggacttgctgtcaaaccctaggatagtctcataaaggggaggctgggccagcctgctgctgtctgcttcaggaccaggcagagagtgaggctgggggttctcacaccttactccaccgggcacatcccaacctgcactggggcccacccgagcgcttgttctggtctcagccgctcccttggcagctgcagcccccatgcagaagaggctcccaggcccaagctctgtgtgacccagagaaataaagatgcctcagtgtggcccaaa

SEQ ID NO: 11136 - DNA, 790 bp, Homo sapiens
caggctgtggctcgtccgcgcgcagctccctcagcttcgcagcgccgcccgccaccccacacctcccacgctaccgggcacgggcggcctcctattggccgggcaccgcgcggctagcggaggttgcgtctcattggctcaggtcctgcagccgctcctggattggagcagtgtgctctggcgggaagggcccatcccgttggtcgaggcctgacaggcgcttagcgggcgactccctccccattggccgagttatggagcgctccgaccagacagcgtctcattggccaaagatgggagggttccgcttaaagaccgcctcttactggccaggagtggacttggttagggctaccttctcattggttgcagccagaggcacttctgcccgggctgcctctcccccgctagggcctggtgcctctggctggaggctccctcccttggccgtcccaatagagcccggggctacttccactggccaggctcccgggcatctggttgaccccagcctggggaggagggctggtctccgctcctcaggggcttagtccgtcccaccccttcccttccctggcgccccgggcccaggcccctcagctgtcagctggttttgatggcctcccactgccccacacgccgcgggacctccaggggcgactctagtggcctgaggagatgtatttataggcccccagcagggctgctcccccctcggccggtgccccaggatgggctcctcccggcgggggcttggccaaagctttcttaataaaatgcctttcccctc

SEQ ID NO: 11137 - DNA, 554 bp, Homo sapiens
gctccctgtgcctggcatcagagggaagggaggctggggctgcagggcagtgaaacccacgcagcctaggccagagcactttactccaggcagggcccctgcccctgttggccacagcttatgggccctgccctctttcttcacaccagccccttggccagcctgccgcaggcatctcagggccatgcagatcccaggctgtggattacgtcactgcaggaactgcttctgaaaggctttggccttcctcagtgagccctggaggggttggccttctctcctccctgcctagatcagtccttctccaaaaggacctgggagctggcagcctgggcaggggggctgaggcacgtggtagccctctttctgtgaatggggtggggctgtgggggcagctggggttggaggatgagagctcctgaggggcagaggagcagagatgcatcagctcgcctgggactggctctgtgataaaaagacccctcccgctgggttttcagaccccatgttgttggtcaatgaaataaagcatcttacagaaggtgttaactgtt

SEQ ID NO: 11138 - DNA, 356 bp, Homo sapiens
ggaggggaccttcgagggcctctgccccatgtgccctcaaagctgtcccacaatcatggagccctgcgacctccctgccctgccgccacatgcagtggaggagaggcctgtggcccaaagaacctggtagcgcctcctggggcagcacgtgggtggcgcagccttggtaacgccatggactgcagcgacaatcaatggatggtgctgtctatgcacaggtgtgagtcctctgtttgcactggacatattccctacctgtcttatttcataggtacatgaagtattgtgtataaaaaaagagataagatttaaccaacatcaacaaaataaaaacccaaaatagtgctgtgttggaa

SEQ ID NO: 11139 - DNA, 108 bp, Homo sapiens
ggggctgctggactgaccgaggggctgcccagcaagactgcagcctcttcctccctcagatcccaccagacccaccaggtgccataataaagcggattctagacggag

SEQ ID NO: 11140 - DNA, 891 bp, Homo sapiens
ttcgatggggccctgaatgtgtacttgacagaattccaaaccaacttggtgccatacccccacatccacctccccctggccacctacgccctggtcatctcagccaagaaggcctaccatgagcagctgtccgtggccaagatcgccagtgcccgcttcgagccagccaatcagatggtcaagtgtgaccctcaccatggcaagtacatggcctgctgcatgttgtacagaggggatgtggtcctgaaagatgtcagtgcggctgtcgccaccatcaagagcaagcacaccaaccagtttgtggactggtgtccgattggatttaaggtaggactgggtgatgtggagtccttgtgccatcaggaagcaggagacctgcagaataatgctgcccctgaaggcccgcatcctttatggagacaaccccttttcacgtcagctaggttgcaaggataataattttagtaatttatttcctaccgccttatactttaccaaatactttatgttccctcataccttaaccactaccctttaaagttcatggggcaatattaccagtatcttacactttagaaaacagaggctgaggctgggcacggtggctcatgcctgtaatcccagcactttgggaggccaaggcaggcagatcacgaggtcaggagattgagaccatcctggctaacacggtgaaaccccggctctactaaaaaatacaaaaaattagccgggtgtggtggcagacacctgtggtcccagctattcgggaggctgaggcaggaggatggcgtgaacccgggaggcagagcttgcagtgagtcgagattgcaccactgcactccagcctgggcaacagagcgagactacatctcaaaaaaaaaaaaaagaaag

SEQ ID NO: 11141 - DNA, 336 bp, Homo sapiens
ctgatcagcccacacttgccccgccctcccacacctgcttgggaggccagagaggccagacaagccgagagccccttctgttgtgggcagcctgggtttgcaggcctgcacaggctggggagtcctcaggaccttaggaccttcatccaggggctgggcttcgggtcttcaggagtgggccttggctggtgctggtgccatggactctgcccagagccttcttgtttatgatcagctccagctacctgggcagttgtggtggggtggatgggaaggcccacagcccaagggatccataataataattgcttggccagccatgtggcctgctggcgt

SEQ ID NO: 11142 - DNA, 356 bp, Homo sapiens
ggaggggaccttcgagggcctctgccccatgtgcccttgaagctgccccacaatcatggagccctgcgacctacccgccctgccgccacatgcagtggaggagaggcctgtggcccgaagagcctggtagcgcctcctggggcagcacgtgggtggcgcaggcttagtaacgccgtggactgcagcgacaatcagtggatggtgctgtctatgcacaggtgtgagtcctctgtttgcactggacatattccctacctgttttatttcataggtacatgaagtattgtgtataaaaaaagagataagatttaaccaacatcaacaaaataaaaacccaaaatagtgctgtgttggaa

SEQ ID NO: 11143 - DNA, 326 bp, Homo sapiens
ccccctacagacaaccaagcactaatccccttagtaccaagaaaggggagccaggatttagtcctggcccagcccagagctgggacctggagcacgatctgttgacttccctgggtaggacactgccacctctgggctcaggtcctcatgcctccaaatggcatctagagtttgagcagccttcttggctgcaggcaggcctagcctgtggcagcgggctagggcccgcagagcatttggtgcccctccatgttgcaatgcaaacaccttcaccactggggcagtggggagagatggctatattaataaaataacgtgtgtctttc

SEQ ID NO: 11144 - DNA, 3591 bp, Homo sapiens
tgtgcgaactttcccttctcctttgaatgctgttttgtgaaagaaactgtgaatgtaatggaaacgtaggagcatctggtgacagcctttcttgccctctgacctcaaaggctagctgcgcatagctcttgacactctcggccatctctgtgggtaaggtgtccctcggatctgtcctcttcgtgtacacagttgtttctgaaaattttcaatgagctttttctaacttctcaagttctagagaaagaattaaccaactgatgacttacctgcctagttaatatcttcctttcacctttgtcttcaatatagttgggctctgcttttttaaggttcagttgaaaaccaaactggggccgggtgcggtggctcacgcctgtaatcccagcactttgggaggccaagatgggtggatcacctgaggtcaggagttctagatcagcctggccaacatggtgaaaccccatctctactaaaaatacgaaaattagccgggcatggtggcgagtgcctgtaatcttagctactcaggaggctaaggcaggagaatcacttgaacctgggacacggaggttgcagtgagctaagatcatgccatcgcactccagcctgggggacaaaagtgagacatcgtctcaaaaaaaaaaaaaaaagctgggtatggtggcgcatgcctttaatcccagctactcgggaggctgaggcacgagaatcacttgaacccaggaggcggaggttgcagtgagccaagatcgcgccactgcactccagcctggcaatagggcgagactccgtctcaatttaaaacaagagagaaccagactgagtctctgaagaccacagggacagggtctctttagatagcaagtctcaccattcccttttttagagaaaaggtattgtagcccaccctccaccccgctgtttttcttaaatttgcagaacttcaaattggctattcctcttgcaaatgaacccttaaagtacagtgttatttaagaatcttccagaggcagtcaacagacttatacactaagggcatttttggtttttagcttgttcaaaaacagaggccagcacagatgacattttagatacactctaaattgagaatggtgtctagtggaacatgtttatttaagccagtagattccttatctagaaagcaggtgagctagcccttagagaaggctgtcccggggcccgcagaggtgcccttactgaggtgacagcctcacagggtctggtaccaggggttgtgccctcagcagtgacagcagcttaggtgtcaggcagttgctgagtggctggtccatgtctatagagtaacacactggaccgaggaaaagtcagatttcattttctaccctggatgtacttgaagaaaaagaattatttttgcatatgaaagaggccagaacccacaggaaaaacttcaaaacttgacatttgccagaatgtttaaaatttgttcagaaaaggttaaagcaacaagtttagcctttgtgcatgaagacgcctggcctgctagacgcgttgcccgtccctgcgtggtgctgtcccatgtcacttgaactgatagaggggcctgtgcaatctcctaaggcctgtgtttctgccatatattttattataaattacaatccactcatccacctgccctccaccaggagtgggcaccccataagggtttaggccactttgcagaggatggaggtcaaaaaccactcccagataagtttggttttcaacatttagtaacttgtctcagggcagagggcaggcagggggaccgaggggcagcagataggagagcactgagcccggatagttctcagcctggcaagtggctctgaagctgccttcagacaaggctagtctaggggcaagagtgcgagctggctgacaataagaacgtggccacctgcccagcttcacacctcccccgacttcagcccttcctaaacccagacctgcggtccaggcaggcactgggctgtgcccactcgagctcactgcccacacacagcatgcctttgggtgccatctctttgcccaagcctggaagccttggcaggtgggaaatgccgctgccctggtgggcatggcactgagatgcatccactcagcaggagtgacagaggcagaagttcctttaaagcacatcttccacttaggaaaggaaggaaatctttgtactgtcttggaagcctccacatccggctatggccctgcaagctgctttatccctgcgctagtctcccccgagggtttaggctggcccagcacatcctgtcctcctgagctcgcgtgcagccacccagagcgcaggggtcactgcacgctgcagggctcttgctgccatggtctcaagcctgaagaggctccgcccacaagctggcccatgaagttagcaatgcctgtggcttcagtcaattgtcttgagactgtgaagaggctgaaagacaccttcccgggtggaagaaggagttcactgaaaacttatcttaaactgacccttccctttgagtgagtcttcattcctctcccatgtgggaacccagcctccgatgccccggggactaggggaaacagttggaggttcgtgccgtccccagcctgccacgggtgcgaggacagccaagtcctgagtgactcaagatgcttcacttacatggaagaaacttctaaaactctaccgagtggtttttgtatatactaaagttctatttagagcttttctgttttgggcaagttcgctgctccttctatttgggcactttggtttttgtactgtcttttgtgacggcattgattgaacattttttactagtagtcttatgacttttgtatttttttttttttttgtaatttataccaacaacacttttatcactttttttttgttgggcttctgcaaaatacaagctcatttttaaaccaaatgaacagaccatgagctggcttcaggggaagtgctattcacaggaccatatccaccaccctcttaaattcctaaacaatatcatctaggacttctatttaagttatttaaaataaatcttccttgagagccttgggaggtgatgtcagggttataaatggcacagtgcatttgctgtaggaatgtggtttggcattgttttatacacacagtattttttataccttaatgcttattcttgatggcatctgtcagatattagaattgaaaataagaatcttcccaaaatcctttaatttacctgatgccctcatcaggtcgttaaaaattcaaatggttttaatagctaaaaaactacaaattaagctctaaaacaaacaaactacagaaatgtaaaccttcatttgccaaaggtccttggtggcctgtcccctgccctgggagcagatggccctgaagcccttccctcactgtgcaggccaccgggtgaggctggacggtcacccatggtggcttcactgcaaggagcaggactgccgagctcaagcacggggccttcagcttcccctgtcctctggccacaccgccagcccttggtccttatctgtgtgaggtttacaaataaagcttctgatgtcaaatgttta

SEQ ID NO: 11145 - DNA, 4581 bp, Homo sapiens
gacaagggctcagaggactggacgtgctcagacatcggtgttcttcttcccagttcttgacccctggtcctgtctccagcccgtcttggcttatccactttgactcctttgagccgtttggaggggcggtttctggtagttgtggcttttatgctttcaaagaatttcttcagtccagagaattcctcctggcagccctgtgtgtgtcacccattggtgacctgcggcagtatgtacttcagtgcacctactgcttactgttgctttagtcactaattgctttctggtttgaaagatgcagtggttcctccctctcctgaatccttttctacatgatgccctgctgaccatgcagccgcaccagagagagattcttccccaattggctctagtcactggcatctcactttatgatagggaaggctactacctagggcactttaagtcagtgacagccccttatttgcacttcaccttttgaccataactgtttccccagagcaggagcttgtggaaataccttggctgatgttgcagcctgcagcaagtgcttccgtctccggaatccttggggagcacttgtccacgtcttttctcatatcatggtagtcactaacatatataaggtatgtgctattggcccagcttttagaaaatgcagtcatttttctaaataaaaaggaagtactgcacccagcagtgtcactctgtagttactgtggtcacttgtaccatatagaggtgtaacacttgtcaagaagcgttatgtgcagtacttaatgtttgtaagacttacaaaaaaagatttaaagtggcagcttcactcgacatttggtgagagaagtacaaaggttgcagtgctgagctgtgggcggtttctggggatgtcccagggtggaactccacatgctggtgcatatacgcccttgagctacttcaaatgtgggtgtttcagtaaccacgttccatgcctgaggatttagcagagaggaacactgcgtctttaaatgagaaagtatacaattctttttccttctacagcatgtcagcatctcaagttcatttttcaacctacagtataacaatttgtaataaagcctccaggagctcatgacgtgaagcactgttctgtcctcaagtactcaaatatttctgatactgctgagtcagactgtcagaaaaagctagcactaactcgtgtttggagctctatccatattttactgatctctttaagtatttgttcctgccactgtgtactgtggagttgactcggtgttctgtcccagtgcggtgcctcctcttgacttccccactgctctctgtggtgagaaatttgccttgttcaataattactgtaccctcgcatgactgttacagctttctgtgcagagatgactgtccaagtgccacatgcctacgattgaaatgaaaactctattgttacctctgagttgtgttccacggaaaatgctatccagcagatcatttaggaaaaataattctatttttagcttttcatttctcagctgtccttttttcttgtttgatttttgacagcaatggagaatgggttatataaagactgcctgctaatatgaacagaaatgcatttgtaattcatgaaaataaatgtacatcttctatcttcacattcatgttaagattcagtgttgctttcctctggatcagcgtgtctgaatggacagtcaggttcaggttgtgctgaacacagaaatgctcacaggcctcactttgccgcccaggcactggcccagcacttggatttacataagatgagttagaaaggtacttctgtagggtcctttttacctctgctcggcagagaatcgatgctgtcatgttcctttattcacaatcttaggtctcaaatattctgtcaaaccctaacaaagaagccccgacatctcaggttggattccctggttctctctaaagagggcctgcccttgtgccccagaggtgctgctgggcacagccaagagttgggaagggccgccccacagtacgcagtcctcaccacccagcccagggtgctcacgctcaccactcctgtggctgaggaaggatagctggctcatcctcggaaaacagacccacatctctattcttgccctgaaatacgcgcttttcacttgcgtgctcagagctgccgtctgaaggtccacacagcattgacgggacacagaaatgtgactgttaccggataacactgattagtcagttttcatttataaaaaagcattgacagttttattactcttgtttctttttaaatggaaagttactattataaggttaatttggagtcctcttctaaatagaaaaccatatccttggctactaacatctggagactgtgagctccttcccattccccttcctggtactgtggagtcagattggcatgaaaccactaacttcattctagaatcattgtagccataagttgtgtgctttttattaatcatgccaaacataatgtaactgggcagagaatggtcctaaccaaggtacctatgaaaagcgctagctatcatgtgtagtagatgcatcattttggctcttcttacatttgtaaaaatgtacagattaggtcatcttaattcatattagtgacacggaacagcacctccactatttgtatgttcaaataagctttcagactaatagcttttttggtgtctaaaatgtaagcaaaaaattcctgctgaaacattccagtcctttcatttagtataaaagaaatactgaacaagccagtgggatggaattgaaagaactaatcatgaggactctgtcctgacacaggtcctcaaagctagcagagatacgcagacattgtggcatctgggtagaagaatactgtattgtgtgtgcagtgcacagtgtgtggtgtgtgcacactcattccttctgctcttgggcacaggcagtgggtgtagaggtaaccagtagctttgagaagctacatgtagctcaccagtggttttctctaaggaatcacaaaagtaaactacccaaccacatgccacgtaatatttcagccattcagaggaaactgttttctctttatttgcttatatgttaatatggtttttaaattggtaacttttatatagtatggtaacagtatgttaatacacacatacatacgcacacatgctttgggtccttccataatacttttatatttgtaaatcaatgttttggagcaatcccaagtttaagggaaatatttttgtaaatgtaatggttttgaaaatctgagcaatccttttgcttatacatttttaaagcatttgtgctttaaaattgttatgctggtgtttgaaacatgatactcctgtggtgcagatgagaagctataacagtgaatatgtggtttctcttacgtcatccaccttgacatgatgggtcagaaacaaatggaaatccagagcaagtcctccagggttgcaccaggtttacctaaagcttgttgccttttcttgtgctgtttatgcgtgtagagcactcaagaaagttctgaaactgctttgtatctgctttgtactgttggtgccttcttggtattgtaccccaaaattctgcatagattatttagtataatggtaagttaaaaaatgttaaaggaagattttattaagaatctgaatgtttattcattatattgttacaatttaacattaacatttatttgtggtatttgtgatttggttaatctgtataaaaattgtaagtagaaaggtttatatttcatcttaattcttttgatgttgtaaacgtactttttaaaagatggattatttgaatgtttatggcacctgacttgtaaaaaaaaaaaactacaaaaaaatccttagaatcattaaattgtgtccctgtattaccaaaataacacagcaccgtgcatgtatagtttaattgcagtttcatctgtgaaaacgtgaaattgtctagtccttcgttatgttccccagatgtcttccagatttgctctgcatgtggtaacttgtgttagggctgtgagctgttcctcgagttgaatggggatgtcagtgctcctagggttctccaggtggttcttcagaccttcacctgtgggggggggggtaggcggtgcccacgcccatctcctcatcctcctgaacttctgcaaccccactgctgggcagacatcctgggcaaccccttttttcagagcaagaagtcataaagataggatttcttggacatttggttcttatcaatattgggcattatgtaatgacttatttacaaaacaaagatactggaaaatgttttggatgtggtgttatggaaagagcacaggccttggacccatccagctgggttcagaactaccccctgcttataactgcggctggctgtgggccagtcattctgcgtctctgctttcttcctctgcttcagactgtcagctgtaaagtggaagcaatattacttgccttgtatatggtaaagattataaaaatacatttcaactgttcagcatagtacttcaaagcaagtactcagtaaatagcaagtcttttt

SEQ ID NO: 11146 - DNA, 173 bp, Homo sapiens
atttgtcaggtacctggagtttaatacagtgagctctagcaagggaggcgctgccttttgtttctagaatattatgttcctcaaggtccattattttgtattcttttccaagctccttattggaaggtatttttttaaatttagaattaaaaattatttagaaagttacatat

SEQ ID NO: 11147 - DNA, 3672 bp, Homo sapiens
gtggtttccaggcccctgccctccccttcctcccatccttgtccttctctccctcagaagcctcaggacccaacaggtggcaggcagtggacagggtgcccgccccacagtgctttccccagcaccccagagccagtcgggacaccccccgcagcccgtcctggtggctgtggaactgcactgggtggcgggcagatggtggaaggcagcttaggagacctcaccaaagagaagatggaccggctcttgctcccagctcctattaggcccggggtgggaccagaggtcataggtgcccaacggcagccaaaccaaagacactggtgtgcatggggcagcatggttgtgcacgtgggaccctggggcggacccaggagccaaactcttgaagcaccccctgggtcaggcccagcagcggagtggccagccccagtttcccattgctcctctctgcggccagggccaggtgggttcatatttacagatatgcccagccagtcctggtcggccacaccagtgtcccaaagaggagagcgcagcagagccaggggtctgttctgtagcagccacccccctgcccccactccagggcagccatgatgtgcttgggcccaccagggccttccgggctgctctcttccctgagcccggaaccggcgacgcacatgtgtcttttgttggtgtgtttgtttttttccagggaggtctaattccgaagcagtattccaggttttctctttgttttatcagtgccaagatgacctgttgtgtcatataatttaagcagagcttagcatttattttattctttagaaaacttaagtatttacttttttaaagctatttttcaaggaacctttttttgcagtattattgaatttattttctaaatcaggattgaaacaggaacttttccaggtggtgttaataagccattcaagtgccttacacagctttgaagaaactaggactgcagtgggctcggataggcccattgaggtttttagaaaagcaggatttgttttgttagggaggcatgattttggtgagatctttctggaagagttttccgcctctttgtgatgctgaacacccccaaggttctcccctccccccgctgcccaggtgactggcaggagctgcgactgccacgtagtggtgcctgggcccgacagcggggctctgggcatcccgggtgaccttggcccatctgcctgcattcccacccccttgggcctggctggatcccaggcagagggaccttgctgctgtgtgattggaacattcccaaatatcttgtgaatttgtaatcaaattggtctcattgggaaagactcttaattaagaggctcaggcaagcacagaggcagcccgtgggtctctgtctcagtctggaggcagcagggatgctgctgggagtccatggcacaggccacagcccctcaccttgccgcggtggctggcagcacgcctgccttgctctgccccatgccctgaacaggcatgagagctccacgtcccctagtgcaccctgagagggggctcacaagtgaccgatcctgggtgcctcagggagctcactgagggcgtgcaaagttgaaagtggcaaggctgggggagggtgtcgggtagagggaagagggcagggggctaggggaggactcagaggccatctgcagggccaagccacaggaagggctgagctggaggtgggcagggctgctccaggcaggtcagagcagtgcagggggaggagaggagaaagggaggaagctgggctgtgtggtccccatgaaggcattcagagtccacctgcagacagcgagagccccaggaaggtttgcacagctgtgccccaagcaccttggcctcctctcagctcgccgaggaggcacgctagagccgccttcccggtgggagccctctgtcccacagggagcggggagccagctttgctggggccctacctgcatgcccagccttacccctcattctcacagcacagatgaggttgagaccatgcagtcaatgcattgcttaaggtctcttatttacaaaaaaaaaccttaaacatagtcgctgtcattcagacattcagagaatggttggccacaaacaatgaccaagtattgcttggcttaacttgaaggcctgctgtctccttctgggggtcagggacgcagctccaccctcaccactagcccaccctgcccgtgggcataaccttgacgaagagagagaatgattggcatctgcttttctcttttctttgctaataattctgttcctggctgccgagagtgaagtttcaccatgtggaggtttggctcctatcacctggtggtctgattcataccctagcctgaggctccactggaagatctcgcagcctcagtgtatgggaaaccctttccccaggcttgtcccagcactgccgctccccacccctgagccaggaccccagaggatggccatgccccgtgcctggcagaggtctggtgccagcactgggagctgctccgcccttgccttggggccgagggagccctcgtccacccctgcacagcagctgggcacagaggagcgctcttccatcttgaccaggactgcaccaagaagcaccaggtgtcttcagcctccaacctccggggcgaccttctcttccagccacagtcccatgagggcccctagccagggacactggtctgtaaattgtaatcctttctccagcccagctctccacttgttccttgtgtgagctgagcaggcagtgcacctctgagtgtcccttttgtaaggcccaggggttgcactgagtctgcagaggccgcgacctcctagaacgctgtgggtgcaggtgagccggcgtgtcctggggagatgctgccagcacacaggggccctcctgctgccagcaggttggggtggttaagtcttattagtgtctattcttaaaattaagtgggctggagaagaatggagctccacatgccagcaccgtatatggaatacaaaagctggggaagcagggcctgccttacaggtgtggctgactctgagcccaggcctgcaggggtggagggcagtccctcagaatcccagaggcagtcccagcctcagaacccaggataggaaatgggtgtgtttagtggggaaagggacggggtgcagacggcagggccagtatggggccccctccctctcctctcctctcctatggtgagcccagcgtgggcaccgggccgtctcagccgtgttcccagggctgggaggacagctctggcccttcttaggcctagcctcgtcccaagctaaatgtaagccagttgggctgtgttaaaggaagcagtgtttttggttcgattctgcctctgtagctcaaggggggcagcccccagagtcctgtgcattctgccaaggctccatagctttgccaaatgcacggagctctgccattccggtgcagtgcaggccttgcgaagggtttatctgcgttcgtctcggtgggcttctcctgcatgggagttgtgttcctgtgcaagggggagctttgctccaggacaggatgactgtcttccctattcttagggacaagtcccaagatgccagaaaggcagtctcccaaggacccaccatgcagaagtgtcaataaaccacaagttctgaactctg

SEQ ID NO: 11148 - DNA, 82 bp, Homo sapiens
tgaccctgtcctccctcacccaggctgcagtgccatgcagacacctcatggcacttcaaactattaaaatgcattttatctt

SEQ ID NO: 11149 - DNA, 3318 bp, Homo sapiens
ttctagtttcagtaaatctaaagcaagtatttcaaaccaaattaaaaaacctcataaaacaaaaaatacaaaccatacattattcagtagcaccaaaaatagtgaaactagtggattatatatgactttttaaacaagattcaggatatatattatttgatctgaattttgaggtattattttaaaacatctggttttcatgttaactgtatctggcttaacacataaaaggtgtttgtgtgtgtgtgtgtgagagagaaaggtattaatttatttttttaattttaattttttttttttttactttagagacagggtctcactgttacccaggctggagtgcagtggcgtgatcctagctcactgcaaccttgaacttccaggctcaagcattcctccgcctcagcctttggagagtagctaggactacaggcgcagccaccacacccagctagttttttattttaattttttgtagcgatggaatcttgttatgtcgcccagggtggtctcgaactcctgaccttaggggagcctcctgcctcagcctccccaagtgctgggttgtgtgagtcactgcccctggcacctatttattgttttggtatttcatgttactcctaagcttgaaagctcttttttctatatacagaattcatagaatttttgaaatacttagttttctttacagctttttccatgcattcagcatttcatggttaactctagtcagactggaatggctttgttatgccctggcccacttgctgccgaattcccagaagtgcctctgctgtgctggcataaaataacctgaaaagattctgaaaagccaggatgtggaattgaaagagaagctgctgcgtgagcagagaccaagaaggcggaggttagttgagggagagcagtggttctttgttctagttgaaggataggcacacattcattctagtcttggggccaggtcaaaaggaacactgcttcagagtatctttacctacctgaaaacatccaaggaagccaaaccattcaaagtaaaatggttttgtttggtgaagggcccctgcagacatcaaacagccgtcatgtatcattggtttgaggtgaaatagcaataaaattaatagaatggtgcctggtactagctgacttcctgttctgtgatctaaaggtgaatttgattcattccctctcctctcccttctggctagccgttagtggagaatgaactggccatattctcagccacagctgtaaagcaagtttcccaaggggaagaagccctaatatctataatttgaactgtactggacccatagttttaactgaaaagggccaaacaagtggtgtctgtccagttcctggactgggctaaatttagttttcccactgttaagctggaatgaggactgtcccaacaacagtaggtacagtggacaaaaatagcccagggtgactgactgaatttaaacccataatggctttatatttttctgtgcatatatatcttaccctaattgaacatgtgaagcttgcaactttatgtcttgctttggacatgaatgtattacagcttgcagctattctgttaaatgtatagtttcccagttttttgacactaatgctgtttgggtcttacctgacacacaccagtgtgcaagaaatgtctctctaattcaataagttttaagacttagagttaatgtccttcatctgatctatcctatctaatctgtactatgggtgaatctttttcccttgctctccccaggggctgtttcacagtattctggagtaccttttgagtattggttcctgaacatcagcagtcttggctgcctctgtggactcccggagttgtctccctgcttgtgttctggtgccatcctttgttcctccacccctgaccaaggtgcccagcagcctgtcttcaccagtcaaggaatccgccatcttggctgtagacataggtctggagaaatctctccctttttccttgatttctttttaaaggtaccttatctctccccactcctttcttccctcctcaatctagttaaatttcctaagctttcacaaaaatccgggaagagataattaagagcttagcatccctcttagagtagaaggcagtacagataacaaagaagttgtgagtatattatctacattttagaaaattttctgactctagatccatagattctgttgtatttatttgccggacactcatttgattgatttgcaccttgaacactatactaggtcttttcagttacgttgcttgggttaagacactttgctaaaattacagcctgaatcctttctttagttgaagaaagggtatgtgtgtgcaagtgggtgtgtgtgtgccagtttttcttgtctcaggtagatactcccactgtgtataaatagatctacagacttttcatacttacctcccgtattctgtttctgtggtaaaaatatgaagtgttttagttgtatgttgagtgattggttggtattatcaacactgttgtttgcagtttcattaaagcatgctcttaaggagtacatatggtcattaattgccaactgtagattccagtgatctggcccctgcctacctccttcctctctttttcattctctgtcatgcttctccactgttttccccaatgacgcactattttgacacactggccttgctattccttaagcaaatcacattcttcccaatccaaagactttgcacatgctgttgtctttcttagaatgcccttcccctaggcctgcatggcttgctacctcacttaattgtttgacacttcctttggttcattgagcttcaaggctcttaaaatgccactgacaatgagatctccctttaaaaaaaaaaaaaaacttctacttttcctcttaaaggcactttactctctccccactcttttcttcctcttcaaagtatttaaatttcctaggttttcatgaaaaagctggaaagcgatcagcatcaagggctttgcttctgtcttagaattgagctagcttgagtcaatttctgtgcctgcaaccaaatgaaaattaatatagtgagttctttcaggagctttctctgtttttctattgatacctctatatatttttaaggcaatgtcactttgttttgtttacaaatatattgaatatgtcaagattactattttgttattgccctttgtgaatttccttgtctattttgctcgcttgttctttcaggtgaaatttattattttattaatgttgccaaaaattataagtaaaatatcaattatagtaataaaatgttttgtg

SEQ ID NO: 11150 - DNA, 266 bp, Homo sapiens
aaatatgttcgactgacttccaggagttccgaaaggcagaagtgaggctaggccatatgtgcattgtggctgtagatgctagcaagcaatgtcatcaactgtcaggttgtttttcacagtgacatctcatcagctccctattgtcaagaagtagctccaaagtctttgagccctttcccagtcaaatgctcccaacaaggcatcccttattctgacctcagaggtttttcttgtttatgaactttaaataaatggaatcacacaaa

SEQ ID NO: 11151 - DNA, 365 bp, Homo sapiens
ctgggtgcacatatcaaatgcttcattctgcatacttggacactaaagccaggatgtgcatgcatcttgaagcaacaaagcagccacagtttcagacaaatgttcagtgtgagtgaggaaaacatgttcagtgaggaaaaaacattcagacaaatgttcagtgaggaaaaaaaggggaagttggggataggcagatgttgacttgaggagttaatgtgatctttggggagatacatcttatagagttagaaatagaatctgaatttctaaagggagattctggcttgggaagtacatgtaggagttaatccctgtgtagactgttgtaaagaaactgttgaaaataaagagaagcaatgtgaagc

SEQ ID NO: 11152 - DNA, 47 bp, Homo sapiens
gcccttcattcacctctgtgagtgaataaatgtgctaagtctcttta

SEQ ID NO: 11153 - DNA, 1119 bp, Homo sapiens
gtggggaagctgaggcaggaagccctttagtcacttgccgaaggccacgctgttacccatgggaccggttttgggcggccgaagagcactcatggggccggattcacgccccaggcccgttccctcctgctctctggtgctcctcacgccattggccccactgcctctcactgcccgtgagtccctgtgcccgtgtcctccttcttgaacccctcagccctcagttaaccctcagaaagctggctcggagaagtccttgtgtggtatctgggaggcagagtttgccgtgagccgagattgtgccactgcacgcactccagcctgggcgacagagcgagaccccatctcaaaaaaaaaaaaaaaaaggcctcacgggactagaagcgtcttaccctgacctcacacctgctggacatcaggctggggagagaatcggggaagagggcattttccaacaggactggaaggccagtcgtggtccttggtggtgagagctagccaggccgccggccttctccctggaagcctgcagggtcccctctgatccctgcacctctggggggtcacaccaactgcgggtgtttcctcaccacgctgggcgcttggtgagcacgttctgccttgagacctggcatttctttgataacatttcttctcgtttcctgctcattctggaactcctgtcagtcagatgttgggccttttggatagattctgtgagtccttctttctacctttgcttgtagataagattttccttgaatccaaacacacacactctctctgctttttaaaaaattagttttggggctggatgtagtggcttacacctgtagtcccaggcactttgggaggccgaggcaggcagatcacttgaggtcaggagttccagaccagcctggccaacatggtgaaaccccgtctctactaaaaatacaaaaagtagctgaatgtggtggtgtgcacctgtaatcccagctactcaggaggctgaggcaggagactggcttgaacccgggtggcagaggttgcagtgagccgaaatcacaccactgtactccagcctggtgacagagccagactgttttaaaataaataaaaataaaaaattggttttgg

SEQ ID NO: 11154 - DNA, 409 bp, Homo sapiens
ggagctccaagccaacaaggctacactggtgtgtctcatgaatgacttttatccgggaatcttgacggtgacctggaaggcagatggtacccccatcacccagggcgtggagatgaccacgccctccaaacagagcaacaacaagtacgcggccagcagctacctgagcctgacgcccgagcagtggaggtcccgcagaagctacagctgccaggtcatgcacgaagggagcaccgtggagaagacggtggcccctgcagaatgttcataggttcccagccccgaccccacccaaaggggcctggagctgcaggatcccaggggaagggtctctctctgcatcccaagccatccagcccttctccctgtacccagtaaaccctaaataaataccctctttgtcaaccag

SEQ ID NO: 11155 - DNA, 311 bp, Homo sapiens
agcccttctgtggagctgaccagggtgctgacccaaagggcaggccagcgcgtgctgcagggtccccagctttgcccctggaggtctcaatcctctctacattctgaggaaaactcttggtcccagcagagagaaaaagtccaaggctgcttcccacccaccgccagcactaggtttggcctgtaccatccaggacccagtgcttctgggcctggcatttctcctttggcaagagagtgagaagagacgtgactgtgctccacgagcagaaagtgccattcccacttgaaataaagagactgagtgcattt

SEQ ID NO: 11156 - DNA, 2214 bp, Homo sapiens
aaagaggagcccacacaaagcttgaaagcctgtgccagatggagcctttattccacgtcgcgtggtctccaagaccccacctacctccctgatgctgaatggaaaccttcccacctaagcgctcttgaacatcccactagcaggaaggccctgtgtggccctgggccaagcacgccagctctcagcaggttttctgcatggaagggaaggtggggtgatagggagggcagccagaaaagacagctggccttcagtttctccttcttgcatttgactcccaagcctacaggatttcattttgccctgtcttcacatttcccagaatctagaagaataaatgccaagagggagaaagttgaattaaacccaggaaaatatcagaagaactctttaaaacaggctgcagtctggcacttttagaagacagaaaccacactcacagtccaaagcagtagaagaaaaatgaattcaaaagtagatgtgtcagcagcaaagtagaattttctcactgcgttgggcattggtggggacaaccaaaacaggtctgcagagcaaaggcaggtctggagggtgggtcttgagattggggatgagggtggtgagcccctgggcgtggcctcttaaccctctccttagccctagggcagtttccctcagacagctctgttacaggaggatagagatttgatcctgttggccagaggatgtttgacacccagccgtgactcagcctggacaccggacatgactgccctccaggaataacccctccctgagacatagtgtccccaagaccacagtgtgccttggacatcagcagggcctgggtctggtctgttctggcaatgatgcagccctcctgccccagtgtcaggggacctgggaagctgggtggcttgttggaggaggctgtgttctaatcagaaggtctgggttcaagtcctagttccaccccctcctacctgggtgagcttgaacaagtcctgtaacttccccaggctccattcccccatccaagagttggggtaatgggaactggccacgtgcctctaagggttggtgccaggctgtcattcagaacacagccactgtgaaagtgctttggcaactgtgagcagtcatggtgactgaggacagagacccagagtgacccctgccccacccctgtgcatttccacggactggagagatgttcccgtctggtttctgagcagtgggacctctcattgaacagggctttctctccctccaccccttgcagcctgggctgtgtatgcctgcggatgcagtgtcccacacaaggacacttcctctaggatgccatcctgagcctcctgtagcagcagtgtcattctgcacttccacattctgtctgtcttccccgcctgccaactaggagttcacgtggggcttgtttaaacagtaccattgcttgtgtcccacctggaccagttcagtcagccccagtggtggcatgttttaaagctccccaggtgattataacttcctagtgtgcagccaggctgtgggccctgtgctgggcttttttttttgagatggagtgttgccctgttgccaggctggaatgcagtggcgtgatcttggcttactgcaagctctgcctcctgggttcaagcgattcccctgcttcagcctcctgagtagctgggactacaggtgcgtgccaccatgcctggctaattttttgtatttttagtacagacggggtttcaccatgttggccaggatggtctcgatctcttgacctcgtgatctgcccgccttgacctcccaaagtgccgggattacaggcatgagcctccacacctggcccatgctgggtttttgtgcatccctcgacagcttccaatgtcagcctgctggctttggctgagcagagcttgaaggccattctgtctcagtgccctcactccctgctccccgcacccggagcctcagggatgggctcaggctgatggtcagctgggcgcttggaaagtgtttggctggggccttggggatctctttagtcctggcttcccttgggctcctcagagctagtggggaaggaggcagtctaggctgttttgaagtttcctaaacatttatggctgggctaacatgaactcatcatggtaacactgggtatttcagctgatcagaagctcagcatggccattatgcctagttttgatgaataaacatgggaaagcc

SEQ ID NO: 11157 - DNA, 129 bp, Homo sapiens
gggtggggtgtgagatgggtgcctcccctctgcctcccatttctgcccctgaccttgggtcccttttaaactttctctgagccttgcttcccctctgtaaaatgggttaataatattcaacatgtcaac

SEQ ID NO: 11158 - DNA, 172 bp, Homo sapiens
agaggtcggtgcagactcgggggccagtcctgcacccacctctacccctcgccgacagccagaccacaacaccagattgtacccagatagctgggattggaagtgaggaggtttctcaccccacagataacccaagacacaaatgtgcaattaaaagtttattttagaccac

SEQ ID NO: 11159 - DNA, 2555 bp, Homo sapiens
gtgttgagagccctccctccctctccccaccctcagaaggatccccaccgatggggacctgtgctggcctgtgctcaacacgggcccctccccacagaaagctgctcctggatgcccctgcagaagaccccaattacctgcccctccctgaggaacagccaggaccccatctgccacccccgcagcagtgacccccacccagggccaggcctaagaggcttctggcagcttccatcctacccatgacccctacttggggcagaaaaaacccatcctaaaggctgggcccatgcaagggcccacctgaataaacagaatgagctgcagtctcttggcccacagcactggcttccccatctcacctggccacatccttctatgcctgccccgtcctcactcagtgtggcctctcagcccaactgcaggtggtaggataggggtgcccacagagggcaaagaaactgcccatggttgcctggcagagctttgagctcacaggttgccaggcagagcttttgagctcacaggtgacaggctcagggttctcatcctggccccaccagggccttgggcaagtcctgcccaccataggcctctgctacctgccagtcagcggggaagttcaccagatttcggctgctggggccaggacaggcgtctcctaggttgtgccaaaccagcctacagatgttcctgccagtggtgccttcaggctgatgccaatctagcctctcctgtctctcatcagccaccctgacaggtgggcgtatgcctcatttttcatctggtgatgccaaagccccatggattcaggtgcagaagagggccaggactaggtcttctgccctttctatgacctcagagcctaagttttcaccttagcagagttctgagactgggtgaggcagggacttctggaaggttctgttcctgccctttttagctgaggacgtgtgtgagccttatccgacccctgtggctcatttttctcttctgacctggcagctttccttgttgttctaagcctgtccatgttgtggtttatttctggatgctcagtggcacggggcctcctccaaagacaggttgtcattttcatggtaacaacactgttctctgttgagtctgccctccgtgttgtagccagaccttgtggagatggctttgcggcggtgtgagctggcggtcaggagtgagggcccagccttcccggcacctcccagccaggtggccctgcccgacctgtggggtgaggcagccaaggttccttccatccccccagttgtggagacacagggctgcctcaccctttcattgccgaggttcctacctcatggacagaacaaacacctcagcaatgaaacctgttcatgtctaagagcagctgggctgggaatcttcccctttgttcaaggccttccagtaaggcccagctgtccccttgctgtgcatggggctctggggagttccactctttgatggagggcagaggccctgagtgcaaactccctgggaagagtcccatgctaacatgtgctcaaaggagccctcctctcacatctcagcgaccaagaaccccaatccctaatcagagctctgcctctgccccacatggggccctaccccacttccagggagcacagcagcctctgaccctagccctgccctggcagcatgggacctgccaacagctgagggtggcagcagtctgtgctgggatctgtgcccggatctgtgcccattctcttcagtaaggctggagctgcgagccagtttgctgccctcccagatcctgtgtccattctgaagaatggggacacctccctattacagatgagaacagaggggacatgaactccttggaggcagggctgggaagggaccctgggctgtgtctcctccctgtaccgtgtcaactccaagagctggcaccaggccgggagggctattcccatattcctcacagctggcttgtaaggcaggagctggcccaggccacagcacctgctggggtgggaaagggccccagctgacctggctatgggtgccactggagctagaacagccctcctgcacccaggctggcgacagcccagcagtgcccacacaggactgggccctccgcaggggacttcagagcagcaaggccccagctggcagtagcctgaccatctggacacagcagagccagggcggcccagggacggcaggagagctcgcggcaccttcctgaggccaagcaaggggagcagggttagggctgttcctgaaaggcagagagcctcttgccctgagcctcacagctactcttctcagctctctgggtctggaaggagaacaggctgaggggagctgagaggagctgaggtgctacccggagccccattcacccccacctgcccacttgggaatctgaggcagaggagggtgaggcctgtgtgccaaccttgttcacataccaccttcgtccccccaggccccggccccactcctggctctcattatttttatgttaaaactttgaagaaattgaacatgacctgttgaagaaattg

SEQ ID NO: 11160 - DNA, 186 bp, Homo sapiens
ttgggcacggagggatccagggcatctgtgaactggctgcttcttccagagagatctcttggcagagtgagggcctggagataaccagctttggattatcccgcatgcaacattcctgtgatcacataatcctcttcttcatcctcatatgaaataaatgaagagagcttcctcattcaaacatga

SEQ ID NO: 11161 - DNA, 282 bp, Homo sapiens
gctgggaaacctcacccttgcaccgtcctcagcagtccacaaagcattttcatttctaatggcccatgggagccaggcccagaaagcaggaatggcttgcctaagacttgcccaagtcccagagcacctcacctcccgaagccaccatccccaccctgtcttccacagccgcctgaaagccacaatgagaatgatgcacactgaggccttgtgtcctttaatcactgcatttcattttgattttggataataaacctgggctcagcctgagcctctgcttct

SEQ ID NO: 11162 - DNA, 316 bp, Homo sapiens
gacactgctctgcccagagctgaagtctggccccaccatgagtcctgtgtccaggccggacatggctgggggaccaactactctggcaggatctggacccctggcaggggagtccagctgagagtggaagaggtggcggggaccagctgggcagatgagaggctgagcctcatccctaaccccctttcccagagcccctggtggtcctgaaccggcccctctatccctccgcaggcctcttgcctggggccactctcccaccctctcgatctgtatatcctccagtccaagattaaagaggcggactgtggcctga

SEQ ID NO: 11163 - DNA, 2564 bp, Homo sapiens
cagcaggagcctggtgcgcctaggccctcggaccccatccccaccccagccgggcccgctcaggatgccctggcccaggcttggggctgctggggttggaatgtggaactgcagcctcagcccatctggcagagtcccaggaactcggagactggcacagctgctttgtctgccagtgccgtgtgttgtcatgtcactcaccccaagcacctgctggctgctggaagcataccccaagaccccaagccttgactccagctgcgcccacaggaagtccagtcccgacagtgcccttgttgcctttgagccagatccatggcaatggtctccccacagaccgcaggactgagcctggagagagaagttgcttgacggatgccacttgtcaggacagtatgtgagtgtctggagacagcatagctgaccccaatcccccagggctgaggacccctccaggcccctctctcctggaagtgctgcatatgcccctgtgcccagtggttgatgataccaccaccacctgcctacccatgggcccaagtttctgtggctcattacagggcatctgacccctgccacccagcatagacacacctcacagctgccctgccatgcagagccctggccgctggagactcttaaagcccccacagccctccaggtcctccagctctgtcagatggagggctctcgggcctagatcccactggtaggcctcgtggctggcagcagtgctctgggaataaacagctgccctagccccagagggatccctgcacccaggaggcctcctgacaccagccaaaatcctgacagcagggtctgccctcttgagtgtggggagcccctagtcctttaaggttggctgctaaggcctgtgctccaaagcaacgggctggggcagcctgcagctgcccacccaacctggtcttcacaccagattgcacaggatactgggtcttgtctatcttgatggagaagaggggttcctgcccaggatcttacaacacagcaagtagcatagagctctttccttcctcttttttggggaggttggggtcaggggttgtttctttgagatttaagttttcatttttgaggggtaatcaccttcaagtaaaacagtaatagcaagagtgaaggtactttggaaccactaacacctctgcacagggcagttagccagctcaagttctttttcagagaaagggacttggccagtggtttaagtacctgccccttcacctctcagacgaggcagctgacgaggcagctggcccagtcttgggagtctgctcaggacagtggtggagctgggtcttgaaccccagtctgcacctaaaaaactaaaggaaatggatttttttttttttttttgagacggagactcactctgttgcccagactggagtgcagtggcacgatcttggcttactacaacctccgcctcctgggttcaagcgatcctcctgcctcagccccccactagctgggactacaggcacatgccaccatgcccggctaatttttttgtatttttagtagagaccaggcttcgccatgttggccaggctggtctcgaacccctgagctcaggtgatccacctgcctcggcctcccaaagtgggaaatgggtcattttcaaaggggcaacagtgataccatccctgcactcctgggtcctgctcttccaatgcccaaggcatggcatggtggcagctgtgcccccgcccattgctttggagcacagatgactctgggggcagaggtgggctctgtttaggagggcagtgagaccacccagccaaattgcttctcaaccctagacaaagcctttggccaagagggaggtgctgttagttgggcagcccttctgggtttcagagaccggtgttggctctagactggtctcatctccattgccttaatgccaggtggcccaggagtacccatgcacagcagctgtggggtgtgggcatcttcaggtggtgttctggtaaaattgttagaatagctgtatgaaggaaaccagtgggaggaaatgaagttttcaggatggtgggatgtgatttagacagtgcacatgctgttagggctgtcactagggagtggccttcatggagggtggtaacagcacctcagtccagccaaaatgtttagaaacactcagtctctggtcccagaggatggcttctcagggcatgccacaagttaaaggtcaccttcctgaaagatgaatgagaaagctgcccattctcaagactcatctgcctagggagggtcacagaggcaggatgtaagacacactgtgttgcattcttgcacaagtcatgaaaatggagccagagagcctggacatcagggacttttgcccacagcacatgacaccgacagctgcccagcctgttcacatgctggggaccagcacagcacctgaagccatgtgggacagttgggctttgttcattctagccacggggatgaaagggatcttttgcattgcagagattttatatatattttgtttgtaatgagccattctcaataaacattattctcactgc

SEQ ID NO: 11164 - DNA, 263 bp, Homo sapiens
cccaccacccacctggctcattgctactgacttgtgatgctctcaagcacatgatagtgggcgatgaaggtcaaggaggactcacaggcccccagaaatccagtgtaaatgctcagcctgagattaaggggacagaagaatggactcataggtggccaggtggccagccctggctagaggctcagccttccctcagtgggaggggccccagcacccacagtgtggaccccgcaataaagagtgacacccgcctctgcttttct

SEQ ID NO: 11165 - DNA, 438 bp, Homo sapiens
cctgcagaagaagacctgatgtgctaatgaaaccacaacgtgtaagcctgtcttccttttgaagcaggatgtctgaaatattttcctaggtccatagcattaaattctcatcgtttttgattggacacaggagagattcagagtgatatgttctactctcaatactaccacagactgatttttccagagaggagaactgacagggtttggcttgcagtttccctttcaaatatgtgacagagatctcacagctgaacgtgactgaacattttccaccccaagcagggccactctaagaattgaaaagatggggcattcgtcacagagagagtacatctgtgaacaagtaaactctacttggaaaactacgtttactttatttttgaaacttttttttgttaaaggacaggaaaggaagacataaaagtaacaacactg

SEQ ID NO: 11166 - DNA, 92 bp, Homo sapiens
aaatctcctgggagtagcacaaagggcacactccagagttttatgaaatcatcatgtagccaacttcaaatcccatctctgctccttcttgc

SEQ ID NO: 11167 - DNA, 337 bp, Homo sapiens
gtgacatgaagacctgcatcatgcccaaggccttcttggtcttcaccagtagagccgccatccacaggatctccctcgagaccaacaacaacgatgtggccatcctgctctcggcgtcaaggaggcctcggccctggactttgatgtgtccagcaaccacatctactggacagacatcagcctgaaggtagcgtgggcccgaacatgcacacgtgcagcctatatgggaaaaccttccctctgtacctgcctcaaaggtttcagacatttttcttaaagcactataatatttattgtaacacaattcaagctaattaaatatgagcaagcctatttc

SEQ ID NO: 11168 - DNA, 1752 bp, Homo sapiens
actgcacccaggaggtgactgggaaggagaaaaccagcaaaggaagctctgccttttataattgaaaaggcccctctattttatttttcttgaaaacattcccttttttaggaaccaaatgatatttgagtttttgttattccttttgcagattgggatgtgttttgggggcaggggttagttcttcaggtcggcagacccagagcacttgataaagaactgtatttaatcggtagtgttggggccgggacgggcttggctccctctctgccatactgagcctgaggtatttcatatctcctgctgttccatcccagcttgaattggtgccacaagcttccaagttggcattttttctagaacctgatcgtccactagcccagagtgtgtgtgttcaacccccacaccaggtggtggtaggcggtgtgactgcacagcgaggtgccggatctgtgagcaggccgactccactcccacgccgcaggtaggtttctccagtgcgctcttgctgggaggtccggatcgttcctgcagggaagcggcagcacacggagaccacttggttgaattctgttggaactctactcaaatctaggggcgtcttctttggacccacaatgggggcaagccttaataatatggaagggagtttgggctttagagatccctttataaaagctctgggggctgagccctgagaattcagtgacaacaggaccaacctgcgctgcctttgactacaagtgggccgtgcagctggttcctctcgagcgagtgtccctaaataggagtttacaagatgtctgggggtaaaagcactgtgcttttcagtggtggctgcgtgaaagggagcgacactcagctgtgtgttcctgggcttgtgtggtacttagaacctcagttctattacgttatagtcagacatttttttgacagtatgagacagactgcaggatgaaaatatttgtcaaaatcttaactgaatgtttactggaagtacttgagattccatttgagagttgtattgttaataatttcatgtcagtgaactgatatctgatgtttatgatatggtgtctttttcttgaaacaagcttccaagggctagaaataaaatagccaaaaaatgctggagttctgagtaattaaatggcagcatttttttgtgacaaaggtaagggttaagacagtgtgtgtgtgtgtgtgtgtgtgtgtgtgtgtgtgtgtgcgcgcgcgcgcgcgcgcgtaacgtgggcgcatccctcttttccttccctgggttcagtgtggctgggtaaggaccgtctgtttgtagggctgccaggctgcagcctgctgctccagggagcaccagctgcagctgatccaatacaccaagcctgtgtctccctcttctatcacctctctccaggatctctgctgtctcttggatcccatctgcctagatggaagaggatcctatccgaagctaggataaatgttgtcttactcctctgctatgttctcccagaaaaaattgattacaagttctctgctgtggttgctgcagctccaggaagtccccgcaatgtctcacgttgtctttgaccagtggtccccagtaccaggccagcgaagacaactttataatgtcatttgtgttgtgaaaattcttccactgacccaaaatggaaccgtacaaagcctatccgtgtatatggaaaagtctcatgcacctggattaactcagaaaaagtaaagtcctgaaacttc

SEQ ID NO: 11169 - DNA, 82 bp, Homo sapiens
actgtggcaggtccagaaccagtcagagacttgcccctaagagggatgtactgtaaataaacagtatttttagatcaccttc

SEQ ID NO: 11170 - DNA, 520 bp, Homo sapiens
atctccgcaaatgacttcattgccaagaagagaagaaaatgcatttaagtggaaatcggacctctaatccaagcatattgcttgctattaatcgccaaaacaggactgctgatgaggaatgtatttgcatatgtttgcaaaagctgaatcattgaaaacgtaccttgaaactctctatctctggacactccagggtagagaatgaagggtatggaagtagtccggcttttgaaacttaggtattttatatttttcccctcaagaacttttttttaagagacagatttgccatcctccttaatttgcaggactgccttggtggctttgtttgctgggacaaggcccacaacctgtgcctctcctattgacccttactttgaattcaaagaatctatttaagagtttaatatatgaggctttctttgattcctcctcagttctacctagtttcacagaggaaaaaaatactctttgaataaagtgaacagaggctcatttgtttgtgccttactttactgaa

SEQ ID NO: 11171 - DNA, 92 bp, Homo sapiens
gtccacacctcactctgctaccttgccccaacccttcttcatgttcaattatttcccccatttttcccaggcaaataaaattccctaaagcc

SEQ ID NO: 11172 - DNA, 2638 bp, Homo sapiens
atgacaagaaagatcccctcctctaccaggcccttcctctccccctgtctgtttccttccccctcaaccttaccccacccctctgttaatttgaaagggccactattgctgagtggatgagttttttttttttctctaggttggtacctgcttagtggcatatggaccggaaagggttaatttaaagggggggaacctcaaaagtttttttaaaaaagaaacttgtctgccacagtatgttaccagtgttaacccttctgcagttagcaaacttttgcttaagcctttttcctctagatactccccatgtttcggtaatcttggcatacattttttagatgacctctttccttgttttgttttcatgctgctgtatgtccaagtattgttatttcataataagacaagagttgctttcttttttattctttttccttttcttaccccctccccttttattttctttttgctttgttcactgcttattaaaatggaaatcctggagaatagtagttctggaatattgccgggtgaaagtccaattgtcatcacaatgttatatattgacaccccagtgtcatcagtcaggcaggagccaaacaatgaatgcccctcttaggtattccgcctgggattttgttttgtctgttccctaagaaaatatattttcattcctgcaaacacagtgctcagccttcagttcccttccacttgagttctctcttctcctgctggaagccgcccctctctgcgatggacgtgaggacgtgtccagctctgctctgtgggaaggagttggaatgttcgacagcagtgttttctctccttttctgggcctcctcgcaaatgcccaggccctgcattttcacgctgtgctaagcagcctttggtctgcatgggggatggtgtgctcccagcctgcagtctttggagcaaggctgctgcccgtgccttgggtgctggagttggaggaggctgttctcagccctttcccttttctgaaagctgttcctggccgggcatcccagggaagaaggaggggactgcgtgtatctcctccacctctcccattccatccccagtccagcctgggcaaccccacccctgggagggatgaggcaccctcttgctcagcctgctcagccttctctgagcctttgcagggatctgcagactcctgagggctagaggacagagaaagagaatagaatgaaatgactttgattcctgcgccttttagttttgaactctggaattcctctgccccctccccaacatttttttggaatctcaccctgttgcaaaactagagccatgtcccaagcatctcacaaaggaataactgctctgagcagagatgagtggtggttggcaggggcaggcaactttgggtgctgctgatgcctgcaaaagccatttatggcttgtggtggggggcacatagattccccggtgggttagacaggaagtaactgatatcacttcacccaaatatataaccgtgatggttatctatttaatttcagtttttgttaacgagcgtgtcttactaaaacgctccactttgagctcccccaccccctccaggtcctcagagtttgcagatctgggctttctaaagcaagtgacctgaaggctctgggctcaccatacaacacccacgttgtttatttcaaagaacttttcagcgaagggagaggagctttcagaaaaacctcactctttcccctcccttctcccctctttccttctgccggtccttttggctggggtctgagtctgcggttctcgcctgggcagtcttgacgaggagcaaaccccgccttcagagggcagacaaagcaggtggcatgaattgatcagcgagaaaggtgtgagccgaggcagttcctgcgttctgctacaaaaggaatggaaagggaagggaatttccccccaccatgggctgtgggagagttgaccgtattctgggcaagactccatgacccctctgattctgcagtgtacagctgtttgagagcctcatcattttacttttgaaacaggaatgatttctccttaattgcttaaggccggggagcaaagtgtcttaacttctgtctttgactttcccagcgttgagtcatcaacactttgccaattagctcatggtcctggcaacctcagaaacccctgaagttttaaaaactttctcgctccccacgaccccagaatgaaacagctttaaaaatagccttaagcaaaaggatgttatttcattaaatttggtttaatggaaagaataaaagtaaatgaaaaacacaccctacacactagactccgaacactggtaatcagtactgcatagcaaactctttgggaaagaaaacgaaaatgttattgcacatgtaaaatatgaaaacttaactctgctgtgtgttaggcaatcctgtaatcttttttgactcttaaaagaaattcatttctgaaatgcttggttggaagactgtgacaatagctcatgaaattgagtgttatttttttctttcttttttaaaaaaatatgtaaagtgcagtcttctgtattcctgcatattgtatatacctgtatatgttttcctgagcagttaaataacaataaatatgacgttaatggtga

SEQ ID NO: 11173 - DNA, 1994 bp, Homo sapiens
ttacgtaatcaaggtcaagtgaggggaacaagcgcagccagtgatgagtgaagaagaatctgaccagtatcttgcagtgttgacgtttcccagatgtgtgcttgtgatgatacacacacatgcacaggttctcaaccacgtgtgtatatatgtatgtgtgcatatgtctgtagctgtatataaagcgcatgtagagctacagatccagatacacacacttgtgtatatatgtacatacagacatactgaagggattagtacaatttctccaaagtactgtacctatcttcagcaagaatgcaaaagaaaatattttcaatatatatacctggaacagattttaataattatcagagtaataccattaatggacaaattgactgcaatgtaatactagctggtatgtttcataaatgtcaagctgtggaccaacatatatagccttttattatttttctcttcttttaagtcagtctgttataaatttttttttagtcccataagcagtagactcccacagaaaatttcttcaaaattttttggtgttccaatgaatctgggatgtaaactctgaatgtatttataactatttatttctggatggtcattatcttgtagccaaatttgacaatataaagtaaggagcaaagttacaggccagtttttacttgtttgccctgagggaaaaatccttttaaaaaaaatttctggtttttattggatttttgtattttaaatttcaaatatttttctacatcaaacctagcaaaaatggagatgacggtttctgatttataataaatactagacagttttcaggctcctgttagacaaacacattgatgaagaaattagtcttaataggattgtaggctgtgtagaaaagttggaaatatagcacttcatggagtcttgttttgaagatgacagttttctgtaactacagcttggaaactatgcaaatggtctagattcctcagagctcacatgataggatatagttagtgatgacattttgctcttcttgtgggaacacacacttcaaggaggagatagtgactttgagataggaacagtttaagatgcagtgtgagtctggcctgcgtgcggtgaggaggccccgccaagagactggtggacatctgactgtgggatgtgctctcaagtaggacgtcatcaggacagattctgaataggcatcatgagagtgctggtcagaaacggctgccactttttttaatttaattttattttttatttaaaggaaggaacaatagctaggtaagatttttatcagctttctctgtctgaatccagtttttcctctgtcagtcctggaagcttgaatagaattatattgttgaagccttcaggtcacaaactgtcttttgtaacctcctgtccctcctaaaacacgccaacccctgcagtcaaatcacattagtaatctgatttgctgacagtcctgccctgcctgctcctcgttttcccacatgtcctgcatccctcccccactggagtgatttcagtgaatcagacaaggaaggatgtgtaggatcactactgcattgcaataccctgttatcctcagcaacaaaacccacatttcatacatcctttgtgtactcaggataaagactgatgtttactctctgggcactgttgtaagataggttttgtcagagcataatcattgtctgcaaagtgtttggtgcgaggaagattattgctaattttgtgaaataaagagtctagccctctccttttaatgaacttaactctcgctggcatctgtagtatcattgggagcttaggcgcacatggaaatgagagcccggcgcatggattttaatgtttttctaacaactgtggagatttgagggaatgtgtggtgaatgtaaaatacctagtttacttgccagtctcttgtgtaaattacagtaaaacaaagtaaatgaaatttaaacaaaaaataaatttgatcacaaaatgcc

SEQ ID NO: 11174 - DNA, 154 bp, Homo sapiens
actccgtggtttgaacacgaaagaaatgtaccttctttcactctgtcatctttcttttctttgagtctgtttttttatagtttgtattttaattatgggaataattgctttttcacagtcactgatgtacaattaaaaacctgatggaacctgg

SEQ ID NO: 11175 - DNA, 985 bp, Homo sapiens
ttcgttttgaccacatatataccaagcccctagtcttagagataccctctgagacagagagccaagctaatgtggtagtgaaaatcgaggaagcacctctcagcccctcagagaatgatcaccctgaattcattgtctcagtgaaggaagaacctgtagaagatgacctcgttccggagctgggtatctcaaatctgctttcatccagccactgcccaaagccatcttcctgcctactggatgcttacagtgactgtggatacgggggttccctttccccattcagtgacatgtcctctctgcttggtgtaaaccattcttgggaggacacttttgccaatgaactctttccccagctgattagtgtctaaggaatgatccaatactgttgcccttttccttgactattacactgcctggaggatagcagagaagcctgtctgtacttcattcaaaaagccaaaatagagagtatacagtcctagagaattcctctatttgttcagatctcatagatgacccccaggtattgtcttttgacatccagcagtccaaggtattgagacatattactggaagtaagaaatattactataattgagaactacagcttttaagattgtacttttatcttaaaagggtggtagttttccctaaaatacttattatgtaagggtcattagacaaatgtcttgaagtagacatggaatttatgaatggttctttatcatttctcttccccctttttggcatcctggcttgcctccagttttaggtcctttagtttgcttctgtaagcaacgggaacacctgctgagggggctctttccctcatgtatacttcaagtaagatcaagaatcttttgtgaaattatagaaatttactatgtaaatgcttgatggaattttttcctgctagtgtagcttctgaaaggtgctttctccatttatttaaaactacccatgcaattaaaaggtacaatgc

SEQ ID NO: 11176 - DNA, 70 bp, Homo sapiens
gaacaagaactcatgggattagagtattctctgctagagatctgaaaaataaacacaactttgcaccttc

SEQ ID NO: 11177 - DNA, 205 bp, Homo sapiens
cccaggcagagagtggggcacaggcaggcccttgggtgctaagggctgggctgcatgtgggtagcccgagctcctactctgtctaaagagggccacagtggggagcaggggcacctctggaggcaggagaggccccccagcatgctgccctagtacgtgtttagaataaaaaccagtttgtttttcaacctggacctccttggag

SEQ ID NO: 11178 - DNA, 925 bp, Homo sapiens
gggcccggcagttctggcggtggggagctaggacaggtctggcagggcctttgcctgaggagagtgtgtagggtctcccaacgtcgtgggccgggtcttaggccttcgcccgtgggaaggtcttaagctgtatgtgctctttggcccacatgggcctggggtttcgttggggcggcggggggggcggtgtctctggccgtaggaagggaatgcgcctgcgtgtgtatacccactgggggaattctccggccgtggggtccccgcgtctctcatctccattcggcccccaggccggcgggcgcgcccgaagcgcccatcctcgtggtaggcaacaagcgggacaggcagcggctgcgcttcggaccgcggcgcgcgctggccgccctagtgcgcaggggctggcgctgcggctacctcgagtgctccgccaagtacaactggcacgtgctgcgtctcttccgcgagctgctgcgctgcgctctggtgcgcgcgcgccctgcacacccggccctgcgcctgcagggggcgctgcatcccgcgcgctgcagcctcatgtgacccgatcggacagtgccatccatgggccccaccttgtgactgggacaatcagggacctggattggacgggatcgcccaacttcactgggactggacagggaagtctccgccctgattggatgaggaaagctccaacccagtctcctaagcgactggcccccttttgaacctcattggacccaaccaggtcccaagctccattggagatgaccagtcctttctgggacctcaatgggtcacaatcccattggatggaaaggacttggctatgaacttgactggaaacacgcagcctgctcctggagcttcactggacatattctttatgccacacctaccacgggataataaaagggaaaataatttg

SEQ ID NO: 11179 - DNA, 1139 bp, Homo sapiens
gaccccggccagcgcccaccccagccttctgcccgccccatcgaggaggcccctcgggggcagcacatcttcctcctcgcaggagggaccaggcggggctccaggccactcagtgggctccctggtcctgatggcagaacccacccgatccctggggtagggcaccaccccctcctggggtgagagcgcagtgcactcccgtgctctgggacacccctgctcctgtggctgtgatgtggggttaagtgaggtggggaccaaaggaaacagagccagagcagccacagaagctgtgcctgaagggtgagtgtggagcttgcccctccggctcacagccccggcagcccctggctccttggtctctccggttggtgttaaagggccctccactgccacctctcatgggatggaccctgccaacctggcctgggtgtgcagggaggggttccccttggtaccaggagagctgctcacttagggcctggggctcaaggagctgtaggtgccggcagaggggcagagctaggctgggaggagcccagggcctgcaccacccacttgcaaccaccaggctggtgccctgcagctgtgccagttgggccacagcctcccgagtgctgacccacatggtcaagaccaggcagaagctcccagagcccctgtctcgggctccccaccgactggcagctgcactatccccaactccccacttctgccccaagggtggtcactgcctgtgatacattcctcagtgtcgcctctgagcccaggcctcctgccacaaagactgggccgagagatggggctgggtaagcgggtgcgcctcctgtttgggtttcttcggggtttctctgtagtgtctgctgccctcctcctggcctcccaggtttcagttgtgtctgacagagcattaggttttcctgttactgctgtgtaataataaagaaagattcggcttttggcaatcacggacacttttttcccctccaccgaatgtcaggattgaaagctgcctccgagtggttggggatggttttctgaccctacggtaactagatctaatatatatcatcagaaaatatatattgtatgtttactcttattttcagaaagagaaaatgaataaaaatgatgacatc

SEQ ID NO: 11180 - DNA, 289 bp, Homo sapiens
tctcccgcgcagaccgttgtttcccccaaggcctcaccctgagcactgggcttctgctttctgctctggcccacatgtgactcttgatattctccaaagacaccagccaattaaaaagcgtcacctgaccagtggcctttgtctgtggttcctggcaaggtggctttgcagtctggaagggcaggtgggagctgtgacacagtgtgaaaaagcatttgtagagagactttttctcagcagccaataaaagcagagtggaaaaagattccaattctgcagagagatgctc

SEQ ID NO: 11181 - DNA, 1124 bp, Homo sapiens
tgctgcctacacctccacctccttccccttctccctcaggcaaccccgacagacagtggcactcctggtcctgctgtcttggttttgtcttggctctgggaggactctgaggggcagtgctcagttcagacaagggggaactgaaggctgacaagttctgaggattacagctctgcccaggccctttctactttccctgcctgcctccctccccctgctagaagtagtttctgatttccctgaatgaaagatagtgatcttttaggccttcatttatcttctaaaattcctcatctcaaggccaccagtccccagttatcacccttggaaatcctctgtttagcttagttgcacaaaaggtagtatgtccagtggctagaggtggggtgggaagagaggaggccaggccaggccctcaggaattccctggtttccactgggccacccacttgctggacagtctgagccaagtccctcctgctggagaaaagcctggaactgccaaaacaaaaaaacaaatacaaacaaacctcgtcaccacggtcaggaggaggttcagacattctgcccagaggggctggggaaagggatgggagccaggaaagatttaggggcaggagacagacacgtaacaggaactcggaaggtagaacttagaattcagaacttgggtttcaattgtagaatttggaatctggaatacagaattgggaagaagaacagagatgacaaaagaccacttgaagagaggttcctaatactagacagatggagagtggcttggctgtttccccctgcatattggggttgaaaacttaaatgtgtagttccagtccttctatgcagagtctctcctgccctccctccttcctgcaggcaaatatacaagctagaccctgttccctcaccctgtatcctgtctcccctaattgacattctatcagcccaaccctcattctgcagggccacctggtgtgtggaggtggcgggaggggtcagtgactctgggggtctcctcagtgacccccatacctcatcatgaacccttgggtagcttgattctgcctaccatccaggaaaacttgtgctggaattgctgatggaaacaattaaatatttactat

SEQ ID NO: 11182 - DNA, 268 bp, Homo sapiens
gccccttgcccccgactgacccccacgtggtcacttttctcatcagtcacaataggaagccaagcccggttcctgctacgccccatggaggctccgagaccatctgcccagcctcactgaggctcaggacacggccacaccaagtgcagccctcgtcctgggtctgcaccgggcagctctcccctcactctcctccacctgcccccctgcttcttaagaagatgggggagaaaacttccaaatgtttataaagaaagtctgtcaccac

SEQ ID NO: 11183 - DNA, 402 bp, Homo sapiens
gacctggtgcagggccagtggggaggcagcggcaccagactcaccaggccgtgctcccatcgcctggggcctcctcactaggggccccaagttcaactcaacccctcaacagcctcagctttgcagcccctgagaaggccgcctctcatctaccagccagccatgagcgccttcctgcagaacacacagtgccttatgccacagccgaagaatccgtggggccggcaagcaggcaccttcccccagctgcgctagcgggaaagagatggggatggagtcccaaggcaagcgccccaaacctcgggccacaagacaccacttcccctttaccctggacagcaggaaacctgtatattcaaaaacacaaaaagtcctgctaataaaatttttgaccctttcaaa

SEQ ID NO: 11184 - DNA, 3197 bp, Homo sapiens
caggaggtcttgaagtgtgctgtgaaccgagggatctcaggagttgggtccagatgtgggggcctgtccaagggtggctggggcccagggcatcgctaaacccaaatgggggctgctggcagaccccgagggtgcctggccagtccactccactctgggctgggctgtgatgaagctgagcagagtggaaacttccatagggagggagctagaagaaggtgccccttcctctgggagattgtggactggggagcgtgggctggacttctgcctctacttgtccctttggccccttgctcactttgtgcagtgaacaaactacacaagtcatctacaagagccctgaccacagggtgagacagcagggcccaggggagtggaccagcccccagcaaattatcaccatctgtgcctttgctgccccttaggttgggacttaggtgggccagaggggctaggatcccaaaggactccttgtcccctagaagtttgatgagtggaagatagagaggggcctctgggatggaaggctgtcttcttttgaggatgatcagagaacttgggcataggaacaatctggcagaagtttccagaaggaggtcacttggcattcaggctcttggggaggcagagaagccaccttcaggcctgggaaggaagacactgggaggaggagaggcctggaaagctttggtaggttcttcgttctcttccccgtgatcttccctgcagcctgggatggccagggtctgatggctggacctgcagcaggggtttgtggaggtgggtagggcaggggcaggttgctaagtcaggtgcagaggttctgagggacccaggctcttcctctgggtaaaggtctgtaagaaggggctggggtagctcagagtagcagctcacatctgaggccctgggaggccttgtgaggtcacacagaggtacttgagggggactggaggccgtctctggtccccagggcaagggaacagcagaacttagggtcagggtctcagggaaccctgagctccaagcgtgctgtgcgtctgacctggcatgatttctatttattatgatatcctatttatattaacttattggtgctttcagtggccaagttaattcccctttccctggtccctactcaacaaaatatgatgatggctcccgacacaagcgccagggccagggcttagcagggcctggtctggaagtcgacaatgttacaagtggaataagccttacgggtgaagctcagagaagggtcggatctgagagaatggggaggcctgagtgggagtggggggccttgctccacccccccccatcccctactgtgacttgctttagggtgtcagggtccaggctgcaggggctgggccaatttgtggagaggccgggtgcctttctgtcttgattccagggggctggttcacactgttcttgggcgccccagcattgtgttgtgaggcgcactgttcctggcagatattgtgccccctggagcagtgggcaagacagtccttgtggcccaccctgtccttgtttctgtgtccccatgctgcctctgaaatagcgccctggaacaaccctgcccctgcacccagcatgctccgacacagcagggaagctcctcctgtggcccggacacccatagacggtgcggggggcctggctgggccagaccccaggaaggtggggtagactggggggatcagctgcccattgctcccaagaggaggagagggaggctgcagatgcctgggactcagaccaggaagctgtgggccctcctgctccacccccatcccactcccacccatgtctgggctcccaggcagggaacccgatctcttcctttgtgctggggccaggcgagtggagaaacgccctccagtctgagagcaggggagggaaggaggcagcagagttggggcagctgctcagagcagtgttctggcttcttctcaaaccctgagcgggctgccggcctccaagttcctccgacaagatgatggtactaattatggtacttttcactcactttgcacctttccctgtcgctctctaagcactttacctggatggcgcgtgggcagtgtgcaggcaggtcctgaggcctggggttggggtggagggtgcggcccggagttgtccatctgtccatcccaacagcaagacgaggatgtggctgttgagatgtgggccacactcacccttgtccaggatgcagggactgccttctccttcctgcttcatccggcttagcttggggctggctgcattcccccaggatgggcttcgagaaagacaaacttgtctggaaaccagagttgctgattccacccggggggcccggctgactcgcccatcacctcatctccctgtggacttgggagctctgtgccaggcccaccttgcggccctggctctgagtcgctctcccacccagcctggacttggccccatgggacccatcctcagtgctccctccagatcccgtccggcagcttggcgtccaccctgcacagcatcactgaatcacagagcctttgcgtgaaacagctctgccaggccgggagctgggtttctcttccctttttatctgctggtgtggaccacacctgggcctggccggaggaagagagagtttaccaagagagatgtctccgggcccttatttattatttaaacatttttttaaaaagcactgctagtttacttgtctctcctccccatcgtccccatcgtcctccttgtccctgacttggggcacttccaccctgacccagccagtccagctctgccttgccggctctccagagtagacatagtgtgtggggttggagctctggcacccggggaggtagcatttccctgcagatggtacagatgttcctgccttagagtcatctctagttccccacctcaatcccggcatccagccttcagtcccgcccacgtgctagctccgtgggcccaccgtgcggccttagaggtttccctccttcctttccactgaaaagcacatggccttgggtgacaaattcctctttgatgaatgtaccctgtggggatgtttcatactgacagattatttttatttattcaatgtcatatttaaaatatttattttttataccaaatgaatacttttttttttaagaaaaaaaagagaaatgaataaagaatctactctt

SEQ ID NO: 11185 - DNA, 1051 bp, Homo sapiens
cctcgagagcaccccttgccggtgaaggatgcggcaggtgctctgtggatgagaggaaccatcgcaggatgacagctcccgggtccccaaacctgttcccctctgctactagccactgagaagtgcactttaagaggtgggagctgggcagacccctctacctcctccaggctgggagacagagtcaggctgttgcgctcccacctcagccccaagttccccaggcccagtggggtggccgggcgggccacgcgggaccgactttccattgattcaggggtctgatgacacaggctgactcatggccgggctgactgcccccctgccttgctccccgaggcctgccggtccttccctctcatgacttgcagggccgttgcccccagacttcctcctttccgtgtttctgaaggggaggtcacagcctgagctggcctcctatgcctcatcatgtcccaaaccagacacctggatgtctgggtgacctcactttaggcagctgtaacagcggcagggtgtcccaggagccctgatccgggggtccagggaatggagctcaggtcccaggccagccccgaagtcgccacgtggcctggggcaggtcactttacctctgtggacctgttttctctttgtgaagctagggagttagaggctgtacaaggcccccactgcctgtcggttgcttggattccctgacgtaaggtggatattaaaaatctgtaaatcaggacaggtggtgcaaatggcgctgggaggtgtacacggaggtctctgtaaaagcagacccacctcccagcgccgggaagcccgtcttgggtcctcgctgctggctgctccccctggtggtggatcctggaattttctcacgcaggagccattgctctcctagagggggtctcagaaactgcgaggccagttccttggagggacatgactaatttatcgatttttatcaatttttatcagttttatatttataagccttatttatgatgtatatttaatgttaatattgtgcaaacttatatttaaaacttgcctggtttct

SEQ ID NO: 11186 - DNA, 502 bp, Homo sapiens
ggcccatgggcaacagagcagcctccctgctctcccctcgacccaggcttccaaagacttctctaagctatttccttaagctctggaacgagccccctgttctgctggggaccctcgttccgctctctgtatgtaagctgcgtgcaggcaccggcttttacgcggacacctgtgtacactcacaggtggagtgggcaggtgctagcctgactgcgtgtctgcccatgcaggggaacacggtgctcggggcttaagcccccaacccatcactccctgcgcagcctcggcgtttgcacagtccctgcctgaggcctgagccattccccaaaggcttcctgggccagctgccccgctgacctccgttctgcctctggtggggttgccttccctggccaggtgagtcctgacagtgcctctccctcctggggcctccaaggaaagtattttgacatctctctctcttctgtttttattgacttgttaataaaggactttgtagtga

SEQ ID NO: 11187 - DNA, 384 bp, Homo sapiens
ccctggcagctaaggcctccagggcggggtctccatataactacacggttcatgaactgacattccacatcctgcccaccctctgagggccaagctgcctggccactgggctgggctggagtctggctggtccaacacagattctgcctggtccaacacagattctgcctgagcctccttatttattttctttacagtggcactcaggctggcccagccagggcaggcagaagctagggcctggggggtggggcctccttcagccccctcctcctgggggatgctccccagggttagggtgctggtgtgaggggaaagggtggggtgttctttgtgtaaaatagaaacatggttttgtacagaaataaacagccttgtatagag

SEQ ID NO: 11188 - DNA, 2605 bp, Homo sapiens
acaagaggaacctgctgtcaagtccctgccattttgcctctcctgtctcccaccccctgccccagacccaggagcccccctgaggctttgccttgcctgcatatttgtttcgctcttactcagtttgggaattcaaattgtcctgcagaggttcattcccctgaccctttccccacattggtaagagtagctgggttttctaagccactctctggaatctctttgtgttagggtctcgatttgaggacattcatttcttcagcagcccattagcaactgagagcccagggatgtcctacaggatagtttcatagtgacaggtggcacttggctaatagaatatggctgatattgtcattaatcattttgtaccttgacatgggttgtctaataaaactcggacccttcttgtgaaatcagttaaataagacttgtctcggtcacctgtgccctgtccagactcgaggcagtggtaacactgcacagtgctatgtggcttctctttgaggatttttgggttttgtaactaaattcttgctgccctcatactttttatgtattagaatcatattcgtattgcccttttaaaacattgggatcctccaaaggcctgccccatgtatttaacagtaatacaggaagcatggcaggcaccatgcaaaccaaggatggatggtgcagtccctgtgtcagtgggcggtggtttcctgctggcctggaatcactcatcacctgattgattggctctgtggtcctgggcaggtgcctcataggtgtgtggatatgatgacgtttctttaaaatgtatgtatttaacaaatacttaattgtattaaggtcatgtaccaaggatttgataaagtttaaataatttactctctacttttatccattttatccattttaactcatgtaatcctcatgtgagtattcctgtttaacacttgagtaaactgaggcacagagaacataagttgcatgccatagtcacacactgtgaaagtgaaaagagaatgtgtgcaaaacacgtcacagtcctggtttctgagtaaaggcaggctgttatctttagaatcaagctatcacagggagataggcaatgctgtgggtgttggaggaaggtgagagcctgttgctaacaatttcctggttttaaagctaaggctgattttattgggaagatctcacatgtgtgtggcccctgagagttcccagtgccttttatttgcagtccttccatttggacctcctagctgccccatcaggtcatctccagggctcagaggggtgagaccatttcccaaggtcacagaaccagctctctagtcaccaccctgcctctccctctcacccagagtcagtaccagttttatggctttattacaaactgctgggtccctcccattttcaacttgattgatgggatgtcatcccttatcctgtctgacatttgcctctggcctggttgctagaagtttgccccaggggcaagagttgaaatttggcttcctgaggtgggctttgtggtttgcgtccctaaagtgagcccactactggttgcttgtccatggccaacaccagaaatcccctgagcactacctgggtctcattccaagaaggaagagggtcaggagacctggggagtctcatattccaagttcttctttctttctgggagcagtgggcagttcatggtgttagggcactcacccccacagactggcaaaccctgcaggacttccgtggctgaggctgtgaccggaggccaggaatgccgttgggtggattgtgagtgaatgggccctttgagctgccctctagagagcaaatccagtttcctggagctcctgaatgaatatctgtactggctcgctcagatgcagaagctccattgaccatgaggccttgtgaacatcagtggccacaggcccagtgtgctgcttggcactgcactagtttaggacctgcagcatgtaggtagcgtcctagtgtttataatacaaagctgctctgcacagcttttctgattcttcttgcaatctcctgaggattatctgccccatttttaaaacgaggtggaatacccaaggtcatgtagccagtgagtgctctggaaagccaaagcagctcatcccttcctggggaccacactgctctgctccaccagaccacactatgaaataggaataagtgctcctgttgcaggactgctgggaaaacaggtggtgtgggacttaagtcaccataattttgaagacttgcatgcagagggctccaggaattgtagacattaaggaatttcactttcagttctacccactacttaagtacttgtcatgtactcttagaggaggccagtaatgatcagaaccattttactttaaaattaataatattgtattagagaatatattaaatggttatattgggttatgttaggatatatacttgaatggaaatacatgtactattagcaatcatatttcatttatccctgtaattagacaagaaagcataatatagctctactcatgggtacacataccagtgtataagatttttagaagtttactttttaaaaataaaagcaaaatgtaagatctta

SEQ ID NO: 11189 - DNA, 784 bp, Homo sapiens
ctgcccagctggactctgcacatggggatggacccttcctgcctgcaccccggtcctcagcctgggctcccaggacaggacaggatgggacagcaggatagacaggacagcaagcccagtgggtgggaggaaggatgagggccccaccatgtccacactgggaaggagggccccacagcttcagactgaggatctagggctgggacctgtcagtcaaggaagagaggtcactttgggaccttctctgcaatcctgtgacgtgagtctgccctccttacaggcagctcccaggtcaataaggaaagagaatatggggccagtgtagctgtcgccagggttctgggagctccctgtggcctgtctgggaattcctgggggctgagactacagtggccaggttttgtgcttatttattggggggtgggttgagggaagagctatctggccttggggtaccctggcctgaccgtctttcaggatacttcttgtcaaggctgtctgcctgttgcctttggtcctcaagcactgggagccatgggtcccactgcctgtccagcctggctcccttcctgggcctggctaggaccagaggtcttagaaaccgtcctgttctggaatccttggctgcggctttgtgttgctgaccgggatactcgaagccacaggatcaatgtggtgcctcatccaggggcatccttttttttttttttttttttttttaaagagttggagtagggaaggtttaatagtaaaataaacgtggctatattttaacataagatgt

SEQ ID NO: 11190 - DNA, 788 bp, Homo sapiens
gtggctccctcatttctcagagacctcctaaccctttgatttctctgtttatatcctacactccctccctccctgaaattgattgttagtcctcctgactctgtgacgttagtgagtacagaaagagatgccctggggaaaactcatctactgtggtcagatcaagaaaggtatgagaggcacaaccttggagggtaccaaggttgcagaagaggaaaaagcaagggtaaaggcaagaagtgggtgtcatgaaactcaataaatagcaaaatgaatcccctagcctttgtcctcacctaccctaaggcaggtgtgtatgcttgaattccttccgtatggctgtgagcaacttgggttggagacatatctaaatcctttttacttccactccctatatatagtagatgctcagtgtatatttgtggcattgaatggaggaccagaaggtagggtgcaggtgactcaacagctgtacatgattaggaggagcctatgtggggtggatttcagcaccttggacaggagcagatgtgtggtggggttggactctcttctggagacccagacaattcagtctccagatttctggcagtggctgtcttttgagggccccagccacaaaggccacatgcctctgataggagctgcctacatcaggctttgtctgacttgcacgctcagcttcccaccctaacccacttcccttgttgcacatagcttatgttttagggactttcctggaagcaaaggcagtcacatctggcataatcataataaagaaaacaact

SEQ ID NO: 11191 - DNA, 1194 bp, Homo sapiens
agaccccagccacctctacctgtgcactccaaccccttcacacccacccctctgacccctgccttcccaggcagggtggtgctggaggtggctgcagagagccacttgtcccacgtcaccatttcatctcattgtaggctcacctggcacagtggccaagcaggaaggggccaccagtgcatagcccatgctgaagattcagacaggaacctctttccctgttcccagagaatgcggctgagaatgagaacgctgaagatgatccagtccactgaggatgggtcctgcttgcagaagctgccctttcacccatcttgacaagatccagccacccaggactcacccatgcctggtgttccagcttcagggggtgtgcgtggttcctaggtcctgtggacatcacagcttcaggcctgaagagcagagaagccctgttctctgcatgtaggaggtcagcaggggtgggcaggcccagctggaggcagctgggtgagggtcctggttccagcagagcactggggcccatccaagtttgttctgccaccactggatggaaaattggaaatggactgggcgtggtggctcacgcctataatcccagcagtttgggaggctgagttgggcagatcacctgagatcaggagttcgggaccagcctgggcaacatggtgaaaccctgtctctactaaaaatacaaaaattagccgggcatggtggcgtgcacctgtaatcccagctactcaggaggctgaggcaggagaatcgcttgtacccaggaggcggaggttgtagtgagctgagatcgtgccactgcactccagcctgggcaacagagccagactccgtctctaaacaaacaaacaaacaaacaaacaaataaagaaagaacattggacatggagaggtggggcctggcatgggtaaccatcagaggaaaaagccatgctcagccttccagttgagtgggtaacgactgagtctccagggaattcccagtgacctcccctccacacctgctgtgatcctgccaacatttagctttggttctcttggcagctgcaccattcatgggtgcatatacgtagagtctgaacaggtgctctgctgctagaaacagcaaaccatctagattaaactcctaaagccagtgccacgaggcattcctgttccaactgggtgtttgagcagattggc

SEQ ID NO: 11192 - DNA, 316 bp, Homo sapiens
cgtcccaccgcccagcggcttgcctgcctgctcgctccctgcagaggggctgagcaggacgccgctggtgctggccgcccccagccccctcctggtgccacctcagaccccggggtgagggggggctccctggggggaggcagccagccaagactgggcccatgaacacagagagggcctaaccgagatcagtatttaactaattataccagtttttattaaacccctttccctccccgataaagaatgttctatttctgcctccccttaaaggggagacctcagaagtaaaggaatttgatgttgtgtttttgtt

SEQ ID NO: 11193 - DNA, 420 bp, Homo sapiens
gtgcctgcggcccctcacagggctgaggccagcccctagcagctggatgtggcagaggcaggccagaggacctaagtgtgatggaccagagtcacttctcctcctcctttctccagccagccctgacccctcatgctctctggctgggccagtgggcagccctcgcttcccttggatggagctgccctgctggtgcctggtcagagaagaggcctctgtgcccagcctgattctctgctcccaggagccagtgacatgaggtgcagaggcccacccagccccctacctactgcccccattcatcctggctttccacagccccctcccacacagttggacccgtgattctcagggtgctgtgatggggtgagggtagggggagcatttgttattaaatgactggacttttgtgccaattgc

SEQ ID NO: 11194 - DNA, 1385 bp, Homo sapiens
gccatcccacgagcccctgcattggagtcagaggtacagatctattgttgatcttacaccaagatccaaacttgaacattctacttttgttgatacagaaaaaaacagatgatgccttttatgagcacaaaaaagagttgctgtagcttttaactttataatccattttttttaagattaaactaattgtgagatggtgaagataaattttctgccctgtgagtgacactggccaggggataggttgaggcagatggtgcccagaagaaagagggcagcacccattgcacatggcaggcctggaatcctgcagccctccccaaaaacagattgacccaggaatgaatctgctacaattccacctcattctttcacacccagagccagagccttaagcatcatggtacctcttgcgcttcttacagtgagtgccaatctactagataaatggccttcaggcagtgctccaggaatcctggggggtcccaggccacctctgcttccaccttcactataagtggcccagttctggttttctagattgtacttatgcataagatagtttttaaagaaagcattccactgtgtaaatttttttttgtctttttttgaaactgtcctgctctgtcacccatcctagagtgcagtagtgtgatcatggctcactgtagccacaacctctcaggctcaagtgatcctcttaccttagcctcctgcgtggctgggactacagatgtttgccaccatgcccgcctcattttttttctttttttatagagatgagattttactatgtcgcccagactggtctcaaactcctggcctcaagcaatcctcacgcctcagcctcccaaagtgttgatgagccactgtaccccgataccactgtataaaaaatttaaaaaaaattgtgagtgctattgtacatggcaaagtttcaaagagctcttggccatccctcaccaaactttggcaaaagatggtgttagtccccttctccagggcacatgagaaaaacaggcctaacatcaggtctcagcggttcctctcacaggccttggcttggaaggctggagcttcggaccaaggcccagccctgtcacctcctcttcatgtgatgtggacccctgggagcatcagtgtcctcatctgtccaatgacagcccttttctcacagagttattgtgaagattcaacaatttcttggcatagtgcctggcacatggtgtgtgcttagcgcaaatggcagctctcatcatgaatgatagactctttcaccctgctggtcccaggtcggcacacacatccccataatggcatttctcctttctgtgcacagcactttattgttacaaagtactcttccaaaaagttaccctgtgtgt

SEQ ID NO: 11195 - DNA, 190 bp, Homo sapiens
aggcaggagagagagcagctcccctgcccacctgcccctcaaccctgtagctgcagggggaggggacttcattcatgggttggtggtcgcaccttggtttgacttacacgggacatttgtgtttttggaggaaaagataccctgattctttgaatcttccttaagtttataaatatttattttttaaaag

SEQ ID NO: 11196 - DNA, 191 bp, Homo sapiens
gtccgggggcgcggcggagctgggacctacctgcctgagtcctggagacagaatgaagcgctcagcatcccgggaatacttctcttgctgagagccgatgcccgtccccgggccagcagggatggggttggggaggttctcccaaccccactttcttccttccccagctccactaaattccctcctgcctt

SEQ ID NO: 11197 - DNA, 916 bp, Homo sapiens
cctcagtttcagctttcctgggcaccagcctggaccttgcccatggctatgccaagccttgggaatctcagcctcccctccgtaggttagactgaagcatggcagaggctgttgtggacaatcaagaggatgaatggggggatctcaaggcccaaatgctggaccacatctcctgctgttctgggtaaccttgagctatgtatgacacaactcttctatgcctggatgtggtgttcaggaagctcattctgatgccctgggctttggccttgccagggaacttcacatacagatgagaatggggaaagggtaacttattgcagcagccccaggcagtaccaggaggaggtacatgtatgtccgtgttgcaaaaataatacatgcctcaaaaacctgcctaggggagccctagtgcctgggtgctgtggcctgaggtagcaggtgggaagttagggatgtcacagaaatgtctgtgtctgaatccaggattggggtgggtgttggagagggctttcagctcccctcctcccaggggggcctctttttttaacggctgccgtgcccttcctggcccagccctaaacctaaattcaaatctcctccatgcctttgcgcaaaggacctccctcttgcactctaagccttagtttcctcctctaaaaaaagggggtctctaaacaggagctacctcatagggttgttgaggattaagtgaaccaatacatatacagtgcttagcacttaataagtattcccccctgcgacacctagctgaactatggtttggtgtctgatcttgagaggttgatgtaaccttttaaaggcctcagttcgctcacctgtgaaatgggtctaagaatagcactgatctcacagggttgtgatgcagattaaaggagatggcatgtgtaatgta

SEQ ID NO: 11198 - DNA, 1483 bp, Homo sapiens
gcccccccagtgggcaggagcccatgcagacactggtgcaggacagcccaccctcctacagctaggaggaactaccactttgtgttctggttaaaaccctaccactcccccgcttttttggcgaatcctagtaagagtgacagaagcaggtggccctgtgggctgagggtaaggctgggtagggtcctaacagtgctccttgtccatcccttggagcagattttgtctgtggatggagacagtggcagctcccacagtgatgctgctgctaagggcttccaaacattgcctgcacccctggaactgaaccagggatagacggggagctcccccaggctcctctgtgctttactaagatggcctcagtctccactgtgggcttgagtggcatacactgttattcatggttaaggtaaagcaggtcaagggatggcattgaaaaaatatatttagtttttaaaatatttgggatggaactccctactgacctctgagaactggaaacgagtttgtacagaagtcagaactttgggttgggaatgagatctaggttgtggctgctggtatgcttcagcttgctggcaatgatgtgccttgacaaccgtgggccaggcctgggcccagggactcttcctgtttcataaggaaaggaagaattgcactgagcattccacttaggaagaggatagagaaggatctgctccgcctttggccacaggagcagaggcagacctgggatgccccagtttctcttcagggatggatagtgacctgtcttcattttgcacaggtaagagagtagttagctaacctatgggaattatactgtggggccttgtgagctgcttctaagaggctaacctggaaactaagctcagaggcaaggtaataaagcacttcagggcttgctccccaagtgggcctgatttagcaggtggtcctgcgggcgtccaggtcagcaccttcctgtagggcactggggctagggtcacagcccctaactcataaagcaatcaaagaaccattagaaagggctcattaagccttttggacacaggaccccagagaggaaaaagtgacttgcccaaggtcgtaagcaagctactggcatggcaagagcccagcttcctgacggagcgcaacatttctccactgcactgtgctagcagctcagcagggcctctaacctgtgatgtcacactcaagaggccttggcagctcctagccatagagcttcctttccagaacccttccactgcccaatgtggagacgggttagtggggctttctatggagccatctgctttggggacctagacctcaggtggtctcttggtgttagtgatgctggagaagagaatattactggtttctacttttctataaaggcatttctctatatacatgttttatatacctcattctgacacctgcatatagtgtgggaaattgctctgcatttgacttaattaaaaaaaaaaaa

SEQ ID NO: 11199 - DNA, 1471 bp, Homo sapiens
gagctctgactcctatggtgacctctcagatgccagcgacctgaagacgccagagaagcagagtgccaatggctctttctcctgcgacatggcagtccccaaaaacaaaatggagtctgatggggagaagaagtacccatgccctgaatgtgggagcttcttccgctctaagtcctacttgaacaaacacatccagaaggtgcatgtccgggctctcgggggccccctgggggacctgggccctgcccttggctcacctttctctcctcagcagaacatgtctctcctcgagtcctttgggtttcagattgttcagtcggcatttgcgtcatctttagtagatcctgaggttgaccagcagcccatggggcctgaagggaaatgaggcagctgctgtgtccccacggaaacaaccatctggggactgctgggaaatgctgtgaatgcggagggaagtgatgtttgggttctgtagctgagagatttttattcatttttaactgccccccaaccccactccaactccttctccaccacccattctcccaatggtctttagaaatagattttcatctgatattctgcagaaatatcaatgagacttggtatgggacaggggcagaaaacactacataggcctccaaggcaaaaccagtcccagtttctttaatgggaagaagctggaattcctggtgctcaattcttagtgaccccaatcctatacccaaatctatgatattctgggacctcagtgattttggtcccctcccacttctctagttcgtcatcctcccttcccatatccttcaaaagaaccacactagggtctccacctacttatacaatgcggatgcccaactgtttttaaggaagccagaagcatcccatggaccatggggtgagtgtcctccaagagccccctgagctcagccctctgcctggagggctccagacctttctgagccctgcttggaggcgagcattttcactgctaggacaagctcagctgttgaggacacccccaccccaaatttcagttcttacgtgattttaaccattcaacatgctgttgggttttaattctctaattattattattattgttattattttttaggaccagttgtagtgaattgctactgaaagctatcccaggtgatacagagctctttgtaaaccgcagtcacacattagggttagtattaaactttgtttagatgtaccataattaacttggctagttgattgtttgaagtctatggaagaaatagttttatgcaaaattttaaaaaatgccagtctggtcagggaagtagggggtttcaatgctgttgggaaccaggaaggtgggacagccggcaggtagggacattgtgtacctcagttgtgtcacatgtgagcaagcccaggttgaccttgtgatgtgaattgatctgatcagactgtattaaaaatgttagtacattactct

SEQ ID NO: 11200 - DNA, 724 bp, Homo sapiens
cctgggcctccctggagagggttgacagtggaagggaacaggaggggcatttggcctgagacccctgcttttgggagaggctagcagggtggttcctgcccagcatgcccagctcctccctgggtgactcggagtctttcccatgtcagagcccccaaatgggggtagcaaggagcacctttctggaaccccctatagcatccaagtttctttctgggctctcttgccttttcccccctttcacagatggcacccctgggcatctgtccttgcctaggtgattttggaggttggtgccttcctgggaactagccaccagcttatctgcttcccttcccctggcatcacttcccataggcctggggtttctagactggggcctggccacccctttccccactccacgagtgagtcggcctccagagaagactggcacaattccaactagagtcaacccatgctgccctctgcccttcccactcagatctagatcctgctttcatttctggctagtgaagtagacttttgtgtttttgaggtttattagcaggtctgctcaggaaccaaactaatgagtagctttatattgggccaccccaatatatggctttgggggctgaaaaagcagatgtagaccccctccctcggatccttattggtgtgccctttagcactccgcagactctgcggggtgaacaggagtgatgataaaatttttcattct

SEQ ID NO: 11201 - DNA, 511 bp, Homo sapiens
gcagggcaggcagactcaactaagcccggacctgtggtggcacactgggcaggaccctgcttcatctcgggttggtttatgggcttttactttggagcactctgtgtgaagctgtttggtggaacccatgcatctggtgtggtccgcattatgatggaaggatcttaaccagtcgagtggagtgtacattgtctgaatacaggatgcacaatgttgtcaatcctggaaatggtctttcttttttgtaagatatgtgaatgaagtgttggtgtcctcaccaagaggtggcacctaagggttctgaggaaataaatgtatagacccttatgtacagacctgtgtataaacaacttttgtatatacatataggatagcttttttgaactatacagctgtacataaaagtagctgatattagttaggcctgtgtcaacagtttggatttttttcacttgtacatttgggattttcttttggttgattaaaattgcatatgctaagtgtgtgaatg

SEQ ID NO: 11202 - DNA, 1117 bp, Homo sapiens
agtctctttcctgattatggctgctaagggatcttttccaaacagagtgagggtcttttcaagagggaggcccatgaggccatccaggtaagggcctgcctcagcgtggttgggagtctgaccaggtaggacttgaatgattcggctaccacctgttccagaggtgcagacaagaggtggcgagagcccccatcatgcccctcaacctatcccgttccttctgcctacaaataaaaagtgcaggctggaatgatctcagtcacatttggatctttttaaacactgtatagacggaagagcctgcattcctgaccgaaccttcagttggtctcggttgtcgttttttcttgctgctcctccccccatcacctgagctgttttctgttggccccttttgttttttggccttaacgctcctgctgcacagggtgaggtgcctccttggcacagactgtggatgcctctcccccagcagagccacacagccttcgtgacaactgctttccgttcccacattcacctcatcctgctctttagaaaaagcagtctttgtgcttgtggctgaacgcatcaccctggactctgctagtgtcttctgaggacactgatgacactgattaatgatacagacctttgcaggacctgatgagtgacccttctggagctggccaggtcctctgcagcaggcaagaccaatcaatcactgaacctgcctcatggcaccagagtgaacagggcaggcaggtagtaggcccagctggggaaatgggagagttcctgtccccctccacatatccctacatgaaatatgggaaagttgctgctattgattcagggtctgtcttggaggcagaggacccttggtggatagttggtcagtgcctggaaaacctgtcccagtttatcaggaacgcaggcctggggagcccccagtggcggggacagggccagatttcatgttgaccctggggatgctgtgaatttctcctgcaggagagacatcattgaattttttcaactgtatcagtagcacagtatttttgtatgaaaagtgggagacttctgaacagtaattcatttaattgcaaagcattttgaaataaaaaaaatcaaactt

SEQ ID NO: 11203 - DNA, 492 bp, Homo sapiens
tcccagcactttgggaggcagaggcgggcggatcacttgagacaggcctggccaacctggtgactctactaaaaatacaaaaaattagccgggagtggtggcgcgcgcctgtaatcccagctactcgggaagctgaggcagaagaatcgcttgaactcgggagactgtaggtgccgtgagccgaggtcgcgccactgcactccagcctgggagaaagactcgcctaagcagtttctctcttttcttttgcatttttaatcttagacttttggagatgttgaaatggtcgctgaaacactgcaaacacagggatgggggacagatcccaaagtatagcagctactcatgagtcccagcgcccctcctgtccttcccctactgctgcctaagtggtcttcctaaaacacaagtttgcacttgtcagaaccactccttaagatctctcatgggttgccctcgtctccaaataaagatactaaccactgagctggc

SEQ ID NO: 11204 - DNA, 334 bp, Homo sapiens
gccctcactccaaaaaaacaaaaaacagggtaagaaaattacttgggtgggtagacttaggaacgctctacttcgtaaaagcattatacaaagtcacgggagaaaaatatgggacatttcttgattgtacttaatctaatttgattagattatagagtcctaagtattaattattgccaccatcaaactcattgagtcctatggttcacatcttgtttcctatagaaatgtcctgtattctgggatcaatttccaaatgctttacttttttatttctgcaagttcaaattaatgtattatagaagttatgagttaaataaagattggaatatca

SEQ ID NO: 11205 - DNA, 36 bp, Homo sapiens
actctatctgagccattagaataatgaataattctt

SEQ ID NO: 11206 - DNA, 410 bp, Homo sapiens
aaccttggacagcagggctgcctgacaccaccaaccctctctgaagtggaagtggactgacatgctcttctgacatcagactcaaggcgggacaagttgcaaagtgtgcagctgtaactgctcacgccaaaatggctgatggggaggctgctgctttcaggggcccgtgcttgtaaaataaccttccaggaagaggcacattgcccacctttggaaagggaggaatatgccttctccttggttgttccacagagttttaggaaaatctgttagggatgggtagatgtcaaactgccttacgcagtcatactgatctttagccatcagattgatcttcttcacaccaagctctgtttacattccgagaggtgtcatgaagaaagttctgttcaataaggttttggaatgtt

SEQ ID NO: 11207 - DNA, 1254 bp, Homo sapiens
ctaacagcctcagcacatccgacacctcccagcgtgggaccccaagtgaagacgaggccaaggctgaaaccatccgcaacctgaggaagtcttttgccagcctgttctctgactaacgccatccaggctgggaggggaagagtgctctgctacactcgtccccctcctgcctcatcttccttctcagccttggttcctgatgggaacagaatggagggcctgagaacatactttctaaatgcctttgacccaggaaccgattatctatatttgttcccattttccttcaccgtgacattccagcattgtctgactgtgaggtgggcctttgagagcctccaggttcctcaaaacaggcctgagcgatgggcatcacaccctctgcctacccacgtgcctgcttacctgccagataaccaagtgagatgtctgcgagtggctagttttcacattcttactagtgtttggctcacctttgggcaaaggccccctctaggccttgccccacctccatcaaacgcagacactgtagtcagacctcagcaatataggaggcaataatcttttaacagtgttttgcaaacaaacaaaaagagaaaaatcccagccaggggaactcgccacctgcccacgctagttccatccacgctcaagacccgcccttagaccaggcaggcaaaggcccccatcacactcggccactagtggggtcctgaggccaagaaagaaaccagaccctgtatgacaagtggggtctttcagaacacgacagaaacaggggggcccttgtaatgccactcatactcagagcattattcttatttggacagccaagggcagatcacaggttattgtaggaataaagactagtttacaaaggagaaagaggccctggacttcccaaggaaagggtcaggttagggctcctgtacccattctgttccaccactgtttgatctctctggcctcccaccaggaatgccgtttcctttttatggatctgttgggaaccagagagaatcaacagatcaatgacataggatccgaagtgcaatgatagtcacttctagtttggcatttcacaaactctgtacagcaaggtattggtaggttactcaatttcaaaagggccccatggccaaatatgtttaggaaccgctgtttgtatttctttttttggagacgcattgtatataatatatgtcaaaggctttcggaattcctgcaggaaagaaatcagctttgttaaatcca

SEQ ID NO: 11208 - DNA, 1350 bp, Homo sapiens
caccaagaagcccaccactagggggagacatgctgtaggggaagtgccactcgctgtttggggcccggccttcaaattcaaaattgagccatgctttttcggtttgtttttatttatctctttggcccagccaagctgccctcactacagagaccttggacaaggatccagccagtccctctctgccccacaaccctgcattcccagaggttagctatgcagcccacctagatgagtctcttcaagaatgggaaatcaaggggtgacagggagtaaaagggttatcatcttactgcaaagccacaagatcagggcagggctttaggatgttctggatgctttttaataattatgcttcccatcataactggggagaaagggaagtcagggttctaggggttattcgtcccaggaaatagaagtgaaattgtctttattaagtgaaaactttcccctttgccctgcaatgtagctgggcattcaaacggagggcaaaccgatgatctaaaccaaccacttggaaaaacccaatggggacattgtaaccagagggtcctggaggtggggttgatgggtttccttatccccaaagtcactcctgttttgttttgtttttctttgggggttttgtttatttttggggctggcaatccaaaatagaaaatctgatcctttgaggctctaaaggaaaatcagctgcctctaccaaccaccctctatcagcagtggcccaggaaggaggtcaagcatcttcggccgatatttaaacatgggcagcttccttcaggatgatcaccgaggctcccgtgactttgaactccctactctccagaatccaggggctatagcgatggggactgcggaattacgagggctggctgttttacaccggtcacattttctattggcagtgactgattcatgggaaagggctttgaaggaactacttcagtgcacacacaaggtacgaacctctcaggcctttcgaagaactttcataattcatgaaagcccagttctgaagattcacgtatccatctggagacctacaggaagaaagtgattgggttcctctggttcttgcctgcttcactgtggatgggaagaggtgacaacctcagtctccctttgggacctgtccaagggtaggcaaccaccttcaccttcacacagattgaggagacactggactttttacccattttctttaatcttcaatattaatattgtgtttacattgatgagaacaagagttaatgccctaccctctgctgggctgtttgtattgagttgcaatgtgaccagcgaaagctgcatttaataaatgaaagtacagactgtttcttcccc

SEQ ID NO: 11209 - DNA, 532 bp, Homo sapiens
gcccctgccgctcccacccccacccatctgggccccgggttcaagagagagcggggtctgatctcgtgtagccatatagagtttgcttctgagtgtctgctttgtttagtagaggtgggcaggaggagctgaggggctggggctggggtgttgaagttggctttgcatgcccagcgatgcgcctccctgtgggatgtcatcaccctgggaaccgggagtggcccttggctcactgtgttctgcatggtttggatctgaattaattgtcctttcttctaaatcccaaccgaacttcttccaacctccaaactggctgtaaccccaaatccaagccattaactacacctgacagtagcaattgtctgattaatcactggccccttgaagacagcagaatgtccctttgcaatgaggaggagatctgggctgggcgggccagctggggaagcatttgactatctggaacttgtgtgtgcctcctcaggtatggcagtgactcacctggttttaataaaacaacctgcaacatctc

SEQ ID NO: 11210 - DNA, 449 bp, Homo sapiens
acacccgatgctacgtgtcccaaaggaaactggtctccacccacccccggcccgtcctcgtcctgggtaccccaccttagtaaatggcgccaccatctgcccggtcactcagcgagaaactcaactcctggcagcagatgacgggcactctggttaaatgactctctccagcctccaagttcaacctgcagggaagccctggaaatcctgtctccctctgccctgcctctccttcagctccgaaccccaccccactcagtacatggccccccaacaggctttcaaatgtctgccttccccaaaccaatctgtggttttaaaagaagtaaggtcaggtacagtagctcatgcctgtaatcccagcactttgggaggccgaggcaggcggatcacctgaggtcaggagtttgagaccagtctggccaacatggcgaaaccccgtctctact

SEQ ID NO: 11211 - DNA, 5469 bp, Homo sapiens
agtgacgtgagacccctgcaaatgggacagccccccagttcatgaggcctggctattgcaatatttactagtagaggaactctatagcaagatgaagaggaaaaacaaacaaacaaacaaaaaaaaacacaaaaaaagaaagaatacttttttatacctcactatgttctttgaatatgtatttttcctttaaatttctgcctttaattcttttgttccaaagattgtgcatttttttctttttttttttaaactgtggtaaaaaaaaaaaaaataatgcatttccatgtctgtatgtccgtgcttagcttattctatcaatcacggaagaggcagtcaaggaggaaggagagacattaggagccgataaatgcatctgatcagaaatcagcagacagaattaccaaagtgtatctggtgctgaatgactgggggacaagcagaagtggaagagatctttctgcaacaggatattcttctagtcttctgagtttctggtctttgacaggcaattctggttggctgtggctggaatccacatgctgatagataggaatttgtgcttacaaagcaggagaattaaaaagacgctttcctctcctcttccctcctgtcttctccgttctttttacaatcatcttacacgcacagcctgagacagctggcatagtttttggaattatagtattgatatttccaaacgtgctctcagacagtggataataaacacctcattaggaaaccgatctcagaatgaactctggagtatgaaaaagatcatttctttttgttcctgtaacctagcattccttctaggcttcttctcctttaattgaaccacagcttagctcatgtattcttttattaacaccctgctctcatgtccataagattcaggaatttaggacccagggacagaaaagtgaataagccagtgaccagatttcccccagatgtcttgaggattagaagtacaaattgttgacagccattaaagagggtgaggaagggaaaaggaatattagaagatctggtatttcttacttttttcttgcctcagaaagtacaaagtttaaaaaatagaataaagaatctgctggggaaagatagagtaccaggtcctaggtcagtagtccctggaagttttggtgatgaggacatggaagggcaggcagaggcactttgtacttgctccaaagccataggaattttcatcttccagagcctttatgagtcacttctctatccacagtcttgagcctgtggctatcccgctgagcttctcactgtcctccaaaaacaccccgctgagcacccggaccactttgtacacattaacactacaggacataaaatgcagaggccctgagattgctgccctcccatattggaaggagggtctgcgatggcaagggtcttctatatcaccagaaagagtcgcgcagtgagtcactgccgttgccatctggctgtaattttctatgttatcaaggtaggagggagtgtttctcttctagctgttagatagaactgataaaagcaagtgtcctacagcatttcccaaatgaaggcattaggaaatagaaaagcacggtctttttggctccctggtctagtcacattggtactagggtgacctttcacccaagggacagctgctaaagggagtaattcagagacatggagcttctggttatgggtttgttttgggtttgtttttaactcctgcctccacacatgttcttgactgataactgactcatgtccctgaattaaaatgactgacctatgacagcatcaagcattctttgtaagcagagtgatatatctgagagggcgttgacctgttgtgtagaatacatatcctttcccccttcagaatcctgtctcgcctcgtaactgggagagaggctgtgcctgaaactaggggcgatgtcaaggaagctagaggcctcgatgcaattattactgactctggggaggaagacagagaataaggggacaccaactgcccagtccactggccatttttaagggtccccccaccccaagccaaagtttggtttgttgctgttaagacaatttttgttgtatgtatataaatattttagttagaggagcggggaatgggatgcgggctttcacagttctagggaatgggggcagggaggattttgcttttgcttttgctttgagggagaactttagctgactaaaaaaacagaagtttggggtcatgatcacaaaggggccattcccaaaagatggcaagccacgtattcagtggagactaggccaaattctaaatggttttatccatagcaggggagaataggagaatgagtttaagagtttttctcttcttttttcctagaaagaggtaaggataatgggaaaggtagagaaggcggctcccacagaccttttaagagaggcagaatcttgagcttgaggcaccttgagtgcatctcagttcagctggttctggctgaggcctccaaaggcaagctctgtgctttccagtggtttctgctgcatttccagggatggtgtttaacaccgcttcctccagctcccttttctaagaaagaataaatggagttctgctttttatgaaagggtctttggttttcagtgtcaacactgagaattggggctcttgcaagcatctggatttcacagtatcaacctccccgtcaccttttgaactttgagactccgtacggtcaacttcaccagaggcaggttgctcgaagcagcactgcttgtctgttcctgactctggttctcactgtattaaaaaagagagtcagaggagtctggcatttcgtgagtttgttagaggatgctggctgataattccagaaaacttactgatgctaaatcacagtacatgcatgattctttttcagctttactatagttcatgacctggactttctgtactcttggaagctgggctccttaaaggaggcctctagtgaacacctttatctccatgtccctcttagagcccagagagctgcccataggcattttccagaattcctcatgtcacctagttcaatttccattaactcagatcagccattgtgattcaccatttgtcaggctctcaggtttaacaaaacctactatcaccatcatccttcaacagccacagtctgaattgagccaacatttttttttctttgagaaagaagtggactggggcacaacttttagtctgaggggagctagtggaaatctagacaatagaagtcatcgatagcagcttttcctcaaatgtgtgactcctcaggggctaaactgctcttagcttagaattatgctttactagagatctagcagataagtgggttaatcactaccatcctgtaactagttatatagcttccagacatgagggagacatcaaacagggatggaagcaaccccaaggatatgcaagaagggcatgatgaacccccttccctctggcaggagaacaaggccaaccaagggacagactggaaagcacttagatgtttaaggaggagaaaggggaagctttgaccagtccttgccttttgccaagttcagccagttctccgctgcttgcaacctctagcgcagtaacatttgcagaattgcagattttcccccagatactaggaggaaagggactttggggggtggggaaggggtcgtggtgttttaaaagcataagttacctgtttgcactgttttaagataggaaaaaaaaatagtgggcaaggtgaacatcagacgtaaatttgtgtgtttttattttgtcatgctcttgaaaatgtttgaccatttgtagtatacacagtgaaacttgattctctgttgcataaaacactatatttttttggaaatgttactgtccaaaagcctcttccctccctttccttttcctatgtacttccttcatacttgctttactgatcagccaggcaatagccatccaagagctagagcatgaaacagggccctttccaagtaggctctgggtgtcctaagccagcgtgtgccctctggtttagtgagtgtaatagagtccctggcacctttctttgcaaatgaggctaacagaccagactgcagcaagttatcagattcctcaatcagatgcactaggagtgaggagcccagggatggagggggttcctgaagtattgcagttggctgtagtagctgagttcttttccatgttaccgaaactgtagccagttacagtttactcaggaaaacggtagatcaattcagccatggtagtgctggttggcagggattggtaacggagagaactgctcatcagccaaaactcaagccttgccttttaggaggccaccagcagagggacttggtcctccttgtctggtacttgtgtacatgccggtgacctgaggactccactcacactggcgagcaaaaagggagcagtgattctcttttctctccccaccccctgccctttgttaccaacaccagtttcccagggggtacatgagtttctgaatttttaaaaaatgtttttggtttggtttttctggggactgataagtgctttaagcaatgtccataccccgtcaagactcccagcttagtcattttcttgtatttttctgttcacagtatttgtgtgtgtgcttgttttggcagctcattttggctgtattatatattgagtgatgaattgatcctcttttttccctaagggatatgaattgtttttcttgtgttatattctgcttgtgaatagctggagcaaacctggggctgacacgcgtaagctagggctgcaaagcgagaagagagccggtggagtgtacttgtccctgacaggctgacctacctgagtctctgagcttttcagtccaaatctttgcaaggctcaaaatgccacagaacctctcctcttctccccactccccatggcagggaccggaccatccctacatgcaacatgctgttcctccagcccctcccattgccatggcaaaacaggtacctttggggcatgggggcattacatgggatgcttgtgtaatcgaccacctagccttctctctcccctcccgtcctcccccagaatcacttcctaggacacccgagctgcttgcccagggtcctgtttccctgctaactccagagaagcatcccagggctttgtgacagtctctaattcccttcccttctcgttaagaatcatattgtatagtagctttcagaccatacagtattcattgggttactcctattattatcaagtagctggaattgtgaaggtcggagtagttagatctttagcttttattccttatttttttgtattactctccatgtgtataaattattgatcatgttgctggcttttataaactctaagcgaaggaggagcactgcctcagcctttgcacatggtaatgaagcactgtttttaaataaaagagagaaacacca

SEQ ID NO: 11212 - DNA, 869 bp, Homo sapiens
ccccagaccagtgcagccagcaggggaggtgagccatacacaggccacgacaaaatgcaggcattttattagggggataaagagggcaaggtaaagtttatggagctgagtgttagtgactttggcatttctgtagctgagcacagcaggggaggggttaatgcagatggcaagtgcaccaaggagaaggcaggaatgctggagcctggaataagggaggagaggggactggagagtgtggggaataggaagaagaaatttcctttagactaacgaatatattggggggaggaatagaggggaggtgtgcaggaaccagcaatgagaaggccaggaaaagaaagagctgaaaatgcagaaagccgaagagttagaacttttggatacagcagaagaaacagcggctccactaccgacctgcccccggttcgatgtccttccaagaatgaagtctttccctggtgatggtcccctgccctgtctttccagcatccactctgtcttgtcctcctggaagtgtatctcagtcagccagtggcttcttgatgatggcggtggaggtggtggttgtagtgtgatggatcccctttaggttatttaggggtatatgtcccctgcttgaaccctgaaggccaggtaatgagccatggccattgtccccagctgaggaccaggtgtctctaaaaacccaaacatcctggagagtatgcgagaacctaccaagaaaaacagtctcattactcatatacagcaggcaaagagacagaaaattaactgaaaagcagtttagagactgggggaggccggatctctagagccatcctgctgagtgccctgtgtgtaagtcctaataaactcacctactcacc

SEQ ID NO: 11213 - DNA, 1945 bp, Homo sapiens
gcccaattgttgcgggaagtcagggaccccaaacggagggactggctgaagccatggcagaagaacgtggattgtgaagatttcatggacatttattagttccccaaattaatacttttataatttcctatgcctgtctttaccgcaatctctaaacacaaattgtgaagatttcatggacactgatcacttccccaatcaatacccttgtgatttcttatgcctgtctttactttaatctcctaatcctgtcagctgaggaggatgtatgtcacctcaggaccatgtgataattgcgttaactgcacaaattgtagagcatgtgtgtttgaacaatatgaaatctgggcaccttgaaaaaagaacaggataacagcaattgttcagggaataagagagataaccttaaactctgaccaacagtgagcctggtggaacagagtcatatttctcttctttcaaaagcaaatgggagaaatatcgctgaattctttttctcagcaaggaacatccctgagaaagagaatgcacccctgagggtgggtctataaatggcctccttgggtgtggccatcttctatggtcgagactgtagggatgaaataaaccccagtctcccatagcgctcccaggcttattaggaagaggaaattcccgcctaataaattttggtcagaccggttgctctcaaaaccctgtctcctgataagatgttatcaatgacaatggtgcccgaaacctcattagcaattttaatttctccccggtcctgtgttcctgtgatctcgccctgcctccacttgccttgtgatattctattaccttgtgaagtaggtgatctttgtgacccacacccacaccctattcatacactccctccccttttgaaagtccctaataaaaacttgctggttttgcggcttgtgaggcatcacggaacctaccgatgtgtgatgtctcccctggacacctagctttaaaatttctctcttttgtactctgtgcctttatttctcaaaccggccaacacttagggaaaatagaaaagaacctacgtgaccatcggggcaggttccccgatacccaatgaccccagagcagtgcagccaccagggaaggtgagccagacacaggccgggacaaaacgcagacattttttaggggaataaagagggcgaggtaaagtttatggaactcagtgttaggaactttggcatctgtagctgagcacagcaggggaggggttactcaagatggcaagtgcgccaaggagaaggcagaaatgctggggcctggaataagggaggagaggggactggagagtgtggggaatggaaagaagcagtttactctagactaaagagtatattgggggaggaagagagggaggcacgtaggaacaagcaatgagaagaccaggaaaagaaagagctgaaaatggagaaagccacagttagaactgttggatacaggagaagaaacagcggctccactaaagacccgccccccggttggatgtccttccaagaatggaatccttccctggtgatggtctctcaccctgtcttaccagcatccactctcccttgtcctcccgggggtgtatctgagtcagccagtggcttcttgatgatggtggtggtggttgtagtgtgacaggtcccctttaggttatttaagggtgcatgtcccctgcttgaaccctgaaggccgggtaatgagccatttccatggtgcccagctgaggaccaggtgtctctgagaatccaaacatcctggagagtatctgagaaccaaccaagtaaaagtctcgttgctcatatatagtagacaaagagccagaaaattaactgaaaagcagtttagacattgggggaggctggatctctcgagctgtcttgctgagtgccctgtgtgtaagtcctaataaacttagctactcgcc

SEQ ID NO: 11214 - DNA, 1193 bp, Homo sapiens
ccccagagcagtgcagccaccagggcagaaatgccgggcacaggccaggacaaaatgcagacttttttttttttttttttttttttttgagatggagtctcgctctatcgcccaggatggagtgcagtggctcaatctcggctcactgcaaactccgcctcccgggttcacaccattctccggcctcagtctcccgagtagctgggactacaggcacctgccaccacgcccggctaatttttttgtattttcactggagacggggtttcactgtgttagccacgatggtctccatctcctgacctcgtgatctgcccacctcggcctcccaaagtgctgggattacaggcgtgagccaccgcgcctggccaaaatgcagacattttattagggggataaggagggcaaggtaaagcttatggaactgagtgttagtgactttggcatttgtgtagctgagcacagcaagggaggggttaatgcagatggcaagtgcaccaaggagaaggcaggaacactggagcctgcaataagggaggagagaggactggagagtgtggggaatgggaagaagtagtttactttggactaaagaatatattgggcgaagaatagagggggagcttgcaggaaccagcaatgagaaggccaggaaaagaaagagctgaaaatggagaaaaccagagttagaactgttggatacaggagaagaaacagcagctccactaccgacccccccccaggtttgatgtccttccaagaataaagtctttccctggtgatggtctctcgctctgtctttccagcatccactctcccttgtccttctgggggtgtatcacagtcagccagtggcttcttcatgatggtggttggggtggttgtcatgtgacgggtcccctccaggttactaaagggtgcatgtcccctgcttgaaccctgagaggcaggtggtaggccatggccacaatccccagctgaggagcaggtgtccctgagaacccaaacttcccagagagtatctgagaaccaaccaatgaaaacagtcccatcgctcttagccggtaagtaaacagtcagaagattagcatgaaagcagtttagcattgggaggaagcacagatctctagagctgtcctgtcgctgcccaggattgacctgtgtgtaagtcccaataaactcacctactcacc

SEQ ID NO: 11215 - DNA, 1387 bp, Homo sapiens
gcctcttctcctgcagcctgagatggatggacagacagacaccacagcctccccttcccagaccccgcagcacgcctctccccaccttcttgggactgctgtgaacatgcctcctcctgccctccgccccgtccccccatcccgtttccctccaggtgttgttgagggcatttggcttcctctgctgcatccccttccagctccctcccctgctcagaatctgataccaaagagacagggcccgggcccaggcagagagcgaccagcaggctcctcagccctctcttgccaaaaagcacaagatgttgaggcgagcagggcaggcccccggggaggggccagagttttctatgaatctatttttcttcagactgaggccttttggtagtcggagcccccgcagtcgtcagcctccctgacgtctgccaccagcgcccccactcctcctcctttctttgctgtttgcaatcacacgtggtgacctcacacacctctgccccttgggcctcccactcccatggctctgggcggtccagaaggagcaggccctgggcctccacctctgtgcagggcacagaaggctggggtggggggaggagtggattcctccccaccctgtcccaggcagcgccactgtccgctgtctccctcctgattctaaaatgtctcaagtgcaatgccccctcccctcctttaccgaggacagcctgcctctgccacagcaaggctgtcggggtcaagctggaaaggccagcagccttccagtggcttctcccaacactcttggggaccaaatatatttaatggttaagggacttgtcccaagtctgacagccagagcgttagaggggccagcggccctcccaggcgatcttgtgtctactctaggactgggcccgagggtggtttacctgcaccgttgactcagtatagtttaaaaatctgccacctgcacaggtatttttgaaagcaaaataaggttttcttttttcccctttcttgtaataaatgataaaattccgagtctttctcactgcctttgtttagaagagagtagctcgtcctcactggtctacactggttgccgaatttacttgtattcctaactgttttgtatatgctgcattgagacttacggcaagaaggcattttttttttttaaaggaaacaaactctcaaatcatgaagtgatataaaagctgcatatgcctacaaagctctgaattcaggtcccagttgctgtcacaaaggagtgagtgaaactcccaccctacccccttttttatataataaaagtgccttagcatgtgttgcagctgtcaccactacagtaagctggtttacagatgttttccactgagcatcacaataaagagaaccatgtgct

SEQ ID NO: 11216 - DNA, 758 bp, Homo sapiens
caagcagggatgagtcctggttcccttgcccgcgtgggaccccaatagaactcagcccttccatgccagcccttcctgctgcctccctcctgtctggctcctggggcccatgcttagagcccaggctccagccctgagtgcttccgagctggcggactgcccaggggccatcagaggatggtggtgctgctgctgatccggggaccgctgtcttccctcccatacgcctttcatccctccttctagggcctatggcagttctcccaggatgtgtggcgagagcctgggccagcccacagcgttcctagtcaggcagccacaccttggtcctcatcttggtcccttccaatctgaaacctcgtgcctggctcgtctgccacctacatttctctttccagctgctgttttgtaaaaagaaaaagaaaaaagaagcccaaactagtgagagtaatatctaattatctcattttttgtaggtctgtgataaagaacttagtcatcccttccacctcctactgtgaagaacagaccctgggtcccacactgaaatcccctctagtcacccattcccaccccccagggagctgcctcccaggcagggggtgcagaaaatgattgatgggctggggaaccctggagagcctcgactccggaagtctcaaggtgcctcctcctctccttagctggcccgttggttttctgagcagggggctgaactgtgaacaagtcagacaaataaagcaagggtctgcaccatc

SEQ ID NO: 11217 - DNA, 1752 bp, Homo sapiens
ctgtcccttcctaagctgtgggcacagtggccaggcctccccacctaggcccatggtcagtccctctttccccgcaacctcacactcccgccaatgcgtgattgccaaagaccactcagatcatggcagtgtctgcagcaaagccaccagatggcacgtgagggctgaaagtcggggatgcggtggtctcctccctcctgtcagggggcagaagggcatcctctgccaggtgggagctgccttccccagcccagtttgtctgcaatggagctgtcgctgagccccaggccagcccagttctgccccgtctcaagtgctcctcttccttccaagcccctcctcagatgggcctgcatcccgcctgtggagtgcttcacaggggaaacccatccgcatcttaagagtttgtggcaagcgctttaaaacaaaagctctgatatcctcaacaaccacaatgggcaggtgggattgttgccccagatgactgctgaagacaccagctgtgggatgtcaagtaattccagggacccccagctgggagtccccgtctgtgtcacttgccacacactgcctcaacctccccgccccattttcagcagggtttgggcttagctacagagcccaagagggtcagccctgcttatcatcataggcccagcaggctgatctcgagcagcgataggacagctccctgcaaagccatcttagcaactttctcactgagaagcaggattcagagctgctctccccagttgcaccccctgactcatcttccagctggctcttctctcccatcctactcccttctgtctccctgccctctgccatcctgaaccatgccttgcttctaacctgcctggtcaagttttgtgaaacttatcctgctgtctcgggctggcacccatatgtgctcaccatgtgtaaggtgacatttccaaatgcctttgtgtgataatgatgatgaatttggttcctagtctcttcttcattgcccttcctcaccagcaatctgcactttcccatcaggcgtcttagtctcatttgtaagtgcataagataatcacagtgatttttcaaagcccaggatcataagtgattgctttttcactggttcttactaactcttcatgtatccactcagaattccaaggacaatcccagcactctgggaggcccaggcaggtggatcacctgaggtcaggagtttgagaccagcctgaccaacatggagaaaccctatctctactaaaaatacaaaactagccaggcgtggtagcacatgtctataatcccagctactggagaggctgaggcaggagaatcacttaaacccgggaggcagaggttgcagtgagccgagattgcgccattgcactccagcctaggtaacaagagggaaactccatctcaaaaaataagttaattaaattaaattaaaataaaacatgcgctgggtacagttgcttacacctgtaatcccagcactttgggaggccaaagtgggccgatcacctgagctcaggaattcgagaccagcctggccaacatagcaaaaccttgtctctactaacggtaaaaaaaattagctgggcatggtggagcatgcctgtcatcccagctacttgggaagctgaggcaggagaattgcttgaacctgggaggtggaggttgcagtgagcagagaccgagccactgtactccagcctaggtgacaaagcaagacccacagtaaagcccccacaccccatctca

SEQ ID NO: 11218 - DNA, 137 bp, Homo sapiens
accagtgatgtggagctggagtttgtccttccaccgagactacgagggcctttgatgcttagtggaatgtgtgtctaacttgctctctgacatttagcagatgaaataaaatatatatctgtttagtctttccctca

SEQ ID NO: 11219 - DNA, 294 bp, Homo sapiens
agaccgcgggcctcgccagaagaccgcgggaggagggcgcggtccccgggggcggggcggggcggggagacccagaccctccgctgggagaccttccaaaagcaaaaacaaaaaacaaaaaaaacaaaaaaacaaaaaacaaaaaaacacacacacacaaaaaaagagaaaaaacataacaagtaaattttaaaaaaaagaacaaaatataagaggaacaaagaagcaaaacaacaggaaatgtgggaaaatataaacgagggaagaaaacaaactttaaaaaaaagcgagagg

SEQ ID NO: 11220 - DNA, 100 bp, Homo sapiens
cgagctggagcagatcgtgctgcacaaccggagaagacagaattacctctgctcttttaatatataatgatggctttaaataaaattaggagaaaatgtc

SEQ ID NO: 11221 - DNA, 188 bp, Homo sapiens
gaagcactgactgcccctggtcttccacctctctgccctgaacacccaatctcggcccctctcgccaccctcctgcatttctgttcagttcgtttatgttattttttactcccccatcccctgtggccctctaatgacaccattcttctggaaaatgctggagaagcaataaaggttgtaccagtcag

SEQ ID NO: 11222 - DNA, 44 bp, Homo sapiens
ttttgacacagtagaggtgtcttctactcaaataaagtgctaac

SEQ ID NO: 11223 - DNA, 161 bp, Homo sapiens
gccgtgacctcttctgcttactgtaactgcggccggtttagtgaccccatgacttacagccggttcttacctcttaggtgaaggagatgacatgtttttagaattgctgtgcaaggctcaccctctctctgtcaacactggaataaactttgccttttctg

SEQ ID NO: 11224 - DNA, 641 bp, Homo sapiens
ggaactgcccccctgcaaagcagggcccacctcctggactcagagagcccagggcaactgccaagcagggggacaagtattctggcggggggtgggggagagagcaggccctgtggtggcaggaggtggcatcttgtctcgtccctgatgtctgctccagtgatggcaggaggatggagaagtgccagcagctgggggtcaagacgtcccctgaggacccaggcccacacccagcccttctgcctcccaattctctctcctccgtccccttcctccactgctgcctaatgcaaggcagtggctcagcagcaagaatgctggttctacatcccgaggagtgtctgaggtgcgccccactctgtacagaggctgtttgggcagccttgcctccagagagcagattccagcttcggaagcccctggtctaacttgggatctgggaatggaaggtgctcccatcggaggggaccctcagagccctggagactgccaggtgggcctgctgccactgtaagccaaaaggtggggaagtcctgactccagggtccttgccccacccctgcctgccacctgggccctcacagcccagaccctcactgggaggtgagctcagctgccctttggaataaagctgcctgatc

SEQ ID NO: 11225 - DNA, 2254 bp, Homo sapiens
acagatggccagggtgggaggcaggcagctgcctgctctgcgccgagcctcagaaggaccctgttgagggtcctcagtccactgctgaggacactcagtgtccagttgcagctggacttctccacccggatggcccccacccagtcctgcacacttggtccatccatttccaaacctccactgctgctcccgggtcctgctgcccgagccaggaactgtgtgtgttgcaggggggcagtaactccccaactccctcgttaatcacaggatcccacgaatttaggctcagaagcatcgctcctctccagccctgcagctattcaccaatatcagtcctcgcggctctccagggctccctgccctgacctcttccctgggttttctgccccagcctcctccttccctcccctccccgtccacagggcagcctgagcgtgctttccaaaacccaaatatggccacgctccccctcggttcaaaaccttgcacaggtcccactgccctcagccccacttctcagcctggtacttgtacctccggtgtcgtgtggggacatccccttctgcaatcctccctaccgtcctcctgagccactcagagctccctcacaccccctctgttgcacatgctattccctggggctgctgtgcgctccccctcatctaggtgacaaacttccctgactcttcaagtgccggttttgcttctcctggagggaagcactgcctcccttaatctgccagaaacttctagcgtcagtgctggagggagaagctgtcagggacccagggcgcctggagaaagaggccctgttactattcctttgggatctctgaggcctcagagtgcttggctgctgtatctttaatgctggggcccaagtaagggcacagatccccccacaaagtggatgcctgctgcatcttcccacagtggcttcacagacccacaagagaagctgatggggagtaaaccctggagtccgaggcccaggcagcagccccgcctagtggtgggccctgatgctgccaggcctgggacctcccactgccccctccactggaggggtctcctctgcagctcagggactggcacactggcctccagaagggcagctccacagggcagggcctcattatttttcactgccccagacacagtgcccaacaccccgtcgtataccctggatgaacgaattaattacctggcaccacctcgtctgggctccctgcgcctgacattcacacagagaggcagagtcccgtgcccattaggtctggcatgccccctcctgcaaggggctcaaccccctaccccgacccctccacgtatctttcctaggcagatcacgttgcaatggctcaaacaacattccaccccagcaggacagtgaccccagtcccagctaactctgacctgggagccctcaggcacctgcacttacaggccttgctcacagctgattgggcacctgaccacacgcccccacaggctctgaccagcagcctatgagggggtttggcaccaagctctgtccaatcaggtaggctgggcctgaactagccaatcagatcaactctgtcttgggcgtttgaactcagggagggaggcccttgggagcaggtgcttgtggacaaggctccacaagcgttgagccttggaaaggtagacaagcgttgagccactaagcagaggaccttgggttcccaatacaaaaatacctactgctgagagggctgctgaccatttggtcaggattcctgttgcctttatatccaaaataaactcccctttcttgaggttgtctgagtcttgggtctatgccttgaaaaaagctgaattattggacagtctcacctcctgccatagggtcctgaatgtttcagaccacaaggggctccacacctttgctgtgtgttctggggcaacctactaatcctctctgcaagtcggtctccttatccccccaaatggaaattgtatttgccttctccactttgggaggctcccacttcttgggagggttacattttttaagtcttaatcatttgtgacatatgtatctatacatccgtatcttttaatgatccgtgtgtaccatctttgtgattatttccttaatattttttctttaagtcagttcattttcgttgaaatacatttatttaaagaaaaatctttgttactctgtaaatgaaaaaacccattttcgctataaataaaaggtaactgtacaaaataagtacaatgcaac

SEQ ID NO: 11226 - DNA, 2022 bp, Homo sapiens
gggcctctgggccaccctcccggctggagagctcaggtgctggtcccgtcccctgcagggctcagtttgcactgctgtgaagcaggaaggccagggaggtccccggggacctggcattctggggagaccctgcttctatcttggctgccatcatccctcccagcctatttctgctcctctcttctctcttggacctattttaagaagcttgctaacctaaatattctagaactttcccagcctcgtagcccagcacttctcaaacttggaaatgcatgcgaatcacccggggttcgtgttaaatgcagattctgactcagcaggtctgagtgggtccaggattctgtgtttctcatatgttcctgggtgatgctgatggggtcagtctatgaaccacactggagcaaccaggttctaggactttctcaatattctagtactttctgaacattctggaatcctccccacattctagaattctcccaacatttttttttcttgagacagagtcttgctctgttgcccaggctagagtgcagtggtgcaatctcagttcactgcaacctctgcctcccgggttcaagcgattcttctgcctcagcctccctagtggctgggattacaggcgcctgctaccatgcctggctaatttttgtatttttagtagagatggggtttcaccatattggccaggctggtcttgaactcctgacttcaggtgacccacccgcctcggcctctcaaaatgctgggattacaggtgtgagccaccgtgcctggccaattccaacattcttaaattctctcatccctccagggctccccgtgctatgttctctttaccccttccccctcttctcttgctcaggcctgcaccactgcagccaccgttcatttattcattcattaaacactgagcactcactctgtgctgggtcccgggaagggtgagggggtcagacacaggccctgcccctgccctcagtgactggccagtccagcccaggcggggagagatgtgtacataggttttaaagcagacccagagctcatgggggcctgtgttctgggtgttcaggtgctgctggtcctccattacccactgctccccaaggctggtgggacggggtcccggtggcaggggcaggtatctccttcccgttcctcatccacctgcccagtgctcatcgttacagcaaaccccagggggccttggccaggtcaagggttctgtgaggagaggacccaggagtgtgggggcatttggggggtgaagtggcccccgaagaatggaacccacacccatagctctccccacagctgatacggcatcctgcgagaagacctgccctcctcactgggatccccttcctgcctcctcccagggctctgccagggccttgctcagtcccttccaccaaagtcatctgaacttccgtttccccagggcctccagctgccctcagacactgatgtctgtccccaggtgctctctgcccctcatgcccctctcaccggcccagtgccccgactctccaggctttatcaaggtgctaaggcccgggtgggcagctcctcgtctcagagccctcctccggcctggtgctgcctttacaaacacctgcaggagaagggccacggaagccccaggctttagagccctcagcaggtctggggagctagagcaaaggagggacctcaggccttccgtttcttcttccagggtggggtggcctggtgttcccctagccttccaaacccaggtggcctgcccttctccccagagggaggcggcctccgcccattggtgctcatgcagactctggggctgaggtgccccggggggtgatctctggtgctcacagccgaggagccgtggctccatggccagatgacggaaacagggtctgaccaagtgccaggaagacctgtgctataaaccaccctgcctgatcctgcccctgcctgaccccgccacgccctgccgtccagcatgattaaagaatgctgtctcctcttggc

SEQ ID NO: 11227 - DNA, 340 bp, Homo sapiens
ggcctggggaaagccaggatggcccgaggaagaggcagaagccgtgggtgtgcctagggcctacttcccaaggtgccacaggcccatgatgggatgttgaggggcctggactttgatgctattgctgccaggtcttgctgtgtgaccttgggtaggttgcttctactctctgggccttgttttctcctctgtgactcagggataggagtcatcagcctggatgagctatgtcagatgagaggtttggagggcactgttgctgggctgacctggctgagcaggcaaaaggtgggtgcagactggcctccccccagggatggagtgtcttggggcatcaact

SEQ ID NO: 11228 - DNA, 768 bp, Homo sapiens
gttgcaccccagcgctcccacctagatgggtctgatcctccaggatccccacccaaagcctgatggcaccccggctggccatgctgtcccctccctgtggcgtttcttagcagatggctgcagagcttcgttgatggtcttttctgtactggaggcctcctgaggccaggaacgtgcaaatttgcaggtgctgcatcccaagcccctcatgctcctgccttcctgagggccagaggggagccccaggacccattaagccacccccgtgttcctgccgtcagtgccaactgccgcatgtggaagcatctacccgttcactccagtcccaccccacgcctgactcccctctggaaactgcaggccagatggttgctgccacaacttgtgtaccttcagggatggggctcttactccctcctgaggccagctgctctaatatcgatggtcctgcttgccagagagttcctctacccagcaaaaatgagtgtctcagaagtgtgctcctctggcctcagttctcctcttttggaacaacataaaacaaatttaattttctacgcctctggggatatctgctcagccaatggaaaatctgggttcaaccagcccctgccatttcttaagactttctgctgcactcacaggatcctgagctgcacttacctgtgagagtcttcaaacttttaaaccttgccagtcaggacttttgctattgcaaatagaaaacccaactcaacctgcttaagcagaaaataaatttattgattc

SEQ ID NO: 11229 - DNA, 5112 bp, Homo sapiens
ccccccccttcctccctggtgaggtcggagccagagggctgggggccttttgggggaagggtccaggcggccagggcggggagcagactcgggggccaaggcccaggagaggacgcacatgcagacccgcacgcacgcacgcacacacacacctgaccaccacccgactgtgaacaaaccaacatccgacaataacggacaggaaaacagagacacattttccttaaagtttacaaactgataccgaaaccagtcgtctttactgtgctgcccagggactctgctggggtgtgcagggccggggggctggcggggggaggaaggaagccaagagagggtgtggggtctggggggtctggggctagaaacaggtgtgggggtcaagaaagctggagtagagagggactgaagcccctctagggcagggagagggtcccttcccaagctgggagtcaagtcacctgcagatttagcattagacatcgggcaatgtctccttccactttagagagggggggaaactgaggcccagagaagggagttgacaaccccagggtcacacagcagcttagcctcaagtcccccaacttcccagcccagtgctgtcccggaaccccctgcagctctcttgtggacccctgcccgccctgtgcccaccccacatccctttccgaagctgtggtcccttggggctgagggacttgggaatcaggcaggtgctttttcttcctagaaagccacatggcagtgcccccagagtgtgcagctgtgattcagaatcctggggggcttttgacccctatgccggcacccgggagaagggagagggtcctgttgacgggaaaggagccgaggcagggcgacattccaccagcccacttcaagtgtcttccacgtggcctgggaagagtggggcgtgtggcgggcaggccagctcccaggacgtctcaggtgcaggctcccggccccagcttctctggtcctccgagacccctgcccaccgcagaagggcagcggtgcactgtgatgcctggagggctgcagggaggagctgtcatgggggacttcctgcctgtccccatggcctgtgtccccacctgcccgaccccatcgtgggatctcggctcctatctcagccgcccacccggggaaggagggctttctcacccatcccctctgggctgctcatccaggcctggccccctggccagaggggctcccatgtttccgtggcaatggccacttccctctttctgacccccccacccaacatcaaacaaagcacaaacagtgaggcccccacccgagagagggttgaggagcaggctgggttcgtggcgccccagcccctcccagccagcctctgtcaccatggtaaccctgtgcctggcagttggtgcccagagtgaccgttgggctctggggttctctgtccatgtaggcggtggcagagggtggtgagggagggccagcctggcagcagctcctggggccagctcttttgggaagcaaatctgcggtcctgagactggggtcttgaccagtcaggatgctgatgggccggagtccatcatccttcacctctgggtgggagctggcccagcggggtgtggggacgcctctactagcagctttgcccgcctagcaacatgtcgcttggctgccacccacctcagcttggggggccccggctctccccacgcccctgccagagacccccagtctagggcctgtggcccacatgggtttcctgagatttggggagtgtgactgaggggcgagggtaggcactggaatgggtccaagaccggcactgttggtgggcaggggctctgaccaggaaagctagtgccatcccctggggaccccaacgaccttcctgctgggggcagggggtgagggaggacagcagagggctaggaggctcgggctcagctgagtacctctctcacaccaactttggggttaacgaagcccagggctcactttgagggtgacatttgcaaagaaaagactgttctcctggggcgaggaggggagggggcggcatggatacgcggagcagacctcctcccccggcccccaaaacctgccccccaacccctcctcacacccccttggcacaactgagaaaagcaagcaggcagagaagccaggggtgtgaggaagcagactccctgttatatttgcatgacgattttactgtatttttctgagcaaacatctgtcgtgtatgtgccagtttgtccagactcccccgccccctctctgatgccctgctttcccacattctgtctgttgtgatctgacgagcagctcttgaaacccagggaggggtcagctctgcaaaaacagacccaaaacaggtgccaccaagacacagccctgccccacacccacctcctgtgtttctgagcattgggcccatgtgccacctcccttcctccctccctctctccactgccacctcccttgtccccagttccttcccctcctccatgccagggagggcagccccagggaagcctcctcaagggctcttgtcccggtggaagggactgtctgtccgtcccgcttgttcccgttttgtagatgaggaagtcagggctcccagacgggcctggtgaattggctggccagctggggtggaggatcagtcacactgctgagtgtaggaggccaggagcttggggcttcgtggggggcttcagggagagggtgggggctttgagaaaggaacccgtgggaagaaggagcacgcctgggctgggccccagggagggttcccagcagcaggagttaggggcctgcgcttgccatttccccatcctttctgcgtgaagatatttaggaaacctcagactctctgactgcagggacaggggcccttccaaagagcaggactctgatgatccaggaggggaactggccttgaagacccagttcatgtggttctttgtgaggcagagcggggtctaagactcgggtctctggcctcccagccaggccagagccccaactgctcagcttggggagagcccacccggaggctggcctgcatctgtgtcccacgtcctgctcaggatgagtttttcccaggcgggagggaagtattcacaaaatgttgccatccaaggtctgggtttgtgatgatgatgagcatggtggagctgggctgtggtctggggcaggccagcagggcagacaccaggaaaagagggcagggggggccacagggagggaggggagatggaggcccggtggagcgagggatgtgtgggtgccacgccctggacctctgcggggaggcctcctgccttgggccggaacaaggtcacacctgggcttgcctgcctctgttggagaatctcctctgaagctgtttctgggaagtagcacaatgggtctgctccttcctgggagggcacagcaggtgcagctaaccctctgttggagcttatggccttccagtagcaaaacacagaggtctggcatgaaggcaagaaagcctggttggtggggaaacctcgtcacgggtcccggccttgcttttccccgcggcaggaagagtctctctctgcccaccaaagaatccctcacctgggctcccctcctgaggcagtgcaggaggcctgtgggagcagcctgtgtccaggctggggagcccgtgtctgggtaggtctgggaaaagggctgtcaggggagcgaggagggtgggagtaaagagacctgcttgggaaggccaggcctggatcgtccccgggaggcagctggggcagcagcagtggggagtatcaggctggccgagagtcacccatgttctcaactggaagttggtcgcctgccccactccctcctggaaatgtaacagcggggtgaacagaagtgcagagacggaaaggagaggaaaggagacctagagctgacaaactcggttgtgacagtgctgaggccgggatggcatcaggaattaaggacaccagtgacaggtcctagcttataaggggcctaagtgcagggaagggataagacacaatgctccctagtgactggcgccttgcagaaaattaaaatagggtgatgggggaggggcaaggctggtcagggagcatcctgtgtgggatggggggacagggagccaagctgtgaatgacaagaggagccagaagggtgggtgggtgggtgggtgtgaagacgagactagagggagtggggttgcagtggctgcctgtcccccaagcaccgcctctgtcccctactaccctgcccctgcccattcctggcccagcagagccccctttccatgagtgtggatgggcggggcaagccgtcggggagcctggggaagctcagccctgaggggcttactttgcccgtggaagccagtgtgaaggttagggcagccttgcctggctggccccattgccacctctcctgtctgacaaggtggctgctccagaggtggctgagccccaggagaggggacctcctctaactctcatgctcagattccatcctgacacactccttccctgaccctgggtgccccttctaagacaaaaccagggtccatactgcttgcctccagaggcggcttcaggcctcactaaaggtcaggcagtcctgctgagcaggagggagaggaagggggtcctgtaggacgggcaggatggtctgggcctgctcctccttcctctgcccctctgccactccacactccagcacagggctgggacaggggcttggagttcctgcagtggcggccacacttccctccctccctcccttcctcaggagccgccagtccccaagttggctgtggttgggcacctggtttgggtcctgcagagctgggctcaggccctgggctctgaacctgtgaacccttgctgtgttacgaaactttccttcctctgagggccttgaaccctctccttttcttcttttgggggtgggggttaactttattttctcttccctgtatctgcctctcccttccctcaatttcctgttttaaaactgaatggcacgaaattgttttcctcaactcggagattcctgtatggagagaatcaatttctatatttgcaataaatttcttatttaaagcta

SEQ ID NO: 11230 - DNA, 898 bp, Homo sapiens
atcctgaactgctgggcaaaggttgggcagagacttctgggtgtgccttggctcccaaggtggcactgtgggtccctggcaagtgtcttgtgataggcagtccctggcagggccttcgggtggttggcaagcccaggatctgagtggcaattggcactgaaggcaccccaggcccctgggaggtgagttagacagcccaggggaccaggtggaccaggtggtggccagagaggctccaggggctagactccctcaggaggctgaattgaaaaagggcagggggcacttgagctgggctggggctcaggggtcctaaccctttaggcagtgacatggcctctgggtggggtctggccgttggccctggctaatgtctctcagtcattcccctggggctcaagcgctgggccgcccactcctgcctccctcatctgtgtcccgagttcctgaagggacatgggtggaatgatggcagaatccagggtctgcagcacctgctgttgttgccaaccagtctcccaaagctccttgctccccaccccttgcgaacaggaccagattttgtttggagcctcagcatgccggggcccagatgatggagcataacgggtcccagccaattgtgatgatcctttttgctcatttcccagcctttcttgctgttaggggctaccatgggaccagctctggccagagggaactaagcaaatccaatagagatgtttctggggaaggttttgcagcccactccccatcttcctgctataaatgtgggtgtgatggctggatctggggcagccaccttgctaccatgaaggaaaggccaagacaatcatccacagctattccctccagcatctggttctgtacaaaaattaaatgcttatttgtttaagtc

SEQ ID NO: 11231 - DNA, 796 bp, Homo sapiens
ggctcatctgatacctgcaccttctccccaagccagcgtggaccctggtgtctatggtgaagctgggccctcccaccctgagccttcctagacccttggactctcagatgcagggcccttggctctggcctctcacccccaaggctgtctctggccctgccgagcctatgggagtcccgggacagagtgcccactcccctctacttgctgctctgggcctccccacctttcctggggtctccacattcccactagtgggtcttatgtgtgtctgtgtcttctccttaaacactcgccctggagtctgttctcacacctgtgcgcaggtttgcacactcaagttctcatgggcaggctcaggtctgtcccgctgccctgggcacgaggtctcctgaggacctgggcctgttctgctcctaggagacctgagcccgttaccgcgtgactcccaccatccagctcgcgctcctcgtggattcagccatgcatggactggggtgttccctggcccatggtcacctgtgcccctcgtgtctcctcacatgggtgtctgtggttctctcctgtgtaaatgtcacgccccacccctgtttcatgtgggcactaacacgtgtgcgttcctggcgggcacactcaggaccgtgcctcacagggcccactccctgcctatgcctccctcttggggggccgaggagggcggctgctctgtcatgagaatgtacggcccgtggatgattaacgggcctttttcacttagaagctgcacattatggagcattaaacacttttgtcatag

SEQ ID NO: 11232 - DNA, 16 bp, Homo sapiens
aagacttccagccgag

SEQ ID NO: 11233 - DNA, 1087 bp, Homo sapiens
caagagaggctccctgccttcctgccactgccccaccctgccccactgctgtctcagtaccaagaaaaagcccaacatctgggacttggagctgcacttgtctggtgaggaccttgccctcacccgcagatgccgtggggcagagatgctctctctccacggcctcagagccactcccagccacagtttccagcatctctgtggacagggaccacagctcccagcttcttccagttctcgcagcaccagaccagcctctgcagctgcacttcagctccgcagacctgcgctatctcagcagacctcacttgccccatggccttcatggcgcgctccaggcctcagacccttctctgtgttccgtcctggccatgggcttgttgcagtcagcaggtgtgggcttaggcgggcaccctgtggccaggggtactgcgtgaggccctcagttggtcctgtgcctctcaccagcacttagacagacacgtcaccagactttcaaggagatactgcagtgagtttctctggttggaaggggagggttggtgagtcccagaccttaaaaatacaaggttaagagggaccccaaagcaaaaaattccaacccttttcctcccagtcattgaaacaccaaaactattataccggagggtgtaatagttttgctgcccagttgtggtaggccagtagtggcctcccaagatgcccatgtcctaatcccaggaacctgtcaaaattaccttgtatggccaaaggggctttgcagatgtaatgaagttaaggatctttcgccaggaagattatcccagcttgttcaggagggcttgatgtcctcacccgggtctgtataacagaagagcaggtgacgggagaggaggttggaggtgtagcgatggagcaggaaactggagttgaggagggcagctcaagccacagagtccaggccacctcagagccaggaaatgcatcctcccacagagccctggaaggccccagccctgctcccacctggactggctcagtgaggctaattttataattctggctgattttagaactctaagggaataaatttgtgttgttttaagtc

SEQ ID NO: 11234 - DNA, 649 bp, Homo sapiens
tctgtctccagagacgggcagggtagcccaagctcgaccactggagtccactcctctgccaggcagggccatcctcaggccagcccatcctaccagccttctgccacgtcaggtggtggcatagcactgccctgcagtaccccaaggcatactcagcagcctagcccctgccccggaatgcagatggagcctctgagactcacagccccgtccgcagagaagcaaagcccgagcatccctactaggacatgtgtctaaaggtatccactgggcctgcttcccaccacttctgacctgtggcctgttcatttagttttctgaattcaggaatgaatatgattcctttcttcctgttttaggatttacttatttgatttcttaccgccttaggcaagtattcaaccacaatgattaactggccaataaaacatatttaacgtgggtcattacaagcaccattttgttttcagagggataagcttatttgttcaaggcattagactttgtcaagcccagatggtttctagctacctgtttgcatatttcaagtggcaacgggaaccaacctcttgggcaccccatggctggctgctgtggcgggtgctgaattccactctgttaatgatctcaataaacctctgcaacggtt

SEQ ID NO: 11235 - DNA, 1182 bp, Homo sapiens
agggggccctgtcgccaccaccccccgcccagcccctgcccccagcctgtgtgccctgttccttgcccacctcaggcctggtggtggcagtggaggaggctgaggaggctgaagaggctgacaggtcggggggctttctgtctggctcactgccctgatgacccacccgccccatccaggctccagcagcaaagccccaggagaacaggctggacagaggagaaggaggttgactgttgcacccacactgaaagatgaggggctgcaccttcccccaggaatgaccctctatcccaggacctgagaagggcctgctcaccctcctcggggaggggaagcaccagggttggtggcatcggaggccttaccactcctatgactcctgttttctctctcacagatagtgagggtctgacatgcccatgccacctatgccacagtgcctaagggctaggccacccagagactgtgcccggagctggccgtgtctcccactcaggggctgagagtagctttgaggagcctcattggggagtggggggttcgagggacttagtggagttctcatcccttcaatgccccctccctttctgaaggcaggaaggagttggcacagaggccccctgatccaattctgtgccaataacctcattctttgtctgagaaacagcccccagtcctcctccactacaacctccatgaccttgagacgcatcccaggaggtgacgaggcaggggctccaggaaaggaatcagagacaattcacagagcctccctccctgggctccttgccagctccctcttcccttactaggctctatggcccctgctcagtcagccccactccctgggcttcccagagagtgacagctgctcaggccctaacccttggctccaggagacacagggcccagcacccaggttgctgtcggcaggctgaagacactagaatcctgacctgtacattctgcccttgcctcttaccccttgcctcccagtggtatttgaataaagtatgtagctatatctgcccctattttcctgttctgcagccccccaaatccacatgtaactcattactgtctcctgttatttatctcagtagtcccctctcctagccactctagcccctattaactctgcattaagcattccacataataaaattaaaggttccggtt

SEQ ID NO: 11236 - DNA, 251 bp, Homo sapiens
ctcagggtgctctgggtggggtggcccagtgacttgggaacacagcttcttgtctcagagagcctggtacgctgggaggctggtctggggtggtcactcccggggtccacgtctgggctccagttgatcccctgggtgtctgggaactgcctccctcatctgtgccccaagttccgccaggccctgccccatcgccagtgaagctgctatggagcaacaggaaactggtgataaagctcagctgaacgaca

SEQ ID NO: 11237 - DNA, 410 bp, Homo sapiens
ggcggggtccgaggtcgtaccccacagtgcacctgcccaggggctgttcagagctggcaatggcagcgacagcagcaacagcagcagatccaagaagcgggtccctgagacggggggtggctgccctccccagaccaccccggcagcctgagcagctccaaagcactggcttggggtccgagaccttcaaagtaaagcaggcggaatggggggacaggacaatttctccccctccaggggctccaggactctccctggggggcccacctcttgccccctaacctctttcccccttttctgcccccgtggggaggagccccttgtacctgctccgtgcccaacacatgccctctctgtacatcttttgtaaatgatgagaaataaaggaagtggacgcaaagtgatgcggc

SEQ ID NO: 11238 - DNA, 665 bp, Homo sapiens
gggtccccagcctctcaccggccccagctgacctcgtccattcagcccctgccaggccaagcccagccactgccctcccgggcagatctgggcccaggcacctctgagtccatagaccaggcctgggagaatgccaagctgcctgcccgaggctggtcctgaaggcctgtctcccactaaccccgccttccagcactttctgtcattccaggctgggaaagtctagagccccctttggcccctttccctgactgtcaaggacaactgactcccccatcagctcaaacattaagggtacccgggcacaaccgtacccctgcccccagccccagcctccctgagggcctgccgggctgcctctgccccagcccccagcaagggcactcccaggcttcctggtgggtgcagcccactccctctgccctctgctccgttccctgggggctgggactaaagaaatgggtgtcccccaccccatcagctgggaaagcccaggccgcaggagtgggatgcccgttggactttgcccctcacactggcccagcccctcacactgccccaccccgagaaccctcagctctcaaaggtcactcctgggagtttcttcttcccaatggaagtggcttaagagccaaaactgaaataaatcatttggattcaagttc

SEQ ID NO: 11239 - DNA, 2178 bp, Homo sapiens
gtgcgggctgcagtggcggaagtgctggcgccatagccacggtcaggctgtgccccacctccagcctcaccaccaggccaggaggcagctggcacagtgctcacgccgcctttatttattggaccagaaacactcacatgtcacttccagaggaacgggggacagccaggctcgcccatgggccttcaggaatatttatacatggcccagcctgcactgcccgggcgagggcagaggacactgggagcaaggcttatgcccctgctgcccgtcctgtgctgggggcatgctgggaccagccgcacccaggccccaatgcttgtgtgtggaccagcggctgcagccttctagcccctcctccccgcgagactctcaggctgaggtcggcaagccgtggctcccccacacaccgtgcaataccctgtctgacctgggctcttcccgcctgcatccctcccctgtccacctttgtccagtgctagattcacctcaccccgggcaggagtggggatgtgggcgctctgtggtcctcccctcctgacccaggcctctgtggcatgctgcaaggatcagagccagacaccaggagtcacaggccccacccaggaagggcattcagggcccctgggcaccgcttctgttgaagcaggggcttctgggcccctgggtatccccacctgtcgtggccacacctctgcctgcctcatgccccttccccctggcctaccaaggacagcccacagcccgcactgccggctcacttgggtccttcctcgatagctttgggcagagcccttgcttcctggctgcttcagggctcaggggctcccagccctccttcccaggctgatgctgggtcctctctctctttggggcttctccctcccgtttcaggggaaaggtctgagtctccacgtttcagaccagcttctgggggaaggcagtccggcagggagaccgggaggggtggccacacagtggggagctgggaggtggggggaatggtcccagactcctctcggggcccctatccacacagggcctggtgttctaccccatctggcccctggcccatctcttctgtgccttagtcacatatgaaagcgcccctccctggctccccatctgtcccacacgctccctggggctcttagttcagctgctggcactcgcaggatcctgcagtgctgggcccagagcccttggacaggcctcaggagtggtcaggaccaccaagcccctcctctccccctccacacctctagacctggggcctccggaacccccagcaggctgggcttatactagctcctgacttaggaagagcctcgtgtcacaacacgtgtccctacaggcaaagtgtcctggcatttaaaacccagattatccctgggtttgggctgcagtcacctggagaagctggtagggtaagggagagggaccctgccggtgttcactggggattctttcttttggtccttcctggaatgaacaggttccctccctgccacctgtgaggagagttggggcccagccgtcttcctggcctccttcctttcctcgtggcagaggcctgcatgtgggtgccagaggccagctctccccctccatcttgggggggcggagcagttgggcccaagctgcccgggagggtgggtgcagacacaggctgaggaccagccctggccctgccccgccatctgctttcaccaagctgtctctccaccgtggcttcccttctccctccaggccaaagtgctgctgattcccactcccttggttttcgcctgcccagcgttgctgtttgcgtggagggtggggggagctcagtggcagggaatcagcggtccgtggggtcgtggggacgggaacatgtgcccgaccgctccatcccctcctcctccttaggatgcataacctaccttgtcttttttttttttaattttctttccaggtagagtagctctttgtacataaagaatacttgaaaaattaattgtatgatgtatgagaagacagagtctcctagttttgtatcttgttgtatgactgccatgagttccaccagaaagccactctattttggtctctgtgacattttaaatgcgtgacagaagtgagcaaataaagtgaggaagaaatctatatatgagataatatagattgtattgaaatctc

SEQ ID NO: 11240 - DNA, 1248 bp, Homo sapiens
tgtcttcactgtattttctttaaaaaaaaaaaaaaaaaaaaaaaggcaaaaataaaccactcaaaagaacaacaaaaaaacccagcacaaaaccgacgatggagtttgtttctttgatttctttgccaatggcaagaagatgagatgccctcagcactgaggattcttgcccccttgtggtgcccgctgcccccaaccttcaggctgccagatgctcccctgacaacaccaggctacaggagccagacgccagggcctgcccggcctcctgttcctgcccccacccaccacctgcctggagaggaacgggtcgggtccgtgtcggagaagtgacaggtcccagagccaaagccggccctcaagcatcatcagggagtggtgtagtcagttgaaggcagttcccaccgagttttccgagcctcagaatccaggagatacgcacagccccacccactctgagatgacagtggctgacttcccgtgctgggcttttccattgtccccctggcctccaggctcctcctctgcctctccatggagtgggtggggaggtggtgggggccggcgtcccctgcgtgtgtgtgtgtgtgtgtgtgtgtggatgtattgacctgtgtttcccaagacagcaggtgccacggcccgccccgcctgccagcccgaattcccgttctcctgtgtctactaacaaggacatgggggtgggcggtgacctccgcatccctcagagctcagagggtcctcgctgccaccggtccccccctagcccgtcatcagccggtggcagctccatcttccattcctggttttagggcagaatccatggagactgcttccagaaggcatctggctctgagttataaattacttccctggtcctgacagtcacctggggtcccccctctccctggttccacctttctgaggaggagcctggagtcagggctgggttttggattaacccatccttcctagttaacacctttttgtttttattttattttatttttgtttgttttctccgtgtgtgtgttttcctaatttatttacctctgtttcccctttttcctttttttttttaattaaagagcaaagctttttattactttgtaatttaaaaaactgaaaaaaaaaaaactgaagaactttggggggaattttgtacttttttcctgtgtaaatattggacttttttgagctttatcgtggttgttaatttgaagtaataaagtagaaaagataaagtga

SEQ ID NO: 11241 - DNA, 465 bp, Homo sapiens
cctccaggcccggccctcaccactgcccacaagagcctctgccgggggtgggatgccaggacaccccctcccacactcaggacagagccaaccctggctccgtggaccttctggaggaaggtgggggtttcaaagactgggggaccccttcctcctgactccagcacccaggcctgggaagagctcggccccgatcagcctgagttccgccagcgcctacttctggtggctctaggtccccggatccaccacccttcccccactgactcttcaaggacgtgccctctttgctctcagaaccttggggaaggtggctggactgctgggcgggggacatctcggggtttcagggtgggcagggggttagtttggggaggggggggtgcgtttcttttgcatgactgtggcctgttgctcatgactttcttttgtaaatatctataaatggagacagatggagacacc

SEQ ID NO: 11242 - DNA, 2497 bp, Homo sapiens
aaccactcaagtggtagtgactccagcagacttaattacattttaaggaacactgtctttcctttttttttcctcttcgccttttctttttttttccttttttctttttttttttttaatttttccccccaaccatcgtgatttgtcttttcatgcagattagttagaattcactgccaggtttcttctgcccaccaaaatgatccagtctggaataacattttgtaaaaaaaaaaaaaatatatatatatatatatagctgactggaagagattaatttcttcccccaacttcttgcatgttgaagatatttgagctatttttcatctaaaagagtaaggtattaggcccttttgtgggagccccatgttttgtttttctgagttggtggggagggagggagggggagggctgaattgttttgcagaggaagatggcatctgtgctttaaatttctcattactgggttagaaaacaaagagggattgccctgcacattttcttttgtgcttttaaatgtttcttaagttggaacaggtttcctcgggcctgttttgactgattgctggagtgcatttgatagttaaaaattactaattggttttatttcccttcacactctgcctccccacttctccccccgttactgaaaaataaccattttagtgtcaggctagaaattgaattgctgagttttgtgtatcctttaaattaaaaaccacaagtgtttattgtagtggttaaactgtagcatctcagcatctgggtggaagctgcctatatttcttcccagtttaactggggaccatctgtgaaattaattttccatccagacagctgctgtgagcaaatgaacataaatgctcgctggaaatttactaaccagtttttatattgacctgcagtgtaaaaagcacatttaattataaacaatatattcaaaatgggcaaattttattttcaaatgcagtgtagagctagattaaaagcaactctttgccacctactctgcccttttggcaaagttaccttgaacaaagaatcttaagggtttattaagaactctttattttcttcataccctgttctctgcagtgctttctaacagcttctgggtgcagattttcttcggcatccttttgcactcagcttattacaggtaggtagtgcttaagaaaagtcatggaggactaaagcctaagtccttttcacttttcctccatctgaaggtaggtgagttcatcctcttcatggtaatgctgttttaccaagactttatagcagatggacccagaaagaattttctgctattgtgttcactacaacaggatagggacatcagacagccccagaaaccccttccagatctgatatgggactattaatttttatgctgttaattggtattcattcacaatgcagttgaagggggaaggctccactgcattctttggctaaggcctgaatgcttgctcatctgtaagatctatactcgaggttttgttttccttttaaaattctttagggagagagggatggtttctgaggggttctgaaagtatgattcaatgtgcaacatacaggtaggtcttcagcataagctgaaatatatgcatgtaaaaactttgacatctttttttttaattttccactttcttcttaactttacttctctttttgtcccccccccatcttacagaagttgaggccaagggagaatggtaggcacagaagaaacatggcaaactgctctgtgctttcaaaccaaagtgttccccccaaccccaaatttgtctaagcactggccagtctgttgtgggcattgttttctacaaccaaattctgggtttttttcttctttctttaaacatagaggtaccaccacaagggatgccctactctctcgcagctcttgaaagcatctgtttgagggaaaggtctctgggcaagcaagtggttatttggattgcttgcttccctttttccacctgggacattgtaatcataaaataacagtaaattccaaacctcaaaaactattatggcctgagcacagctgaaatctagcagagtttaactcttctgcctccatgtctgtcacttataattcaggttctgctgttggcttcagaacatgagcagaagaatcgttttatgctagttattgcattcatggttgaaactcaacttagggaaagggttccaatgtattaagcaatgggctgcttctccccaatcctccctaacaattcgttgtgtggacttctcatctaaaaggttagtggcttttgcttgggatcagtgctctctattgatgttcttgctggtctccagacacattcctgttgcattaagacttgaaagacttgtagatgtgtgatgttcaggcacaggatgctgaaagctatgttactattcttagtttgtaaattgtccttttgataccatcatcttgttttctttttgtaggtataaataaaaacactgttgacaataa

SEQ ID NO: 11243 - DNA, 1071 bp, Homo sapiens
gtggtgaattgatgcaaattgcttcttagtgcttattaggagctgaagaaatggaaaagcagtctccaatttcacatcttgaaatagaggttttttcccacatgttactaaagaaaagtcagcaaagagatttaaatcttatatttatcttaaaagtccctgatttatgataactatacattgtatgtaaattcagggatatgtatatgtatgtttgtgtgtgtgtgtgtttgtgtgtgtatacctgacatatatagtagatatatatacctattgaaattctctcactctgtgtatgtatatatacctatggaaaactagttgttgggaaaggagtacgtgattccctccctttcacttttcaaagtgagccactaaacagaaagtctaagagttcagaaatgtcccattctcctaaggactttcccttcaccatttttctagggtatagtgccactgacttacatagctagatgtttttccacaagaggatttaagggaggaatgtttataggacacacacacaaaagctctttctatttataatatcaaactgcatattcacctttatagcaacagaaaacagacattaaattaagccaaattttaaatcatttgactttgacaagcagaaattacttttaaaaaatgtatttatggctgggcgtggtggctcacacctgtaatcccagcactttgggaggccgaggcaggtggatcacttgaggtcaggagttcaagaccagcctggccaacatggagaaaccccatctctactaaaaatacaaaaattagccaagtgcagtggcatgtgcttgtaatcccagctactctggaggctgaggcaggagaattgcttgaacccaggaggcagagattgcggtgagccaagatggcaccactgcactccagcctaggtgacagagtgagactccgtctcaaaaaaaaaaaaaaaacttttttaaaatgttaaaattaatttaaatgtaaaatttctgaatactaatcttagaaatgtgtaaaagatattattttgattgttaaacaaataaaatcctgttttcaaaatgc

SEQ ID NO: 11244 - DNA, 2281 bp, Homo sapiens
cagttctgcccaacctccctctcgcctcagccccttcagtcctctgtgacgtgctgtggcctctacagtgggtctgcccttgccacttccccaaacatctcatcaagtttttccccttcagatctgacagtgcaataggacagacgtgtggactgttataagaactactcagtgttttgttcctgggcaaggaaggtaggagttctgtgcacttaaggccagtggtcacaaacccttgttttatttaagagacagaggagaaagtggagcggggagggaatcctagcttattttcccttttctatgaggacttgacacaggttctgctgagttgtcactgctgctccagactcacctagagatgctgcctccactttccatcctgtctgggtctgaaaacagtgggtctgcagatagtgcccacaaaccccatgtgactggtttgaaggacccagagcataaaggtctctcaggaaaccatgtccaaaaccctagcagcggtacagcatgctgtctccaacccttatccccaggtttaagggtggtttatggccatacgtggaggttttttgttgttgtttttgagactgagtttcactcttgttgcccaggctggagtgcaatggcaccatctcggctcactgcaacctccacctcctggttcaagcgattctcaggcctcagcttcccaagtagttgggattacaggcgcctgccaccacacctggctaattttgtatttttagtagagatggggtttctccatgttggtcaggctggtctcaaactcccgacctcaagtgatctgcccgccttggcctcccaaagtgctgggattacaggcgtgagccaccgcacccggcagagttttataatgaaaaattaactaatattctagtatgaagtgaggaggatactgaacaggatgtggctaaagccaacctgggacagccatggggtggcttggtttcttcactccagtgttgtccctaccatttcgcagcattgatttaggaggctctgggacaaaagagaagccaaagagcagttttcccagttcactcactctggcaaaatcaggaaaaaaaagtctgcttttgacatcaaattccactaatttggggcagcgttgggtgaggaaagtattgtgaagacaggcttcttggagtaggggcagccacaattcagtagacactctaggctcggaggctgccactgtagttgccaagctcaggttgggtggttctgtgctgtatggatggaataggacctgggctggtcatcttcatgtcgtttcctctctgtatcaatggaagttcaacccgcccctacctcttcagatagttgtaggccacttttctcttgtaactttggaaaacaaaagaggagaaataagtatcataccatatgcgtgtctccaaagtggatgtggttgcctcaaggcaggtggcaggcaggggtgacctgctggccctcagatcaatggtcgtggcaggtctgagagctgtcccactggccagacttctctccagcagcaaagccagcctggggcttgcatgttgatcctgagcaagcttaacggggtgaagctgggctttctcccccctgtgactggagtgcatgttgacaccagcactttttctgcacatgtatcttcaatccaacaaggccgtttttttaatgctgagtaacaggccaccaagcggctactgcgttatatcttctcagcaactggccgcagtctcttctgcaccattttctacaccagacctgcttggcaccacagggagctcttttcctgccctgcacaatgacattccaaccaccaccagccagacattacagccaaccttgctgattgtcacaagcaggaccttggggccactggcactgtcagatagtaagccatttcttgggtagaggaggaaactcctctccacaaatccacttgggcctgtgcaaatggcacttgaaagagtccccatgcacttggagtccatgagccaatgggatatgcaaagacgcttaaacatttcagggctggtttctctgttcatatccaattctggtgcttaggaacagggacccatgctgatgcccaagggcaaaaagccccacttcctttaaggaagtgaacaggcctgaccctgatgcccaataacgggcaaccctaggctttttgtttttcttgcttttattcctttttgttgttggccttgtgctgcgtttgtttacaaaagatgtattttgtttaaccaaatattaaaaatggaaaactcca

SEQ ID NO: 11245 - DNA, 1537 bp, Homo sapiens
ccctgcttactggtgcctgctgccagccatctgggagtgggtgaacagcaccccgccgcttcccccacacgcttgctcggcgctctgacttctaggagcacaagagaggagcctgtggccccatgcagatgaaaaggacgggcagggtctcctgagcagcaggtggctcgaggcggttagcaggctccagcagctcccttcttccttccctctgtgcccgtggcgtctgcttcccatcctgggagtgtgtatatatgtagcatatcatgggggactgggaagttgggagaggtaggacctgactggtcttggctggggtcaggggctggtgcctgggagctgatgaagcaggtgccagggctgtgggaggggcaagctacggcctgggctaggtgagctgcctctgcccctgggcaaggaagcgaggccctctgggaggagggtgcttagctccagagcaggatgggacttccccaggcaggaagcacttgatggagagctgcccagctctcctacaaggttagtgccctccacctagggaagcatgaaccacagggtccctgagggccttcgacaaaagtgtgtatttgtcccggggagggtagcagtgggccatggggcttcttgtgccctaaaggggactggctgctgtgatcttctaaggggcccagggccaaccctgtaggcttcccctctgctggggacggtagttgcttttctctctcctgatgctaggttggggcccaccctgctccctgttcctgctagggcctgccagtgcccctgagcttgctttccacattctcccagggtatggagacctagacctgtctttggggccattagcatctggggttatagcaagaagagtggggagcatggaactcctgggctcttgtggggacgttcagggtatcggggtgcgaggtctgtctgcaccggcccccacatctaaccaggccctgatgtaggggtcgtccgctcaggctgcccccttgggctcttgcagctcttgttcaggtagtcgcccttctggtttgttctctgtggggcagttggtgggggctgggggaagaggctggcagaagttaccctggatagggaagggggaggaggggacttttagagccagcaggccccactgtattatgtatatatttttcaaggtctgtttttctaactgaaaagctaagggcttgattcctagccccgttctgtggggcactgggtgatactcagtttcttgttcctggccgtggagaggggcctggggcactggttccggctgtgtctggtggtctggctgcggggaaggggcaagaaggcgggcaggccttcactgcagcactgagcctcaaatccgctctggagcatgaggctggatgcagtggtggtgaggccgccccgctccatcccgaggcagccagggtttgttttgcgctctcctgtcacaaatgctgcactattggttcttaagttttttatctccagatcctaatttatgcctatgcaaaaaataaatgacgcccaagagctg

SEQ ID NO: 11246 - DNA, 940 bp, Homo sapiens
cactctgtcccctgccccgtcccctgcagggccttttcctgccactcatctggggtggggagcagccctaggcaggtcctggtttttccaaggagagttggggtcttttctttttgtctttgtgtaccagtttcctgagccacgcccagtgtgtgaacttgacatctccatccccaggctctcaaccgtctccctcggagtctcagggtgtggacggggcagcgggcatgggtctgtgtgggagacgtggggtggggcggtgtgacagggtagaggaggtgggagatgagatcttccgcacaggaacacgccagtccccctttctccagggctgccttccccttgcatcctgggagccccactgccctgccatccccagtactgccgggaagtgtcggccgtccttgtcattagtggtcatatgaaaatggccccaagaaggagatgattctttcaagggacacaggcagcttctctccttgtcctctggggaggtgctgacccctcagaaaccccttcccccaacttgaccccaggctgaacagaccactgcatctcactgggccagcagcccccccagcccccagccttggtggggaccaagcagcctttcccgtcccctcctcgacccgtacagttgagagccaggggctggtgtgtgggagctgctacctggcagtttctcgaggggtcaccgagcctctggtgggacacctgggcaggagtgctctcaccacgaggctgcttccgcagggaaccctggcctgcccgcgacttcgcatcagggaccgcatgctgatttgtactgctctctgctgggttttctatgttcttttcgagtgtgggaaaagggttttagtagaagggtgaatcgtattttacacagcggtcttatttatataaatgtcttggtttttacaattaaaatgaccaaaaactg

SEQ ID NO: 11247 - DNA, 4156 bp, Homo sapiens
ggggccacctcatccagggcccctcccttgcctgccactttggggacttgaggggggtcatattccctcctcagcctgcccacgcactggccttccctcctgccccactcctggctgtgcctcccatttcccctcacctgtacccacacctccagaatgccctgccctgcgagtgtgtcccctgtccccacctgagtggggaggagcgtctcaagtgaacagtgggagcctgcccacctggcactgcactggagttgtctcttaccccaccctccctgcccatcaactgtatctgatttcactaattttgacagcacccccagtagggtaggattgtgtatgagggggaccccactatctcagtggtgggggtggccgcccgcccccttgtcccccatgcaacaggcccagtggcttccccttcagggccacaacaggctgtagaaggggatgacgaggacatcagaggttagacttaccctcctccctctttccaccagctgccagtcaagggcagtgggatctcgatggagcctccccccccccccacccatgcctccctcttcctcctctttcctcctctctttgtgtgtagcggtttgaatgttggttccatgcctggcccagccccacctcagtctccaggacattcctttcccagctccagcctggagggaaggggacaaagaccccaggaggccaaagggctgcagtcaccccttgtgctcacccatagtgatggccactggtatagtcatcgctctccctccatgccaaggacaggacttggaccgcttcagcctgggctgggagcagccctaaggtagaggcctcatggcccaggagaccccacctctggcagagccacattacctaccctgtgcatggtcctggggcagcaaggaagaagctcagagggtggggagaagcatgaagcagtgagcagagcactgggtgagagggagaagaccttggttcctagccagccctgctaatgtgctgtgtggccttctgtaagtccctgccctctctgggcctggccttcctcattcgtgagctgaggccctcgctttggtcatttgctctccagattgggtgtgagcttctctgtgattccaggtggatatgtggggaaagctctggtgaccctgggcttcgcaggggtagatcccaggactcggcagtggatgggatgcagccagtcatgggttagggtcagcagagactcagagtccagggcaaggttcaaggcagactaacctcatgcatggattgtaaaaaaccagctccctttggatcaacccagcctggcacccttgcctgtctgagagtgtctcaaagggctgatggcttcctggtccccttgagtcatcaccagcttccccaagagagtgtcagaatcttaagagctgagaggccgggcacggtggctcacgcctgtaatcccagcactttgggaggctgagacaggcagatcacttgaggtcaggagttcgaagtcagcctggccaacgtggtgaaaccccatcttcactaaaaatacaaaacttagctggttaggtggtgcatgcctgtagtcccagctactcgggaggccgaggcagaagaatctcttgaactgaggaggtggaggttgcagtgagccgagatcacgccattgcactccagcctgggcaacagagcaagactccatctcaaaaaaataataataatcttaaagatgagaaaagccaccccatctggcaccacagctgcatcttgcttgtgagaaatggggaagagttcagggaggacacgtgacctgcacaggatcacagagcatggggcagagccaggactagagctcagggcatctgactccctcttcagtgttcttccccctccatgttgcctgcccctgaagacctttgagttcagtctacacctaagcaggtagacatccgcgaggtcagatgctttccaacatgacacctgaacatcttcctttatgcaacacccaaacatcttggcatccccaccccaggaagtgcggggaggaggttatgatccctgggcgcttcggcagaatggagagctgaggtgtccctcccctgctagtcacctaccaggtgtctgagcagctgcatgctccctggctcaagtgggcactgtaccttttgcctgcctttttgttccctatctccactccctgaggccacttagcctgagacatgatgcaagagctgcaggccggggggctcagtgccatggaagctactccaagttgcattgcctcccgcgcccagatcctgctttccatttcgagaacataaatagattgcccagcccctccagtacaatcccactggaagaaaaggcaatggcgggcttcagccagacctgctgagacctaggttgccacggtaacagccaaagacatcaacccaagtgctgggtcaagtgtctcatcatactggcactgttgctggggtgacggcagaattcagaacttcaatttcagtgacgccaagcttgatgtgtttctgttattgttttgaagaaggtagctcttgtggaggacttgggagaaggatggggtcttaggaaggaggtgacagcacttgcatggtcacttgagcccacacacacgctcaaccccaagtcctttatgctttgtcacagtgaagatgagacctctgacgtccaagccttgttcctgtgctgcatcacccactcagccttccaaagggaacaggaacaaatttccccagcaccactgtttgggtcccgcttttcctatcttctgctgcccctgagcacatccaagcagacagggaaagaggagtcagacatggcccagtcacatcctgagctgctcctggctgataaccacgatggagcccgtgtttgtcctgccatctggcactgcactgagtgtggcacaggcaccgtcctgttgatctcacaacacagttctaagttaggacgttcttggctccgttagacaggtgaggaaactggggcacagagaggtgatgtcatctgcctggtgtcaatcagctagcaagtgatggagcccagatttcaaaccaaagggggttacgtccaggggctgagttcccactcacctgtgtagagtgccatctgggcaccattgctccagacgtgttccgacccctttcccagcccacagggcttgaagtgaaggaacagaggcagggggtgggccagccccagggccagggtccccttggtgaagccgtgccagggggctcagctgcttcagggaatgtgtccctcccaccatgggccagagcttcagcccttctttagctcagctagagttcacaggagagccaaaaaagaaaaggaagctgagcatctcccgagtcctgggcagggaaggggagggaaattgctgcttctccaactcttgcttggggccaagccctgcaccagttgcttcccagctgttatctgccagatcttcccatcttgtggcatgtggtgcccccaccaacatcccaaggggaccaatccccttgccaccactttgcatcacctgggaccacagatttggacaggaagggctctgagaagaggccaaagccctcattttacagatgaggaagctgaagcccggggaggggagcgaccctcaaggccacccagctggacacgggagacttgagcccagccttctgactgcattcagccctctctaggacgcagcagcctctccccagcactgagtcccccctcctttgtgtgtcccagcacccttggcctgagtaaacttggaaaggggctccctcccagagaagggactactctcttcacccctttattccagctgcctgccaccccagacccccacctcccaccctgacccccgacccctgggtggggaaggggctcacatgggcccaggctgagtgtgagtgagcatgtcaagttgtctgacactgtgacattagtgcaccctactgacaacccctccccagccttgcccctttctcctctccctgttttgtacataaattgacatgagctgcaacatgtgtgcgtgtgtgtgcgtgtgtgtgtgtgtgtatgtgtgtgtgatctgtgtcatggttttgttacctttttgtttttgtaaacttgaatgttcaaaataaacatgctgtttactctg

SEQ ID NO: 11248 - DNA, 1955 bp, Homo sapiens
gggggctccaccaaggaggggggcttgggggggccctcctgcccgaagtcatactcttgctcccaccccacccttgcccccagccctctctccctgtgctttgcttgtctcaaatggctcggtgttgacccagggatggggctgggtagttggggtcccagaaagccgggggtaggggccaccctggaatggggcaggggaagggcacaccccctgcccatgcatggtagcccactgggtggtttctggaaagccctagaaactagggttcctctgccccttccacatcccacctgtctctctagcttgcttcctgctctcctgtgcggcgtctgatttctcggtgctaacctggcagctgtggggcccttaggagccccccaccgagggtggacacagtccctttccttcctgcagatgcctaggcaggaggagggcttcctgcctgtttggcaaagtcccaggcagaggccaaggatgaggcctgactcggctcctccctccacatcagccagggcatcagaagttgggccagggcggggtcttccctgctcgattttggacgaggcctaagtagaccccctatgccctgccccagccctggctctttcctaaccccctcaacggtgggaggaactggcagagggtgcgcctggccacagcctccccgcatctaaaggccccttcagttcttgaccaaaggtgctacgagaacctgccgtggaaacttccagttgtgcgtctgccccactcgctgtgtttgtccgtgggttcatacatgcattgggtgctaggccccaggctgccgggtggcaccctttacagttcctttgaacaggggcattgaaggcctggactgcctctcgcctcagtaggcctggggaccaggcttgggtctggaggtttgctgtggaagtcaccaggcctcccctcctggcccaggtgtgctgggggcaccgtgccccccacccccctgccctcctcagggtggtcagcccaacctgtcggaccttcacttcacatcatggtggggaccgagatagagagggagaccccattccaagctccctcttcctccgggtgtttggggaggatgctgaagaatccattcccgagggcctcccggcttgtcccagcccctcttttgcttctgaccacggaggctttctcacagcccagcctgcctgaagcaaaggaggctcccgtgtcctgggcagcttctgtttccctctgctgcctgggagctgaggcacccgtgccagtggcagaggccacagccccagccttaggccaggccctgggagggcaggcaggcaaaggggagaccagagggtctgtgttctccaggagaatgagggtgttggtcccagaattgggaccggggccccgctggccagccctgggccacttcccgggtctccattgtgcgtgggtggcgtgttccaggcgtggctggagctggcttcctggctgtgctgccatgggcccctccctcagaagcacgttggcaggaggccgatcagaaccctagcgcctttggtcctaagaatgggaggctgccttccttcccaatctccctgccagggcccacagcgtggccctagccctcccctccccgggatgtagaacggggaccctcgcagggttggggcgggggctgatactcctcggcccctccctaccctgccctgtgtgttggctttgtggccgtccaagtgccaattggcttttcgcccaaataagggctggtatttctcctctgtccttggaggtgatttccccctgaccccctcccccaggtgagtgaccacctgggtgccagttacaggtgtttccagagaccatagaaatgtgttttcctgagagttcgtgtcattcgtgacttttttgtaaagaagttgtgttttcagaggtgattttatgacaggaaagtgaaagaattagttttgcaaaaa

SEQ ID NO: 11249 - DNA, 3117 bp, Homo sapiens
atcaccgtttttactcttcttaaactgttttcttttgggcttggggtgggacttccagagatagggatgggttgggggcggggtaattattttatttaaaaaaataccgagcagcaaaaggggagaagatcccactactctcccaccacctgccctttctctgagggacgtttaccacgaggcctcaggctggggatggagagagttgctctgggagttggggtaccacccccagggcaggatggggacaggatcacctgcccgggacaccaccattatcattctcctctagtgacgcagcagctggttctgggagttaaaggagcattggaaggcccaaaccctctcccttgagtggccaccccagcctggttggctggttttccccttttctcttgtttcaattgggtctttaccttgaactctcctctctggctttgcggtgggctgtggaggctggttttgaccaaaagtgagtggggcgggaggaaggggcaggaggaagggttgaggttacttggggcgagtcccttccccttcagagaggcttctatccttcccagggaggaggcgccgctgagacccttctgctgagagctctgccctcccctcatcacctggcctgtgcagaaacgctcatgcacacctggctgcacaggtgtgcacgcattacccttcgcgtgtacgttcccatgtgccccgtgaaagcatgtgtggctgcagacgtgtccacatgggccttgcgaacctgggttagaaaccctggccaggcgaacgtggggtgattcacagcacaaaagacctcaccaccacacctgcactcaccccaccttgcatgcaccttgctacctgcttgcggctttcagtggagggcaggggtctggcacaggtgcgatggcaccccatgctccaggcatacagatgtggtttctcggctgcaccgggccaggctgcgggtgtgcaggcgtctgctaagttgtgtgatgtatcagcacaggctttgagacgtctggaccctgtccttcctcccgtgaggggttcttgttctttctgactcaggtgacttttcagcccttccaattcccctctttttctgccctcccctccaactcagccaacccaggtgtgggcagtcagggagggagggagtgtcccaccacgttctcagggcagcccttgactcctaagccccttcctccttccattctgcatcccctccccatccaacctaaatgccacagctggggctgagctgtattcctgtggagggacctctgccgtgcctctctgaggtcaggctgtgctgtgtgatgggcaggctttgccccagcccacccctggcaaggtgcacttgttttctggtttgtacaaggtgtcctgggggcccgtggcttccctgccagtgaggagtgacttctccctctcttccagtcctgtaggggagacaaaaccagattggggggcccaaggggagcatggaaaaggccggctcccctgtctttccttggctgtcagagtcagggtaacacacaccaagagtggagtgcggccagcaagtttgagacctgcccgccctcctcgcagctctgctctgtgtcctcaggaagtcacagagtctactgaggcaaggagagggtgattctttccccaaatcccttcttccctggttcccaaaccaaagacagcctgcagccctttctgcatggggtgctctgttgacaggcttcccagatccctgagtctctctttccttcctcctcgatctttagttgtccacggtcaattcagtgcttccattgggggacagtcccctccgggatgacctgattcacctccagcccagggaatggaatctagaggaatacgtggggtgggtctggacaaggagcggcaggaatcaccacccatctccagctgtggagccctgtggaggggaaggggaagcttggggttcagaggggactcttccaggagaggggtgcccagcggaggtaaagatgatagagggttgtggggggtctctagttgaatgttttggcccatgactttggaacatggctggcagcttccagcagaagtcacgctccccatcccccaggggacataggacctttttcctgcttcctggtcactttcaaagaactatttgcgcaatctgtgggtctgtggattcacggggctttctgtgtgggtgctgcagttgcttttgtctgcagcagcaggacacatctttcctcttactcagccctttatggcccatggggaactccgtggctcagggagagctgaactccaggggtgtgacctgggacgggtgggcctgaggtgcccagctcagggcagccaggtggctcatgggctgtagtgagccagctccctgggggaaaaggctgtgggccgttaggaccatcctccaggacaggtgacctctatgaggtcacctacggctgtggccgtgcaggcctccttccagcccagagtggcccagtagagcaaggcagacagtgacctccacccccgcagccctcttaaaaggccagtactcttgggggtggggggagggtttagaaagcatttgcccatctgcctttctttcccccagcccccacccgctttgaatgtagagacccgtgggcacttttccttttgtggtggggggtgcggaggaggtacccccacccctggcacagccgcctggaatgcaggactgtcactgctgttcgggtgatgacctcgttgccaagctcctcctgtccccttgttctgggggcaggcgctgtgcttctgtgaggtggtttagcttttgctttcgaagtggccagctgcggccaccaggtctcagcacaagagcgcttcctttgcacagaatgagcttcgagctttgttcagactaaatgaatgtatctgggaggggtcgggggcacgagttgattccaagcacatgcctttgctgagtgtgtgtgtgctgggagagtcagagtggatgtagagcgcggttttatttttgtactgacattggtaagagactgtatagcatctatttatttagatgatttatctggtaaatgaggcaaaaaaattattaaaaatacattaaagatgatttaaaaaaaagaa

SEQ ID NO: 11250 - DNA, 1600 bp, Homo sapiens
ggttatttaatatggtatttgctgtattgcccccatggggtccttggagtgataatattgtttccctcgtccgtctgtctcgatgcctgattcggacggccaatggtgcttcccccacccctccacgtgtccgtccacccttccatcagcgggtctcctcccagcggcctccggcgtcttgcccagcagctcaagaagaaaaagaaggactgaactccatcgccatcttcttcccttaactccaagaacttgggataagagtgtgagagagactgatggggtcgctctttgggggaaacgggctccttcccctgcacctggcctgggccacacctgagcgctgtggactgtcctgaggagccctgaggacctctcagcatagcctgcctgatccctgaacccctggccagctctgaggggaggcacctccaggcaggccaggctgcctcggactccatggctaagaccacagacgggcacacagactggagaaaacccctcccacggtgcccaaacaccagtcacctcgtctccctggtgcctctgtgcacagtggcttcttttcgttttcgttttgaagacgtggactcctcttggtgggtgtggccagcacaccaagtggctgggtgccctctcaggtgggttagagatggagtttgctgttgaggtggctgtagatggtgacctgggtatcccctgcctcctgccaccccttcctccccacactccactctgattcacctcttcctctggttcctttcatctctctacctccaccctgcattttcctcttgtcctggcccttcagtctgctccaccaaggggctcttgaaccccttattaaggccccagatgatcccagtcactcctctctagggcagaagactagaggccagggcagcaagggacctgctcatcatattccaacccagccacgactgccatgtaaggttgtgcagggtgtgtactgcacaaggacattgtatgcagggagcactgttcacatcatagataaagctgatttgtatatttattatgacaatttctggcagatgtaggtaaagaggaaaaggatccttttcctaattcacacaaagactccttgtggactggctgtgcccctgatgcagcctgtggcttggagtggccaaataggagggagactgtggtaggggcagggaggcaacactgctgtccacatgacctccatttcccaaagtcctctgctccagcaactgcccttccaggtgggtgtgggacacctgggagaaggtctccaagggagggtgcagccctcttgcccgcacccctccctgcttgcacacttccccatctttgatccttctgagctccacctctggtggctcctcctaggaaaccagctcgtgggctgggaatgggggagagaagggaaaagatccccaagaccccctggggtgggatctgagctcccacctcccttcccacctactgcactttcccccttcccgccttccaaaacctgcttccttcagtttgtaaagtcggtgattatatttttgggggctttccttttattttttaaatgtaaaatttatttatattccgtatttaaagttgt

SEQ ID NO: 11251 - DNA, 57 bp, Homo sapiens
tgccaggaacagattttgcagttggtggggtctcaataaaagttattttccactgac

SEQ ID NO: 11252 - DNA, 398 bp, Homo sapiens
gctccctggagggcacggtgaagaggccttcaagccctgcagcctccgactcctgctggctccaggaaccggccgtgccgcgcggccagcagatggcgatgcaggaccagcctggctcgaggaagccgcggagctgagccgagtggaggctggaatggagctggtgggccggaagtcctggggaggatttacacacagaccggagctggcttccgcaggcctgggcagagcatctgcacctgccggaaaggaacgtatctgttttgtttgcttttgcccaggtggggcctctgggctgtttgctgtggagcaaggctaattcctgagcccttggggacgacagctccaggagtaggaagaagggtgggcttccaagttacaataaatgtgaacccaag

SEQ ID NO: 11253 - DNA, 635 bp, Homo sapiens
tcatcacaatatctatttttgatagaactcgtgtggttccacttccccaagacttacgttagcattgtataaattcatattattatggcaaaaaaggggatggtttaatttttccttgtcaggtttattagcaagtatctttcaaactaatactttcatttgggtggtttattttttaaaagggaaagatgtcacctttgataatttcagatttagatattagttcatttgaaacagaagagaatttcattctttcatgctctgtacctcaaatgggttaagcattagtgaaaattgtggtaagacctcaaactgcaaatgactattcaagagcttttggataaggaggcaggaagaagctctttatctttcaactgtatggagcttgttaacaagcctctgaggtgacctaggaggattgagtttgggggtatacatttcacacattcttttgcaagttttaggttctgcaaccaagggccagaaatcttttctttcttccagatgctagtgttaggagttaaatggaaacaagaaggacatggggcaaatgtttttactgtcaatgtatattgcaaggtgaattcaaatgcatccttttattctacttcagaaaataaatttgatatttttca

SEQ ID NO: 11254 - DNA, 1102 bp, Homo sapiens
ctctctggctcaagacggggtggggaaggggctgggagccagggtactccaatgcgtggctctcctgcgtgattcggcctctccacatggttgtgagtcttgacaatcacagcccctgctttttcccttccctgggaggctagaacagagaagcccttactcctggttcagtgccacgcagggcagaggagagcagctgtcaagaagcagccctggctctcacgctggggttttggacacacggtcagggtcagggccatttcagcttgacctccttttttgaggtcagggggcactgtctgtctggctacaatttggctaaggtaggtgaagcctggccaggcgggaggcttctcttctgacccagggctgagacaggttaaggggtgaatctccttcctttctctccctgctttgctgtgaagggagaaattagcctgggcctctaccccctattccctgtgtctgccaaccccaggatcccagggctccctgccattttagtgtcttggtgtagtgtaaccatttagtggttggtggcaacaattttatgtacaggtgtatatacctctatattatatatcgacatacatatatatttttgggggggggcggacaggagatgggtgcaactccctcccatcctactctcacagaagggcctggatgcaaggttacccttgagctgtgtgccacagtctggtgcccagtctggcatgcagctacccaggcccacccatcacgtgtgattgacatgtaggtaccctgccacggcctatgccccacctgccctgcttcctggctccttatcagtgccatgagggcagaggtgctacctggccttcctgccaggagctctccacccactcacattccgtccccgccgcctcactgcagccagcgtggccctaggacaggaggagcttcgggcccagcttcaccctgcggtggggctgaggggtggccatctcctgccctggggccactggcttcacattctgggctgactcataggggagtaggggtggagtcaccaaaaccagtgctgggacaaagatggggaaggtgtgtgaactttttaaaataaacacaaaaacacagg

SEQ ID NO: 11255 - DNA, 1197 bp, Homo sapiens
gacgccttcccatgaaaaattccgaagatgctcaagagggaggtttcctcctgagtgaagagaagtgattctcccttgactctggctcctgccaccacaaatgttaccctcattggcttgaaaagcatccaagggtgcacagggagtatggccaactggacctgttgtcaccttaattgtcatgctggctggttggattttggggtggcagttggactaatgtgaaaaaaacattgctgaaaacctaaaaatgaaagtttgtgagtgtttattggttttcttaagagaaatggactattttgctctcatgtgtaatgttttctatttaaatctttcttaaatataccagctgttctctttccctgaactctcccccaggttctaggacaaatttaataacatgtaattctcctcaaatacttttgtatgtctcagtgttggtgttttcctccctaaaactaacattagggctgtgccacgggcatgactttatttttgttgggcttttttttccctgcttaaggagaggtgtcttttttggatatgagctatttattttgtgaaatgaaaattgttcacccaaatgattctcttataaactatttgtaaatgtcacttattcattagtgtttgacataatttttagaatatttattttgaatcaatcctttcattacgaaagacttgaagttttgtgtccattcttacaagccctggtcagtcaagtcccaataaatggtcagcacaaaaaagatattcttgaaaattgctctttattaaggtattacgttgagtttgcaaccagatgggaaaaatcacaaaaatgagaaggggagcagatatcttgttgaggtctggatattatctccctttataaacttggtgtaggccgtatattttgaaaataaacatctggttgaggttatttcatttggaaaccttccttagagtcctgttgctcagtgtggtccatcagacggtagtactgccacaagctgagagcttgctgggcacgcaacccagagtttctgaatcctgttccgtattttaacattcccaggtgattcacagccacattaaagttcaggagaccataggacccctgacccatgagaagaagtgattggtttcgattatagacatcaagataaagatttttctcaaaggaaagagattaatgtattaaaacaacctctg

SEQ ID NO: 11256 - DNA, 1940 bp, Homo sapiens
tgtccttctgataaataaagcccttgctgaaggaaaagcaacctagatcaccttatggatgtcgcaataatacaaaccagtgtacctctgaccttctcatcaagagagctggggtgctttgaagataatccctacccctctcccccaaatgcagctgaagcattttacagtggtttgccattagggtattcattcagataatgttttcctactaggaattacaaactttaaacactttttaaatcttcaaaatatttaaaacaaatttaaagggcctgttaattcttatatttttctttactaatcattttggatttttttctttgaattattggcagggaatatacttatgtatggaagattactgctctgagtgaaataaaagttattagtgcgaggcaaacataactcatttgaggataaagtttgtgttggatatgtggttcctgatgcattttgacttgtctttttaaatgctttatctttttctttaaagatttatttcaataaaactaattgggaccacccgtatttcagtaggacctgggtagggattggaagtacttggcagggcagcagcaatcttgctgtgtttgatataacatgcatccttgggcaggttgcccttaaatcttacactgtggtgaagggatgttttttttgtaatgctgcagtagagttggagtacttagttctcttgttgtccagtatatctaataagtgtttttcatattatttccacgtaagggaaataaggtagtacttttctttttatatttctatgcttaaaattctctttcctagtcaaaaattgcccaaatctgtgtttgctttctgcttgctacatttgtctcccttacttttcttgagctaaagacaggctttttccaccggcatcatcactgctatcatcattaacagcgtaattatacaagcatatttaatgctgagtttaatttaatatgtaatacatatggtaattgtagggtaatacccacaacaactgtagtttcttacttggccaagagaatgcttatttaagtgttagacttccattctggcaaaatcttgccttatcagaagacattggaaagagggattccctttggtgtttggtcttctacttagaaaaacctattgcagttagtttatcttgtagtattcatctttgtattctgaagataaggtttgaattaaattgatacacacagaggggaaccgattttttttatccaatgtgaattataaatgagataatccacagttattcattgtggagttgttgagactatgaaagactcattgtctttgtattcagctcttaaatagtgtaactatatccccacctctgcttgctttctttccctcccctccaatgataaagaaaatgataaattttctgttgtgcattcaattcttattttaaataagactaagtataggcattgtacctgacattgctacgtttctaccagtgtttcaatttaaagtgctagtgtttaaaaacattttcaagggataaggccttctgtactttgcttatttgaagaatcagtggtaggagcagtgaagtaaattctatggagtacatttctaaaataccacatttctgaaatcataaataagtttattcaggttctaaccctttgctgtacacaagcagacagaaatgcatctgttacataaatgagaaaaagctattatgctgatggagcatgctttttaaatcctttaaaaacactcaccatataaacttgcatttgagcttgtgtgttcttttgttaatgtgtagagttctcctttctcgaaattgccagtgtgtacttggcttaactcaagaacagtttcttctggattccttatttgatttatttaacctaattatattctaatattgcaaatattaccataagtgggtaaaagtaaaattcctcttctga

SEQ ID NO: 11257 - DNA, 1513 bp, Homo sapiens
attgactcttcaaatatataacatttgaacacaattgtgtgtgttttggttaatcacaaattttgtagataacacttaatactatactaagagcttttcaacacttttagcaggattgtggacatttggttagtagtttttttgaatgggtatgtcagaaaaggatgagtttgtggtgacagttggtgctaataagaatttgcctgggcagtatagtgagatcttttctctacaaaaaatttaaaaattagccaagtgtggtggtgtgcacctgtagtcccagctactcgggaagctggtagaaagactgcttgagcctggaagacataggttgcagtgtaatgggatcacgccactgcactccagcttgggtgacaaagtaagaccctgtcttaaaaaaaaaaaaaaggaatttggaaaactgcaatgagttttttacttttgaatttttctttagtagagtttatagcctatttttcttttttctaattaaaaccactatacaaacttacgaaacatgcatagcattagaagacaagaatgtatcaagacacacaggttcagactacacaattattcatgaaatggctgttttccaatggaggaacagcatttgatgcattataacttaaaggtactacaaattaaaaattaaagtataaagtattttaagttagaaatagacttagctgggtgcagtggctcacacctgtaatcctagcatcttgggaggcccaggcaggagggttgaagtcagaatttcacgacagtccgggtaacataatgagacctgtcctctatgaaaaaacttttttaaaaatttagctgggtgtggtggtacgtgcctgtaggcctagctacttaggaggctgaggtgggaggattgcttgagcccaggagtttgaggttgtagggagctatgatcttgccattgcactccagctgagagtgtgaccctgtctctaaagaaaaactatagaaaatttaaaaaattaaaaaacgggtaacatggtaaattttatgtagtatattttaccacattttttttaaaggccagtcttatcctgaattcctcagagcagtctgtatggtaggccatcagtgaatcactccagacaggaaattttctatttttgtttagagtttgtacacaaaatctacaaatacattactctaaaatagcacctatagccattttaatttagtcatgttgggagaaaaatagatgggttacaaatacatcagatatcgagcaaatggtttgagttacatctagcagcactaaaacttattcaactttggccaaatacaaatgcgaaattagaaaaaaattataatatctgctatttttaaaagacagctatagtcaagagcttgtgttttgtatcggtatttgatttttagtgggcagatgggagaaggaaaggttatttattctatagaagagactgcggacaattagtattcaaagtttattttcagaaaataaaataataaaagcccagggtatttt

SEQ ID NO: 11258 - DNA, 991 bp, Homo sapiens
actcaaagcctctcccatcccttggcctggaccagtgagctggggagggactcggatgaactgaggcgcagcctacgccattgccttggacaggactctggccacaggcagggcgggtctgtgtcccatgtgtcctgtcagtcccctgagtatgtgtgtgggtgtggcgcatgtgcaggtctgtgcctcctgtcgggatttgggttttaacgtcttctgctggcccagccctgctctgttgtggggagttggcccccaggggaaagggctgtgagctgctccgccattaaactcacctccacctgagggcgctctgctgatctccgcctgggccctgatggccgtccccacccacctgccttccggcccggctccctggcggagccagaacccagggagttgcccgcgtgctgtccttcccctctgtgttgtgattgggttgtttcctgccctgcctggggctgcttctcgtcaccaagccctggtcctgcggcagctgtcacccctaccatccataccactgtgctgaccgctcagcctgaagagcagagaatgccatgggtgggactgtgggggtcggatcgtggggttgttggcagagggcaaccctgggccccacaccgtgtggacaggcagacaccagattgtccaggagcaggagctgctgggactgcgctggccccggacctagtgggccttctcctggctgctgagatgtcgtctgtgactggcctggctggagggggagtgttgacaacccaaagctgttctccagtctggggagggagaggcagggtccccaatgtccgagctgcatctggacgctgctcttaaaggacctcctggggcaggggagcggtagggtctggactgggcagatgctgtatgacctccctgagcacccgtgactgccccatgctttcccctttgtgctctgtgtgtgtctgggctgtgcccgggggcttcacaaataaagtcgtgtggcagcttc

SEQ ID NO: 11259 - DNA, 999 bp, Homo sapiens
acctgtggcctctgccacgtgctccctgccagcttcccccctgaggttgtgtatcatattatctgtgttagcatgtagtattttcagctactctctattgttataaaatgtagtactaaatctggtttctggatttttgtgttgtttttgttctgttttacagggttgctatcccccttcctttcctccctccctctgccatccttcatccttttatcctccctttttggaacaagtgttcagagcagacagaagcagggtggtggcaccgttgaaaggcagaaagagccaggagaaagctgatggagccaggacagagatctggttccagctttcagccactagcttcctgttgtgtgcggggtgtggtggaattaaacagcattcattgtgtgtccctgtgcctggcacacagaatcattcatacgtgttcaagtgatcaaggggtttcatttgctcttgggggattaggtatcatttggggaggaagcatgtgttctgtgaggttgttcggctatgtccaagtgtcgtttactaatgtacccctgctgtttgcttttggtaatgtgatgttgatgttctccccctacccacaaccatgcccttgagggtagcagggcagcagcataccaaagagatgtgctgcaggactccggaggcagcctgggtgggtgagccatggggcagttgacctgggtcttgaaagagtcgggagtgacaagctcagagagcatgaactgatgctggcatgaaggattccaggaagatcatggagacctggctggtagctgtaacagagatggtggagtccaaggaaacagcctgtctctggtgaatgggactttctttggtggacacttggcaccagctctgagagcccttcccctgtgtcctgccaccatgtgggtcagatgtactctctgtcacatgaggagagtgctagttcatgtgttctccattcttgtgagcatcctaataaatctgttccattttgatgac

SEQ ID NO: 11260 - DNA, 2823 bp, Homo sapiens
ccatctacctgcccgtggggccaggagcacccaagaccacagaaaagagaaaggaaaggccaaaaaaaagaggaaaagaaaaatgtacaaaaagattttcgatcttctcactcttacttctagaaaaaagatccagcccaggcacggaatgggagggccctgcaaagcacccaagtgtgtttcactcaccccttaccgctcgcccaccggcctgtgatttatttggttggtttgggttttatatttctttttcttttttttttttcttacatgtagttttctatataacatctttaatgagtggcttcctgtgctaagaatggtccagatgtgaactgctgctccctgctcctcccttcctccttcacactcctagtttaggattgatgtgtccaagctcatagggaagaaagagctgcagctggagcctgaccctccctggaacagggagaggctggcccgtgtcactgcctctgtcacccagctatcctcgcactcaaagccatccaacctcagcaggccttctcgggccctgccacctgaataggtctgaccccagtccccactccctttcaggctgggccacagggagttgctggctggccacttgacaccctccccctggagctgatgtctgtgactacagggagattagcacttcgtctagtgaaactcctttcatctctgtcctatggccccaccccaccattccctctaggcccagaccatcatcatggccctggccattgatgtgtatgggctttctttccctcatgcagccccttcttccccaggctggatgttgtgggtagggaggggtgtgtgtgtgtgtatttggtttgctgtccttttttaaaggattccaagccatgtgaaacttcccttctggatgtgattctgggtcgcaagtccttatttatatgtgaggctggggaatgggctgggggtattggcagtccttttgcagggcagtgtgtgtggtggggtgacaccgctgtggcttagcccaagacactcccagaggaaaacactgcagaaggaactggtttgcagactgtggaaggatctgcagttttgtttttgaccaaaaaaataataataagttagctctgaagggcagagggaatacccaagcccctgatgcctatgagaagtccctggacttcaaccctcctgttgtttggccttagcccagagggagctgctcacctgagcacccttgggggtgggcagagaggcagggtgggattttagagttagtgtctgtgcgggggcagccctgagcctggagttgagactttggggtctcttagtttggaggtgttgagtgcatttgtgcccctgcctggttgagagcttcttggtacctcttgccaccccttctcactgccctgacccaaccccactggaccttgatgctgcgaggagtggtgtcctgacggactcagcactcccgcctgatgtattggatcataggagagcacttgctctcctgcctctgccaggagagggcttgttcctccaactctaggaggccaggcaagcatggacaggagccaagggagcagggtcattaactttttcttctttgcaaagtgggcacttggcatcagggtcccaatcaccagaaagcaccaaagcccctggcaccccacccactccatcctacccagggaccccaagtaggcaactgttatggcagtgggtccagcccaggccagcactgccagcctcctctccctgcagtaggcaccagctctacctcccccggcaggcaatgtcctggcttctcagcccagcaccatctgttcccctagacttctcaggggccagcccagtctgggccaccctttgtttccctcatcctcggctcccacacaggtgacagacccagcagatagcttctctctgggaaaggttggatgctgccttacatccccttctagccctcctcccatccacacacacaggcacccacccacaccaggtcggcttgtttctcacatgtagggagagaggggagaccaacccctttgtgtcttttgaaatacgaagaaaaatgtgtgttcaggagcatgactccagtgctgcgctcttgggcccagttcagtctgtcttgtctcaaatctaggcatttttgcttcaattttattttttttaagaatacaaaaacagaaatctgcactaatttacctggtttcgtaggaaaacttttttttattttttacattttttggtgtccgtttgtattgaataatttgctacatttgtaaaatgtaagaggtatataatatatgtatatttctaacgtaaaaaacataatttttttcttttcaagattttttcttaaaaagatgagagaaacatattttttcaggaaaaacaaactttaaaaaaaaaagaggagaaataaaaccttttctcccctttccccatcctctatctatccctctttcccaggaacaaatcaaaaggtggattatcttctgaagaatggaaactgttagtccagaatgatgtgtttttctcaatgcagtgagttatagattctctagttttctccctagggatgggaagggggcattgaggcaagcctggagaggagcccggggagcagggtcatgaacttttttctttagtgaaggaggaatacaatcaagggttttgtattcagaatgttgtgcaatattttggaatgggacattggtgtgtttagagattttagtttaaaaacaaaacaaaaagattgatcaaatctgtacagtttctattgttccagatttttttaagtttgtattaaaagcatgatacataatagccttc

SEQ ID NO: 11261 - DNA, 680 bp, Homo sapiens
ttggtgggtggccccttcctccccccaacatcagtctgctgcagctgccagaaaacatgcctactactaccagcagaaagggagcagagcccagagcatcaccaggagtgcctgctagtgtactggcagcttgccaccccctcctctcccttcacccagacacgtggtagggatggaaaaggattcttcacagagcactctggcacaccatatcggagaaaacttgatagattagttaatggtttttcttgaattcgagaagcaaagatctgttctccatattggtatgttctccctcaaccaagatcttctaaaaagaaataatattttagtcttctgcttgaggaactgactgtgaagcgacgcccagtgaaaaacatgttcttgcagcagctctggtggcagctgtccttgaggaacctttggtgtgtggtgggaagctatcagaacaagaaatgtaggcatttcccgttttttttggggggggggtgggggggcagggctctgccctcttgaaaggcatttacttgtttaacacttgtccagctacagtggggtacagtagctggctattcacaggcatcatcatagcccactagtctcatattattttccttttgagaaattggaaactctttctgttgctattatattaataaagttggtgtttattttctggt

SEQ ID NO: 11262 - DNA, 3479 bp, Homo sapiens
ccctggggctggacagtggaccctaccagcctgcgggaaggtggtatggccggctgtgaagacaacagcagctgaggccgatgctaaggagatagtgtctcgagctggacagtgaggcaaggccaggagtgcccaccagcttgccccgctcctccaccatctaggccctgctcctccttcactgcagtgatggatccatctgtggctgtggctgttgggcctccactgaccttgactgaaaagacccttcctggaccctggacttgacaacaaacggcacagacaccaatcactcacagaacagtcactggttttggattcttgttttccttgcaagaacaaaaggttctctagaatccttcagccaccaatgaaatgatcaggcaggagaaaaactttagatgggagtcttgtcatcaaaaataaatacagttgcatggagctgcttaagatctgaaccaaactcaaaataggaagacgggggctaaaaagttattttaagaacccccccaccacaaccacagtcactccgtgggctaagcggggagcaggaagcatgtctggtcacaccatcttggaataggaagccatggctggacggatcggatccactgatggcacacgtggagctgaacttgacgccagcggcggggcggggaggcactgccctcactgttgcagttccttcattctgttgagggcactgccagcgcggaaccactcaatctgcgtctcgttgaaggtgtggttcaggaggatggtctcctgggtcccgttggggtgcttgatgatgcacttcaggggctgcaaggagaaggtgggtgtgggtggaagtggtgggtactgtgtgcccttggccccgcaggggggtcagggagacagggcactgcctggggacctaagaggtcagcaggcaaaccaaatcctaggccagtctgtgcctgatggcccaggtcagacccaggtggcacctacaggggattcctggggcccagagggtcctgcagtgggtgggctgtcccctgagtgccaggtcctggtgagtaaagggaggttggggaggtgtgagggccccgggttgactccaacccccaactctgagaagccactttgctttctctgtggggccacctggagaactgggggcctttccagctggaatgaagcctcctgggagaagctaccctggggccagtgcaggaggggaaacaaggtggctgcccctcaccccaccacctcagggggacccgggcccctaaccttgccaggggtgaagtccttcaggccctgaatggtcagcttgtccacagggtgaatcttgttgtagtcagccgggtcagcgaaggtcagaggcagcaggccctgtttcttcaggttggtctctggaaagcaggcggcattcggtcatcgggggcctgactagcctggagagcttcattttctgaacccatctggggctctgggagatgcccctaatcctgctgcctgggacaatgcccgggcagtgactatggggccctggtctgctccctttcactaggggtgcccctagcaagtgtgcgctggtgctgaggtctgcgaggccttcctgctgcacattcatgatcagaaagaaccccctggcacatgtcctagatctcagcggctcagatctacaagcctggaagcagggcctgcgggaagccgggaagctgagcgtcggatgtgcactgtgtgagcctaagaaggggcaagaggctgacgggcctgtgggctgcagtggacacagcctagaaccaggcccaactcagccacgggcagggagagtgaccttgatcactagggatgggatgaggatggcctgggtacagactccagctcaccgtggatcctggcaaagctcttggtgatgatggcccggcccccaaggtggcgaggctccagagctgcatgctcccggctcgagccctcgccgtagttctcgtctccgatcaccacccacctgatgccatgtttctgtcaggcaagcgggggtaaggttataaggcagaggagggcaccgtcctcacctgtctggccctacctgcctggcctcacccacctggcgcctgggcatcctgaggctcccggtaaaggggctggaggggcccttcctcgcctgctgcctaagggcaagtgaagcctgcgtgaatgagacccaaacgaggccccgaggggacagaggcacgtggttgtttgcagtggcaaagaagacagaagccacccattggtgcttggcagaggcaggtgtgtgtggagggaggttgggtgagacagggacggcctccgggccccacacaagatgcatctgtgaagctcaaggcgcccccttcctgggagcaccctctgccccacccagccaccagggggtgccagagtcctttcacccggctgggccaggacttgggttcagccctggttctgtttgtttctcaaagcagaaaaagtccaatcacctcagaccctctctgcctgctcactgtgaggccccgtgtagccccctctctgagcttttggcctctgacttcctgagtcggcccccttccttgtctttgtctagggccagatatcctaagatatctctcactaactcctcctggtgcagggacccggctgtaccaccggacctgggcctcatgccttctcagccacagggaggggctgcaggcctctcctcccttccacagcagtcccctttgggcttggtcggcctccttcccagtttccactcccctaatgtcctccctgcacctgccttgcaggccccttcaggagtgaccactggcattgcccctatcaactctgacccaccttgtagtagcgggcagtgtcagggacggggccaaactcctgagtgacggcattgcgcacggagttggccttgccgttttcaatgttgatggcaccaatgagcaggttgttggagatgttatccaagtgcccacggaacttgagccaggggccagcagctgagatgtggtcagtggtacacttccctttgaccttgggtggtaagtagagaggacagaggtcagggcatggccctggaggggtggatgacaagccctccagaggcaggcagcaggccccggggcccaggaggggtgacagaggggtgagaggcaggcaagtcttcagacacgtgttctgtggtcctggtgcttccaccctaaggccacatgggctcaggccaggccttcatcccctcaaaggcctctggctgctcagtctcccttatggggcagaggccgcccaaagttgggacaggtcaatgttcgctcacccttcaggcctcagctgcaagatcagccacagacctcatgctggacacaggagcccaggacatgcctgggtcctggctgatgactgattagtctcttctgtcacaggggtgcctggagaccccttaataagcagcataaataaatatctgacacagattggaggcctctggccacacc

SEQ ID NO: 11263 - DNA, 410 bp, Homo sapiens
ccggggcccacatctgtgtgtcgtgacttctgaagagtttggcctaggcctaaagagaggtcctggtgttggatagatgccagggcccctcctctggcccaggacgcctgctgcaagcccacccagatggggccagagtctgtgtggacaaccgtccccagccagtctgctcctagtggcactggcttcgtcctcccagggcccagagtgttccccatgctccacctggtggcccaggccacagctgctgcttgtatttcggtacagaagaggtttctttctgcaccaggaggaggcgtgctcaagtatcggtacgagatctagcctgccctgcctgcctgccctgggcgatgaggtacggtggggaaggtgcctattttagagaactttgtcacagtattaaagttccc

SEQ ID NO: 11264 - DNA, 165 bp, Homo sapiens
caggactgcctgggaccgccctgcctcaccagggcttttcctttttaaacaaaacaaaccctaccagatttctattttataattttacatcagagctaacaaccaggggacggctttttaaatttcccagggaaggagaccgtcaggccgcatgtagacaatgct

SEQ ID NO: 11265 - DNA, 335 bp, Homo sapiens
cagggagccggcaggaggtggcccctgccctccctctggacccccagccaggggcttggaaatcaaattcagctcttcactccagcatgcacatgccctctttctgggaccaggctaactctgcagaagcacagacactacagaccacagcattcagcccccatggagtttggtgtgcttgcctttggcttcagacctcaccatctttgacagcccttgaaggtggtagcccagctcctgttcctgtgccttcaaaaggctggggcactatgagtaaaagaccgcttttaaaatggggaaggcaccattaagccaaaatgaatctgaaaaaagac

SEQ ID NO: 11266 - DNA, 438 bp, Homo sapiens
ggccaccatggcgcagcgcctggtgcgcgtgctgcagatctgtgctggccacgtgcccggtgtctcagctctgaacctgctgtccctgctgagaagctctgagggcccctccctggaggacctgtgagggtggctggcccctgggctgccccttctcatggcttcgtgctgactccataaacattctctgttgaggatgtccagtcagggcttgacaggcccaggctcagcccgccgtggctgggaaggttccctgcagtgccagtgctgcagcagggagagctgggcagaagcagcgagggggcccagctggcgagactgtagccccctcccactcccacactcactcttgcagagcctgtgtctttaagcagctggcgtgttacatctccatttaaggtttcctttgaacaaaaggtctgtggctaaaaaaagttt

SEQ ID NO: 11267 - DNA, 1898 bp, Homo sapiens
ggagctgggacatgtgacaggctgtggtggcaccactgagcctagaccatggagccttggcatgcccagggcaagtggggaggttctctgctccccaggcctgctcggtgactgaccccatcatacccaaagtgcaatctcacggccaggttctatgccctgtccaagcgtaaaccctcttggaaacttcttttggggcaattttcctgtggccttcctggcctctacttccatgtgcgcagccccacagacgttgctgagcaactcgccagcctcctgagctccatgcccatcaggactctagcctctgaccttgctgttgactctgaaatcaggatttggaagttttcgaattaggagtagagagatctgacctcttgccaggaatgcccatggatcatgtgattggcttttctacccatagagggccttgcagcctgataccacctgggagtgagggtcacaaaggagaccttggctccctcaggtcaccaataaacctgttctttaatcaagtagttgtaatatggacctggggtacctttagttagggactctggtggcactacacggggtgctggattcaaatctcacctctatggatgatgtctggcatcgtctggcccctccttttccaaagtgaccagaagattgtacttcctagagatgccagacttgcctcacacccaggagctgcccctgctgtgcctggtatgctggcagtggtgatggtgacaacacaatgaggccaagtagcaatgctcccaggtcctgcagcttgtgctctgcccagcagtgcccctggcccagcacctcagcctgctcttctctctggtggctccaccccaacccctacttcttttcctttatttctctcccaacctggctgcaaaggaggttcatattccccagatgtgtccacaaacctgtccaggagttgtgtcttaaaattgatttcctgtccctcttcctaaggacaggggtaacagtcaaagtgaaggaatgatgggttcttgcctgtcttgctttggtccgtatttcccaagccctcctcttttagccaaggctacagggcacttgtcttccctggtggctctcccctttggagagagctagtggcagagcaacctagctaggtcctccttgggctttgaatgcaggagcacccagtgccccaggccttgcactgtgctgcccaaggagtattttctgggtggatctcccatactcctcagggttctgaggtccttgtatttagggtatggtgtaaaaacttacatatgcacattttgttacatcatttaagatgattgaagctttactggttaagtatagggtcaccagagaaagttcctttccccagttgatgtcttgaggctgttgagaaacttaggacagaagcctacctcatcccaggcctgcccctccgtgcatagctctgcctttgggtcttgttcatagtgctgttcaggcaaaatggaatagtctcaggtgggaacaccttctcttgctagctccaggaaggctttgtgggaaatgagttgagaccatggacttgggagttgggggccagagttgagcctggacttgaccaattaattcccttacctttcagcccaagatagctacatgtctttacttgctgtataagttttccttttgtcctgggggtgcctgattgatcctatctcttcacccttcattctttcaacaaacatgccatctatctcccaggacatttattcccttctattcaaggccagttaggaatgcaattatttttttttttcagttaaatacagacttgtttggacgcaaggtaccctttctctttttaaaaactttttatcatgaaaactttcaaatacaaaaataaaatggtagagtgaacctccatg

SEQ ID NO: 11268 - DNA, 656 bp, Homo sapiens
agtcattcagtggaaagatgcacgttgatactattttagagcacaaataaactcactatacaatggtcactttgtgatagaattccattgatgaaccaattttctgcagcctctttttgcctgagcaagtgggaccttggtatacacatcacctgttctttcccttttcttgaaatgtggtgtttgctgtaaattggattgaattatttttctcagagccttgcatgtcagtaaacaggaaggaaggaggccatctgttcaaaaattgtgacattgggcatgaggctggacgacttgttaatgtagttgtttctatagcccctatgattagacacttcagtgtcagggcacagattatctaaaattagccagctcttcctgtcagggatcagggcagcactaacaggcgcaaaagtagagctgtcaagatgggctagttttccttgggttctgaagaaaatggatgtgcaaaggcttggctccgctacttgtaacaagctccagcccttaaaatgaaattaacttcctactcaggcaccctgcttaggtgcacagctgttcaatatacacagagaacagaaatattcctactgtctttggaaaccctggtgtacctctcagtggcagaataaacatcaacacaggttcaagaactg

SEQ ID NO: 11269 - DNA, 73 bp, Homo sapiens
aatggggtacctagtccccagcctgctccctagccagaggctctaatgtacaataaagcaatgtggtagttcc

SEQ ID NO: 11270 - DNA, 1346 bp, Homo sapiens
gtgagactgtggagatgagaaggtggtggacactcgtgatggaatggaaatcgtcctaccgtgcagccacaccctgccctgccccgccccgccccgcccgcgtgcctgcccatgccagcacttccttaagttctcacatcacactcaaaccagtgacaccacaggaaagaaagacccaagacgttggaatggctgtttccatggacacaatctccatagtgacaatgtggggggaggggggaggggtgggatgatggggaaagggtggggggaattaaaagggagggataaatatatatatataaatctatttttagtctggaaagactttgtttaaatgaaaggtgcgctatcccttttgattctgttttaaaattatctcgttaaagatctccaaatttgttccgatgacaagtgaaatttaaatgtgagattgaactgaacaaaccctcatctcatgaaggacggggtgtgtgtgtggcgttgatctttagcctgtctcacaccagttcagaaaacactagacccaggattgaaaaagcaaaccacagcagaaccatccttttgtcattaatttgtctcaaagtgggaaggttttgggggagggggaaatacagggatggtccatgttttcaagagtaggggaatgatgtttaaacacaaaaataaattttttttcatttccagaaacactatttatttatggttttttttttttaattttttctttttgggggtgaaattggcagatgcctgaggtcatagctgtgtcctgggtcactgtggctggtgaggacctcaaggaccccatcaagtgtacacagcagcagcaaaatcaagggatgaccctcctctggggccccctgtcctcagcacattccaggcagctgtgccctgacccacagggacccgtggggatgggaggaggtccaggcctgtgttgccagagctggcagtgtgagctgtaggcagggacggggagggactgtcgctgtgatcagagtgggttaagctgaccaggaacacccatttaacccctttttctttttgctttcatttttataaaggaaaagaggacctgtcagataggcagccccatgctacgtgattctttatgttgtgttgttttgttttgtaaattgtataatttttaaatatctgagttttaaaaaaagaaaaaagtacaaaaaaatcttgttatggccttaagaaggggttagtgcatctttcaggggtcactctgccatggggataaaatagctgtttcacaaacagttttatttaaaaaaacaaaaaacaaaaaaaatcaaaaaatcaaaaaaataataaacttcattttaaccttg

SEQ ID NO: 11271 - DNA, 4753 bp, Homo sapiens
gatgggctccaccgctcatagagcttgccctgggtcagaggaccggggcagcccctgccaccaaaggacttgatctgagttgggagtaaggcccccagggacaccccatcatttcaccctcacattcaaggcccttcctgtcttggccggccccactgcccccccattctatgccccaaccaccaaggctttcccatcttggggcctttgcccaggctgttccttctgccaggcaggcccttcctcccttggcccaaccagcaaagcgcccctcagtcttcaagggctttcctggatgccacccttgcccagagccctgctcactgcctcatgctgacagagcagcatgctctcttggcaccagcctgcacctcagccagtagggcagcctctgagctgagggaggaccctgcaggggcgcctagcagtgctgtgtggggagccgaggtatggaggagctggggagcagctatgcaaatccctacctacccagctgggccagaggcacgaggcagccaggcagggtgggagcaggggctggcgtgggaggtctgggggacagacaaggatgatggacccctcagaggcaagactaggatcagggacagatctggaggcccaggacatggctgagaggtggtcagcaggctgggggcatggagcagagagggcttgggtacaagctggagaggaaggagattctggcatgttggggtgagggcagagggacagatgaggggaggagggtgctggctaaacaggaactgaatgaatggcctgaagctccctctcccaagggttcccactcccattggcctggccctgtacgtgcactctgtcatctccttggtcaccctctgctccaggccttctccaccacaggacctcagctgtccctccttctacccaaggtggagtcccccaaagtcccttctgtctggcctatcctgtgcccaccacctgtggcttcatccagccctcctcctctatctttatctgccataggccgcagccctggccccctgtggattgaggtcccaagtggtccagctgtggggtttggtgctgggaccctcaatggcagccggaaggtccctctgaggcagaagctcaagccccatggggacagtggctccccagtgcctggccctgagccatttctgctgtttcaggtgcccacatcaccctcatttcctcctcgcagtagccctgcaccgtggccagaaacccatccacaggcaggcagtggctggggtccgggtgccccgggctgttgggctctgcttcctccctctgctcccccatgtctccctgagttctcccacctttgctcatttgtaaaatgggcaggtcaatcttcccaccccaccgtgtgggctgccccaaccccaaatgtgcccagggaggggggggaacccaaggcacaggccccgcccctgcccccaagcagcactgggctactggctcacagaagcacctttggttctgcaggtcatgcccctccctgcagggaagggaaagctggtggtagaggctgggcacagactgacgtccagaagaagtcccttggccctgctagggtggcaccagacttctctggtcccacaggacagccagtggcctcccaacttggttctgggcccccgcctgcaagcacacatggcaaggagggctttagcaggctcacataaccgagtggcaaggcccctgctcccagaggctggatttgaatgaactccgggcctgtttggggaggtgaagctgccaggtgtgcacaggggcctcccaggctcctggctccaccagccaaggaggtgggggcaagggtcagggcaatgggggacaatgccgctcagggtgcagtgagctcccctgggaaaaccgaagccagcaagaccaggagagggccacctcactgggcctgcctcccccacctcctgggcctctctgacctcagctcctagaccctggacccttggctgggactcagcattttccagtctttttcaggggtagacaggggagcctgggttaaactttaccactgtgccctggcccaggcatcaccaacacggcctccctgcagctgccctgccaccgacagaccccgattaaacccacacctggccttggcctcccctgctctataccttgcatggtttttgcctcacttggaataaaattccaactcctccctgtggcgtaggaggttcttgggggctgacccatcacccctctggtggacagagacattgccagcgtggtggtcgtctgtgcttggttcagggcaaggctgggaggcagtgggtgctgaggtcttcagtgagcaaggagagaggcagggaggaggaggaggaggaggagagcacagcatgaaaggacgggaccctaaagggctttggcccaagggagggtggggcaagaatgttctgagacttctgtgggcagcaaagaggactgagcacctgttctccagcccccaggactgagagcctgcagagacaagctggcacagggcgaggggtggcagggaacttcagggtgggaggtgcatggggcaggcgggaggaggaagaacagagaggggacagagagggtatgaatgggagctcctggggtgcaggcttgctttccactatgaatgggtggaggagggaagagaagaaaattgcttttgagacccacccaggctgggtggcctcagggcctcccttgaatccctgctccacctcccacagccttgtggacttgggcaagtcactggccacctgagcctcagtttgcagtgacagtcaagacagctcaggccaggcgtagtggcttatgcctgtaatcccagcatgttgggaggccgaggcgggtggatcacttgaggccaggagtttgagaccagcctggccaacgtggtgaaaccccgtctctactaaaaatacaaaaattagcctggtgtggtggcacgcacctgtagtcccagctactcgagaggctaaggcaggagaatctcttgaacctgggagacagaggttgcagtgagccgaagtggcaccactgcacaccagcctgggctacagagcacgctctgtccaaataaacaaacaaacaaacactactcagtgtctcagaaaggacagaaggggactccctggctcaggcagaagctcagtgggtgtgcatttccttcaagactcgtccttcagaaggaataggcttctggggcagtacagaggagtctaagtgagaggcaggcctccctgggagctgggcccaggctctctgcagccatgcctttaaggagtgcctacggggtagcacgatcagatggacaggccagggctgcccagagctgggggtgggagcaaggtaagcagagaggtgagggaaggagggtgctggcttagcaggagctgaatgaatgggcctggaggggaaaagctaagggggatggggtggcttgagtggagtaggtgaggcctaggtgaaggggagctgtggaccttccaggacggacggatgtgagcagtcctgagtggggactggagttagggtggggaagggaagccccaggcagcccctgcaggcccctgcccctgggccctaccgcagcagggcagccctgtctctgggtctcagctgatgcttccctctgcccactggcccctgacctggtgggatttcccaccatctctcccggcccagcctgccctgccctcctaggtcttcccaacctcccctctgcagaaacatctcagccacgtctggcacccccaggcatccctgcctgcctctaggaagttgaccccttcaatgggtttcagcctccaaccccacccccgcttgactcctgctctgtcagcacttgcttgagaaaatcatcctgggaaaccagcttctgggagcaggggccttgccactcggttctgcgagcctgctgaagccctccttgccacgtgtgcttgcaggcgggggcccagaactaagctaggaggccactggctgtcctgtgggaccagggaagtctggtgccaccctagcagagggcccatggacttcttctggaggtcagtctgtgcccagcctctaccaccagtccagaacttgcagtgggtgcggtaaacggtggcccctcctcagcaaacatttccaggggattctggcagcagagtttccatgggaacatgtgctggttctgcgctgaacccggtgtggctggggttcccttcacagccaatattgcaggaactgagcctggtggcctcggccagggtaggcagtgctctttggccacccagtgtcacaaacctgaactcaagttacaggcaaaacctgcttttcctttttctttctctctctctctctttttttttttgttaaagcacattctaatgtaaagtccatgctccattctaaagatgcctctgggatttcagggatggatttttatgtagttcaatagttttcttggcagacagcttatgcaggagaggtgggccgttggctcagtccagccaggctgagtggcgtcactccattccttgcaatgccaggggatgtcatttgtccacctgagggggcttccccagtctcccttccctgacctgtggtcagaatgatggcctcagccttgactgagcgcgggtcaggccagactctctgaacttggtgttggcgtgtgttttgtgtgtgtctggaggtgacatatgtgggtgacagaagcatatgttacagtgaaacattaaaactacagcaaagtgaa

SEQ ID NO: 11272 - DNA, 341 bp, Homo sapiens
gctgtgagagccgcagtgaatggctggaggtgcagggccaggaggaggcgaggcagggcctgcagcggtctctgagaggccgagctctggccaacgggccccaggttgaaggccaccgcgtccaacagccccatcagagtccacacaggccaggagggaaggaccaggccacccctcgggtcttgtgcttcagcagtcctggggacccaggcgtgccgagaggaggacttgtccttcctgcttcttgcctccacaccctcctctccaggaccctggatgaatccgttctgtgcttccttttccctcaatgcaaaagcccttgctggcaacgaaaaagcctc

SEQ ID NO: 11273 - DNA, 2069 bp, Homo sapiens
gcaggggagtgaggcagccagaagtgggggcagaggagggtggctctgtttccccaaggcaaagcttatgaccaatgggccatcggactggagacccctgattgtgggaagggttgccagggataaagagcttcctcactggatgggacccgcctttctgtgttgtgttctgccctgtgctcttctctctacgttaacgtttcctgtagtatgtttcttcatctcatcgccaaggtaggcttgtgtttttcagtgtgtgcctccccgagcctcagccccaagctgatttcttatctggaaatggtacactgaattctctgggtggctttcttgtggccccatgggatgcagcgtgggggctgtctgaaggaccctgctttttccaggggccgaggggctgcctttcctttgtgtgtattaagcttttcaaacaatggaggggatggagagccctggtgtcctgacgggagccaggtcggcctgagagctgtgccgctcctctgtcttgtcagtggaggtgcctgggtggggagcaggtctcaggcctcttgtcctctccccagtggctccaggcctcactagtggcaagggcaggatgaggctgcaccgctgggaagagtctatctaagctcttggcttggagtcccgtgtcgtctccacccagaggaagttctccagagttcacctttcccttttccttgagttgtgctgaatgccccaccccagctctctttcccttctgggtgtctttgctgggagggggctgtgttgtgagccctcccggttctcacctcgcctggcacttaaccacaccctggttttgtgtagccgccagctctcttctggttgggcctttgaaaggctcagcctcccattgtgcagtgcttgggtttggagcttatttgaatggaagaggtcagtttgttcctggctctccatttctggcctcagttgtctacaggacagtggtcagggatgcctggaggcatatatccagctgccaccaaggggcactgtttgttcccacttatgtgagtgaccccatccatccatgaccagaggattattttcctgccttggcagaggaggaggagtcaagggagcagggcagctctaccaggcaaggtgtttccccagcataggcgcagacagttgggacgaaacttcagagcccaggcagtccctgaatgaccaggccagtgttgtcactgagtggtcccctgctggttgggagtgaagagaatccaggctggcagagctggagccagttggggagcacggttctgggagctctgcaaaatcagtagcaagtgctggaaaaggcacatgccgaagatactcaagagctcccaagatttgcttgaggctagcccagtgaaaaaaaccagagactcatgtttccaggggtcagtctgtcaggcaggaaggacccaggatttgaacccagcttcagtgtgcaggctctgaggctgcccaggacgggaaagtccaaggaaggggcctggtggtgctccacttgcagttctttaaagaatgctgctttttattctcctaaccctttcaagtgggtgcagacttctcgttagcagctggaagacattcctcccacacttttcccttcctggcccaagagagcatccagaaggcagtaggacctggtttttcaggtactgggagccgggggctcactgcttgcactgtgcttagggtagggatggtaaatatcctccctgcatggctttatcctccctctcatcccaaagcaggtatcttctggttgtcacagagtttcattgagtccagctgcagccacgtggccatctggagctggtgctataggtgaccatctggtacattgaggggacctgtttgcctcctccactctataagcagtcatcttgggagaccgggaggagaaggtggtgggctagtcctgtgtcctcctccacttcccatgcctctatgttacccatctgtgtctcctgtgcagaaggagaggaaggggcattaagagatgaagggtgattatgtattacttatccatttctgaataaacatttgttattcct

SEQ ID NO: 11274 - DNA, 958 bp, Homo sapiens
gggccgggcacggtcacacggccacccgccccgcgcaccccacgccctgttcacgctcacccagtcacctccccacatcgcacactggggccccgggttcagcctggcctgcccgtgccctggtgaatcacctggctgagcagttcccctggagccccttcgggagcagggctgtgtcccagatgggccacggctgagccttcagagtacgtcctgcctggcacttactggtccttaccagagacgcccagccccatccctgtcctcatgacccctcgtccaccccccacacacactataaggctgagggctgccagcagccccgtctgcccaccattcccggccgtggaccatagtcgggatgtcagcagacacacatgggcagcccaaagctgcaggtgccagggcccaccccagcctcgcctgtcacccccactcccgcctcagggccaggcccaggcctcaccacctgacgctgcatgagacattgacaccagaaagccctcttgggggcactgctccctaccccagggccctggccagccgggagcttggctctcctctggctagagtgggaagagggggctggccatggggccctcccagaacctcagcatttccttccagcccatccaaacactgaggcagccttggggaaccccgagctggggggttggcagcccactgcaccgcctcagggttttggggtcctgggctggggccaccatccctgatggcagaactcccacaaccacatgtatttattcctctgtcctaaaccgtcccctccttccctcacccccagcacagggggattctgagcagtgcctcttgtctgagggacatatcagtgacctcgacgttgcctttagactacagttgtgttagcctcttgcgtattggctttttcagagtcatttatgagcagaaaaaaaaaaagtaaaactttgctaatatt

SEQ ID NO: 11275 - DNA, 768 bp, Homo sapiens
ggggcccgccaggtcacctccccaacctgctcctgatggggcactgggccgcccttcccggggaggcaagattgagggcccgggagagggaggcccgagctgccaccgggcttaggcaggctgttgaggagctgtgggagcaggcccagtgggaggctgtggacaccccgaggacagtgtcctgtctcgaggcagggctgacacatggtgccatagccagcggagggcgctcagtgagtgccccgggccttctagacaacaggcaggaaggatgaacctcagggcacccccaggtggtgcggaaagccaggcagttgggacagaggtgcccacgagggcagaggccggtgctaaggggatggggaagaagggacaagattcccagagaggagaggaggctgttggtaggaaagtggcagggctgggggagacccagccccaagggtccggggcggaggatgctttgttcttttctggttttggttcctctttcgcggggggtgggggaggtcaacagggactgagtggggcagaggcccagaagtgccagcctggggagccgtttgggggcagccccttctgcccaccccatccttcttcctctccagagatgccaggggggcgtgtatgctctgccccttccctcagacaggggctgggtggggaggctctttaggctcaggagaagcattttaaagaaacccccaccctgccgcccgcattataaacacaggagaataatcaatagaataaaagtgaccgactgtc

SEQ ID NO: 11276 - DNA, 1062 bp, Homo sapiens
tactgaagtcatgatgtgtatttcctggagaaattcctctttaaatgaacaagtaaccacatctcaggcggcagtgaagtccagatagttttgcagattgttttgctactttttcatatggtatatgtttctgatttttaatatttcttttgagaaattctgagttctgatgtaggagctttcctgtgatttctgtttcacgttccttcctgtcacaccctcctttggcgtctctgtgtatatccttgctttattttcttggaacctttgatttcaacactgagggcctggagacctcggctcctcctgctcctgaaccaggaggcttcatgtgggggaggaggagaggtctccatgtgacacatgggctcagggctgccagaatcagcggatgctggatgggcctgcagaaacaacactcaccacacacacttccttcaaaagaccaaaagtgactggtgtctcgtgtgacagattgcttcatttatgtttctacatagtaaggtgactgccaaataatatttgaagtcatctgtctctttgtaaattattttatatgacctataaatttaaaaatgtttttcagtgagtgcttttaacaaacttaagcttctgccctgccaagggaattaatgttatcttgtgaaaggtgttgctgtttgaattgatgagaaatggaagatgagaactccctaagagttctcataataaatcatctcatcacaaatcaatacggtatacagagttaaagtggaatgaggtaagaagatacagctacagaaaatagttgcgtgtatgggagaacagtcattgtaattgggtagttttgttaataaatatttttaaatcttgcttttcagaaattaccgaatgtgtataaacaaataaagaaaaataatttagctgtgttttagacagcattagaatatattgttcagcacagtaaaatatatttgaaatttgataagccaaaaatgtggttttgaatgaatattttgtgaatctttcttaaaagctcaaatttgtagacttctaaatagaataaacacttgcagcagatgg

SEQ ID NO: 11277 - DNA, 426 bp, Homo sapiens
tgagtcggggacaggccagcggggggacggaggcggcgggcccaggagcctcagccagccacgtgggcatccactccttttcctgcaagagatgatggttccattgctcttggcttcatggtgttcctggaaggcagatgagctggtcatttcgcctgggactcggcacctttccgagtgcagctggagggatctgagcgcaggaagacgcagaacaacagaaatagccgcccctccccgcccactgtgcctgttggcctatcatagatctctatgttcttgactttgtctctcctttccgagtcaatggtgggttacactgatcttgttccactgattactctctctgacgagtccatcacctgcaacttaaatgaacaagcttacatcccattttgagtgaagattttgaggtttttaatttaa

SEQ ID NO: 11278 - DNA, 136 bp, Homo sapiens
gtcccacctggaccttatcaaaactactcactccacctgggcccctgctgaagccctattttgaaatttcccttttgtagagcttttttcctttcctaagccctgtaaataaacgaaggcacttctttggaaggtt

SEQ ID NO: 11279 - DNA, 1249 bp, Homo sapiens
gtttcatttcagacgcaccaggatgttgccggttagtggcgcattccacacccgcctcatggagccagccgtggagcccctgacgcaagctttaaaggcagtcgacattaagaagcctctggtttctgtctactccaacgtccacgcgcatagatacaggcatcccgggcacatccacaagctgctggcccagcagctggtctccccagtgaagtgggagcagacgatgcatgccatatacgaaaggaaaaagggcagggggttcccccaaactttcgaagtaggccctggcaggcagctgggagccatcctgaagagctgtaacatgcaggcctggaagtcctacagcgccgtggatgtgctgcagaccctcgaacatgtggacctggaccctcaggagcccccgagatgactgcagggggctcaaatgcgatgaccccctctgtcctcctgaggagaggctgtaggctgtgcctgtcgccccctaccttcctaatggctcctcctctgaggagtgaaagggatttgtttgcaacgtgctttgaaggccacataaaaagccctaaaaatgagtatttctttacatgacccagtccatttctcccccttggaaaaacgtttggacgttgggaagaatgatgccacagggctggtgtgtggggaagctagaatcctggccccgcctctgccagccctgcaccataggcaggtgtgccatctcagcgggaaggggaggactggctgctgcagcctgtcctgctctgtgagtgctgagaacatgctggtgtggcctcaatttcagccagtgccaggggagcccctccaccacccccagcctgccccccagggctcctttgtcacaaatctgaaaggttttagaacccagttggccttggcagttttgttcacctcctcacttgacagctgggagacagaggcccacatttatggacatacccaagagatatgtattgcctgctgtgtgctagagagtgagtgcgctctgttctggtagaaaggtccttgagtgaggtgcggggtgtggggagtgccaggtagggagggcgactgaggccctggtcctaggggtggaaccatggaggaacaccctggtcacccactgggactgcgggtctgcggggcgccagagggagcacagcacatacctgcctcggagctgacccctggctccatgccccgtcctcagagcagctcctgcgccaatattaagtatgagacattccaagct

SEQ ID NO: 11280 - DNA, 1385 bp, Homo sapiens
gcactcgctgtccccaaaacctgtgcttggggcaggattccaacctcagttctctgagctgcttctgcaaaggcccccatgtccctccccacaccggccctgggcatagcctcagccccaggcctctgtcctgccgagccatcctcccggcgccacactccgggagcacagcatcctcctctcacctgtgggtcagagcaggacagtgatggtgtccccagggctgagcaccaccccacgccctgccctcacccctcaccaccatctgtgcactgatgagtctccagtttagccaagggctttgttcctggcatggagaatttgttcctggctgctgtgtttccagggggtgctgggggaagggttccgtggagcgagacaaggtgtcctcgggagcagggttccaccgggaagcgtttgggagccctgtatcacacggggcaggcgggtttctcttccggggtctctgctcttatgcatcaggacgaccccgggacggctgtggggccccacactgcacccacagggctctatgcgacaggggcccaggaacagcctgaggccaccacccagcaagcccgccttatcacccattccagctcacccagaaccttcaccagcaaacctcctgctgaggtcctggcaggaggccaccgtcttgttaccgtttccttttcgtttgctgagggtcacagaccccaacagggaaatcagtatctgtcttcccagtggttgccctgctcgccgggcactccacggggtcccgcccttgtgtgagatgggccaggatccttcggcaaggggcgcctggggctggggctgattgtgggcggtggagcgccagacagaaaaggattccaatgagaacttcaggttaaagtcagatgccacctaccagggtctacagtcaaaatgttggctttttcttattttttaatgtatgggagaaaaatgtaaaattccagttcttttctaattgtgtttctgaaattaggagtcagctgccagcgtttttgtgtggctgcagtgtgcctgggcccagctcacgggcagtgggtggacctaactgcccaggcaggcgagagctacttccagagccttccagtgcatgggagggcagggctaggtgtagcggtgtctcctctttgaaattaagaactatctttcttgtagcaaagctgcacctgatgatgctgcctctcctctctgtgttgtctgggcccttgtttacaagcacgcgttacccttcctgaggggagccatgctctagcccctggagggcctgttgcaggggcagggcgggcccgtcgcctttggcagctcctggagagctgtggacatgcagtccccctcagttcgtgctgcaataaaggccatcttctctt

SEQ ID NO: 11281 - DNA, 773 bp, Homo sapiens
ccggggggagcggccctgcctgggggtggcctggtccgcggagggtgcacctgccctccacagtgggagctgcatgggcctccacaccaccttgggaaccccatggcactgcccttcagggaagccgaccagcccatggagaccgagcccaggcacccttcggacccgctgcccctgtgggagcaccctgcttcaggaagcctccctccctccctctgcctcccttccccaggacaccaagagcgccctctcctgagccctggcagaccgactgcaggtagcaggattgcaggaccctctgcctggcctggcgtttcaggagagaggggaagtggggcctgtgctctgggaggcgtggtcatccgagacaggagtccaggggagagaggaggggacaaaggcgccgtctgggggaggtcgatgagcctgtgctggcatccgcgggccccacgctttgccaactcctccagccacaggcaaggccacggctccgggctgttgcgctctaagggttctgtgattggatggaacagagctgctggggaggagactggaagtttctgcattccttcaacagaacatttaatgaagtactctatatatatatataaatatatatataaatatatatatatacttctatttgtgggtactttaggaaaatgccctttggtcactgtaaatatgaattgtgaccccatcccttcccgcatgagcccagtgagtcccagcagctatcagcctccctgaacgattaaacagctcctcccagc

SEQ ID NO: 11282 - DNA, 79 bp, Homo sapiens
acacccctgctgtgtgcccagcgggacgacagccacagggcctgtttcaaggctaataaaatcctataatttgggggtt

SEQ ID NO: 11283 - DNA, 1494 bp, Homo sapiens
taacagaaacaacaacctgcatgctcacaatacccagacagtctactagccaaaagtcctgtatgcattcatttattccttgctggacaaactctggaagcagcgtgtgaaacagcgggggaagggaagagcggcgtgagcggagggagtgtgatgattcccaaccgaaagcagctgtctcgcctttagaacgtgcagcctctccatgtctgattacaaacagtctccacattgcagttccaatggcctggaccgtaaggataaagcctgtaatatatgcaactagaatgtctgccttttcaaccccgtattattgtattttatagagcttttcactggaaatctacataaatgtcagtaaaccaaataaaagttcatttccaaggggaatcaggagcgagccacacccgaatggtagaaagatctcagggttaactctttatttttgtagttttattatctaaggcacagccattctgttctcacttggttctgagatagtggtgagaacagaggatgagttgggtctgttggggggaatctggacacttgtttattctgacggagttcacttcttcagaaccttcctgaaatgagcagaaattgttcactaggtcttcagaatggacgtccttctgccagagacttccagcgggcggctccaaaggcccaatgcagaggagcccgcggagcatgtgctgagggaagtctgcctggtgaggctggcaggtgggagtctaatgcagtcaggagcatttgcatgcagtgggtggagagtcggccaccaaaggaccgagttgcgctcggaatttgagctgaattccacagccttactttgtttcctgaagtgatagcctactaatgctggcaagcagatgcttaatagtaaatttctaaaatccccgggtctttatcattcagtttgttctgtgcacctgaggcgctcagccgtgggaggaccattttgcgagtgtagccctgtttcactcggatcaggttggcacggccgcctgcgtgtctgtccacctcatccctccgtgtatctgagggagtaaaggtgaggtctttattgcttcactgcctaattttctcacccacattcgctgaagcgatggagagtcgggggccagtagccagccaaccccgtggggaccggggttgtctgtcatttatgtggctggaaagcacccaaagtggtggtcaggagggtcgctgctgtggaaggggtctccgttcttggtgctgtatttgaaacgggtgtagagagaagcttgtgtttttgtttgtaatggggagaagcgtggccaggcaggtggcacgtggcatcgcatggtgggctcggcagcaccttgcctgtgtttctgtgagggaggctgctttctgtgaaatttcatttatatttttctatttttagtactgtatggatgttactgagcactacacatgatccttctgtgcttgcttgcatctttaataaagacatgttcccggcgt

SEQ ID NO: 11284 - DNA, 1116 bp, Homo sapiens
gggggccgagcagggccagcccagtgactggtgtcccttgattcctgctctggcctttgtcctgtgtgcccacatctgccccagcgggaagaggccctgccaatctccgtggagaccctgcagcttggagcccgttccttggggcgcagcctgtcagcatgtccccggtcactgtgtacccaggtcacctgccctccctcttgccccgtctcatcagggagagaaaggaggacagccacagagacacatgtcttactttcagaatttccacggggggactaggagggcagcattgctggggagaggggctcctgttctgccgtggagctgcccacggagcacctcacagaagattgagaaagtgcctgatgcccgcgtcagagaccagaggagccaactgagatgatggggtgggggtgctccccccagactttctcagtcctgcagcggcccttgggggtgacccccggcatctaccccactcaggaaaccttgacttctgaattcctatcaggtccagagggtggaaggccctggcaggaagcaggaggaggaggagaggggggtccaggtcttttcaggatcccagctgtgggtgcttctgttgggcccagtggcccctgctatccccacagcctcattcctgcagaaggtttgtgacgtagctgtgcctgtacctggggcagagaggatgccagggacaccaggcctctggcctctccacgagtcactgctctccccattggcagcacgggacccatgctgtgcccccggccaggccctgaggaaatgctcagcctcagtggagatggggaggttagagagatggaggcgtgagtgagaacgggaagcaaaggaatacacgtgggaactaaagagaaaaatgaccagcctgggcagcatagcaagaccctgtctctaaaaaaaataataaaaacttagctgggcatggtggtgcatgcctgtggtcctggctacttgggaggctgaggatggaggatcatttgagcccaggaggtcgaggctgcagtgaaccgtgatcacgccactgcaccccagcccaggcaacaaagtgagcccctgtctctaaataaataaagagacaataagccactc

SEQ ID NO: 11285 - DNA, 4267 bp, Homo sapiens
gaatccgccagcacttggtagcgtctgcagccacccaggtagcatacgctctttgctgtgtagaagaaatgcccatacgacagctttgcccctgtttgaagacctcccttcttgcctctccagacgtgttccccgaggagatcttccttccgtccttcctggcgccctggttgcccaccttgccgtgcttcctcttacgtgctagctttgtacctatcgctcactgcatgctcgcctccctcttgctggcatcccggcctgtttcaatgactaccgctctgctacttaggcacagggactccgccgcacgctgacggaccacgagggctgaccccttccagcctgacttggttcatggaggctcctactctgccctctccaagctcccctggcggctccccacctggttgcccagttcctattgatgagctctggacagaaagatgcccgtttggccaggctggtggcttgatgggtgtacctggagagggggtctggcttcctgcccaagatgcctcccagccctgccagggcccggtgcagcgggcagggcctcatctgtgctgtagtggtcgagtggttgctgcaaggagcgtagttctgccatgtctgggggccaggttccactctgcacatgaatatgcagtctgggaggccccactgctctcactgggaaggaccaatgttgcacctctgttaatgcctgacttcagctgctggtgttctgatggagccagaggcttggggaatctggaacttgcctgctaaataaggtcgtggtggactctcagccattgggcaggtctatcaggctgcaggttcctacacacccacgcctgagggtcatagcaggctaagggtggataccagcgactccctttgctgcccaggatctccatgggcagtgccacagcggctgatgctcagtcactcctgcttctaccccctgtcactgatggcgagccttgcccagcttgagacctgttcccatctctattcaggtgccatgtggccttcactgcagccctgcagccacccacgcaccatctgtgggtctccaaaggcaccttgtagcatgtactccccgtgcctgggcaatcagatgggctgcctttgtccaagggaaaacagactcccttcgggaaacatccttaagcacttaaggccggggggggtgtctgcctctggcaacccagccagggtcttggtggcatttgtaaaagcaaagagctgtggactgccgtggtcctagtgtggtgacaatgcagcactggcatgcatgtcctccttctgaaggacctcatccttcctcacagggggatgaccaagaaatcattttgtggctgagtttggccacgccctttggactgtgctgttccgccatatttcaatgccaaatgaaccacattgacatgacctggaccatagggcttcctatcctgggctcagctgcccctgtctgaagggtcttggcttgattgcagaaggacaacctccgcacccacctaaagacatgtatatgtcttgggatcccagagattgggtccttgggcctggcttcttaagagttttgatgatgctgggaaaagtgactgcgattctgaagaaccgctgccttgcaaggtcaaggacattcagtggttgctggggtccgcagactactgccacccactcaccatcaactctgttagcccaattgccctgctgaacaactgcctgaatacaggctttaggttcccctggactccagccaaggctgttcaggtgggaccatggtgctctttaagcgtgatcggagggaagacacacagcagggccaccattccatgaatgggaggtgtacagatcactttctctttgtgctcagttctgttctgtctccagcagctatattggtaagactagtacctgccagggagaggtgcccccaagtgaaggggtacagtggcacctgggaaaaggcacctggaaggtttccatgtggcccagcccagcatggaagcagggtgggaactctgctgtgtcgccagcgctcactctactcgagtggctttttgaaagccctaccatgtctgtgtcaggcctgtgctgcttcacatcctacagctgcctaggaaaggccggccacgctccctgtccacacactccctgtccacacactccctgtccacacactccctgtccacaactgcagccgggccctctgcctatgggcacccaatccaagcagctgctccacctttgtttggcatggtgatttgtgttttttctcttggtgcttatgtgtgtgggcttgggacgagtgctggtatgcacttaggaccttcttgatagctccctgcactttggaacacggagcagatgagagagggtcggggcttgccctccaccttggacttggaagaagcccacattggagaggtgaggaccccatggtggctctagtggaagatacgttagtctccagctaaggaggatgaggcgcagccccagagggagacctcagtgataggggatcaggctaagaaagtgggggaagggagatgctttgtacatattttggggttataatttctctaaattttaggagaacgggtattgattgataaaagggacaggcagtagtgttcaacagtgcatgtgaaggaaagttctgttttccatggttttgacattctttggactgtattgtgactgctgtctggtccacatggtacccctttggtaagtaggcttcagtgcataccagggtatcactggagatgggagttagtgaaggggtgactccctggcctagtatagtgtgaccctgggactaacttaatgtcctaaagcattttggtgacttctagggaatagcaaagacctatttcattgtccccaggtaagtatgtgatgagcaatgaggaggagtggaaaacaaaacccagaaagtgcggcaggaccagcctgacgcacacgctcctgttgtcatggcagacagccgccttgggtgggcaccaccctggcagttccagcctgtaggggagtgaagggacatggctgagctgggcatgtgctgaggttgacttagggaacaagccctgggattggacaaaagggcccatgctgcagccactgactgggggcagagctctgggtggaagagggaagagatcctaatggaggcgcctccatctgcaaccacagttgtaaggctcatggcacctctgcttggaaagcactggtttagggacttagagaggtaggcacaaggtgggtctcctgggtaagggaagcaagagcagactgttgggccaacaggagaagctccccagagtaggggagaaggttggggtgtagggccttccacgtggaacagacagcccctgtgtctctgtctcttggggacctgagtttgggtggggtggcagttggcacagcgcagatgcggtagagatgggaggaaacccagctcctcacttccgtgtgcctcatgcctttgcatacacaagcaccaaacctactaggtcttctcattacccatgtaaaccacatgttagataaatttttgcaagtagaggaaagaaggaaataaaacatcacattttggtgtctctcaggctttcccccccaactatggtttctttgctttttgttttaacatagttttgttgctgtcttctgtaatgatacagttttgtgcagctgttttcacttagcatatcgtgggcatctccccttatgattactaaatattttattttggagtggctgtgtactctcccattgactagatggaccattgtgccagttgccaatcactaatgctgttactaacttttcagttataaattgatgaatatctttgtgcacaggctgtttcccaatgtcaagttattagggtagactccaggaggtgggattcttcaactaaagaatatgaaaacctttgaggcttttactacatattgacaaaatggtttccggaaatatttgtatccccttacactgccaccagcaaggataaacatgtccatcttgcccgtattgggaattatcatctggctaaatatttgctaatttgataatgaaaaaatagcatcgtgtttcagttggcatttcactgacttctagcacggttgaacatctttcatgtggagcgattgtatttcctcctttgtggattgtcagtgtcctttgctctatcttctggggtcagataaatttgtatgagctcggtatatattaaagatattaacctggtgtgtgtcatatttgctacagc

SEQ ID NO: 11286 - DNA, 1924 bp, Homo sapiens
ccccgagggaccagtcttcatacccacggaaagttattgggaccctgcttacacagcctgggggttctgtcggccttaattcataaacactatgaatttcagacaaaaattaaccagacagaggagaggagggaggaagagctgggcgagaggcctagagccaggaccaggtgggggtgcggccctgtgccctccaaattcacagggggtacctaggagccaggtggggtacgacaggctggggcacacagtctccccccggccacctcggggctgcctgggcctctggcttccaggccctgctctccacggcctccctctggcccgttggaggggcaggctgaggctgtggaggggacaagcacgccccccagaacgcagtctccactgagggcaccgcctattggtgtcctgtgggagggcgagctgagaacacatggactagctgagtggtagcggtagttgggacgagaagcggggtagtggatctaggtagttcctcaatgccccacgctcctaggaggtccccctggggtgggcgggcgggcctggggcactccgtcgcctttgcagaaccacctgggcccctttctgtcagtattattagggttacgaattgcagctgtttaacttgaaagacactgtcggaggtgagcatctgggcgccgggacgctgcagtgatccccgccagagcctgtgcccttcctgctccgtctttggggtcctcaaggctgcctccttccttttgccaatctcttggactcagtttgccgttgatgcgtttttctcatggagtttctgggcagagtggagctgcaaccctgttgtggggggcagcatttggcaggttttctccttggggttgaatcattcaacttaacgactgaagccctttcttgtctcctttggaagagccgataagtattccactcctcccttcttgccagtgcagacactatgccaaaaaataacttcacacttttgtatggcgtttttattgtgagatatttaatgtgaatggttggggggactctggctgacttcctttctgcttctagtagtctctgcttcaaggtacaaatgggaacacctcccctcgggaagcctggccaagctggaagatccggcaggttttttacgagccgggtggagggttggggaggaaagaaagggcggtggctcgggaggttccggccttcggggaccagacttgctgccaagggcttctgcatccagggtgggcagtggcagcttgtcacccttgcccgattcccacatcccagtcctgagggactcagcacaacaggataagcgtccaggagccacgggctcccaccccgagcatatcacatggtgccgaattgcactgaacacgcgtgtgtgcatcgcacgcggccacgaccacagacacgcatgcacacacgcagaggtgcagagcgaggaggccggcaaatcccgcagctgccacggtccctcctgtcattctcacgactccgggagaaactgtgctgtatgatacagatctattttaatacacttaccactgggtgaacaagatttttatattcttttattgatgaacaaagtgaaccgtgtgaggcacacgtcttctatattggctactctgtgccaagtatgcattaccgcgtggcttgcgatgtccatgtcttcagcttccttttctgttggtttggttttcttcgcggatggattgagttacatgttttaacagtgtaatgggaggatctgaaaggttggacccgggaggggtagctgccgatgtgtcttgagattgttaggttttttttggaccaaggaggaccgtccagtgggtagtgaggatagagaaaaagtgtttgtcttaaatacgccaatgtagttttccttctttacaatgtattaaactcgatcgatgatttcaaa

SEQ ID NO: 11287 - DNA, 4934 bp, Homo sapiens
ccgcgtgcggagcctgcgcagagccccggccgggcccagccctcggagtgctgccaagtgcctacctgtccaccgccaccggggtctgcgatggcacgccagtgctggagccgcagccaggcgaggccactcgactcccggggccggggccgactccacgaacaccagcccaaactgaagtgcctcttccctcccctgctggcgctgctccgccctgtgccccccgcccatcgccccccacccatctctggagagccctctgcacccaaagaggactagagatgccgagcggccatgagagagagcggaaggagcagctgatgcccagagcggggccagagcggcgggtctatgttcacgtccccccagcagcaggcggaaccacccagccagggcactcagtgcattggactgtccacatgttcttgaggaaagccggtggaagattctggaatgccgtgcggatgaacttcagcacccgagtcagtcccagctcatcctccccagtttaccactttgttctaataggagatgggaacacgagaagtttgatggctttgccctgggctgggaatacctcacccacgcccagttccagaaaggcctccagctgagcagacggccccgatcccgccagaacggccttttgcttccagccaaagaacaccgccaacacgcacacctccaacctgggacatcccacgctgggcctcgcacggaggaacctgcagaatttggattctgagggtagtcgggaggcctcggtagccaggcagaacaggatatctgccaaagggtgtctgatgtggggtggggctggcatcctcccaggaaggttctaggtgggaccccgtcttctgggggcgggggtgtcttttcatcttccctggtttcctagaactcacttcctttgacggcgtgtgttggtcccatctctcagaccagctcactgaggcagaggagttgctcagaggctcacatgggcacccccattggttcgtgtgagcagctgcccagccccaggcctgccctcggcctggtccagcatgaaggcgtttccatctgcaaggatgcacggtaccctccccgagagcaggcctgtcccctacccaactgggaataaactggaagctgggtctctttgttgctatgtttttttgtttgaagttcccaggaatatttgaggggttccggtgatgtgtttagggatcttctctgtgggggaaaaggaagaggagggtcttgttctcccatctgtttattctttgggctctgggaacaggggactactttggggctttctccagacttttgtatgttgttattaaaagcgagctattgcatttcattctgcctcagtttgcccacctgtgaaatggggctgataccacctacctcactgaagtcccagggttcaagtgtgtggctgggtcagggcgtggtcacccgtcattctgcataggtcgggttggatgttagactcctgggatgccctcctccccctcgccctttgtaataacctaatctgagaccgtgcttggtggggggatgtgaactttctctctcccccagcagtgtctgctcaggcctgacagctcagctctgcacgatttcatgttcctaaacccatgtcttagggcagcacagagccaggtcatgtcatgccccaaagtgtggggacagagcctcagggagccccgagcatggtccagccccatttgagtgctctccggggatgccaaatgctgcttccaagtttgagtccatgtggctaaaatacacccatttcttcaggaactcttcccctggttgttctggggatcttgggagaaacacagccctgacagctcgtccgtgggaagatgaggcagtccaggttgtgaggagcacagcggcccgccctctgttctcagaggtgaggggcgggagaaggttgtctcctctggggccagcatttggccaagctcggaggcttggccagcactgctggatggctcagagcaagctgggctccccgtctgtaagatggcaaaaatgctgcccccctcacagggtgaccatgaggaccagtcacagtgatgtgtgaaagggctcgctggtcacagaaacgtgtacaaatcatgctattttagagatcagccctcaatttgtaaggcatgtgaacagggcacgcggtgggctggtggtttcatagccgacacacagcgcctaccatgtgcagctgcctgtccgaccccatcttacagacgagaaaaccagcacacaggcaccaaggaactgtccggaactaacagcaggggccggcgatgggagtcaaacccaggcacgcggcctggcctgcatgctgagccacatggtgctgtccggacagatggacagacactcggtggagtctgcctttctcaggccctaaatccctctccaaagggtacttgcgatgccggatttaaaacttgctcagagccacttagccacttgagaaccagacagtaaggtgttactcccaggtttgtttttccaaagtaacagatgacatgtggaataaagtaatagagtaacaagtggcagggccagaaccagggtccccaaagtcctggtgttggcacatttgtacttcttgtaagaccatctttaatttttctgggaacacacctgccttttgtgtaatgcggggaagactaatgcatggtgacacctagttttcctcaacaggacacttgatcccaaaacccctttaagaccttaggtttcctcagcggaaaactgtactttaatcccaaaccccctttaagacatattggggctgggcgcagtggctcacgcctgtaatcccagcactttgggaggctgagatgggtggatcacctgagatcaggagttcaagaccagcctgactaacatgctgaaaccccatgtctactaaagatagaaaaattagctggacatggtggcaggcacctgtaatcccagctactcggaaggctgaggaaggagaatcacttgaacctagtaggcagaggttgcagtgagccgagatcacgccattgcattctagcctgggcaacgagagcgaaactctgtctcaaaaaaaaaaaaaaaaaaaaaaaaaaaaaaaaaaaaaaagatacattggtctttaaacccaaaccccctttaaggcatgttggtctcaaggggatttgggattgaagcacagctttctgttgaggaaacctaggtgtcactttttagaacattaaaaagaaagttgtagggtgggcttttccatttaaaggaatgtgatgatcctaggttctgatgagtgataggtggtctccgtttataccctttcttcttttggcacctgtaagttccggtagtggccatcttacattctcatgtcctgctggaagtgcctagttgcctgcaaagccagctaaggcttattatttcaaaagaagattatttaaaacatgagtgacaggtagtcagaagagaacaaaaggacgcaagatactctatagccaagtcagcttggaggcaggatgggttgctgagtgaagtcgccgctcacttttggattcttatggactgtgagttagtcttccctctacacggagtcacaggaagggtataaatgcatgttcctgaggtgccctcccccaaagaatgtacctgcactcaaaccaggatctgtttttgctgttttaatcataaatagactagttagtagaagacttttgaagaacaaagtaaaacttttttttttcattaaaagatgtcccagaggaaaggccctgtgcagccagtatattctaatgactgcctggaccatgtcctaatatggtggttttaagttgttggccaaaatcctttaaagacatacgaaacatctgccaactttttagcgaacttaacaggtttcactgacgttttcctcaatttttgaatttaggtgggatttgctttcatgtcctgtttcaaaaaccaagtgtctcttgacagcccactggttcttcctgtcctcttgctctagtctgtatcagaaagcagaatgactgtacttttgttttacaaacaaccacctgataggacggacactccacgagataaggaaaggcacgtgcccttgagcttgaatggaagcagcctctggagggggcagccactgcccttcgagggagagcagctcttcagcagtggccagagtgccacgtgactctgcagatgacccctgggagccgggtgatgggcacctgctggggcttttgttttttctttttcactggctggcttgatcctcagtggcaaaaggacccctgagccccttctccgagccctggagcactcctcgggacaccgagtggcctcagggctgggttcagagctcctcccgcagggggagcctcagaagtggaggcagctgctgatgggtgagtttacaacttcttatcctgcctaaggcgagtaggcgtttttattccgtttccagtccttgagctcagcagatcaaaataacagtgaccctgcaaccccacagagcccgcgacacgctcgctttcttccccgccctgcccctttagtccccgctctggaaggccaggcagtttaggtgtaaataggtatcttttatggtttccaaatgaattatttgtgtgagagtaattaaatctgtaagaaaacctgttgagattcttcactatgaattatgacttctacaacatgtattttagcaaaaacacgatgctggcctccactggatagctcagtatgctgattgccagtgatagttctgtacgcgttaccaacagcgtctttattaaccctcttccacatccagtggaaatcattgctaggcggtatttgttggttggctgttagctttgctttatgatttcatgtttcttttaaaggttgttttgcatgttgaatattaaattttttttttctgtgtc

SEQ ID NO: 11288 - DNA, 493 bp, Homo sapiens
gggcagtcctgcagcagtcacctgatcactgttcagttcccactctaatactcacacagctcctccacaggagacttctggagcaagcaggaccagcctggtgcaccctttaagagaaaccttagtcgttctagccaaagaggctgtggctcactttagttgagtgttcagacctcattctagtagggaaagttttcagtgagagctggtgtcaaatgagtttttaaaaaacaaacaaaaggtacaattttgtactataattctaacttctattttgaaataagctagtttggttggaaaaattttgaattcagcttcatcttcactctgatcttgccttgcacccaagtaatcttgaagggaacttctcttggtttttaaacatactagttataagattgttaataaactgttgaacctggcttttgggaaattgtttcagagaaactatgttagtattgaaaatatcaataaaaaatgttctaatttcaaa

SEQ ID NO: 11289 - DNA, 1077 bp, Homo sapiens
ggccaggcccggaggcggccgcgggcaccctggaacccggcggcattttgcacatccactcctcaccttccctgccttggtgctgccagcagcagacatagacgggtgcagaagcggggagctccaggtgcaggagggcaccggccggggcccacgccctctgcccgcctccctggggctccttcctgccacctcctcccatcacctcctgcggcagaacagcacccgtgacccacccagagagcaaggccaggggtcttggtgctccccgacggggcccggcaagttctctttcttctctctgggaaaatgaacgtccaggacacacctgtatcccagagagcaaagtgatgaggagactgagcgtccccagccccacctggcggcatggacacagaaaagctacgccggctggcctctccagaccagttcccaggctgggtctgccgctgggccctggggcggtggggacagatgttgacacaaattatttatgttttcttagtatcagaagaggattctcggcactaacacatagccagtcctaactccgtactctgtgtcagcccatcccctagacaccctctgtttcctttcccggccccacctggccggccctctgcccctgcagagctgaggcagcctggggttgatggggaccacgcggtgcctgcaggtcctagaagtgagctgggcaggggctcttcagaccacacagccctgaccgggccttggaggagagccatggacaggctcctccatgccgtctttccttcttttgaaaatcctatcaatggctgggcgcggtggctcacacctgtaatcccagcactttgggagaccgaggcaggtggatcacctgaggtcaggagttcgagaccagcctggccaacgtggtgaaaccctgtctctactaaaaatacaaaaattagctgggcgtggtggcgtgcacctgtaatcccagctactcaggaggctgagacaggacacttgcttgaacccgggaggtggaggttgcaatgagccaagattgtgccactgtattccaacttgggtgacagagcacgactctgtctc

SEQ ID NO: 11290 - DNA, 1368 bp, Homo sapiens
gctaccgcgctcagcccaaacccagggctcttaaccaccctactatgtactgtgctggcccccggtcaagggagagaactcacgtcaggcaaaaatgttttacagagaggcagctaagtcttttccacagtggatgacacagtccccctcacaaaccaccccacagatccaaccccaaggaactctgcttctacgtgtgcccttggggcaagggatgcaaagcaccaggcgatggagctcagaggatggcactcttccagagagctgtgtgtctctgggaaagctaacacacctctctgagcctgttgctacagctttaccatcagcgatgtgactgcaagccttctcagctgcctgtcagcagatgcacaggcctgtgcacagagctctgcggagaccacgccgacatcgccgcacacccaccctcctgctcatgggacagaccattcacacctgcttcaccaccagccacaggcttgtcggaaggagcagactcttctccacggacaagccactgcccctttgagggcctcagcttccttaccctatgagatgaggaaacagatcttcacttgccacaggacttggggggatgaaaaggtaacctccgtaaagctgcccctggtgtggggaagccaccccatagatgacattgcccgccctccccctaggcccagagctctacagagtcctcaagctggtgtccctccaggctaaaacacttccaccccctgggcagtgcactacagggtggtggggaaggggccatctgtggaagaaacacagggcctggcctggggtcctgggcaagacctctgtgacctcagtttccccagatccctccaggtgtgaccttgtagatggcctctattctggattcacagctgctgaggaggaggaagaggacactgaaggcattccttcagtcccctggggaggttcagatgctcagactccctgataccacctttcctgggcagaataaagtccccaagatgtccaagccctaatccctggagcctgggaaagtgttacctcccagaccaaagggactttgtaggtgtgtgattgagttgaagatctgcagtgagagggtagcctggattagccacgtgtgcccaaaagcagagactccttcccagccgtggtcagagacagaacaaggggacgctgctggctttaaagacggaagaagggacgaggagccaaggagtgcaagtgccgccagaggccagaaaaggcaagggatggatttttcccctggagttccaggaggaaccagccctgccaacacctggattttagttctgggaccccacctcagacatctgacccccttgactgtaaggtaataaatgtgcgttgctt

SEQ ID NO: 11291 - DNA, 1078 bp, Homo sapiens
gtgcaactggggctaggtcatcgggcggcaccctgcacagagctcctgggccagcctgcgccagggatgctgctgagctgggagccgccatgcctggccttgtttctggaccactgggagcagcactgcagcccaggggagctggagtccagcttggagcagccacaggcccagggagctgtagcaagagggtagtccaaaggcagatgccagacaagacacagccaggaacccggccaggtccccccacatgcccctcagggcccaggcctgagtgagtgctgctcagatgtgactgagagggatgacctccttcagcagggcagctcctaagaggctgcgtgcaggtgcgtgtggggggagatgccacactgtgtcggggccatggtgcactgtaggtggctgcaatggtctctctgtaaggaaaatcactgacagcagctccttctggacccagtctggaaggtctagagggggatagaatttttatttcatatccttatgtggtgcttggaaaatgtttttaaccttgaccatgtattatgtttataattaaaaacccaaagaaccagctcatgtttggaaaaggaatcttccactgaaacatttggatacccgacgttctccctggacacttggcccggcaatagttggggtctcctgggaagctgagtgctggcttctagcctctccagttccctcagactctgtcttcagctcgggcccctccgttctgtctccctcgactccaagtcaggaataccgtgggcttcctgccctcaccccacacctcaagaccatcccactgcttgcctgcttgccccctgccatctcgcactcagccctgggtgcctgtgaagcctggccccactgcctgccgggggttcctgcagcacccccctactccaggctccccatctccctgaagcttccagggtagcagctggtgggacactgatctgtgagctctggaatgtctgcttagaattctgagaggcaggaactgctctgtctttgtaactactcaaggccaactgtcacatgaaggaatgaataaagagtttttactgacttgtgc

SEQ ID NO: 11292 - DNA, 897 bp, Homo sapiens
tgaatgatggtttcatgagtcacaagcaagcgttcccccaactgctgagtctgtgggattaaggggattagggagtgtcagtggcctagtcatgctttctactcatgtccttcacaaggcacatcccctacatttggaagaatccccaatcttgtcctctgctcttgggagtgtaaaagttgggagtgtagtgtagcatctggggagacagcaggatcacagtgtgggattcctggactgatttccctttagaggggagttatgtgactccccgtacaagggcaaccctgtttctttggtgcctgcagtttagagaaggcagagccactggttttgagaaccagatttgagagagggacctggccagggtggagcattgtctgggtgtttctgcgcttgacccatgctggaagctaatggcctgttgctcctgacagagccccaaactcctcggcctcactgggaggcccctttgtagaccagggctcccctcctcttgttccccctgggcttagggcctcgtggggagttccaggacttgcttcatgcttgagaatgcagatgtggtgcttctcatttattcttaaagctactggtagttaaagtaaaattcagtaacattttctgaccaagagacatgttttgttaaacaacaaaaaggtacatatgggttcacattgaaatatgtctatatgctgaatatagcaacatatgcatctaagatttgggcatttggttattaatagcgtgctggactattcaggaataaggaaaatgtggtttatcacttaagagaaacaagggctggtagctgtactattttcactcagaagcatgttcatttatgtagatgccactttaagctttatcagaattaaatgtgagatttcttctttg

SEQ ID NO: 11293 - DNA, 2344 bp, Homo sapiens
ggcaagcccgtcaccccacacaggctgcggcatcaccctcagaccttggagcccaaggggccactgcccttgaagtggagtgggcccagagtgtggcggtccccatggtggcagccccccgactgatcatccagacacaaaggtcttggttctcccaggagctcagggcctgtcagacctggtgacaagtgccaaaggccacaggcatgagggaggcgtggaccactgggccagcaccgctgagtcctaagactgcagtcaaagccagaactgagaggggaccccagactgggcccagaggctggccagagttcaggaacgccgggcacagaccaaagaccgcggtccagccccgcccaggcgggcatctcatggcagtgcggacccgtggctggcagcccgggcagtcctttgcaaaggcaccccttgtcttaaaatcacttcgctatgtgggaaaggtggagatacttttatatatttgtatgggactctgaggaggtgcaacctgtatatatattgcattcgtgctgactttgttatcccgagagatccatgcaatgatctcttgctgtcttctctgtcaagattgcacagttgtacttgaatctggcatgtgttgacgaaactggtgccccagcagatcaaaggtgggaaatacgtcagcagtggggctaaaaccaagcggctagaagccctacagctgccttcggccaggaagtgaggatggtgtgggccctccccgccggccccctgggtccccagtgttcgctgtgtgtgcgtttgtcctctgctgccatctgccccggctgtgtgaattcaagacagggcagtgcagcactaggcaggtgtgaggagccctgctgaggtcactgtggggcacggttgccacacggctgtcatttttcacctggtcattctgtgaccaccaccccctcccctcaccgcctcccaggtggcccgggagctgcaggtggggatggctttgtcctttgctcctgctccccgtgggacctgggaccttaaagcgttgcaggttcctgatttggacagaggtgtggggccttccaggccgttacatacctcctgccaattctctaactctctgagactgcgaggatctccaggcagggttctcccctctggagtctgaccaattacttcattttgcttcaaatggccaattgtgcagagggacaaagccacagccacactcttcaacggttaccaaactgtttttggaaattcacaccaaggtcgggcccactgcaggcagctggcacagcgtggcccgaggggctgtggaacgggtcccggaactgtcagacatgtttgattttagcgtttcctttgttcttcaaatcaggtgcccaaataagtgatcagcacagctgcttccaaataggagaaaccataaaataggatgaaaatcaagtaaaatgcaaagatgtccacactgttttaaacttgaccctgatgaaaatgtgagcactgttagcagatgcctatgggagaggaaaagcgtatctgaaaatggtccaggacaggaggatgaaatgagatcccagagtcctcacacctgaatgaattatacatgtgccttaccaggtgagtggtctttcgaagataaaaaactctagtccctttaaacgtttgcccctggcgtttcctaagtacgaaaaggtttttaagtcttcgaacagtctcctttcatgactttaacaggattctgccccctgaggtgtaatttttttgttctatttttttccacgtactccacagccaacatcacgaggtgtaatttttaatttgatcagaactgttaccaaaaaacaactgtcagttttattgagatgggaaaaatgtaaacctatttttattacttaagactttatgggagagattagacactggaggtttttaacagaacgtgtatttattaatgttcaaaacactggaattacaaatgagaagagtctacaataaattaagatttttgaatttgtacttctgcggtgctggtttttctccacaaacacccccgcccctccccatgcccagggtggccgtggaagggacggtttacggacgtgcagctgagctgtccgtgtcccatgctccctcagccagtggaacgtgccggaactttttgtccattccctagtaggcctgccacagcctagatgggcagtttttgtctttcaccaaatttgaggactttttttttttgccattatttcttcagttttcttttcttgcactgatctttctcctctccttctgtgactccagtgactcagacgttagacctcttgatgttttcccactggtccctgaggctctgttc

SEQ ID NO: 11294 - DNA, 2724 bp, Homo sapiens
gaagccggcgtcctgctcacaaactgggaaagtgtgaaaactatttaagataattattacagaccaattatgttgatatatacatttaaatgtagaaatttatttttgatagttaaatcttgattttagaagaaaacccttttgtcaacaattttgtgtacatatttggcattttcagttctgtacgcatctgcgggttgcagcccacgccgcttactctcagcggatgcagctgctcacttgggggcactggcctcttaggttttaacgatgtcaacagtgtagtttagaaaatggcccgttagtggctctattgcaataatgttagggacattatatgatttccacgcaggtcacaccatctgggcctgaggtagcagtgggtcactttgatccactttgcaggacttattctgtaacggtttgtggccaagttttgggaagtggttgattctctttgccttcatttcaccttcctcttcgtttacggttaggacatcgctgcttgatccttacaatactgtgcaactgcaatgcaacgtggccctgcttcaggtgatccgcgggaggggcctccacgccagcgccgggaaggctgctggggcctccacacctgcctcatcacggcggcgaggctacgacaatccggctgggagcatgaccttggcgtctgttctgggagcacggatgataagctctggaagctggcagtgtgtaaagcactggcaagtttgttactgttaaaatgtcaaataccaatgctttatatcgacgcgaagtgcttaacacagccgggcttgggggcagtcaggaggaagctggccatccgtggaggaggggccggtcctggactcccgcaggactcctctgaggcagggcctgaagtctgtacacgtggtccagatttgtccttgtcttttcttcacactgagttctctatatttattgaacatcttgtccttttaagccagagtagtgtaaactgcgtctcggatgtctgtcttttgcctcgaagccacgatggatcgctggtttcctctgcagcgcgagggctccggcgaccagaggattcttcccggaaggcattcctgccgcgctccccggggcacccctcaattgtgtactacgtccttgtttagtgtgtatccgtgcccacgtagatgatgtctgtaacgtagttttgtttgaaatatgagaatatgcggcttaaactttgatctgtaaggagcggggccgtggccgtttggagcacgctgtagacaccgttcctcatgctgccgggtgggttttgcagaagctcccttagtgatttcatgtttaacaggcagcatccattttcagaatttcctggcattgatttatattttgaagcatacaggaaacttctcgtttcctcgtttagccccacccagatcaggtgaaagggcagctttaatggtggtttttatggaccacattatcagagagcactgtgcaagccaaatggttcaataatgaatgaaaattctgggtgtaaagagtaaatatgccctggctctttctaccaatgtttgctcctggttggaaagaaaccaaagatttaagacgggctgctcttccagactggctgtgcctgcctgtgcccagcaacctgtgcagccggcagtgtgcctggtgtcacgccaggaggctgtggctgctgtgggccctctggaattgtgctcctcacaaagtttccccaaaaggttcttctaagcctttattgtccctggtaaatgtttcccggctgggcgcggtggctcacgcctgtaatcccagcactttgggaggccgaggcgggtggatcacctaaggtcaggagtttgagatcagcctgcccaacatggtgaaacctcgtctctactaaaaatacacaacttagccagtcttgttggcgcacgcctgtaatctcagctactagggatgctgaggcaggagaatcgcttgaacccaagaaagaggtggaggttgcggtgagccaagattgcgccactgcactccagcctgggcaaacagagggagactccatcgccccccccaacaaaaaaaaaagtttcccatacactggcctgccccaaaacccactaacaattttagcaaaacagtccaggccaaagaggaagcatttcatgttcaataagaaacccagccattccgcatggctggttcctgagtggctctggtgatactctccagccacctgctgacattcagaatctcagacctcgggactgctgttgcggtaccgtgtgtctgacacctgccagcagccctttgctatctgcgcgcaggatgggggtgactgcccagacattcccgctagataggctctgatttccggggcagcctttcagatgcggcagacatacaacacctgtactttagagttttaagggaaaaaaaatcagaagtgctggttagatagtaaaaacttaggataacttagaaaggctagttttagcttcctttgtggctccctggtgcaaaacaattagcagttatgcaatggacctgattctagtttattctaattaagaagtgaggccgagtttgacttcgttcctgaatacaatcttgagtaactgggaaagtctgagtgaaaggatggcctcattctctttctaatcttgctggtttcaagattagaaaatggcattatttgatctgaaatgtttgagaagacacgaataaagttacttgggcaga

SEQ ID NO: 11295 - DNA, 943 bp, Homo sapiens
cggcccggccgccagcgcgggtcttgtccatagtgttgataagctgtacatgtttgtatattgttcaaaacttaacttattctgatttttagttatagctctttaattctttttccccggggaggggggaggttttatttccaagttttctaggaacccatctccgtctgggcgctgtgagtggggtgggcacgtccgggcagcccagtgcgtctgtcgcacgtccccaggccgtgctgctggcgtcactttctttgatatgtagctttttcttaaagacttttgaatgtttaataattttgtaaatcatgctctttacacagagtaccacttatttaataagacgggatgtaaatttacaatgacaaatgtgtattttaagaaagaaaatgacattattttgaatggtactttgtggaaagaggggagaataaagttatgctgtgtacatcacttgcagatcaccaaaaacactccgctgcccgtgaccgccggtgggtgtgtccccgctcccgtcgtcccgcccacctcaaaccccgcaggtgtgcctcccagcggattatttattgtagaaagtgtattcatttgctttataatgaaaaatacatttgcaaaggtatattgatatgcatttttatacaggcacataaaaattcaacttggcttgggagcagaatgcattgcattgtataaatgactctggcctgtgtgtactttgattttataacttgtaatcttttgtttacaatgaggggctttctgtaacttgttttaatttagaacactttggtagcaatagaaactttggatacatttttgtatggtacctgtgatgtatatagaattagtactttatttttatttttaagaggtaaagcattatgttggggaaagtagggtgggtttccaaatttgcattttttatattaaaaataaagtcaag

SEQ ID NO: 11296 - DNA, 632 bp, Homo sapiens
gggggaccaggcagccctcagcagccacaggccttccaggagctgttatcactaccagtttctggcacaattccagcacaattatgacaattcagagaagcaagtcaaaggactgggcacctgcctctgacagacaccagaccaggtccagggcctcctccacagcctcagctggggctctcagcaccaaagaacgaggggcccaggtcttgttggcaccccgggagccactgcccagggtgatggtggccagctcagggcttcctgcgggtgactgtcgcccagaccaggtgccattcatgactaatcaggagcagcgggctcacccaggcacctgtctgccaggaggccacgtgtgtcctgcccacccagggggagctgtattttggcagcaccccacgcttgctgcccgagggcctcttggggcacctaagacagcaccccctctcaggggagaccatggtggccccggccgcacccccccaccctggtgccaccactgcaacttttgtattcacaggcatcccatctccatcacagataaaatcttaggagataaacacattcaaaaaggaatgagataaaaagaataaggcaataaatgttgattggaacctctcaagattacagaa

SEQ ID NO: 11297 - DNA, 2348 bp, Homo sapiens
ggctggaggaccgatgtacacttctccgtcccccagcagctctgcaacctccgctccagtgggtgcccatctctcaggggccgcaggaggccgaggactagacctaggcctcccacggcaggctgggcgtggcgtgcactgaacaggagactgggtgggggaaacggggagaccatccggccctgagtcaggtcaggcttctgcgccaaacccaggtctgtgcccagcactgccctccagccttgcatttccctccaccacacaccgctgggcctcccgcacgcccaccctggtctcactgtcactggccttgcctcctcctccctgggggtccaccttccctgatcagagctctggttccaaccgccagtgacttgggatgtccctttgcccaccagccactgaggcccaggctcccaggacccagggtacatcaggacaggactctgcccagtggacagaactaagcacatgtggcctgggtgtggtcaggagcgtggctctgccttggagtccaggaagggtcagagctggcactcctacctgcacccctccctgtgagcaaaagagcttgcctagcttcgggtggggtgaaccgcaacagccacagaggtgggaggggtgggagggggtggataggacagcctggcacccagggcctctggagaccctttccagggagcaccagtgggccaggcaggggtctctggaatgtctcctcagctcagctgagccacagccatttcagggcagcctgctgcccacaggacatgcccagggccgtggcagtacccgcagaccttcagctcccccttctcccagcaagactttttggccaagcctaggtccccctccctagcaaaggtcacctccagcagatcacagactaaaggggcaatggccacctgctggtcaggtgtccctggggctggcacctgccactgtggagtgcccatgctatgctgggcaagtccacggccccagggacaggcctggaggcagcaggaggaccgggcctggctcaggtggggggatctgggggtcatacacactcctcttggggccagggtgggctcctccttcacttgtctgctgagcctccctgcagatggaaggctgctgtccacagccactggcaccccaggactgggcagccccctccccttccctcacatgtctcagcctcgcacagtgggggcagggctgggaggtggtgtcccagccagtaccacccctacgtctctctccagctgcacccacccacatgggacggcagcctgaggccaggaatctcctcacgaacaagtaggtgccagggacacattgctggggggcaggaggccaaggcacagcctcggacagctgagccaggcccccctccgagagtgtggggtgttctcacctgactgtggggcctaggcacctgctggctgtcctggggctacagctccatggggccctcaggggctctgggtcacataaaagaccttcagccctgtcctgagtcccctgggaacagcaggagctgggtgggctaccccttccccggatggcccaggtgctggaccccagcctccctctcagacaattcatggtcatggccactgtccctggccctgaagacaaggccctggcagctgcctggagcttccccagtgctctggggtgcagggtgcaaccccacccttcctgtagctgatcaggcccgaggtggtcaaggatcaccccagtttctgcccagggcaccccacactggctggagtccacctctcctgtctgtgcatccttgggtgctgagcttcactggggcacccgccccactcggacccctccagagggtctcagcttccccagatcccagccccactcacccagcaacggtcagtcacttcctgtggtctcagaggccacctgcctgggggccacctgctgggatgtgcggttctcagacattccaagtggcacatccaggtcccagccaggggtgcccagcagtggcctgtgcagtgggccatggggtcggcccttgaagacttctcgtgtgggtcacgtaggctctccggcttccccgctgagccaccctctggagcctggacatcgtctcacctgagtgctgtgcaggaccacatgcccagcctgtcccagcggtggtcgcaccccatctgcagatgcactcccaccgcagtctgggcccaggctgccctcttccagctggccgtgggccgctgggccttcttttccctcctgcaacagaggctgctatgtcccatagactggagagggggctgcagagcgagtaagtccccgccactcagtaaacattggtccaggggtagctgttaaaatgg

SEQ ID NO: 11298 - DNA, 2192 bp, Homo sapiens
cccccagacgcggaaaccgggtggcagcgcccagcctggccccaagcatggaaacgcacaacccctaatcgccctgagctactgcttctaacacctcttttcccttgtgtgagggcaaaccaggctgcaggtggggttttcacttcctagggtagtttaattttaaaataggccaatgttggctagtctgtgcctcagtgagatcagtcagctccgagtggctcccgtgtcgtaacagcaggagcatggccgcaacttcccaggccgaggaagggcccccggctcggcctcttgagagccccacccctgaactggccccagctcctcttcctgcctctctcatggcttgggctggagtgggctctctggacctgaccagactgtgggtccctgcgtctcctgcccactctgaccgggcttcctccctccacgcttagggtctgtcccgggtactcagtcagcccagtgggatcttacccacttccctgcaaggtgcacctgccccaggctcaggctgcccagcggctcttcctggacagtgagagcagggctgggcgcctctgtcctggcccgggagccgcaggggcccctcctccagagcctgggcgcaagcgacacaggctgccgctgctctcccaggtgaaatccacaccagtccacgccgggtcgcctgccctgtctccctacttagacccagtcattctagagggatccaccgccacactggccggcccacgtcctgggtgctgtcatgcccagcttggagtgccacgtggccgctgcccacgtcccgggcactgtcatgcccagcttggagtgccacatggccgctgcccacgtcccgggcactgtcatgcccagcttggagtgccacgtggccgctgctgtgacaggcagtgttcttgggggtggggctgcatccaaggctttgtaaaccggctggaccacgtctccctggccccagtgaccgggggaagctgagcccctccctcctgtgtttgctcccattactcaaaatgcaggacagatcaggtcagagcccaggaattctcacaggttcacccagcgccctctacctcctagcaagtactttgtcttgatcctcactgagaaggccccagggcagcggtcttctccatctccgctgttttggggtcttagggtacagcccaggcggtcactgcccacctgccaggctgcagggacagttgggtgtgagaataacactggctttgggtagtgccatggccaggagtgggtttccctgcgtctcctcgtcccgagggcgcctgggtcctcccagctgacggcagtaaatccacagtgagttggggcgactgtgaaactggaatgctgttactttgataattactttccagcaggtgttttccttcacaatggttttgtttctttccttctgatctgagaagacatgaacgttttctcttcaccgccgtggggtgtattgactggtcccccatgggctgctggaaaggcccggagatgcatctgtggcctggggccatcaagatcaaagaaccaggaggcctgggagatgcagctggatggggcggcctgcagaccctgccagggggtttgaggaccctcccaggtttcccactgcggaacaggagtgactctggctgccaagataccttcatggtgttcatgacaagtggaatcattattttcaaccattgaagggggatgcaggcaagacaccttcccagctgctcctagaggggacaagccaggccctctctgcagtcctcggcagctccggaaggacacagtcaggggccgggcaaacactttggccacagccccaaacaagcgccaccgtgggagaggagaggctgctgtcactggtaccggatgcagaccccaccctgtctgcaggccacccccacctccctgcagctttgaggctggcggggtctgctcctgggaatggggtgggagccacagggacgacccggggcgggctgatgtcttcttgggggcagaccagagagctcaagtttcagagtcagaattaggcacttggagcgtttttgctggcttgcactttcttattttcttattttagagcgcttaaaaaatccggaaaaatggggtttaaaagaactgtctctttcagtctacatttttgtttaatacgcttgagcaataaacgctgacttgcagacgtg

SEQ ID NO: 11299 - DNA, 47 bp, Homo sapiens
ggctgctctgcgggggacgtgcacaataaaggtgttctcggaccctg

SEQ ID NO: 11300 - DNA, 321 bp, Homo sapiens
aatcggccaaggtgggagcatttacaccgcagaaatgacaccgcacgccagcgccccgcggccgcgatccggaccccaagcccacggctccctcgactctggggcacggaaccccgcccactcccaatccccgcgccccgccctctcccacccgtgcttcccccgctccacccctcacctcacctcgcccccgccccacccatcgcgccccggcccgtcccatcgaggcccatgcaacccacgctcggtcccgttccggcccctgcgccccgctgcgcttcgctccccgcccttgcgccgttagtaaacatcgctcaaacg

SEQ ID NO: 11301 - DNA, 499 bp, Homo sapiens
agatctctgggctccggggtggcagtgaggaccaccttcaccttccacctgagaggggactctcgttgccaccttgaccttggctggggcttgcatcccaaggcatccatcagagcagacgcccgggttccatggaccctcctccccacggccatgcctctgctcttgggcgcccatcatggaggagcacctgaactttctggacaagacctctggccgacctggggatggcctctgatccctggagcagtggcccacttgcccggtgctctcagaaacctcagagctggtggggctccagatcaggccttggcctctgagccctgcctgctctgggccatgcagaggaaggacagagggtgggcgcagggcaccaactcagggacatcccctctcctgggcgacgtcagtggaccttcctgcacccccagcctggaatgtaaatcagctgtgtggtgcccgcgtggctggaaggaaatagacccttttgtagctccct

SEQ ID NO: 11302 - DNA, 1234 bp, Homo sapiens
ggtgctgcccagcagcccctgagagcctgtggaggggcttgggcctgcacccttccacagctggcctggtttcctcgagaggcacctcccacactcctatggtcacagacttctggcctaggacccctcgccttcaggagaatctacacgcatgtatgcatgcacaaacatgtgtgtacatgtgcttgccatgtgtaggagtctgggcacaagtgtccctgggcctaccttggtcctcctgtcctcttctggctactgcactctccactgggacctgactgtggggtcctagatgccaaaggggttcccctgcggagttcccctgtctgtcccaggccgacccaagggagtgtcagccttgggctctcttctgtcccagggctttctggaggacgcgctggggccgggaccccgggagactcaaagggagaggtctcagtggttagagctgctcagcctggaggtagggggctgtcttggtcactgctgagacccacaggtctaagaggagaggcagagccagtgtgccaccaggctgggcagggacaaccaccaggtgtcaaatgagaaaagctgcctggagtcttgtgttcacccgtgggtgtgtgtgggcacgtgtggatgagcgtgcactccccgtgttcatatgtcagggcacatgtgatgtggtgcgtgtgaatctgtgggcgcccaaggccagcagccatatctggcaagaagctggagccggggtgggtgtgctgttgccttccctctcctcggttcctgatgccttgaggggtgtttcagactggcggctccagtgggccaaagggcaaccacatgagcatgggcaggggctttctccttggatgtgggacccacagcagcttcctgaggctgggggtgggtgggtgggtggtttggccttgaggacgctagggcaggcagcacacctggatgtggacttggactcggacacttctgccctgcaccctggcccgctctctacctctgcccaccgttgtggccctgcagccggagatctgaggtgctctggtctgtgggtcagtcctctttccttgtcccaggatggagctgatccagtaacctcggagacgggaccctgcccagagctgagttgggggtgtggctctgccctggaaagggggtgacctcttgcctcgaggggcccagggaagcctgggtgtcaagtgcctgcaccaggggtgcacaataaagggggttctctctc

SEQ ID NO: 11303 - DNA, 335 bp, Homo sapiens
gcctcccagccctgcccggctgctctgcttccggtcgttaccgaccactaggggtgggcagggccgccccggccatgtttacagccccggccctcgacagtattgaggccccgagcccccagcacttgtgtgtacagcccccgtccccgccccgccccgcccggccggccctaacttattttggcgtcacagctgagcaccgtgccgggaggtggccaaggtacagcccgcaatgggcctgtaaatagtccggccccgtcagcgtgtgctggtccagccagcggctgcaggcgagtttctagaaccagagtctatataaagagagaactaacgcc

SEQ ID NO: 11304 - DNA, 440 bp, Homo sapiens
ctgtgttctcccagctgcacgtcctgagagggccaggtcgccgggagtgctctggcctccggcaggacaggacccagccactgtgccttagctgaccctgcagggccaggcacaggttggggggctgcccctggggtttgcagggtgctgcattgagggctccaggccccacccccacgccagccatgcccctccccaggactcccactattgcctctgtgattggcccaggaggaaaacacgaccaagctcaagacccttcccctgccctgggctgtgggggtctgagtctagagcccccaaccctaggccccgtgccagaggggaagaggctgactcccaggggaagaggggaagcactgtcatcttccacgtcatcttcacaccagcccatcctgccctttagatctgggcaccaataaaggcgtcttttgtgcttg

SEQ ID NO: 11305 - DNA, 43 bp, Homo sapiens
gccactgcagtctgggccccatcattaaacgggctgcgtttaa

SEQ ID NO: 11306 - DNA, 53 bp, Homo sapiens
cccgccaggcgggagcggccccacacgtgtttgcttaaagtctgcgagtccgc

SEQ ID NO: 11307 - DNA, 15 bp, Homo sapiens
agctcctttgccgcg

SEQ ID NO: 11308 - DNA, 560 bp, Homo sapiens
aacgcccagcgctttggaaaccacatccgcaaagccctgctggacattgctgatcttttccaagttcccaaggcctacagctgaaggttggagaaatgccagctgccctttcgtccccacactgtggaggaagggacctgtggcagctcacaggcatgaggggtggccgtgcacaggtgcccaggctccaaggacagctccggcagcaggtcctcgctgggcagatgctgctccctgagggcccaggtggtggaggtggggttggagcaggaagggaattttgatttttttttttcttgatagatactaataaaaataaggctgtgtaattttctctcagcccttaggtacctgtgttttgtttgggaactcggaggccctccccctcccccagctcagaccacagaggtggcaagagaagggctgaagctggaagactgttcatgagggacttgtgtgacctgctttgaaatgtgtgactctgctgagtgacgtaggctctgagatagctgtccacgcccacgtgtttgcttggaataaatacttgcctcagaaccttc

SEQ ID NO: 11309 - DNA, 223 bp, Homo sapiens
ctccaccctcccactccttggatttctcctggagcctccagggcaggaccttggagggaggaacaacgagcagaaggccctggcgactgggctgagcccccaagtgaaactgaggttcaggagaccggcctgttcctgagtttgagtaggtccccatggctggcaggccagagccccgtgctgtgtatgtaacacaataaacaagcttcttcttcccaccctg

SEQ ID NO: 11310 - DNA, 124 bp, Homo sapiens
gggcccctcggctggcctgggcatgtgatggctcctcactgggagcctgtgggggaggctcaggtgtctggagggggtttgtgcctgataacgtaataacaccagtggagacttgcagatgtga

SEQ ID NO: 11311 - DNA, 3701 bp, Homo sapiens
acacaacatatgtaagcaacgctactggttcaccccaaccttccatatttatctgttcaaaggagcaagaactttcatataggaatagaaacatgctggccgaagatttcatccagaagtcaacatcctgcaattatgttgaaaagagtagtactttcttcaaaatataaaatgccaagcacttcaggcctatgttttgcttatattgttttcaggtgctcaaaatgcaaaacacaaaacaaatcctgcatttagatacacctcaactaaatccaaagtccccattcagtatattccatatttgcctgattttactattcggtgtgtttgcatagatgttgctacttggtgggtttttctccgtatgcacattggtatacagtctctgagaactggcttggtgactttgcttcactacaggttaaaagaccataagcaaactggttatttaaaatgtaaaaaggaatatgaaagtcttattaaaacacttcattgaaaatatacagtctaaatttattatttaaattttactagcaaaagtcttaggtgaacaatcaactagtatttgttgagctcctatttgcccagagatggtcatatttaaacagaagtatacgtttttcagtttcaacatgaatttttttatttctgtcagttatgacatccacaagcatcactttttgtgtctgttttttttttttttcttggactaaattcaactgcatggaagcggtggtcagaaggttgttttatacgagaacaggcagaaagtgcccattgttcaggattctaatagctacatctacttaatatcttcatttctaaattgactgcttttacctttttctcatgtttatataatggtatgcttgcatatatttcatgaatacattgtacatattatgttaatatttacacaatttaaaatatagatgtgttttattttgaagtgagaaaatgaacattaacaggcatgtttgtacagctagaatatattagtaagatactgtttttcgtcattccagagctacaactaataacacgaggttccaaagctgaagactttgtataaagtatttgggttttgttcttgtattgctttctttcaacagtttcaaaataaaatatcatataaatattgagggaaatgttttcatatttttcaaaataggtttttattgttgaatgtacatctaccccagcccctcaaaagaaaaactgtttacatagaaattcctacacatacgtttgcgtatatgttattttaaacatctttgtggtgagaattttttccccgatattctccttctgtcaaagtcagaacaaattcagggaatttattttctggcagttgtgctccagtccttttaaaattgtacatgaacatgttttagaaacaatatggaggatgatgcatacatgtcggtcaagttcagcgctcgacattttatggaaagatttttttaaccttaccacgaaatacttaactactgtttaagtgaattgacttatttcactttagtttttgaactgtgattattggtatactgttatatcctcaacttggatttatggtaaccccttatagttcatggagaccaaaatttggggtatttataatagtcagcgcaggaatgcacatggaatatctacttgtccttttgaacctcacgagtcatccagaatgtatagacaggaaaagcatgtcttatttaaaactgtaatttatgggctcaggatctgaccgcagtcccgggagtaagcatttcaaagggggaaggcagtgtggtccctaccctgtgtgaatgtgaggatgtagacatccatcagtgcaactcgagctccatcctcctccgatttctaaggttccagttttctggagggacagtcatcatgttttgatttatctgggagaaaactgtggtgcacagcttgtgaggagggcaaggttgtgacgttcgagcttagttctggtgttattctgtctcctcttctttgtcatcagccaaaacgtggtttttaaagagagtcatgcaggttagaaataatgtcaaaaatatttaggaatttaataacctttaagtcagaaactaaaacaaatactgaaatattagctcttcctacacttcgtgttcccctttagctgcctgaaaatcaagattgctcctgctcagatcttctgagtggctaaaacttatggatatgaaaaatgagattgaatgatgactatgctttgctatcattgttacctttcctcaatactatttggcaactactgggactcttcagcacaaaaggaatagatctatgattgaccctgattttaattgtgaaattatatgattcatatattttatgaatcagaataaccttcaaataaaataaatctaagtcggttaaaatggatttcatgattttccctcagaaaatgagtaacagagtccacggcgtgcaatggtaattataaattggtgatgcttgtttgcaaattgcccactcgtgataagtcaacagccaatatttaaaactttgttcgttactggctttaccctaactttctctagtctactgtcaatatcattttaatgtaattgattgtatatagtctcaagaatggttggtgggcatgagttcctagagaactgtccaagggttgggaaaatccaaattctcttcctggttccagcactgattttgtacataaacattaggcaggttgcttaacctttttatttcaaactctctcaactctaaagtgctaataataatctcagttaccttatctttgtcacagggtgttcttttttatgaagaaaaatttgaaaatgataaaagctaagatgccttctaacttcataagcaaacctttaactaattatgtatctgaaagtcacccccacataccaactcaacttttttcctgtgaacacataaatatatttttatagaaaaacaaatctacataaaataaatctactgtttagtgagcagtatgatttgtacatgccattgaaaattattaatcagaagaaaattaagcagggtctttgctatacaaaagtgttttccactaattttgcatgcgtatttataagaaaaatgtgaatttggtggttttattctatcggtataaaggcattgatattttagatgcacccgtgtttgtaaaaatgtagagcacaatggaattatgctggaagtctcaaataatatttttttcctattttatactcatggaagagataagctaaagaggggacaataatgagaaatgttggtgtgcttttctaagcatttaaaacataattgccaattgaaaccctaaatatgtttacataccattaagatatgattcatgtaacaatgttaaattaattataatgggattgggtttgttatctgtggtagtatatatcctagtgttcctatagtgaaataagtagggttcagccaaagctttctttgttttgtaccttaaattgttcgattacgtcatcaaaagagatgaaaggtatgtagaacaggttcacgtgattacctttttcttttggcttggattaatattcatagtagaactttataaaacgtgtttgtattgtaggtggtgtttgtattatgcttatgactatgtatggtttgaaaatattttcattatacatgaaattcaactttccaaataaaagttctacttcatgtaatcc

SEQ ID NO: 11312 - DNA, 175 bp, Homo sapiens
tgaataaaaccataaatctttgagagttttttgaaagcaaatcattctgtatatatgctctccagcctctgacacaagatgcgttcttaatacagacttgtttgcaaagaaaaaaaaaagtatattattaaaatcctgtaaatatctatggtatattaataaaacaattttaaac

SEQ ID NO: 11313 - DNA, 1740 bp, Homo sapiens
caaaagttatctgaaggacttgctgtttataatataagcaacatttagctagttgttttgaagacacccagtactaagtaatattgttgttcaagtacatcttattactggaataaaaatgttttttgcttctttaggaatggcattatacagtacttcctcaaagcaaatctagctttgtctgaagtttctttggaaactctgcaatgcactgaagacatctgtaatatgatgttaccaaagcagtttacatatgtccttatatgcatattttttattatatatttagtgttttatagaattttttaaagttaacatataatgtagatattaattttttcctcggctgtaaaatgctatgggcaacacaatcatgcaattataatttgaaaatatttcctttaaagacagagtttgaaactcatcttggtaaataaattgcaaattactcgtacagttttacaaggatctcatggcagaacagcggaagacttggtccgtaactcaaggctgttgtatgcaaactactcttctagtggttaatgcacttgacatgtacagtatgtttcccatgccgttgtgattttgacatgtacagtatgttttcatgccgttgtgaattttgttgttcaacccaacttgagatggtttcaggaatggctgcaatctcaaaagctcaatgtactgcccaagaggcaccttgtgcaatattcccatccctgaatttagcattgtacaggaagattttcttttcactcaactgagttagcattgtctttgtggtagcattatcttagacattaaatttgaagtaacatatatcctgtagtaacatagacccaaagttactatagtcaaccaagtctttcaaaggataaaagatcattttattatctttaactgtatctattttgaatgtaaatttaaaaaaagtaattctctgtcaatggattcgtaatttctttacaaaatttcttatatataatatgtgtatctctgtaataatagagcccttcttttgaatcaaaattacatatggactttggaagattgctcctatttcaacaaatagttgctgcaagaatttttaatatgactctataaaagctctttagtacaattgtatggtttcttgatgattctgttttgcaataggtagcctagttgctttatatgctttaccttctaggtcttaaaatcacacattggaaaatgacaatatcaacaaaactgtattcttatgaaaagaactatttgttacaatgagaaaggttttgtgagtaaaccctactggacagtgacataaaaggcaatggaattttctataaacattttctcatgtaaacatgctgccaccttttcttctttctcagagaactcaaatttgctatagtttgtcatttttgcttacaaataatataacttttcaaccttctagttatatttatccaataaagtcataatcgggattccatttgtgtaaaaactagggtggtaaccggaaaaaaatattgtcagtatttcaagctgtgttcctttcttagtttgatatggttacttctatgttgaaataaaatttaaaatcacatgcaaaaaaaaaatcagcaaaataataaaatgaacgaaaaaaaatgacacccagggagttcccaaccccagtgtaaatgatatttaccagtgatctagcatatgtaatcttttttaaaggtattgttaataaatattctgtcatttgtaaag

SEQ ID NO: 11314 - DNA, 868 bp, Homo sapiens
aactgatggctactaaaaagcagagcatttctggtaagactaaattttctcccctccctcttaatgaggttttagagactacaccagaataaaagacagtttaggggacctctgtagaacaacaagggtcttattttgtgaattatatatttcaagaactaaacagagatccacctttctggatctgatttatatcactgaaatgtacagttcttttggaatagtttcacctgagaaaacatagttggctattatctatcttaacctgttcaggcttttaaaaaaaactgtttttgcatagggtagtactaagatcttaaaaagtggtaactgtcttgaagaaaaaacgtttattgtttgtttgcaattgaaataacagggttaccttaacaatgactgtctatgatgtgtcagttcttatctgaattccaaaataaacctgtgcttaaaaaagaaataattgaccaagtaagtttgcataaaatgtgaatactaaatgtgtccccagttgctggcattcatatgtacaggatttgttctagcaagctatgcttcagtatgtggttgatatttttctgtcacaatgatttctttatgcatgcagagcctggggaagtcatgggattaacttgagggtcactattgagcctattaattaattattgttttaataaaacaaacattggtattggaagataaatatgtttatgtggtatctgacaatgtgtattaggtgtcatatacaatggtaatatgcctgtctttaaagtgttattttattaattaaaaggatatggctattattatatattctctaaagatttgagtcctaaatgctttcatcaggtaaataaaatgtataatacaa

SEQ ID NO: 11315 - DNA, 911 bp, Homo sapiens
ctcagaggatattttgcttctggtagtaaggagcacaaagacgtttttgctttattctgcaaaagtgaacaagttgaagacttttgtatttttgactttgctagtttgtggcagagtggagaggacgggtggatatttcaaatttttttagtatagcgtatcgcaagggtttgacacggctgccagcgactctaggcttccagtctgtgtttggtttttattcttatcattattatgattgttattatattattattttattttagttgttgtgctaaactcaataatgctgttctaactacagtgctcaataaaatgattaatgacaggatggggttcccctgtgcttttaccagtagcatgaccccttctgaagccatccgtagaaagtactttgtcctccaaaaagctaacatacggttttgaagcagcattgaaacttttgtagcaatctggtctatagacttttaactcaagaagctaaggctagacttgttaccttcgttgaatgatgttagttgactgtactgtaatgttgtatcaactgaattgaatgtttgcctttaaacaatgaattttctttttctttccttttttttttttttgttgtaatagttaaagaggcttagaacaagctaacaggcaatagaaatatgtatatcagattttttaatgtaacaaactacatgttaattgttatcttattctttttatctttagtagacacttttaaaagaaaagacaagtttgttgtgtttaactcaccaacacgtggtgtataatgaagacagaactataataaattagttttgttctgattttttagaacacttgcaataatgtatcatttatagttcttgctagttgcagtggtaatatttttcacatccataaaaacaactaccaaaata

SEQ ID NO: 11316 - DNA, 18 bp, Homo sapiens
taaaaatgcgttgagcct

SEQ ID NO: 11317 - DNA, 1377 bp, Homo sapiens
gcaaatgaaagaaaggaattgtatttaccttttataattattattagtgtgggtatggctaatgagttctgattcacccacgaaggttacatttatgctgaatacatttgtaaatactcagttttatactgtatgtatatgattgctactctaaaggtttggatatatgtattgtaattagaattgttggcatgatgacatttcatttgtgccaaaaatattaaaaatgccttttttggaaggactaacagaaagcacctgatttgcacttgaaccagattatagatttaaaagtatatgacatgtattttgtatttaaaactagaatagccagtatttatgttttttataaaactgtgcaatacgaattatgcaatcacaatacatttgtagctcccgagtgtcctaaagggagtgcacttctttgaagctggtgtgttaatactatgtaataaatggttaactttcaaatgatgctgctgccaaaattatattaatagtgagtttcaggcccctgggcattttgtaccatgtaattatcctctggtgatgctgtttctcgttagtggcagtagtgcctccgtctcctagtgataatgctccaagtctatgaactgttaaatcagcattcattttaagaaaagcaactttagtttcaaagatacttttaagcttctaaattgatcatttaaactatttctttaaataagagagccaaattagaggctcatactttagcttgtgaagaagataatgaattttttaaagggaactttctatgcaatgttcaggataaatgcatactgctggccaatcagtgtcatctcctgggtaaattttgatgtcgcattataaagacatgcataattgatggtttctagattatctagtccaaacaatagagtttattttttcttcatctgaaccaacatgctacagtagctaagaagtattaaaactatatacatccatataaagatgaaatatgaactatctcattagaagtcatagttgaccacagacatgttattcttctgaaagagccacattttggttttatttcttgtcacatgatttcttttcttgatggatgaaaaatatgaaaggaaacttttatatctgttgcctagttttgtacatggatctcattttacaagagaatctctctgcaaaaaaaaaaaaaacagtttaaaaatgcattgaaagcagagttctgaaatgagtaaagtttgtaaatgcatatataaaaatatttaataaatgatgcagaatatacagtgactggttggtggctttcatttggcatttgtgacttaactgctattccatttatgtactttctttaggatcagtttgaagtacagtcggtttgattac

SEQ ID NO: 11318 - DNA, 1484 bp, Homo sapiens
actctctaggggatcctgctgctttgctttccttcctcgctacttcctaaaaagcaacaaaaaagtttttgtgaatgctgcaagattgttgcattgtgtatactgagataatctgaggcatggagagcagattcagggtgtgtgtgtgtgtgtgtgtgtgtgtatgtgcgtgtgcgtgcacatgtgtgcctgcgtgttggtataggactttaaagctccttttggcatagggaagtcacgaaggattgcttgacatcaggagacttgggggggattgtagcagacgtctgggcttttccccacccagagaatagcccccttcgatacacatcagctggattttcaaaagcttcaaagtcttggtctgtgagtcactcttcagtttgggagctgggtctgtggctttgatcagaaggtactttcaaaagagggctttccagggctcagctcccaaccagctgttaggaccccacccttttgcctttattgtcgacgtgactcaccagacgtcggggagagagagcagtcagaccgagctttctgctaacatggggaggtagcaggcactggcatagcacggtagtggtttggggaggtttccgcaggtctgctccccacccctgcctcggaagaataaagagaatgtagttccctactcaggctttcgtagtgattagcttactaaggaactgaaaatgggccccttgtacaagctgagctgccccggagggagggaggagttccctgggcttctggcacctgtttctaggcctaaccattagtacttactgtgcagggaaccaaaccaaggtctgagaaatgcggacaccccgagcgagcaccccaaagtgcacaaagctgagtaaaaagctgcccccttcaaacagaactagactcagttttcaattccatcctaaaactccttttaaccaagcttagcttctcaaaggcctaaccaagccttggcaccgccagatcctttctgtaggctaattcctcttgcccaacggcatatggagtgtccttattgctaaaaaggattccgtctccttcaaagaagttttatttttggtccagagtacttgttttcccgatgtgtccagccagctccgcagcagcttttcaaaatgcactatgcctgattgctgatcgtgttttaactttttcttttcctgtttttattttggtattaagtcgttgcctttatttgtaaagctgttataaatatatattatataaatatattaaaaaggaaaatgtttcagatgtttatttgtataattacttgattcacacagtgagaaaaaatgaatgtattcctgtttttgaagagaagaataattttttttttctctagggagaggtacagtgtttatattttggagccttcctgaaggtgtaaaattgtaaatatttttatctatgagtaaatgttaagtagttgttttaaaatacttaataaaataattcttttcctgtggaag

SEQ ID NO: 11319 - DNA, 2201 bp, Homo sapiens
agcatctcctgaagtcttccagtccttcttggctataatcctagaattattgtccgttcctctgaagtaattcccagaatacggtccttcctaaaccccagaaattgcctttttcagagtttatttctcatgtgcactgctgaagatgaatatccctaatccttcataaagaatcagctagagttgtcatgataaagtcagcacacacaaaaaggcttcttacacatacctgtcttaaaccatgtgtagagctttaaaaacagaaaaaaaaccccatatacttatgaccatcttaaatcaagaaaattgcatatttccattctggtctttctgggccagatttttatattggttttcagtaaatgtctatctataatatttcattatagagtccagtagcttaatactgacactgacttgatacagcatgaagtttctagtgccacacacagtatttagaaaacctttaggcgtgaatgactcatgtgggatatatgtaaacataatgtttattttatctcacaaatgcatgtgaaatgtataattacatcttaggaatccaaaatggtctgcagagagtgagcggaggcaccagatcaatgttggttctttgcactggtgagattctgcctgatgaatattaaagatatcctgctttctgagaactctatcaccagatggcagttgggatatgggaggaactaaagcatcctgttttgtatctgtccagatcattatttctgtctcttgttttttcttcctggttcaggatacttttttaaggggttgagaattgaagattttccaaaagcgttcatgaatttagagcattccacccaatataataaaacctgttaagaatgtcagtctttgttcaaacatctgtttgttctatctccagtcattaaatcagtgctgctgcatgacactcttaactcctgactttttatatccagtcataaagttgactttcagcacaaaagatacttataaacaaataaaaaatttttatttttctctcttactgatgtaagctttggcactcttttgactggtgccattagacatcttgattattgtgacaactctagacctgcctgctttatctaatgtaatcatgctcaatgtctacaggttgtttaataatcagtcacacagagaactgaggaactgatgctgtttgtttgcttctatgatacagagatgtctaaaaacttcaaatggacatgttttgtagtttagcgacttccgtatacataaagggacatattaatactggttcatttgtaaattattattcatatagaccactgtagtagataaaactctatggtacacctgcttatgtgttgcctcacactgtgtgtgattttgtttcttttgttaagcagcacttatgtagactgcatttccaaatgtgttgagcactcagagtgtagtcaacagtaagttcttttaatgaatatcagttttaatttatagactgccatggccttaaaaatattctgtacaatatactgcactgtgttgcacagacactacttgcttttctccattcatatttttatgagtagaatctgggcttttaaatttctcttcttattctttgaagcatgttgcatactaccctggtgggatggatggttctgtaaatgaagggatatttaaacttgctactgttgttcaacaccattaatggtcagtgtgaaccattacaaagaatgtggcaacttgcttgtgcctaaaaggaggaattggaactagaatgtgtgactctgtggggactgcataggtttgttaattgacctatagctaaaccttaatgtgtttgtgtgtctatacattgctttccgcatttcaagacatccagacgctattaccaacattttcctgtgcattaacctctgcatgtgaaaacttttaacagttactgaactatgtaaatatgtgaatttttttatttaggtggatgcattttttgtctgtttactgctcttctcagctttattcaataaacttgcattttaagggttgtattggcaattttaacttaaaatgtgcatcatgatggaaggtgcagacttttttggaagtttccgagaggagggtctatagaccatttgtcagaaatcagatcagccctcaaagaatggggtctgtgggctagttaaaatagaaataaacttttaaaatatccacag

SEQ ID NO: 11320 - DNA, 4039 bp, Homo sapiens
tctgctctctgtgaggcctcatcttgaaccagaccttaacgaccaaacccagaccatgccaaagtccagtctgaaatgaaaggggacagaagtcttgctgtccatggtggtgtaggaatttctgtgcaacacctcaccacgtctggttaatccttgcacacttcagtgtttctctcctgttcaataaaatgccctgttaaggatataatttgaagtgagaagatacatggaaattgccctcttatgacatgttgatgttataagcacaatagatggggcatctttggattgatgttcacagctttatacttcagaacctaagtctcttcactttgctggcacctgctatactggagtattgctatgtctttaaaaaattttttttattatattttatttttttgagacagggtcttgatatttttttgggacagggttacctgggctcaagtgatccttctgcctcagcctcccgagtagctgggattacaggtgagcaccactgtacctggctagctacttctttgttagaggattgagaatgaaatttctgcaaaagggcccatggttcatttggtatccctatttaattgcattgaaaatgtcatcctttctgttgttagataattggggtcttcccctgatatccaaccgtgattttggatcacatgggagaaaaagtcatccagtttttcatgtttgcctcaagtaatctttacagtgttacaaattatttgcttaagaagaatggtcttaaccagaattcttaacagatagtctcttaggttattatgttatggtctaagaggttaactgacatcttttgggtggtattttgcattttgaatatgaacttacctgaggaactcccatagttccagaatcaggtgccttttagggagagaacaatacctaagattgtctgagcttccatctttctcatatttcctaagcaaggattctcacttctgaccatatttgggttagagttctgttttgtttctgttttctgtgtctagtgccaattagctaaatcagggagaaagaaatgatcacatgacttttagcatccttgagccatttctctgtgtaatacaggctttagattagtgccttatattggttttggtttggggcactggatgtcgcagctactgctatggtttcaggaggcctgtttagccacatggtgagaccgtggtgaaagggggatggaaattgcttggccagtctttgcctttcatcctgtaaaagtaagcatgtagaaggaggaagttgtgctaaaatgcctttgtttttttgttattattttcttagccagaacatctctctttgaactcacactgatacacacctgctactcttacacagtgcagcagggttgactcttagtctggcttccatgaagcgtcatgggtggaaacgcattctagtaaaaaaggtaggaaatccctaaaacttccagcctcacatagcacggttctcacctgtcactgttttcccacctctaaggatttcatgtacatcttttcaaagctagaaataagcactgtctaagtttatgttgcatttttagtcaaaagggagaaatcttattccttcttgaaaattttaagtgttatggttttatatagttcagttctttgagatttttgaaaagagtattttcagtaataaacgtgccatctctatctcttaaacatttattacaacaattgttttaaaatagaaaaaataaaatgcttctattttaccttttttcatttcagaagcattattctgtttattaacagtgtcccatctactgaatagaaaactttgagaataatatatatatatattttaaatgttttcactgactcattgaaaatgttaattacacacacatgcatgcatgcacacacgagcatacttgtacctttgtctctgggcaaacaggtgggactgttagtgacccatttgggaaaatagagcatctcagagaaggaggtgagttcttcctgcctgtgatttctcttggcgctcccctcctctcccgctctggcttctgtggcggcagtggtgggtaagcactccagtgttctcttaatgaggcactttgcctgtcactcgagcaagcctgggtgttccttcctcctcatgctcctggaatagggaatagggatctcatgcttgcaaactacacaatgctgcaggtgcttcccaggggccacaggctgtcaggaaacgtgttttatgttaagtcacaaacccacttgacttctgggtactggaattaataccagtgggtgagactgagggtgagtgagttagtacatattaatcctggttgttgagcttccagactaccccgtccaaagtttgatgctatgtagtcagtggtttgtggggctggatgccagaaggttctttgagccagtttcaaaggttacttgttttttttttttttttttaaagtcagaatgttaacagctgtgatatatcctgcagggcttttgcagtttcttctgttctgtgttctgaaatactgggtagagaatggctgaggaggagattaccagagaagttgctttgctcagtgctttgccccaggattgcctcaaatctgagtggacttcatcctttgcggcggctctgagcctggcccatcttcctattcccacgtgtagctagtgtctagtgtcagctttgctcagtgtggtggaaacattttgcagaactgttgtagaaagctgccttatagttggcttgacaaagcataattctctcataacaaactttcaaatcattacagtagcttagctactttagttgatgtgaccgaggaatcccttctagaatcataggtggcaagggagggtttgctagctctccatttgcactggccattgtgaaaaaccagcttctgtattcaaatctttccttcatttttttaaattttttttttggcagcgcttgtgctggaacttactcattgtaactgaatcctcagggcttttcttgttttagatcatggactgtgcacgtgacacttaaataattttctatgtatttaaagaaaaatgcaccaggatggtgtctgtgcacgtgactattagaggagcgtctgtagaagtacctggtttggtcagtgcagttgtgcaatctgagggccttgtttcctcctcccctttccccttctccccaccaaaggaaaatatccctcttaatgatttcgtagttcagtttactgaatgattaccacctgtaattcctctttggattgtgtagactcaacatgagacattcctttctgctttctggagggcaccaggggcctttctctttgataaattttttttgtctgttgacaaaaacaaaaatcttttttcaaatgtagtgctggtgaaaaggtagggctgagtgattaccttagccacagggtggctgagcaggaactttagaagaaaatcctgagctttcctgtccattcccagcatccagctcctattctagtgcctcttccctgcagggcagggaccccttgggaaatcgaggaggtgggacgggctgggccctgtgtcccaggtttcacagggctcagggttatgctcccgcttgaatctggacgtgaatctggtaaaaatatcaagtacctgtggaactccctgattctataccctcttccttctttctgcaaggcagaggaataatatttttaaaggttattttgttttagttttaaatagcaaaacacaagctgcatttttatttattttgcataagaaaggtaaatctttttacaaaaaaaagtatagagttggaaactctgggaaaacttacggaaatacacaaatgcttctctgtaatgtgcaatatgctttgcaactgtagatgatattttatgtttaatctgtaaataagaaatgtatttaaattaaaagggatctttttgtaaaaggaccaaatgttcttttataaatgtaataaggaatatcttgctctttaaaatttattaggatttttatgagtaatttttattaaaagatttctttttttg

SEQ ID NO: 11321 - DNA, 1174 bp, Homo sapiens
gccctgctgcaaaaaagaagtatgtcagttataataacctggttatctaacctgttccattccatggaaccatggaggaggaagaccctcagttattttgtcacccaacctggcataggactctttggtcctacccgcttcccatcaccggaggagcttccccggccgggagaccagtgttagaggatccaagcgacctaaacagctgctttatgaaatatccttactttatctgggcttaataagtcactgacatcagcactgccaactcggctgcaattgtggaccttccctaccaaagggagtgttgaaactcaagtcccgccctggctctttagaatggaccactgagagccacaggaccgttttggggctgacctgtcttattacgtatgtacttctaggttgcaaggttttgaaattttctgtacagtttgtgaggacctttgcactttgccatctgatgtcgtacctcggttcactgtttgttttcgaatgccttgttttcatagagccctattctctcagacggtggaatatttggaaaaattttaaaacaattaaaattttaaagcaatcttggcagactaaaacaagtacatctgtacatgactgtataattacgattatagtaccactgcacatcatgtttttttttttaagacaaaaaagatgtttaaagaccaaaaactgtgctgagaaagtatgccccacctatctttggtatatgataggttacataaaaggaaggtattggctgaactgaatagaggtcttgatctttggaatgcatgccagtaatgtattttacagtacatgtttattatgttcaatatttgtatttgtgttctcttttgttatttttaattagggtatatgaatattttgcaataattttaataattattaagctgtttgaaggaaagaatatggatttttcatgtcttgaggttttgttcatgccccctttgactgatcagtgtgataaggactttaggaaaaaaagcatgtatgttttttactgtttgtaataagtactttcgttaatcttgctgcttatgtgccaatttagtggaaaaaaacaacccttgctgaaaaattccctctttccattctctttcaattctgtgatattgtccaagaatgtatcaataaaatactttggttaactttt

SEQ ID NO: 11322 - DNA, 521 bp, Homo sapiens
agggctgcccacccacagccagaatccacaggatcccaccgagaaggagagccaggtgtgccgagaccatcctaagggtccgatgtgacagcaagcaagtgaaataaacaatgatttgcttttcagtgagaatatatatatgagatatatatagatatatattctaggttgggtggtggtagatccttgagggtcagtagtttcaaaaccaaaaatattctaagaagtcttaggatggagttccttttctttctgttgttgtttcccagctacaaccaactaaagacacaaatggcgttctgcaaggggactctgggaggagttttccagaatgcaattccgagtgagcaaatcgcatagctgtagaatgtgcgtgcttttttgtggacacaggagctcctccaggagcaggctgggatcccaactatcgcttgttgcctctttttcaagtggaatttgaattttaaataaacaactttttttggcatgataaacagatcaataaaagttttgtgaattcc

SEQ ID NO: 11323 - DNA, 821 bp, Homo sapiens
gacaattgattttcttattttctatgtagggtggtacatttcctcattttgagatatttcttcaacatatagcttttcattagtggggattttgtcaattataaccaaaaacaatgtgacggatacccaagatgtttcatgttgtagcttgggtgaattacacatttctgaagccattacacttcctagtttatttggatttaagttgacaaataaaaattgcatatgtttatggtctataacatggtgtttcgatatatgtatacatcgtggaatggctaaatcaagctaacatatccattacctcacatagttattttttgtggtgagaacattttaaaaatattgtcttagcaattttcaatcaagcctgtcccatggagacacaagcaatagtgacatgagcacttgactcgctgggttatcaggctttggctccaaatgtttggcttcaaatatgaaaaagttacatgaaagatgaaactatgcaatggcatggctgttggtcattcacatctctctctgccaagaatggggatgacgctgttgaaggaagaaatgtgttttctcctttttctcaagtgatatttgccttaggtcagattctactagtttaaagcaaaacgatctcctggtctgattcctttgggtctctaataatggaaactgcaaggatcagcataaagtgttcctttgttctgacgttggtataacattgcttcttgaaaaatgaaagtatttggacatacagacagaagcaatattattcaggtcttccttgttgcaagtgagggaaatccaattaaaactggtttaaacct

SEQ ID NO: 11324 - DNA, 897 bp, Homo sapiens
agccaggtggggcaacagcggtggcagggcagggggtggtgggccagactggtccccgggggacttcttcacaggggctgctggcgagctctttctctttagggactgctccataccccatgatggagcacacggtgtagggaagccagaaagaaaagacggcccagccacagaagcacaatggcccttcgctctcccccagccccaccatgatgcccccatgcctgggcgtgggggaagatcatttgccaagaggcagctactgcaagtctttgcgttcacttgtactgtaacaacataaaccagcacgcggttcccacccggggccaacctctccacgcgcactcaggaaagtgaccagtgaccactggcgttaggaaggtggctccagtaaagggttttggctgcatttggggaatgctgcattttgttcgtgcctgtaagattggtttgtgtcctgaccagctccaaaaatatacttcactgccctgaaaaacagacacagggagagttggttgtctcttcacttggccaaatgtaagtgaagaacagagtctttttcttcttcggattctattgtttgctggaaccgtacacgttccttggaagatcatgtttaagtgactcctgttgcctgagcacaaaaatgggcaccaatggaggaaaatgacccttgggctggcaggggcagtgacccttccagggtaccactgagggaagggcctgggttcaagcctcccggaacctcccctttggctaaccgagcccctgaaatgcccagtactgccatttgacatgagggtaccttcgccctcaggagatgtgacgaaggaacaaggtctaatttgtgcgtgtgtggactcactatggaaataaaatgcagtagaaagagcatgt

SEQ ID NO: 11325 - DNA, 1040 bp, Homo sapiens
agatgactaatagtacttgtacttcccaccactggaaatgttagcataaaagaacttggagaggaaaaaagtattaacaaaactgcagtctgcactctttaaacctgtttaaggctcttcatcctggttagcaaaaggtgtgaatgtaatgtgatggaatttaaaagttttatgagaccaggcacagtggctcacgactgtaattccagcagtttaggaagccgaagtgtgcagatcacctgaggtccggagaccagcctggccaacatggtgaaaccctgtctctactagaaatacaaaaattagccaggtgtggtggcgggcgcctgtaatcccaactactcaggaggctgaggctagagaatcacttgaacccagcaggcggaggttgcggtgagtcgagatcacgccattgcactccagcctgtgcgacaagagcgaaactctgtctcaaaaagattttataagaaagcagagcttttccttgaagctcttttgaagtggtagcttaattagtattttgttgaaaatactttaaagatgcctagtgaaaagcctactaaagtgctgtgagattggggtttagaacattttattttcaggctttatggcctattttccattgtgtcaagtgcaaaactaccctggcccaaaggaagggcagagaacataattacatcttaggccacatttcattctttgcagctttgctaatccagttgctcaagttctttacctcaacctgaaggaatgaagcattattacattttgtgaatggtgttcagcctataagacgaagtctcacaagacctataggaaagtttaccatctgccttaaatattaaaatatccatctgttattcacattaatacacagaatgaaaatagaggtctaggaattatcaaaggtactgcaaaaatactgtatagaacttatttgtaaatagcacatacattgatagatggggtgtgggaccaacaaaccaaattaaaagaaattgtttttctttcagtacactaaggtgtgtgttttcaaaacc

SEQ ID NO: 11326 - DNA, 419 bp, Homo sapiens
agaagccagcccatgacattttcctgctcctctctcagctgagcccttagcagagaatcaaagccatgcctggccgaaggggtacttccaggtcaggggaaatttcagtcccccatctccatcatgaacatggcagccccaaagctgagcaaggccaaagacagggttttccaacccccagcctcttgactggtgaccaccaccccttcttgtcactgtctcccacccaccccatctttgctgggattcccatcaactctcagaactgtgtggggtttccctggggccttgtggaagccatgacttcacaaagaccctacctgtcagttcttgtttctggggaggagggatcacctgcactgagaatgaggcagtttgacacagatcacaaaataaaatcaaagtctttttgaatagcc

SEQ ID NO: 11327 - DNA, 664 bp, Homo sapiens
tactgctcaacacagcccaacctatagtgccctgtgacttctctcctcccctttgctcactgtcctggagtggcaccggcctctgcactgactcatttctggtcttggggccagtctcaggggaagctgggtgggggaggtccctcctgccctaagtgcagctggactgtacagaacactccaagggccaatggcagttcagcgcaaggagagggagggcccacaggtcagaaaaagctccagagacctcacagcattgtagggcggggtggtgggccaaagttaggacactgcgtaaaacaggccatcccaccacctctacctgctcatgccaggagaatccataactgcctagaggcctggggcccctaccggtcgtgaggtgagtgggcatctgtccagcctggaagaggggcactaggtgactccctcccctgctgttgtaaatactgtaattatcggagaatttaaattattctcatttgtaactgcgtttccgggtcgcgccagagtcatttggtactaaaaaaaaaaaaaaaaaagactgggggctgtccccatttcccttctctttcccatagattcccccacctttcaaactggtttgtatttatttcaaaggaagaaaatatattgattcttagaaaataaactgtcaatttag

SEQ ID NO: 11328 - DNA, 850 bp, Homo sapiens
ggcctccttggcaatgcatttgatggccaccagcttctgcgtcctcttatcttctgccaggatcacctccgagaaggcccccctatcgggagaggggattcacaaggtgaagaactggaaccccagcttccctccagcctctcctccattccctatgggttctgtgaccactgctggaccaaggacgtggatgaccctcccctagtcactcatccatcccctggctccagagatggtcacatgacccaggcctggccagtcaaagtagtctctcccctggccacagtaattggtcatgtgatgcaagccagcttactagcactttgagaatgagtctcctgttgagctggtaggatgtaagcctggagctaatggcgatcatctttgccaccacctggggagagcctgcttgggaatgaaattaacacaaaggaagtccaacctgagaaatggccaaatatatttcctgataacattatgtggccctctggatccagccatgcctgaggtctacccctgggcttttggattatgtgtacagttggttcatccctttttctgctaattcgagtcatggctaatttaacaccctttagaaccttaaagaaccatcagcatcacccgggaacttttttagaaatgcaaaatctctactgctttggatcctgggtcaaaaaaaagaaaaaaaaaagaaatgcaaaactttaggccctgccccagatttactaaatcaatctgcagtttaacaaaatcctcaggtgatttgtatgctcattgaactttaagaagcagtgttttagaacaggttcttaaaaaggaacaaataaactcatttaactaaagttaactg

SEQ ID NO: 11329 - DNA, 560 bp, Homo sapiens
gtttcctctcctccagcccagacccagtggactcttccaccaccgccccaggtggccctaaaggactctccagccacccctgtcccaaccccagtggattctcattgccttcggccctgttccccaaggactcttccacctcccaacactgtcactagtctcaccagccctgaccccagtgtaccctcctccccacacagactccaccctcctacaggtgctgttcagtgccgacctgcgccaatcccgccatgctcaggagccaccagcaaagcgcagaaagggttccaaagggccggaaggctagatggggcaccctggacaaagaaattccccaagcaccttcccctccattccccacttctctctccccatccccacccagtctcatgttggggaggggcctccctgtgactacctcaaaggccaggcacccccaaatcaagcagtcagtttgcacaacaagatggggtgggggatattgagggagacagcgctaaggatggttttatcttccctttattacaagaaggaacaataaaatagaaacatttgtatgg

SEQ ID NO: 11330 - DNA, 890 bp, Homo sapiens
accatctggctggatctcgtggccttccccctcagactacccatgtctccacgaaggcgtcctggagtcactccccgagcagcgcggcggcggcagggagttgggttggggtgggcatttgatgcgggaggtgggtggtgtgcttgctagctgggcaagaaagcagcagtggacctgccccaaggccacacgtgcctggtcaggctggcttctgatgttcagtcccctgggccgggacagattttttttaacgtcttgaaacttaaactctgtgcttgtaggatactgtaacctttttgtctttttttttttttttttttttaaacctccacctccagtggctgtgactggtcccagtgattatacgttattggttgctgtgggtctgggcgggcctggagccagaaggcgacttattttttctctcctatgccaccccaggtggggagggagggaggtttcagactccagtttctcccttgcccttttattcccaagcctccttggccccagtataagtgttgggaactctctgccagcttcctgagttctgcctaaagatggccccccagcactggttggggacaagggccaaattggtgaccaccagtcatgcctaggacctggggcccaaaagccgggcaacctctggctacaggggccattgggtgccctcccagttgagaggggccgctgtttcgccttgtccgtcagtgccagtgcctgtgccagaggtggcgaggtgagtcctccagagcttcctggccgggccctcctcctgcctgttctggctcctctgctcccacgctagctgtcccttttctgattctggtggatcctccctcccctaattaaagtctctttttgcccctttggggctgcatgaggtc

SEQ ID NO: 11331 - DNA, 1534 bp, Homo sapiens
ggactctacccacggctaaggtcttcatttccctcccaccgaaccttgatttcaaggtggcacccagcatcctgaagccaagaaaggtgggcctcgacctgtgactcacacccagtggacagtgctgagcacggggtcagggctggagggcacaggcagagggcagctcccaggctggctggcaccccaagggaagagctggtctccctcagaagccccttcctccacagacttctgatcatctccctcttctcccctcctttcacaccgaggctcctgctctcctgtgcctccgaggcccccagctggaagtgccttgttgcctctgccctttgaagtcggaacaattcctagcacctgtcggaaggtcaaggccaaaggcaaattcaaggccagactgtgacaaacccagggctgaggcctgccccatgaagaggctgagccccctgaaacccctgccccttgttggtacattccagaggcgcaggggcctgggggatatgaagctagggaagcccctgcttcgattccccactgcccttgtcctggatccaacaccaaataaaaagaaacaagtgaagtatttggggcttgactccattgctgttggagggtcaagagtggatggggcgaggccgtgtaccccagggtccacagcaagagcctgaggccatcagcagctcctccgtgcagcgaggcccagaattcccacctaaggacagacatggggcttcctatttagggactcccccagcatctccgatccaggggtggggagcgtgagccttcactttacagatgaagaaactgagtctgaaagaggaggcatggcttacccaagatcacgtggcagtgagtcgacgcagggacatattgccagaactgccgagcactgggagccccccaaccccagagaacaagccaagctagcagaatgacacctaccgggcataggaacgttaatgccatgagacaggggaaggaattggccttgcctaaacctcagcccttctgcagagggcatgggtctatcccttcttcagcaaggggccaaggtcacctaaaaatgaaacatccaataagccacacccacctgaagaaaagtgtggcactgcttagttgtagtgggttgaactgtggtcccctgaaaagagatgtctacttggaccctgtgaatgtgaccttatgtgggaaaagagtctttgtagctgggtatggtggctcacacctgttatcccagcactttgagaggccaaggcaggagatcgcttgagcccgcaagttcaagaccagtctgggcaacatggtgaaaccgtttctacagaaaattagctgggtgtggtggcacacacctgtagtcctagctactcgggaggcctaggtgggaggattacctgagcctgggaagatcaaaactgtggtgagctgtgatcacgccactgcgctctgagcctgggagacagagtgaaaccctaaatcaaaaaaaaaaaaaaaggtctttgcagatgtaaataaatttaagatcttaaatgag

SEQ ID NO: 11332 - DNA, 968 bp, Homo sapiens
agcctctttggggtgaagcctggacatcccatcgaatgaaaggacactagtacagcggttccaaaatcccttctggtgattttagcagctgtgatgttggtacctggtgcagaccaggccaaagttctggaaagctccttttgccatctgctgaggtggcaaaactataatttattcctggttggctagaactgggtgaccaacagctatgaaacaaatttcagctgtttgaagttgaactttgaggtttttctttaagaatgagcttcgtccttgcctctactcggtcattctccccatttccatccattaccccttagccattgagactaaaggaaatagggaataaatcaaattacttcatctctaggtcacgggtcaggaaacatttgggcagctgctcccttggcaggctgtggtctcctctgcaaagcattttaattaaaaacctcaataaagatggccctgcccacactgtgccttgtgtttggggcttgatagagtgtgaaaggtgtgttgcttgaaaggtgtggccttagacactaggagatgatgggtagaagctccttgagaaacctagcagtggccatagagaagtagactgggtatggggaacctaagtcatagttgtaacctacagctgattggtaagaactatgggccagacatttaatctctccatctatgaaatagtccattctcatttatctaccttaggttatgggctcttcttttagttggatattcacatttatctttcagtgttaactgggtatcagttatgagtctactactgtataatggcatccaaaagaattttaaagtacctcggtttatagggatttacaattcagtagaaacttgttattcatgtgaaacagtgaacataatatctaatgatgtggagcaagtacattaaaaacaggaaggaagagatctgtgattaaactaaaggccctttcacacct

SEQ ID NO: 11333 - DNA, 591 bp, Homo sapiens
gcagagctccaccgcagtcccgggtgtctgcggccgcaacgcaacggacactggctggaaccccggaatgagccttcgaccctgaaatccttggggtgcctcgaggacgactggccgaaaagccgcattccctgcctcacaggccggaagtcccagcccagtccccgcgcgcgtccctcttcctcctcatactttcccttgactgagagctcctctaacccctgttctgatgggggagggcggtcttcccacttcctctccagaactccagaaagagcagtgtgcttatgcttcagtccaggctggagaggttggggccggggtagggaggcaggagccatgtcagttctgaaggagggtgaggcggtgggggattgcagggggcggctgagagaaaacctccttgggggccagggattccctttcccactctgaggctctggccagagggagagaggactctggacctaggaaaagaggcttttggctccaggtggtcaggacagtgggggttgggggtggggtgggtgggtgctggcggtggggaccaagatccggaaagatgaataaagacaaacatgacaaactaag

SEQ ID NO: 11334 - DNA, 36 bp, Homo sapiens
ataaaggcagacgctgtttttctacccatgtggccc

SEQ ID NO: 11335 - DNA, 1013 bp, Homo sapiens
cagaagacgagttggtggtgctgcagcagatgttctttggcatcatcatctgtgcactggccacgctggctgctaagggcgacttggtgttcaccgccatcttcattggggctgtggcggccatgactggctactggttgtcagagcgcagtgaccgtgtgctggagggcttcatcaagggcagataatcgcggccaccacctgtaggacctcctcccacccacgctgcccccagagcttgggctgccctcctgctggacactcaggacagcttggtttatttttgagagtggggtaagcacccctacctgccttacagagcagcccaggtacccaggcccgggcagacaaggcccctggggtaaaaagtagccctgaaggtggataccatgagctcttcacctggcggggactggcaggcttcacaatgtgtgaatttcaaaagtttttccttaatggtggctgctagagctttggcccctgcttaggattaggtggtcctcacaggggtggggccatcacagctccctcctgccagctgcatgctgccagttcctgttctgtgttcaccacatccccacaccccattgccacttatttattcatctcaggaaataaagaaaggtcttggaaagttaaaaggcatcagtcttactacctgtcccaccacccccaccttagggaaatgtcctagaatcctgggaaattgagggcttctttgatggtgagtggagaaaagatagaggagaaggttgcccctgaagtgctgttaggagaaggaggatagaggaatcagccttaggagggttccatgccagctgtcatttggcaaaggaccctggacagatgacttttgcctctgaacttcactcttctctttcctcaaatgggcttcataatgctttccactcaggcttaacatgagaattaaatgaggtgacaaatgtgaagacctggacagtacacaacagatattcaataaaagtgtggtcgccattatgaccagagcctcc

SEQ ID NO: 11336 - DNA, 709 bp, Homo sapiens
cagcttctgtgcttatataatttttgggacccagaagaaacaacgacacaatcttagaatcactcctgagtatctcgagttgtggcatttgttatagagttgacaattttctgcattatagcctctcattttccatgaattcatatctgaaaccattttagaagggagaagtcatcgaagtattttctgagtgttgagaagaatgagttaaaccatttaaacacatttgaaacatacaaaaatagaaatgtgaaagcatttggtgaaagccaaagcacagagtcagaagctgccaccttagagaactgaaataaaaatagaagttcttacgcttttttgtggtacagatgctttcgacaatttaaagaaagctaaataaaaatgtagacatggctggcgcagtggctcatgcttgtaatcctagcactttttgaggccaaggtaggaggattgcttgagtccgggagctcaaggcaaagctgcacaacataacaagaccctatctccacaaaaaaaatgaaaaataaacctgggtgcggtggctcacacctgtaatcccagcactttgggaggccgatgtgggcagatcacaaggtcaggagttcaagaccagcctggccaacatagtgaaaccccatctctactgaaaatacaaaaattagctgggtgtggtggcacgtgcctgttatctcagctacttgggaggctg

SEQ ID NO: 11337 - DNA, 668 bp, Homo sapiens
accccagataaattgttgcctgcttctgtgtctctgccagcctgtgatcattttgtgttagagtttgaaatccgctgtttgcctttcttactggtaggatccttttttgttcctctttttttttttttttttttttttttaaagacggggactcgctgtgtttcccaggctggagtgcagtgctgcaatcttggctcactgcaacctccatctcctaggttcaagcgattctcctgcctcagcctcctgagtagctgggacgacaggcacatgccaccatgcccagctaatttttgtatttttagtagatacggggttttaccatgtcggccagatggtctcaatctcctgaactcatgatccacctgcctcagcctcccaaagtgctgggattacaggcatgagccaccgctcccagccatattttgttcttaaagtggggtctttattaacttgtggacatcatggattgtctaacaccatcacagtccctggctcaggattctaatgtagcattatttattggtttggataaacccagctgtgctacactgcagagtaaaatctctgagtcatgattctggactttgggagctagttttgaaactctgatttattgtagaacttaggcttgtaccaattttacaaataaattctgttctaagttc

SEQ ID NO: 11338 - DNA, 894 bp, Homo sapiens
aacagtgccgtgctgctgctgggaagttgctttacacaacacaggccacatgggaaaggccccagcagccttcagctccttcctttctccttaaagagcaacagggcttattcttgtttttcttttttcaaaagtgtggcctttgggctctgccatctggggtgtggtgtggtatgtgggaagaagttcagaggaaccgttggaaacgacgttaggcattttaccttttcagtaacattttatacatctacttgtcaatgtatttgagacattcacagccaaaagcctgggactctttgtgaaggtcctcctcacctctatctttctttctctctctctcaaactttccttaaagttctcattgcctttgcactgcttctgtgaacagtctttgtctcctccccacctttggtgggaagtgcggggcagtcctggtcaagacactcatgccctggcaatgtggctgccagagaatgttgttgctaacccaccagtttcttgttgatttggagaggtcaaggccaggcccccacttggcttgaagggacattttcagacttttctttctgtcacttggagtgtctatgcctctcatatttccctaataaactcctcaactttttatctgactgctgtgattatggtggggagaggagctagagatgggttcacttattgcacagaaatgtaatacatggcgttattattctaacataaaactttcagatgtagctgtttgattcaaagcctaggtggcttaccagcccaagtccccatgtttggactttcagctgactagctcatcttgggaatcatttggtcattcagcacatttaccaagtatttactatgtaggcatgttaaactccaataaaacatacagcattgaatcag

SEQ ID NO: 11339 - DNA, 2095 bp, Homo sapiens
agatttctgttgaaacttacactgtttcatctcagcttttgatggtactgatgagtcttgatctagatacaggactggttccttccttagtttcaaagtgtctcattctcagagtaaaataggcaccattgcttaaaagaaagttaactgacttcactaggcattgtgatgtttaggggcaaacatcacaaaatgtaatttaatgcctgcccattagagaagtatttatcaggagaaggtggtggcatttttgcttcctagtaagtcaggacagcttgtatgtaaggaggtttgtataagtaattcagtgggaattgcagcatatcgtttaattttaagaaggcattggcatctgcttttaatggatgtataatacatccattctacatccgtagcggttggtgacttgtctgcctcctgctttgggaagactgaggcatccgtgaggcagggacaagtctttctcctctttgagaccccagtgcctgcacatcatgagccttcagtcagggtttgtcagaggaacaaaccaggggacactttgttagaaagtgcttagaggttctgcctctatttttgttggggggtgggagaggggaccttaaaatgtgtacagtgaacaaatgtcttaaagggaatcatttttgtaggaagcattttttataattttctaagtcgtgcactttctcggtccactcttgttgaagtgctgttttattactgtttctaaactaggattgacattctacagttgtgataatagcatttttgtaacttgccatccgcacagaaaatacgagaaaatctgcatgtttgattatagtattaatggacaaataagtttttgctaaatgtgagtatttctgttcctttttgtaaatatgtgacattcctgattgatttgggtttttttgttgttgttgttttgttttgttttgtttttttgagatggagtctcactcttgtcacccaggctggagtgcagtggcgccatctcggctcactgcaacctctgcctcctgggttcacgtaatcctcctgagtagctgggattacaggcgcctgccaccacgctggccaatttttgtacttttagtagagacagtgtttcgtcatgttggccaggctggtttcaaactcctgacctcaggtgatccgcccacctcagcctcccaaaatggtgggattacaggtgtgtgggccaccgtgcctggctgattcagcattttttatcaggcaggaccaggtggcacttccacctccagcctctggtcctaccaatggattcatggagtagcctggactgtttcatagttttctaaatgtacaaattcttataggctagacttagattcattaactcaaattcaatgcttctatcagactcagttttttgtaactaatagatttttttttccacttttgttctactccttccctaatagctttttaaaaaaatctccccagtagagaaacatttggaaaagacagaaaactaaaaaggaagaaaaaagatccctattagatacacttcttaaatacaatcacattaacattttgagctatttccttccagcctttttagggcagattttggttggtttttacatagttgagattgtactgttcatacagttttataccctttttcatttaactttataacttaaatattgctctatgttagtataagcttttcacaaacattagtatagtctcccttttataattaatgtttgtgggtatttcttggcatgcatctttaattccttatcctagcctttgggcacaattcctgtgctcaaaaatgagagtgacggctggcatggtggctcccgcctgtaatcccagtactttggaaagccaaggtaagaggattgcttgagcccagaacttcaagatgagcctgggctcatagtgagaacccatctatacaaaaaatttttaaaaattagcatggcggcacacatctgtaatcctagctacttggcaggctgaggtgagaagatcattggagtttaggaattggaggctgcagtgagccatgagtatgccactgcactccagcctgggggacagagcaagaccctgcctc

SEQ ID NO: 11340 - DNA, 1515 bp, Homo sapiens
tgaccggaacacagctgaggacccttgtcctcagttggaaagatgagcatcagatcaagaaaaaggtctgaggcagaatccaagatctgccaggaaacacacaacaaaacatctgctgtcctgggtgggagggaaacttcatttcactggaatgagttgggagagaaaggccctcagcttttagagacacaaaaatccatgaagtctcttcctttctgggctttgttagtcagagcaggggatcagaggagactgaagcagaaaccctgcacacgggcccaggatgtggctgattttgtggttccggggagtatgtgatgataatcacccccagcagattccattacctcagcagctcttgttcccccgccactggcagttctgcaatgccatagcattttccagagctaagatctctgggttgtatttgctgacagcctgcaagcttgcatgctctgaaagattttttttagtttttaatttttttgtagagatggggtctcgctttgttggcgcaatcctcccacctcagactcccaaagtgctggaattacagttgggagccactgtgcctggcctggaagactttcaacttgtgtctcagtgcagttcttgactcacctctctgggcctcaggttctacaaatgccagacacctagcgaagagctctgcaggctttccactgcctgtattggaaatcttgcaattcacataattattcagtcactgcctggtacctttatcttcccatcccactaatgttagtgttttttaatggagcttttattctgagaatatgtgtttgtctgtttgtttgttttttgagacagagtctcactttgtcacccaggctggagtgcagtggcacgatctcagctcactgcaagctctgcctctcaggttcaagtgattctcctgcctcagcctcctgagtagatgggactgtaggcacctgccactatgcctggctaatttttgtgtttttagtagagacagggtttcaccatattggccaggctggtctcgaactactgacctcgtgatctgcccgccttggcctatcaaagtgttgggattacaggcttgagccaccgcacccggccgagaatatgtgttgttatttatgactggattatgaagaatcaggagaatgcatttcatgtctgattctgctgctaattaagtcaatcatttaatttttgggacctcagtttctttgtaagtaaaataacacctgcttgttcttcatccctgggctgttgggaggaacagatgagacagtggctatagaagcacttggaaaatgcacttgtcctgttttgtaaaataaaaaggtattaaatgtgtatttctgccatgtacctaatgattattcagtgcgtatatatctgaaaagtcatgttgcaaatctttctgtgaaacagatgctattttaaattcactgggagaaatatcctatttaaagtaatctatagtaatttctttttatataataaaaatatatttgtaaagtc

SEQ ID NO: 11341 - DNA, 1996 bp, Homo sapiens
ggcgaccagcagcctgacagaacacaggctggcttgaagtctgtgtctcaggtcgaggatgtgtttagagagctgattggaacacagaaaaccaggacaggatgttttcctccaagcgggtcataaggcttcagcttctgggtggtgggtggggtggggtgggcatggaatgaggggtatggggactgcctgtaatagcactgggattttgcctcccagccaaaatgctccagggtaggcagcaaagaagaaagagtgcgatatgagggtacagtgagtttggcagtccaaattctgttctctgcagcctgtttttgagtagttggtgaataaagtcacccgcctacttgtctaagcacatgtgggtgtgtaactcagttcctggttctcggttctaaaaacagacttccaactgggaaactttttgggggaaattaactggacacctatctcggaggtttattttcttgcaaccagtgaagtcgtcctcctcccttccctggataactcttcagtttgactgtcactgttctggtgtcaactccagcgtcggcacaggcagaaggacttcagctgctggtctcattggttccactgccattgatatgggggggtgcagaggagcactcattgtccatgatggagatccaggacagactgggggactccgggaagaggctttcttggggaagaggaccccaaaggaggtacttcctcctcactgatgccctcagggctgctgtgtgggtgtgttaagctgataaggttcagtttgcggcggaaactacctgctagtcttgtgtcaggggctgccagcctccttttgtttcacttttgcccccttcttgggaacatttgaccaaaaataatcctcatttcatcttgtgtacagtcctttgtgtaccccgcccaggttgagaggtgaatcagcgtaattctccgaagctctgctgggcagctcagccatgttacattgtctatgcagaataagcaggcctggtgtctgcaaatgtaccagtccttctcccgcatctcctgggtgcccccttggctttgcctctcctgtgtcctgtctttctgcgttttagaagtgagagcctctccttcaccttttgagcaactgagtcatctcaagtcctgagctctgctctgccgcctgctggtgccttgtaaaggtatactcgttacaggccctagaggttctaatggtccagggttaagtgagaggagactgtactttgtttcaaaggatccttcaccctgatctgcagtgaggtggatagatcacctggagtccctcgtctgtggtcttggaggcttaaattgtaaaatacatcccttatggaatcctaaattcctctaggtgtttttggaaggcgcatttgagccttgtgagctaaaatggaatggatttaatatttcctatctggcatttccatcttgcccctggtacacaagtcactggcctggaactcagccttgattcactgtccgtcttcacggattagctgtgctgttatgttgtctgtgctgcagattggcccatgtgggaagtcgggggggacctgatttcctgcttggaagacttgggggactgccgagcatatcaaagtgtttatagtcaccaagtgaactgcagcacaaccatctcctctccagcaagccctgaagtcagtagtgcctgcaggtgaaaccaaccagccctgtgttagaggaggaaaagcggagatgacatggaagtctccaagcctgtgccatccacctgccaaggaaaagcacaaggtgctatctacttttctctctaggatttagattatcatttatgtgctgttgcacagtgaaacctcacctgtgtgggcgtgaaagctgattggcattgtttttgattcagctttttggatggctaattgttttcactgtgctgtgggaatgcctctgtattttttcccctctttggccatctttttctgaaaataaagtgatggatcctctagcc

SEQ ID NO: 11342 - DNA, 56 bp, Homo sapiens
gcggccaccagccatctggggctcttcttcctttcttccccccgtgtatgtaaatg

SEQ ID NO: 11343 - DNA, 2282 bp, Homo sapiens
ggtgggggccactcaccgacccgacactctcaccccccgacctggctgagtgcgaccaccacttgatgtctgaggataccttccatctcaacctacctcgagtggcgagtccagacaccatcaccacgcagagaggggaggtgggaggacagttagacccctgggtgggccctgccgtgggcaaggatacccggtggcttctggcacctggcgggctggtgacctttttaatccaggccccatcagcatcccacgatcggccttggtaaccgccgcggtagatcatttttatcccgccagggagtgtgatgcaggaagaccacatgcgctcctggcttttaaacctgttcctgactgttctcttactgccgaaacccttgactgttatctcggactttgcaggagttcctttccctccgaacgctgctccatgcacaggaaaagggcattttgtacaatggggacttcccgggaacgcttgctcttaagtaccagaagccggcggagctctggctttcgtgtttttggttttctccttcccaaggcagctggattgaaaaaacaaaacaaaacaaaaaaacccaggggcgtcagtcgatattcccagggccgcttctcctgcagtctgtggagcgtccttgtccccgccgccggaatgaatgagcattctgcagcccgatgtccctgtcccctcctcgccgggccattctgattggacctggcccagtgcaatctgtccagacaagccctgcttgctggaaaactgccacaagcacaattgatctctttttatcgccattccaggggcctcaggtcctactggggaaacttcctataccggagctccagtttctcttaagctgcccaatttcacagagtacaaaatagttgtaggggaaatcaaggtgaaggatctgtccgacagtcaagacggatccacagtaatctttcggtctccttaaactaccaccctcgctgccacccaccccaagctgctgccgcctcaccttccttgaaatttctcagcgggagtctcctcactgccactaaaatccacccagcccactaactgaggagctagtgttaatccagagaaccccccgcaatgtgcttccgagattcagactgcttcattgggaagtatgatttgttcctttctggaattgggctccgtggtggcggcggcacttcaagcaaagacagtttcttgcaagctccagtagctccgcgtgtctcatttgccaggaagatgggttcccacgtagcaaatcgtacattgtgccctgtagctccttagctagttagctcacaagccgtgttttatgactaatccttaataactatggtaaataactgtgactgtggggtttttaatctcttgtcattctcatccaaaagtgaccagcataccagttcttgcaataagatattaccctcagaatattaagcacattattgtagagaaaaaaaaatatgtgtacacatatgaacgcacaacatgcacattcatcctcacatgtggcacgtaaggtctcatttgatattgtgtaggaaatctgaagccttttcctgaggtcatctgtaaaatagtctcattgccaaggcatccccagtgccagctggtgaatccatgatcaaaatgcatacgtattgttaaatgataaggtttagaatgacaggaacccatcactgtgtctcatggtcccacttccccatctgtgtgtgaattcctttagactaagggcaggaagacttccagctttctctttgttcttcaatgtgaaactgagaccaagtctctctaagacaaatgcagtgtatttaatgtttgtaagcaattctaagtgagatgtttggcaagaaatcccctaactgatttccatccaaacctaccttatagagcacaatattaagtgttgtacaattactgtgagaactgtgaatatgtgtaacttttttttagtatttgcccggggggaaaaagatattgtattatcatatatgcttttttgcaataaggatttattctcagaacaccaagtaaatctatctctatataaaaaatatatgtaatatatacatattcaaagtatatacagagcctgttttaaaaaatacagtattatttagtaaaattatctgttctatggaccaaatgtaaaatatttataaatgaagatgcattttaaatgtctataaatggtgtcataactagagcacgggcgttatgtaagtttctaagaatttagaggataaataataaaggttctatgatatacaac

SEQ ID NO: 11344 - DNA, 2752 bp, Homo sapiens
gggaggctctgaggggatgcaacaaaatgatccttatgatgtccaacaaggaaatagaggacgaaggcctgtgtgttgccaggcaggcacctgggctttctggaatccaaaccacagtcttaggggcttggtagtttggaaagttcttaggcaccatagaagaacagcagatggcggtgatcagcagagagattgaactttgaggaggaagcagaatctttgcaagaaagtcagacctgtttcttgtaactgggttcaaaaagaaaaaaataataaaaataaaagagagagagaatcagacctgggtggaactctcctgctcctcaggaactatgggagcctcagactcattgtaattcaagctttccgagtcaagtgattgacaactgaagagacacgtggctagggttccactggagaattgaaaaggactcttgagccctcctggaatggagctgtataactgtgcagagactttatccatgccaatagttgctgtccccttccaggggtcaccttgagaggcatgacagctgttccacaggggctatcccttctcagaaaacttctcttctgagcctctttaacagctttctccagaaccagtgtctgaaccaccctggaaattctgccttattatttcttactcaaacatgtttagagtggatagaaaattatgcagcttgcacacccatcgtctttaaccccaaatttcctttggctattaaaaaagtggtggcaaaagacatcctcaaaagaaagagaaatgaaatatttttgaatggttgcacgttaaaaattaaaagaaggaatgggggcagaatgccatatttttgagggctgtactaggtttatctcatttaagccccacaacaccccacaggagggtaattttctaactctagtttgcagaggagcaaattgaggttcagcaaggtgagagaggtacccaaggtcacatagctagttatgtgagaaagttagagtacagatcctctggggtttcagcttattgtagcatattttctccgaaaggcaaaaatgtgcccttttggccgggcatggtagctcaagcctataatcccagcatgttgagaggctgaggtgggcagatcatttgaggccaggagttcaagaccagtctggccaatatggagaaaccttgtctctactaaaaacacaaaaattatctgggcatggtggggcatgcctgtagtcccacttacttgggaggccgaggcacgagaattgcttgaacccgggaggtggaggttgccgtgagccaagatcacgccactgcactccagcctgggcaacagagcaagactctgtctcaaaaaaaaaaatacaatattttaacaatgtgccctcttaagtgtgcacagatacacatacacggtattcccaagagtggtggcagctcaaaatgatatgtttgagtagacgaacagctgacatggagttcccgtgcacctacggaaggggacgctttgaaggaaccaagtgcatttttatctgtgagttctgttgtgtttgtcaaaaagtcattgtaatctttcatagccatacctggtaagcaaaaactagtaaagacataggaacatgtagttttacttggtgtttatgttgcaatctggttgtgatttatattttaaagcttggtgctaaaccacaatatgtatagcatatggagtgcctgtacaagctgatgttttgtattttgtgttcctctttgcatgatctgtcaaagtgagatatttttacctgcctaaaatatgatgtttaaaagcatactctatgtgatttatttatttctacctttctgagtctcttggactaagaagatgttttgaaatgtaccatcaaatgttaacagagtttgatatgggctttctctttggtttctcatcacatttgtaaatgtcttttcaaaaggatttactttttgtaaaaagcttcattctcactctgctttgcatcccccaaacttcttgttcaaaacggggggagtttaggagactttaatcccggtttcagaagctgcagctggtctgtttccaggtcagaaaccattgttcagaagacctccctgtgagagagttgctcctcagggtccctcaggaccaaagaacactcgaaaagagcacttcacacagacaagtggctaagtgtccattatttaccttgaacaatcaaggcaactagtggagagaactgattgtgagctctgcctctgggtcagagagacctggatttgagtctgacaagaacaagaaatggtcaataaatataaattaccagcgtctaaggaacaaggtctatgcattattgtatacagtgtctctagtgcttgtatagtgtctggtatacagagggcactcctatgcatttttaaaacatgctgagcacataccatgtgccaggctttgtgttttatctaatgttatctaatggtattggtgccattatgtaatgttgcctttacaacaacctcatgagggagatttccatctttacaaataggcaaactgaggcccagagagattgaggaactgctccgaggtctgattctggaatgtgcttcctttccactttatcaatctgctcttcgtactcctgtctgaacgatggaaattaatttttgaatgtataaaagacaacagactatgatacagaaatgtcagccccagcccactaagaaagccccagcccatcagtggctaatggctttaataaattggtcatttggcta

SEQ ID NO: 11345 - DNA, 239 bp, Homo sapiens
gatggccccgctgtggggctgacttctccccggccgcctgctgaggagctctccatcgccagagcaggactgctgaccccaggcctggtgattctgggcccctcctccataccccgaggtctgggattcccccctctgctgcccaggagtggccagtgttcggcgttgctcgggattcaagataccaccagttcagagctaaataataaccttggccttggccttgctattgacctggg

SEQ ID NO: 11346 - DNA, 2286 bp, Homo sapiens
aatgattggtggttaatttttcaaagcagaaattttaagccaaaaacaaacgaaaggaaagcggggaggggaaaacagaccctcccactggtgccgttgctgcgttctttcaatgctgactggactgtgtttttcctatgcagtgtcagctcctctgtctggttgtttacctgttcctgttcgtgcttgtaatgctcacttatgttttctctgtataacttgtgattccagggctgtttgtcaacagtatacaaaagaattgtgcctctcccaagtccagtgtgactttatcttctgggtggtttgatagtgtttttaaaagtaatatataatgtggggtgaaatgggagtaggggggtggacaggggagaaacgaaaaccacaaaaagaaaacccaactcctctcctccccccaagctcagttaaatcccccacctccaactttccctccaccagtgtgcttgggatcttcaatgaactgtgcttttcgctttctttctgcatgactattgtaactagatagaacattaagagattttcaagatcaaacttccatagcttcatccactgaatttgaaggcatccacctttttctccatttgctaaaatttggtgcagtttgagtttatgtgaataggctggctgtgcctgtagagctcttgtgtttttagtgatgacatgaaatacaaagaacaagctatttccaggaatgtgttctgtattttacatcccagtgtaccctttattttattattaactaattaactatgagatttttaaaaaatggggccgctgatgtgcaatatcaaagtgaacttgtgagtattttgtgtgtgttgatctcagttgtttcttcattgttgctgtttctggatccagccatgtgtgcgcttgtgtggacctgaggctgctttctgttcccaaagcttgacctgtgtacagagataattccttggcaatgttggacatagaatgcagggagctactgaaggtctgtcagggatttgtccattctgctcttggcctctcctgaggcctcataatgggagaccaaatcaaaaatgtcccatgtcacttgagtgggtacactgcctacagaaccttgaggttgactcctgcttcagttctcagctgtttaccacagccctccagggtccaaagattgaggagctttctctttcctgggaggaactgtctcagatttagcttgtgtgtgttttggacagaggctccacagcggtggctcttgaggaatcctcaccagtttgttctcttccctctgacaagcagcacctgagcagatgctgaggcagttcattaaaccaggcctcagcttcagtgcctcatcttgccatctcccggccaggctgggaacgggcaccaagcagccgcctctaacaaacaccatggtccgtggaagttcatgccagcagcttgcctttgagaagaaatgctgctggctctatttttacattcccttccacctctatactgtcatgtcaccgttctgaactcccagatctgagaaggaactagtgttggtggtatgtaacaagagttacgtatccaggggcttgtgccttggtttctcctttgattgctggtaaattctgaggccacagagaaatgcattgagtgtgaatgttgtcatctgtaatccctccctcagctgataatggtagttgatctgttgtaaatatatacatatatgcatatttgcacttccagatgggttgcataagaatcaggtccttaaatacctcccaatctgatgaaacgatagaataaagtaacatttcccagaatggaggaatacattattttatcgtatatttttgtccaagcgatgagctgacggtggtattgcttctctgcatgttatcagtgtgtacatctggtgcttttcatgtgtcatttgtgagccacaaatgcaaagttgccatttgaattcagtcaggctacagggtggtgtcagtcaaggtctttcaggtgggggagaaattggttagggctcccactgccaaatgcaagcagatagcataacctgactgttatgtgccctcaggcagcatgcttagggacaactctgtggcctgggggacatctgtgtcacagtataggattgccattcaggtgttttgtacctatttctttcctgacgttgtcccctttttttgtactgatccaactgggagaacctcagccaatgctggaagtatgattgaagtacctctcttttgtgactcttgtacagcttaatgtgcaataaaggaaaagttatatctg

SEQ ID NO: 11347 - DNA, 1407 bp, Homo sapiens
ctcttcagacacacggggcacccagcccaaccgggaaaggcatctaagacattcaccaacaacagtcagccagcttggtggttatgtcccatgaccttgacgtgtgtggtcccttcctctgctctgttgtactaagtgatgttgtgcagcccagaaaggaccatttgacagtctcagggcaggtgcctacccagcaaggggtacctggcatcagagaggaaagagctgcttccctgtagtcatgagagcttccttctgaagtcatcgttcgctgtgagtttagtggccttattgtgacagtgccatcatgtcttattcttccctgtgaaaccaggattaatcgtggactcctggcagcttaacctagctcagttgcagtgctaagcatgccccgcccccattcagtgatacctgtttgggaagtatatacttccccaaaagtactcttggccctaagttttaggaactttccccgacctggatcccttgtcatacctgtgttactgtttaaagcacacccacccaacttacaagatcttaggctgctgtggtggtgaagcaccttgagtctgctgatattcgggagaacaaggatctgcagtttccccttttctcccctctgaagagtggttcttatgtgcaatctgcagtaaccttgaactccagagctgcactatagaggagaatgcatgccactatgacagcagtatgccaagctttgtgttcatctcctaataaacgttaagacctttggtgtaataaaagcagcagcattcaccaacatttgattcagccatgaggtcttgaccccttggccaccctttaggctgagagagtgtccatgaggggtgtgtgtgtgtgtgtgcttgagtgtagggagtgaaaaatctaggtgtgtgaagctgtttgtgtcagtttgtgtgtgtgactgcaggtgtacatgtgtttgcaagtgtttgagaatgtgtctgtcctttacataccacttctgggcctcctcgcacctccccagtgaatctgtctcctccaagacacctagccttccttcagcaactcagcgtttctacctatattacggactttgtaacctttcaaataagcacagaacccttgctcccggaggagtcaatttagactcacttgcctggtctatcatcaagctcctcagctgaggcccacatggtggtgccaatgaggctggaccaacctgctctgacaaccaggctcccacagatctcaacgaaggcatcctaaagaggcctgcaattgagggtgggctctgagggatttcactctggctgcttcatgactccctgatactcaagtatattttcccaaagaccacggatgctgtgaagataaacactacatctgcaccaataaaaaatccatatattaaaatgttaa

SEQ ID NO: 11348 - DNA, 210 bp, Homo sapiens
cagagagtcctgagccactgccaacatttcccttcttccagttgcactattctgagggaaaatctgacacctaagaaatttactgtgaaaaagcattttaaaaagaaaaggttttagaatatgatctattttatgcatattgtttataaagacacatttacaatttacttttaatattaaaaattaccatattatgaaattgctgatagt

SEQ ID NO: 11349 - DNA, 591 bp, Homo sapiens
caattcaacctcaaatttctaatttcaccaacaactatttattgagggctaggtaaaaagttctttttgttgtaatcgtccattaattcataagttttaaagggcatggtgctcccagcaccagaaaactatcagtgtttttaaagataaattacacaagggaggagaaagatccctgtgctaggactgcagattctatacttgcgttggcctctaactctccaatccagagcctcctgcctctggcgtcagtcttttccctcatccactcactggggagattggactagaggagtcctgagaggacacttccaacaagagacatttattctctgattttacctgaaaatggtagtagtttacatttatacagtacagtttatgaagcactttcatacgcaggcatctcttgttacctacatctaagctgttcccgaaagagtgttacagaacacaacagtattgtacaatattcgataagcatatcttcactgcacttgttataaaaatgagtggtgaaataatgtttggagacataatgaaagcgattaacatttggcaaaatataataaagcctttttgtaattggtg

SEQ ID NO: 11350 - DNA, 1456 bp, Homo sapiens
agagtagatggttgccctgcatcttgggctccatcggccgaaactttcccaagccagggtgtgcggagcttccctgtactgcagccaaggtgacgtgtgacttggatttgagtggagttgggcttagccttagtctcattcaatctccattattacagccatggggaagagtgaaagatataaagtaacctaattaaatgtatggaattgctatttttatagctgatatagttacacctcaagcccctcaggggtaacaactaacaaacacccaaactgtttggattgattgctttaaaaaacaaacctggctcttacctttgatcttttcttccccagaaatagtaaacttgcagctgcccctaatgcagcatatttttcttaccaaaggagtcttcagccctataaaaggattcctctatagtgtatttctctagtgtatttagtgtgtcgtcaaaattttgatttatacagagctttcaagaacacacaatgcaaagtgagcgcagcatagctgttaacaaacatacaacttttttctagggctttaagggtggtcatttttttcaagttctctcaagtgtcccaaatcagggtagcaatcttgttgccacatgtgcagcaaacaaagtggaagtatagatcttcttctcccttagggaggctcttgaaggagcaggaggtacagtactgggtagcagtctggccctcctgtcgtctggttggtgttggggcctccagccagggccctctaggggaaccaagcctctgctctcacctgtgggttcttgcccatcagggtaattgtattgagaactcaaatatacgtgcacttacatgtgtggttcgtactcaagtgatctattatctagctgcaaagcctggctttgatttgaaattttgtaaaaatttcatggcacccaaggtttctgattctgacccagcagtggtcctgaagagagctgatggcaagtcttgtagtcattttgattttaattgaagggtgagcataaccttgtgaaccagcactagcttgttccaagctggaatttatctaatctatttttgtgtttaaaaaagctgtacctaccaaataaataaatagtttataaaatgtattacttaaggtattagctgagtttagagtactttctgcttaattaatttttatacttaactcttcagtagaggtttacaaagagtacaaaggttaaattacaaattcattcccagcctaggctctgggcacatttcctgttcttgaattctgctcctgaagagggtgaacaaatggggcattcaagttgtgagctcagaattactttaaaaggaggtaacagccagccattacacctaaatttaatttattttattaaaataacataattgagggaccatcagataactgtattttgtcaggtgcaataaaaacaaaattaaaacccaaatcatcaag

SEQ ID NO: 11351 - DNA, 651 bp, Homo sapiens
cccttgctgccctgcctgtcacgtggccctgcctatccgccccttagtgctttttgttttctaacctcatggggtggtggaggcagccttcagtgagcatggaggggcagggccatccctggctggggcctggagctggcccttcctctacttttccctgctggaagccagaagggcttgaggcctctatgggtgggggcagaaggcagagcctgtgtcccagggggacccacacgaagtcaccagcccataggtccagggaggcaggcagttaactgagaattggagaggacaggctaggtcccaggcacagcgagggccctgggcttggggtgttctggttttgagaacggcagacccaggtcggagtgaggaagcttccacctccatcctgactaggcctgcatcctaactgggcctccctccctccccttggtcatgggatttgctgccctctttgccccagagctgaagagctataggcactggtgtggatggcccaggaggtgctggagctaggtctccaggtgggcctggttcccaggcagcaggtgggaaccctgggcctggatgtgaggggcggtcaggaaggggtacaggtgggttccctcatctggagttccccctcaataaagcaaggtctggacctgc

SEQ ID NO: 11352 - DNA, 502 bp, Homo sapiens
ggtgccagcacgggccacctgcgggtgtggcgcagcccagggctcacactgcgtgggagggactgggtcactattgtggtttttactataactttgtaaattaacttaattttgctgacttgactcctgtggcttctggacccctcctctgccccgcaggaggaagttccacggcaggtggtgcgttcccacgcaggcaccaagtggaagcttgcacggtgggccacggccgtggcgggtgccctgtgggtgaggctgggtgatgacctgaggaccagagacacgcgaccatgttggggctcttggactcctctggatgacccgtccccaaagttgacattccatttcatgttccactgtgattaattcttttcttttttaaaaaatcattttaaagttttttgtttaactataaagtagtacatgtacattatataaaaaaaagttcaactagtatgaaagggttataaagtaacagaggaaaacgcctcttggtcccttt

SEQ ID NO: 11353 - DNA, 4340 bp, Homo sapiens
gctctctcgggtcgacggggccggcggctttcctgctgtttactaacattagattctcataggaccaggtttacagagctttatatttgcactaggatttttttttttttgtaattgtcacagaaaatgtaattgtgggtatgtgtgcgtgcgtgtgtgtgtgtgtgtgtatcgtgtgtgtgtgttttgttttgatttgggggatattttgtacaaaaagaaaacccacgggaagatgtccgtggagaggcagagctttcatactgaattagatgtattttatgggaatttggtaaatttttctttgtatttttttttttacatataagtatatatacacttagagattgtcatatacttttaccacttgaattgatcttcttgccagcaatagatctcattttcaaaagcaattcttcggtgctgtgtagctggcagaaagttctgtccagtaaacgcaggatggaattttcctgggactctacacccatcttaaggtggtataccttccaaatcctggttcagatggaagaaatagcaggagagaggacccattagctggcagacccagggggaagaaaggagggctgtgaggagatacctcattaaacttggcttagtgaagaagagagatgccaaaggaatgaaccaacccttcacataaaggagactggctgaagctgaatgaggaggccctatagcagaagtctgattctaagagcagtagaaacttgtaccagaagcaaaatcccacttttaattttgagatggtgagtggatagtcagtagaccgtcagaaccactggccagagagggagctgctagagatccaagaaggctggcaggagtgaggctcacaactcagcctcgcaagaggtggcagaggcacaggaggccacagtccttcctggggcattccaggcagagaaggagcagaggctctcccggcaggagctggggtctcagggctcagatgagtctgttgcatttgaatggggtcatagcaggttctggtcattccccaagcaacatctcagcatctcttaaagttgcctgcaggaatgaagcatgacatacctgttgagggactaggggagtggtggggaggtgagtggaccaaaggatataggccccaggcatgcagatgggcccggtgtcggggaggggtgctttctttcctcatctccccactccccactctcagcctgggagactcctgccaagccctcattaaagatgccaccctgggctgccctggcacctagcaaggcacaccaagaacagcttttgagtctgtatcctccactgggggaagtgctcccagttcagaacaagggcagcccgtggtgctgacctaggatataacaaagctcttcacttcaaaacccctgcaatagctgggtttacagacatttaccacctgcggacccaaaagagaaggcctaggagagttttctagaaggttgggattgtcagggtcctggcccctcagaactggcttgatcaagggccttatgtggagcagaggttgtctctgaaccaggagagaaggtactatacctttcaaatccccagggcagacacacccccacccagcccctatttggacctaaactgtgccatttgaacagtcacttccaagctcagtctaaatgaaaccgaaacgtgaccacgcacaaaggcagtcactgcctcgaggggtgcagaccgcagaattttcacagcaggggctcttggaaccctggaaacccccttcttaaatttgggaggaggagtatgcctttggtgtccccctcccaaggggcaattctgaaccccatctttggcaggcatacatatttcactgtttccaaagctatctactctgccaaacaacacccagtcctattccaaactctcaacgattctatcttgttcctgtttttctatgtatttatggttgccgtttgtgtctgatttgattttactgttttttccctgattttatggagtagcattgtgacctgttttcctttgtcttatataactttagtaaactaaccactgtcaatgattgagggcaggtggcacgtggggaagaggggacttggcacgcagtggctacctgggcatttgtggtcatttcagtttccatctccccagcgggggctccctgggtgaaaggccacagtattttgggttggtaggcaaattgcaacattctggacatggcctgaggaaggcctcttcttataagattctcagaccaaattctagaccaaagacacaggcagaccaagtccccaggccccgcctggaaggaagtcgttcctcaactctccccaaggcacctgtctccaatcagagccctctcgcccagccagccctggctctgtgtgcagagcatagctctgcgagtacctgtgtaataatgctcaaccttcatgtctccgtataaacgaaactttccatgagagctcatgactctggtccacctgtctatagagaatgggcaaagtccttcacctgctttctgcttgggatgggtcagaaatgctgatgcccgcacatagcccagccagccagatctggaaaggaagcgagggggttgtttaaatcaattttttaagatgaagaagtgggagacactgcgttgagatgggccatgctagggccacagagatttcctgacggtcagggagagaagggcctccagggtcccctaacccaacgcccttgttgtaaatgaggtaactgaggctcagggaggcactgtgagccaggaatggattttcttgaaacagctctagctgcaggttctccgaggtaggtgcagggaatggtgagtgtctaaccagggctacatccagcaacatcctcaaggtcttcctgacaaccaaagacaagcctttatggaaaaggaaatgcgctcccctccatgttcagggatgaggggagcagcagcagccacactcccaccatcctcacagaattcctggacccatgcggtggctccgtgagctgggtgactccagcctcacctgcacaccccagccctgcacggggccctccttcctcccagcagcccttggtgagctaggaattgagatccctgtttgtgaaagagggaactgaggtgcagagaagccagaggtgtgccagatccttaggcaggatttagatgaagtcgccctggctccagactgaccccgaggctctgcggggagtttccaggcagcaggaagtggccttggatgctctccttccaggacagcataacccctgggccatgtgcagctccttcactgccccctggatccccagcatacccccaaagacagtggggaaacacaaggggagagcacagcatggcccctccagcccacttcagggcactcttgtatcacccgggtaccgccacactggtcccccacccagccagcatctcccagcacagcccctctccctggggaaatgctctgggtagccagtctaaaggcagaggcacctaactgctccccgcagcccaccccacccaagattcagacacaagccaggaaaggacccaagagaaaatccttcaaggtggcctgaggtcccatccctccctcagacccatgtggtcccaggccaggctgcctgggacacggtaaataccactgtgtgcaaaaatcgaagtacaaaaccacaagactaaacaaaacaaacccagagagccaaacttgtagaggtgggcagtccagaaagcagggggcagccctccccctttccttctctccctgatcctcagaatatatattgttgtaataggaagcatttttgcattgttctcttgtgggtgtcactacagacatgttctggcgtgttctccgagggatggagcatcctgttatatatttgacttcaaattgagatgttggcttcattttttttttttacccaattaatctcccaatccctagcaactgtgactctgtatttagcacaagagaaagctgagaatgtgggtcttgcctccttccagaaatatgtctggctcatcaggacatttttttaaaacttcaaaatatttttaagatattttaaacttttataaaaaaaaaatcaaccaacaagagacttttctgaggaggaacatttgtatttgaacaagatccttggtgtgtagttcagtcttgcagtatacaagcttttgtgtataaatgttttatgatatgattccctgtattttgcaggggtttttttctcttttgctttttagataaatatgtatatcaatattttaaattcatctttgctttttttagaggagtttgtaatcaccttataacatgaaaataaacatttcctttttaacatcc

SEQ ID NO: 11354 - DNA, 1884 bp, Homo sapiens
aaagaccctggcacccgcccgacacctgcgtgagccctaggatccaggtcctctctcacctctgacccagctccatgccagagcaggagccccggtcaattttggactctgcactccctctcctcttcaggggccagacttggcagcatgtgcaccaggttggtgttcaccagctcatgtcttccccacatctcttcttgccagtaagcagctttggtgggcagcagcagctcatgaatggcaagctgacagcttctcctgctgtttccttcctctcttggactgagtgggtacggccagccactcagcccattggcagctgacaacgcagacacgctctacggaggcctgctgataaagggctcagccttgccgtgtgctgcttctcatcactgcacacaagtgccatgctttgccaccaccaccaagcacatctgtgatcctgaagggcggccgttagtcattactgctgagtcctgggtcaccagcagacacactgggcatggacccctcaaagcaggcacacccaaaacacaagtctgtggctagaacctgatgtggtgtttaaaagagaagaaacactgaagatgtcctgaggagaaaagctggacatatactgggcttcacacttatcttatggcttggcagaatctttgtagtgtgtgggatctctgaaggccctatttaagtttttcttcgttactttgctgcttcatgtgtactttcctaccccaagaggaagttttctgaaataagatttaaaaacaaaacaaaaaaaacacttaatatttcagactgttacaggaaacaccctttagtctgtcagttgaattcagagcactgaaaggtgttaaattggggtatgtggtttgattgataaaaagttacctctcagtattttgtgtcactgagaagctttacaatggatgcttttgaaacaagtatcagcaaaaggatttgttttcactctgggaggagagggtggagaaagcacttgctttcatcctctggcatcggaaactcccctatgcacttgaagatggtttaaaagattaaagaaacgattaagagaaaaggttggaagctttatactaaatgggctccttcatggtgacgccccgtcaaccacaatcaagaactgaggcctgaggctggttgtacaatgcccacgcctgcctggctgctttcacctgggagtgctttcgatgtgggcacctgggcttcctagggctgcttctgagtggttctttcacgtgttgtgtccatagctttagtcttcctaaataagatccacccacacctaagtcacagaatttctaagttccccaactactctcacacccttttaaagataaagtatgttgtaaccaggatgtcttaaatgattctttgtgtaccttttctgtcatattcagaaaccgttttgtgcctgctgggagtaattcctttagcaattaagtatttggtagctgaataaggggtcagaacttctgaaaccagagatctgtaatcatctctattggcctggggtgcctgtgctataaatgagtttcttcacatgaaaaacacagccagcccaagatgacttatctgggtttaggattcaatagtattcactaactgcttattacatgagcaatttcatcaaatctccaaactcttaaaggatgctttcggaaaacacgctgtatacctagatgatgactaaatgcaaaatccttgggctttggtttttttctagtaaggattttaaataactgccgacttcaaaagtgttcttaaaacgaaagataatgttaagaaaaatttgaaagctttggaaaaccaaatttgtaatatcattgtattttttattaaaagttttgtaataaatttctaaattat

SEQ ID NO: 11355 - DNA, 220 bp, Homo sapiens
aacaaagaatttgtcctgtatggaaaacgggagactttgtacagtggcctctctaaaagtacaaaacattcataagagaaacctgcatacattttgatattaagaaataattccggggattcttccactcctgaaatgagttgatttgcagataactcacaacttcttaagctaaatggtattttcatttttctcaagctctccaataaatatgaccacc

SEQ ID NO: 11356 - DNA, 1463 bp, Homo sapiens
tctttcaaagcacgctgacttgggtttgtactttgacagtgcctttctctcccagagggagaaataactttaggaactgaattgtacctttgtcctgtcctttccctaggaggcacagacttcgggttggatttgtcagcaaggaggaaagttatggaaactttggccacttggctgttcattttattctaagtgggatagggacatacctacctggatttacatgtgagctgcgatagaatagaagtatttattctgtaaaattagacactgagatgtgcttataaccctgtttcatatctactcccacgacttactcatatttaagggttcttttccattccttttgcaaatccgagcatgcaggtgtctttattccaagggttcagcttccagatcagccgatggaccataggtcacgaggaatttctccctgtcaagcagtggaaaactgcatgggaggcaaaatgctctgttctccaagaggacccggaagtaatcacataggaaatgataaggaagaccaggaggagctcttcgtagtccagaaaggtagaagtgggagttgtttacttaattttactgtcataccatgctattacctacactcctgtgtgcagtgggcattcagtaaatgtgtgttgaaggactgggacgtacgtggaggctgctggacctggtcagagactgatgtgccttagcggcaatggttagagcttttcagtgcatcccacctccctgtcgcccccatgctcggcttcctcacattcaggagcctgacttggatcagacttggggctgcacagtggagcaggtgggttcccgtgtcattagtaataaggagagggttgggggtgggcagggctccagaaagtcagcagtgtgcctgggcacccaccccatcctctacctgccacacctcagagggttcctacagctgcacacaagcagttgagagttgatgaccaggcccatagggctcccacagctggttcccaggccagtgagtgctgtgagaatacagtagcacaagtccttgttctctgaagagtgggaaggagaggagtgagtgaagtagcctgtcccctgcaggtcctctgcgatggcattgtctcggttcccgcagtgctgcagtgtggaagggagtgccccatcctcattacagatgacacactggagtgtggaggggtcgatgacttgtgcagggtcatatggtacctaaggggcagatctcagacttaaacacaattgatgtctaacccctagacagtctttttagtgccctctgctctcagtcttgttgccctagtatcaagcaatcttagacaaacatcctgaattcttacaaacttacctctaaactctgaggataaagttgccagtccttttaatggtcagcctaatcattctgtcagcctaatcgggtaattgctttttttaataaatacacataaaaaccaact

SEQ ID NO: 11357 - DNA, 158 bp, Homo sapiens
cgccatcctggcagcagccaagtgagccaggccccggcccggggtgctggggcttcttgccagcccagccctgcctccccggtctcccaccctgtcctccaagcttctataataaaccagcgggcctccagcattggggtgaggctctggggaaggac

SEQ ID NO: 11358 - DNA, 1221 bp, Homo sapiens
cagttatcaagcatgtggacttgtaacaaattcttaggtcaatatgtgaatgcttttagaagctaagctgtggctcaactcatccggacacacacctggattcagcaatgaggcctgaccttttttgctataaccgccccaccactcccctgcccttgccaacatcttcatgaatggaatccttaagggatatttatggacctctccttttctgtgttttccacccctacccccacccgccacccagtaataaactatttccttaccccgcagtgagttaaaatttagtaagatgaagatgtggaaaccaatgaaaagtacatttagaaatgcaggctttttagtagaaagaagctcttacagtttttactcatgataaatcttatcacctttcaaaaattgattgtggtgcctcaggtgaaatgagaagctatcagtaacagctactctcatcgaaagcactttattattttacggagctgcaacctccaattttgtgttttctaagtgatttacttaagtcaataacagatggaatcctgtggactaatgtgccaccagttttctaacaagggtgtacataaaatggatttgtgcagacctggctgtggcttgctggtgtgcaagcacacatcactttagaggggctgcgccccaccagataggaaggggaggattttctcctccagtcgaccttgtgacctgtatactaacataacttattaaaggaggggtccctcctcccccagagcagtcctcaacactatgtcagtgctggaaatgcagccactggcagatctggccccccagacgtcaccgcagggcctctgaagagtcaaggtctgctttaatttattgtgtgcctttctgtgtttacctcactcaagctgacaacattgtttatgggaatctatccttcttttagacacacggtaatccttgggctgtattactgaaggctttttattttttgagaggtgaaaaaaagagaaaacaagttagactccaaaggtgaattcctggtcttggcagatggctctgggaacagcgagggagcacagaagtcgtggcctgaggctgttctatgggcacttggggctaaatcgcctcctgagggtgactgttgcttattctgctggacaggtttttacataaagcaaagggcatgtgaggggtgggattccttgttactcttactgcaataaaaatcaattgtttgat

SEQ ID NO: 11359 - DNA, 6263 bp, Homo sapiens
cgcaaaccacacacctgccaaggagcaacagaatccttccaggaccgttcacatacaaagaaaagtagtggtattttggtatgtgcaaatatttccatatgttagccatttcctgtctggtttctccttatctgttaatcccagacaatagcaattaaaagactagtaggatcctttcctgacataagaaatgttttaatgccttttgatgaagcagcagattttggaacaatcttttaactcaatttgtatttagaaattctcaaagggcaaaaaacaaaaaaaaaggttttataatgtcagagactagtattaaagaaaactgaaagaacctgagagaatagtatgtgtgtatatatatatataaaaaagtccttggaattatagatactaattaccagggtaataatattagcactttctaagcacttatcaatgtgtaacgttagcaacatcttgcctgtgggcagggcaaatggaaaactgtgtatgtcttttgccgaaatgctaatgatttctgtgaaaactcactagggtacaggagacaatcatttatgtttaagaaaagaaggcatcattcctaattgtgtgcacatgttgtggagttgagctgaattctgtgaatggaaacgtggctcatttgcatcatgcagtaagtgggagtgtggtagcacagtcggtggtgacccagttcagaagcttctagccatagagcagacacttgtcaggttccctgactacttggtcctggtctctgatgggcatctgcagactcctctagaacctggggttctcctttgatgactggttatctgaattggattgcaactagtcagacattaactgccaaatgagatgtacagttcctccagcaagtgaaaacatccccaagtcacatccgccgctcgtggcagatggagccttgtgaccaaaaagtgcaaggtgggcattttgagctcttgacagtacttccaatacaattgggggtgcttgtgtgtttgtccagatggaggagtgtggccttggagtgtgagcgttaccttcccagggctttccactccaaatgcccccttgaaaagggctcgtgtttctgcagctccatcataactgtgaggctggattggggctgggcaggagcctgctgccgcctggcgagagtggttagggcctggtaaagctggatggaaggtttcaggacaatttcttcctgttgaccttaaataccagagattttaaaaatgtgtatagactcagcatctctgttggcaagtctgttaatgttaccagcacactgtgcactttggttcccccaggtgtgtgccagccgaccaccccggagcattttaaatgcaggctgcttgctccttaaaaacaaccctcaatttccagggtgatagtctttctcctcataaattgtagcaaccagagtttacagcaagaacagtatgcgcttaaaaggaagttatgtctaacttcaaacacccgtaaattcccacggatgtgaatatatagcaagcttttcctgtttgagaacagtggcatgtggaagacccggtcaattgctttgtcttttgctttttaaatagtccagattaagaaaatacaccctgttgggttaaatttgcctctcttgatttgttaatcagatgatatccaaaaagatccctggacactcccctgactcacaggtgctctgatctggctcaggctggcgccacatgtgctccacaggggtgcagtctggccagctacagacgcccctgtggtgccacattggacagaatggaagctgctgcaggctcaaggcagaacaggatgcttgatcctgaagggttagcagcactttacgcaagtcagtgttagtagggtaagtgggaacagtgtttccaacttctaaattcttgtttggatttaattatatcattttataattcttgccttggcagcaaattttggagagtagtgggagtggccattataaaatgatggaaaggatttaattttgccagcttaaagtaatttttacttttctaaccctgatgtgttttcagtttcaaaattaagacaaaaaaccagctgagacaatggaattagggcaggtttgtttcatttctgcttgtgaaggcttttagtagcaggcatcctgcagctcagtggtgcctctaacacagattgttgcctgccttccgtcgttttgatccttgagagtgaccatgagggccatgttgcagttccctgggaatacaagcataacagctttcagatcccagttcttggtgttggtgaaaaggtctccaccagcccctcctctcattcccaggtcattcagtggcagccagtaggctgcttagactcaggctggataaggaagtgttgggctgtggtgaaacaaccttgcagaaaacgtgattttgcttggaaaggtgctgattctaacctggtcctgctctttaagtccccttgctggtgatggctgattccagggactgttttgggctttgaacacctcttggttggtttctgagatcctcttggccttactttgaagtggccttttctttaaggatcatgtccacgtaacctgtattcttgctgctttaactcatttcaagcctctgactgcaggtccatttcatctcctgtcaggttggttaagtaaagtcagcccaaagtcaagaattacttaaagagatgcaaaccaaatatttgggctccaactttcacagggcttatagcccttattagcagtttgtgaaactttgggtttcatgaagtgagacctgtcctctggctactgaactccatggagccacgttcatgctccctcttctactggcctggctgctcctccctcaatgaggagaggcagctggctcagagaggtgggacagacacatgctgtcatcagttaagtgagctcttttccagaagtatctcagataatgttgggttaagacagatagatgttgaaaatggtggagatcattacacattagcataaaacaggacaggaagagattttttgaaagaccaaattagttgagcaagtaatacttttcaagttactcctggaaggtgtttttaaggaagtgtgttacctaccatactctcctaatttgacatttctgtgtcctgaggagttacatttattgtctaacccttgccataaggctgtggtttgaggttcttttgctgttctgggctttatatttaatttcaggtgtagtcacttctaagatgtgtaattgccctcaagagggactgatttttagcttgtcattgtcagtattgaatgtggactcttctgaggcagttaggacaccagccatggtgttaacagtggatgcgttaggctccttaatctcaaggcaatatccacgctacacacatacttattagctgtcttacttgtttgggggatagttacggcaaggagcaaaaaattctaaggactctagctgtttctagtgcttttactttcatagtcctttgaggacatttcctgcagagcactcttgctcacagcccgccctctgcagggcttccagcccctggccgcaatcagcagttcatgccacatgtgtacatccatgttctgggacctgatctcattggagtccagaagcttgttgcccactttccagtgtaaatgactttatgtgcaatggggtcataggtaacattttaactcttttcttagtccaggtcataggaagtctcatcatctgacagccacttttctcccagggaaggcggtgcccactgggccctgggaatgcctgagccagcagagcagatgccccacgtgcttcctttatccagcttccattctctcagttatgaggctctttgaaaatgtcttaactttgatgtaaatttttaaagccaacccctcatcaagacagggttggtttgggtcttttgtacacagggtctggaccttctcattgtgtgcctcccaccagcgtgcacttcgtatgtccagccctgggtcccttcagcagcattgtgcgtgtacaggtttctaggctgtaagactgaatgaatgtacatgtgtttatatcctctccatatgtacagtgtatatagtgtgtgtatgtgtacatagatgtatattatgtatacagacatgtatccaaactttcctttaaagagagtttttcataaagttgctaatgtaaactgatatgggtgttccaaggtccctcggcagggaagatttgctggtgattttcttcactccattttcctttgggtgagcctgcctgggaagggccatgaagtcagaatctccactctgcaaaaggaagaattccaggcagaagaggttctgacagggtgacatttccgtatattctctaggttcggacaagagccaggaagctggaagacagtttatcttaatatccaaaactaagtgggaatttttaaccttttcatgcacctattcatggccctacctggaaggaacttggcagttgggttgagccatcagccttcccagctattcagctctgttgagtagcccagagacaggcgtcacggtcagagattcagaacggtctgtgtcagtgaggcctgactcccaaagatggtagcaatttcccaggcttgcgctgtgctcagtcagcaagatgtggggcactgtcctatgactgaataaatagtaattcccatctttctatcgccagttaaaaataaacaacctaccaagtattattctttaaaactaagcatggatgttgatggctaacttctgcggcatataagctacagatctcaagttacttctctaactgtaagcatgtaaatgactttaactcctttctataagttatgattttaaattttcagataagaattgcattttaatatggatatgtgtgcccttaaaagctacagataccaaattttcctcgtccaggtctactcggacgaattttcccccttaatctggccttaaactgagactcggcccttgagagccagggcctggcccagcagtagttgctcatagacctgggaagcaggggcctgctggaaggaatcactagattgctgcaaaaactcacataatccacagtttcctctttttctttttaaaataagttatcaaaatgttttaaaaacactttatgagaccatagtactcagtgccttttgtgagacagtgggtcatttagccttcagcttccctgtttttgatgtagagaaagcttctatttcactggcctcatcccacaagattgtgcgacctttccccgtcatagcctgtcgtgacaatcacgctattgaaagtggctttctagttaaaatgcaattggaaacttgacagtctctaaatgaattaaaagtttcctttggggctatttagcttaacagcagtctacaaataattaaagtgtgagcttaagaaaagtatctttgcggggagaaaaatgtcagatatttttaatgcccagctataaataattttggtgtcttgatatttatacatgcaaaatagaaaaaaaatgttcaacatttattgattgatagactgttaaaatttaatgtttggaataacatttggaagtagtagactttgcattaaaaaatggcttttctttaggaaagtataatcaattattttaatgaccatagcattcatggactcaaatgctgctgccacacacaactcaagtgctggaatatttttctacagtctctctgttctacggattatcttgtaaaccagtgttcaactagttttataactgaaaagctgcacatttttcacagtacaagccgtagtttttacctgtagtttggacttctctgttagaatgtaactgcattaccagcccttttaaaggcatctatctatcaaaggaaaatttgggtgttagattttcttgggaccgtttctgtaacctttgcccttcacaatatagaaaatattggttttgccattacattttaatgccaggtttaaaacctgttgaaagctgcagctttatacagctttcttctccctgtgaaatcactttgtttatgtgatggcatttaaaaaatagcatgttctttttaaactgaattttatatctaatcaatgtcttcagtcttgaagaagaatttgcattgttgtgtttgtatatagagtattgcagtgcatgaattagctttatgcattttattaaatgctgtttcaatgtggcattattgttgtggcttaatactactacctaaatgaggtttatactattaaaagtgaattaaagact

SEQ ID NO: 11360 - DNA, 1655 bp, Homo sapiens
tggagaaatctcaagttactggcttttatacttaccaaacatcagttcttcaaataaggacgcaaatcttcaggacagtaagcagaacaatcagaatggaattaaatctctaaaaacgtgttacagtggaatctggtgcttgtcagggtgtttggtaagaactgtatatagtcagaattacctaaatcacctagaggtaccgtttacatggttttgtgtatatagagttggcttgcattttaggggccattttgtataaaaagtgcatatgattaaaattagactcagtcatcactgtgagatgcctttgctaagaggataaaggaactgagaccagatgagaaaaagaaaggatatagattccttgagtggaatagtgggctagattaatataccgaaatatttccattgtttcccttttttgcagagcatgtggaagttaaacctgcttgattctactatacatcttgggcaactagttaccaaatgaattgtgccaccataactgattttaattttgcattatttatgattttaaaatatttgttgcccaggtgttatgaaagaataaagcttttaagtatagactaccttagcatgaagatgctcatgcctaagaatgaaaattgttgaggttatctcccattcaatcatgtagcaagaacttaaagaaattcactactgcagtttttatttttaaaaaacagtaattgagatattgaagacattacaatttagtttgtgtggtctttttttaaattgctgtatcgttcagtctcttgtggcaatagcactttgaagaaaatagagaatttaatatatggtgattgggatatgtagcattcaaaaaaagtgaattgccaagatactggtgtcatgtaaattcccactttacataaaaacccatcaggacagaatgatgctcaatattttaaaattctaaaaatagggtgggatttttcattgtctctactttataattatcaaaacttattttgtattgctactaccttaaattgaaataaaatgtttatacttacggatattgcatagtttaagttagatttattgaaagatttcatctgtcgtgtttcatgtaaatgagaacagattatttgcatgaaaatatatacttcaacaaaaatctgttctttaacagagtagtggtagattattacactaatgagatttcactttggtaaatacttcatgctttcagttttagcctattaattttaggtggacaaatttaacaagttttctgttactttttaaaaagaaaaaatccagaacataagaactatattatgaacacatgatttgaacctgttgtggtaaagatcttgtacaggatgcaaactaaaaacctaatccctgccatcaaatttattagaagagacctatatatgaacaacttaaaggcactgatttctataatagagctctaaaaacatgccaccagtgtatgaataagggaaagattaattttggctggaccaatataaaaaattgtatttgaagaattgatactttaacttggaccttgaaggtaaagcttcaaaagacaggttactgaccattgagtgtttactatgtacccaatgtgtatatttttctttttaatcttcccaatagctgaataaagtatagatact

SEQ ID NO: 11361 - DNA, 3457 bp, Homo sapiens
tgctggatctttcgaaacctactttttggtgcacaaacatgccgcaagactgagctactttggcgtggagtccattgcaagaggaaaatgttatggatcagtgactgtagtaggagtttgaggctctggaactctcacatattcaagtctttaacttagtggtgatgggtgattttctcgtgtcatttttgaacaatctcatctttcaaagtttaagtagacctgtagaagagctaacagaattatatttctatttagttaaaattgttaatgaaaaacagataaatgtgccctggtctaagttactcaaaggccatatcttcaccaggccagagattcagttttaaacctcagcagccatcagtttggccaagtggttggtaccagtggaatgaagtctttgatgggtaggagagagagggaaaacctcaaactacatcatagaagtatgttaaaaccactttaaattgttgacacaaagtggtaaggaagttttgtctgactcagcctgacaagcctggatagaaatggacctcagaatacagaatggagtccttgagtgtcagttggtgaggaccatggagtcctgccagctcaacctgtcatttacagactaagaaagggaagtacacacctggcttgtggccagtctcctgccccctctctgggctttcctcactgttctctcccttgaatctcatttgtaggaatcaagagattcctatacatgggacttttagatgtacattggcacttggattagattccaaaagacaaaagtgttgggtgcttctagcttgaattcagtccctaaatacatgaggctgggtgagcagatgaaaccggtagccactgtgctgatgcatgtgactccattcagttggggattttggttccatgtggatccatactaagtattcttcagtcagtggattttagcaaggggaggtaggagtggaagagaggtgtgaagaaacctctccgaacaaatgaaccagcagtaagtttctaaaaatcagaatctagatagaagttctgcaatatgaaatgagcacattctttgataaggcgtatctattcatgcttttgtaccactgttttgtacctgactccctgaccgatttgtattttttatatacaactagaaggaagtcacaagattgccttctacagtgtgccatttccaaatggatctgttgttggaggaaactggttgctagtcaatgttctatatttaatgaatgtgtgataaatcatcctgtaatcagtatggagtaacctgtttttgtagtttggatgaatatgtcctgagaaatttccatccactttggttcagcggacatcaaggtagtaataataatttttcctccacaggtccctccactcatatggcctctccctccccagctagtggaggggaagcagtctggacttagaaaggaaataggtggtctgtcataggggctttcattagagttaaacttcatagagtcaactgtttcatcatcatagtgagcccagagagccactgcccagcagcatgctcacaccacctaccctagtgtaggtaataggtctacgctaggaccccgtgctgggctctcagcccatcatgagattttggtggatttaatggcaggtaggaacttatttatagtggattgataattgctttataattccttggtaatgacagctcagggaaggtttcacaaggtcatgatcaggagacttgaattgttactggatgtaggaattgtttcactgctcttaacttgctcaaactggggcaggttccaggaacttgaactaaaaatatctatttaagcctctctctctttctctcctccccaacttttttctgaaagccttgatttctgtagacagaactatggtttttggcatgttgggtcaagacgtgtttctataggaaatgcttgcacgtggcactggcttggtgagtcaagcttcctgagcttcagaccgtttgtcctgtcatctgtcctgcccaacactgtatggtttttctctagcacggcttcaattttgttctctgcacaaagcctttggtggttctgccctctgccctccagctttacccaccagagtaagcaatcttttctttttagaaatcaagaatttggcttcacagatggcttctcacagatgccctcctgccagccaaaccggacttgttcttcctgcctctgtgccttctctcattctccttctctccctccataccccacttttgaggttctgtgggtaccatctttgtggactcttgtcttttttttcaacccacatggagtgccctgtgtgtacatactgaccttttttttttttttttttttttgcttgaactctggtcggtatgagctccttaaaagcaggtactgggctggctgtggtgactcatgcctgtaatcccagcactttgggaggctgaggtgggaggattgcttgagtccaggagtttgagaccagcctgggcaacatggcgagaccctgtttctacaaaaagaaaaagggaaaaaaaaagcagggactgtcattctcatctcctccctggggtatccacaggaatggacattcaaatggttgtagcctggtggggtagaaggcagagaagactacccagccagtgaagtgcagaggatagacataggaaaacattccaggcatttggagacagctgaaagtatccatgctgactttcatgatttagaagtctttaactgaattattaaaattgccttttttttgtgctgtacaatgtctactgtactgtgggtcatttagatgagatgaaaaacttaattaaatctgaagtgtcagaggcgcttagtaagccttagtaaagttgtgattgaagaaacttaatacaaatgaactagaggtttgtaatcatgccactcactaacgattttatttctgtagcagaatcattttttctatgtaaggtgttaatgtgtgtgtatgtgctttggttgtaggaaaacttgaaaattccaaaatccttattttcctatttgagaggctggttcagcagggtgtgtgtgtgtgtgtgtgtgtgtgtgtatgaatggtatatttattacattattttgaaagagaattagtgtgttatgtggataatgttatatacagccaaagtggatgtttctatttggcaaggaaggtaggatttctgaaactcaggccttaaccaataggttggaagacaagaccaattgaagagttaggaaatgtgagtttttgttacttctgttattccagtcttggtttcattgtctcattctttatttttaaaatcttgtgcctaaaagtttttttgcttaattatgaagtagacatgcatgtttacatttatgtaaaatatttgctgtgtaaagtattttttgtttattctcttaaaagatcactatatttaaataaaagtgaaggtcagcaacac

SEQ ID NO: 11362 - DNA, 329 bp, Homo sapiens
gaaaagtgtgtggtctgtggggcggactctggccatcatgttgacagccttgcacttccacaggctacaagccctgggaccatctttctgccttaagggcaggagcccacttctgtggcaccagattccaccctgggaactgtggaaaaagtaggagaggcagattccctcagtgtcttcctcttaaacctcaatcatcgagacattagggggtattttctgttcacatttatctttttcaagccacatcttcctctaacaaatctctcagtatgcgattggtctcaagctaaaacaaaaataaatgtcagtttatattttacacatcc

SEQ ID NO: 11363 - DNA, 1142 bp, Homo sapiens
atgtcaatgtcagaaggaaaagagaattttggccatcaaaatccagctccaagtgaacttaaagagcttatatatttcatgaagctgatccttttgtgtgtgtgctcctggtgttaggagagaaaaaagctctatgaaagaatataggaagtttctccttttcacaccttatttcattgactgctggctgctttaaaaaaaaaaaaaaaggatccattgtaccgttgtcttcatcactgggaaatgattattacatagtacagaagattctttgtttttctccactgagcacttaacaattgctttctctctggcctggacattctctggcagcacctccaggatacataaattcaatggatcaatttatttgtcttcaaatggccttaacttggattgtctgtttggccaaccatgaaaattaaagagtgaagcagatgtaatggcctgacattccaaaaactctgaattgggtttattagcacaaatgttgtgttcatttgttgagccatatctcagaagaaggaaagggagctacagaaaggaggtttaggattgcagagaagatgcaagagcactttggcccaattctccagctcaacccagcagctgaaaagcttcaagagatctaggaaaagacattttcatgttaatgagaatttccaccattgtagagaatttccttcctactgagaatctacctctattccccctgccctagctcttctctaacttggttaaccataaccataaccagattcccttgcaatcgatttctctttagtcgttggtgttagaagtaccagcacaatttgagcattcccattaacaaaggtgttcacagttgagaaactctcctgccgggcgcggtggctcatgcctgtaattccagcactttgggaggcagagttgggaggatcacctgatgtcaggggtttgagaccagcctggtcaacattgcaaaaccttgtctctactaaaaatacaaaaattagctgggcatggtggcgcatacctgtaatcccagctacttgggaggctgaggcaagagaatcgcttgaacccaggaggcagaggttgcagtgagctgagatcatgccattgcactccaacctgggtgacagagtgagactccatctcaa

SEQ ID NO: 11364 - DNA, 2524 bp, Homo sapiens
gaggcagacaaaggcagaaaaaataaagaggtgagatctactcaggagagctcctgtcctttgtggcatgattaattttttttatctctacttgagttgtcttattttttaaggctataaacttagtgaccagctggataataaaagccagctggcagacttaaatgataaactttttgcaaagacctcagtgatcaaactattttttactatactgattttctgttattaacaacgatttaattgtctcatgatgtaccatgattggtcagtatagatttttcttttgtctttaggcaaaaaaaagatatatacttatgtctaatcataggaaaatgtgatttttgagtataaaatgtgggctagctttaaattatttgacagccatctatatatcttatgtttaatgaaagtataatttaaatacaatcttaataattttactttgaaaattctttttatttaatgcctttgtttactgtaccatggcctacagtcttatttggtccatcaaagttaagtttggacatggaaaattgttaggaaaactgctttagggagttaaatatccagcatatttgctttcttgttaatgaatatcctaagtgtgtatcctgactaattgttagtttcttctcaaatgaaaccctttctgtgtcttggctgtctgccttaacgctgtaggaggcagcttcttgcttgggacaaaggcattggtgatgtgttccatgttgaatctgccttcagtgcctgggctggcttgctatggaaatgtgcttagcattgattagggggtagagagctgtttctaaatcctgcttttctactttttatttcactcatttgccagaattgttcttggcaccagcagctccttaacatatagttgttgaatgactgaaagaaagcaactaatgttttaactccttgctaagtctgagattgggaggcagtcccctagagtggatagaaagaatggtggagcctcatcccaaagctgctctgatgaaactgctagaaagcagattgtagttctttgtttagatttttaaaaatccaaaagaagtcctgactgaggccaggccattccttttatgacaagtagtcctgggcccaaggttgcctgcatagagatcacaggagggtgaagggagcctgggaagaaggacagataagtgctggagacctaggagctccagttgagattctgttctggagcggatgagagaagacaggttaccctttcttatctttgttgttgcaggcctcccagggacttgtgggcttgaacagatatgattcatgggacctgaaggtgactctagcttctgcccagttttgagttttgtcaagttttaagcagagatcatttgtcaactattttgatcccagatttgaatttggggaggaagggaggagctactgacctgatgggaatatcataatccattcaaggaaatggtcattagtacctcagaggtgaagggaatatgtgaagctctggatcactacaaggagccctgacttaccagttggccccaaagtgcccaggctgagggcataggagcatgatgagatgcaaggatgtgggattatcaaggggcacgtctactaactggtgaaggcagtctgcgggggaggacacctaaaggtatgcggaaagtacctaacccagacctctctgcattaggagtggaggtgcaaagtgagcatctccagtgcagcatgggatgggaagatagggaggtgtcgcccactgtctcggtttagccagcaccacggctggctgtgtgcctgctactgtcagagagcaagggtcatctgtcctgcccagctatgcctgccaccctgttgctgactcagtattggcagaattgctgagatgggccaggtcatcacctttgcctggagtgttcatcctttcagtgccattattctggtgctaagtgctgaagaacattttcaggtctagccgagaatgtcctcttgctcttgcctgccaggcctgtccagatctttttggtacttaaattgagctaactccagccagagtggcttggaattcatagtgcggtggctcagagtataggctcgaaagcccttgagccagattgcctgggttcagatctcacctatactacttactaggtagatgaccttgagcaagtcacttaactgctctatgcctcatttaaaattacatacaactacatgtaaaagggagatgatactgctgcctacctacctacatgatagggctgttacggggattgaaggtgatcatacatgtaaagtgcttggcagagcactgcatgagtgtgttgtcgttattaatttgctattccttgtcctattcagaaaggatttcaagaggctggatgccttagatgtggtctaacttgaaaccttcatgtgggtgtgcgtctgtcttgtttattgctgtgccaggcacaaaataggtatttcataaatatttgttaatatgctcagagttgataagctggattaaagtgacttcttaagg

SEQ ID NO: 11365 - DNA, 681 bp, Homo sapiens
ggaaacttacaataaaccattatggagtttataactctaggaccaattgtagtcagatgggacatttgctttgcactcactaatgagaataatattcgggattttaaagcacaactggaatagctaattacagtctattaaaactgtgaatgtatgtagcaatcctgcgtgtgaaggcaaataaactctttaacaggcaattatattgctggccaaaatatgctatatttgtatacaaagacattctaactcagttccagtatgaagaaagattattcactctagctccactgagaaacattttcctaagtgaaaacaatttcttaagatggaaatggattggattgtcaaattattatttattggagaaaaaaacctgatctacacatttttacttatatggggttgccagagtctctgggttctagatgattttggtggcatgcttgctgagccataattactaaagagaatgtaagtggacgggttccctgaatccccggggtccttggagagccatcgaggagaatgtgcaattggactgaagctccctggctgaagatacatgccgagtcagcacatgggtagagatgatgtaaaagcagccaatctggaaacaatacattgtaaatagtttttcattgtatgaagtagtgttcacattaaaaagatgttttatga

SEQ ID NO: 11366 - DNA, 1544 bp, Homo sapiens
tattagtgcccatgatgcagcagctaatttcaaacctaccactgcatgacagttttagtttgcctttttgcctctggtgggcatgaagactgagcaaagctgggaatcctgcagaaaagagtgtgaggagccagggaaaggcagaaccacctccatgctgtagcaaacaatttctagatactagaagcataatagaaacatttttctgtacaggtattaaactactggtctgtttgacagactttggtaacaatccaaagaccctgagggtctgagcagctagaagtcctagacaaagaacttgtggatgacttttgtcccatgtggcttttgtgaagtatggcaaaggtttttcatgagtgcctgattgttattcctgaacaatatccatagcactgttggcctcaggagtgcacagctcctgctgatgtatttttctttttgtgaaggcaaagggacaattatcactgcatgtcatctcctagacaatcagtcaaatagagctggtggccagtggttagctattcgcacgttatttgccatgtaaatgaaaacgtctttatttatcaaaaaaacacagaggctatttttatatccttggtatgaaatatgtatttaaactatttaaatatttataaagaaatgaatgttttcttttcattttggtaaaaaaaaagcttgctgttttaacaagaaatgcactactgttgtgtatagtagatcaaaaattatttattactaagaggatgtagtttccaaaggaatcccccattttttctgcatgcagtttgcaacaaatgtattctcatgcttctggattataaaagaaaagtgaagtcatattttgttaatgaaataaaaacatggactgagtgtcaactacatgagctttggcatggggatagagaggctccatctaggctctgccaactcatgtcaatgacatgatttaaggtcgttgtgccagcagaaatgtctctcctctaggtatcgtattttgttgctcaagaatccaaaatgggtctgtggacatagggcaatttggggctcaaagtgagggagaaaacctgggtgtgtcctttcccagtgcttttcttttacaagaggtagtagactagtggaaatccccaaatggagccaagacttctgagctataacttgtgggagtaataccagcttgcaatgggtcagcactttaccttttttctttaaggctcccaacaatgctatacagcgcagttgtttccattcctatttttaataaatctcaggggaagcctcagagattacacagttaggatgctgacacagtctagaatccataatgctccctacatctcacactaacaggcaaattcagatgctgggattggcaatgatttaagcaccttcactaaagtcttattttatgttttagaacagttacagtctaattgtcttggacattttgggaagatatattgggttcacattctggagttctctttattttccaccacaaaaaataatctgagaattgtatcattaaaagtatctaaacacac

SEQ ID NO: 11367 - DNA, 1328 bp, Homo sapiens
acctctagtttgaactagctggaatagtcttctgcttcctaaatgttaataacaatggaattggagcatttaaccagcccagtatgacttccaaaagaagagacttatgatagagtcaagtttctaatacagaattattttaagtgttttgaacttaatttttaataacatgcatgggtccctctcactaatgtttcaacaatagggaaaaatgagaactatgtggacacttgtttcattggaaggttagggggaataatttctcatcactaggaatatagacaaatgactgtctgggcccacacagttaaccagcccatttctccacactggtacagtagtcacctgtgaaaaaaaaattggaacttactaatttgggcttttcaaaaacattctttgtttagaaggagattctaaagttatttatgatgcttagccatagtattcaggcaaatgttcatttctcctggtacctgtatttaaaatgtacattccacattttaataaattaaccacaagaaaataatcccacatatacaaggtcaggggtggggaagagtattaatggtatcttaattatacccagtctggttttttttttttaaatggggtaaaaatcaaatgcaaccccatcttgttttaggaattttgagaactaataaatgcaccttaatggtcagtgttcctttcaaacatgtgagttctttaacaaaaatgaaataaaccaggtgtctgtgatttctaattaatcaccgctggccattacacaggttttgttgtttggggtggggagggggcttttgttcccttttgacataatatagtcaatgcactaacaattatgtatattcaaacttgattattttaaattcgatcttcagctgtactgtaaatagggtactgcattgtagtctccatatctgtattacttttctgtaatatttaagagttgcttaaaagcatacaaaatgtactgttactaaaacagctaattatttctctctccccctttgacaggaaggggcttcagttgttcctccatggctagaaccataataaacaatgtacccgtaatttgtaacataaagtattgcaatatgttagtaacaatcttgcagccttcctttccaaagttcattttattttgatcagttcagtatattgcactaattattttaggtattttcattatatgaaagctaccatgtgtcagagatgatttaatctatttaagtgttggactgctaggagaacttgtacatttatgataatgcagaattaggaaaacggttcaccagtgtttagttttatattgaggtgctcaggtt

SEQ ID NO: 11368 - DNA, 1879 bp, Homo sapiens
ttttttttcccctctgcttcttagaaactcaccaagcagtgtgcctaaagcaaggtggtttagttttttacaaagaattggacatgatgtattgaagagacttgtaaatgtaataattagcacttttgaaaaaacaaaaaacctccttttagcttttcagatatgtatttaaattgaagtcataggacatttttattttatggaatagattttaatctatttactactattaaggtaaattttctatggcatgtccattagctatttcatgatagatgattaggggtttcctcaaaacctgtgtgtgaggaaattgcacacagtagcaaaatttggggaaatccataacattttcagaccatgaatgaatgtttccatttttttctaatggaatgtgagagtttacttttattttattctgaaggactttaaggaagggatacatgattttaaaaaagcctgtaagaggtgaaatatgtgatgtttgaagtctctttatagactttttatatatattttttaaaacactcatctagatgaggtgctttgagcagttctgaaaaatgcagttccaggaaagcaactgctttggttcctaaggaagaaattctaaataatgcaaacttttaaaataagcatctaggtttttgataattctgtctacttacaacaaacttgttagtacataaccactattttaataattattttctctacacaaatgtgtaatatcatatttgactttgcttatgcaggccataagttccaaaagataatttccctgcccacaaaggcataaacttgaaaacacatgagattgaatcaacatgctttaataggaaaagatgtatggtctatatatgtatcaatctggtgaatcctcgttctaataaaggttctttttcttttctatgatacacacagccacgctgataatatgcaaatgaacattttcctttatgtctctccagataatgtttattgtctgaggtaaattaaattcccaccagggtttgctgtcagtattttaacacccacattagtatatgcgtccagggtcataaccccctaaaatccatcatgcaaccttattaatctgtcttgggattccagtttagtgcttggatttatttcctgattacactacatagaaaagtgagacatctgccattcccaactctgggaaaaccaactaatatacaaccatataaatgaaggccatcttgatggtctcaacactaatttttatgatgcaaatttatacactgatttttgtaaaggacaaagttttaaaagcgtatttaacttgatgttttctatcagcataaataaaatggtcatgaatagtcattaaaaacagttgccagtgataatctgcatgaaggaaaaagaaccctgcaaatggctattgagttggaagtattgtttttgatatgtaagagatattcagaatgctcacactgaaaatgcctcaactttttaaagtgtaagaaaccaccatgagtggtgtctagatttctaatgaagaatcatgatacagtttggattaagtatcttggactggttttaaacagtgctttgtaccggatctgctgaagcatctgtccagctggtatcctgtgaaagtttgttattttctgagtagacattcttatagagtattgtctttaaaatcagattgtctcttctatattgaaagcatttttatgttttctaatttaaaaattaatattttcttatagatattgtgcaataaagctgaagtagaatgtgtggtttttgcaaatgctttaacagctgataaaaattttacatttgtaaaattaatatattgtactggtacaaaatagttttaaattatattttaaaaagcttccaa

SEQ ID NO: 11369 - DNA, 748 bp, Homo sapiens
gggcctgctgcctgccgccccgcgggacctgtgcaagcacattcaccaagtgcatcggtagccctgcccacccctccagacctcggttcttattttcctatttttattaaatttggaaccattttgtgatggtatgttgtccatcttcccatcccagttcttcctgccccccttcctctctcccacgctctcttttatctctcattttattcccttgttgatttctgttaacttgaaagatttgggattttttcccacctcatcatagatgggaacttttgttttcagtgcaaacaatgttggagctgtaatagtaagagctttcttacaaagctttgtattactgtgtggttttgttttttttgttgttgtttatttgattttgatttttttttcttttatgtgatctttgggaaaacacattcagaattatatctcgtttctacttaaatgtagtgcttagggttaattttttgtactgaagtctttattggtgggtgcatgctactgggaacaagtttttgtacaaaagcttcaatcagaatcactgtgcattactgagactctgtttatcactagccttctgtccctcccgcagaagactgttggattgaacaaaataatatgtattttgatttacttaaagtgcttgtaaatttcttagggacctgccacttttgactgtggatcagttgatgtacacttgtattattaaagcactcaataaatcactgtggctgataactgc

SEQ ID NO: 11370 - DNA, 705 bp, Homo sapiens
attggggtttcacaattcttacattatttgtctgtcacagaagagagctgcttatgattttgaaggggtcagggagggtgggagttggtaaagagtagggtatttctataacagatattattcagtcttatttcctaagattttgttgtaacttaaggtatcttgctacagtagacagaattggtaatagcaacttttaaaattgtcattagttctgcaatattagctgaaatgtagtacagaaaagaatgtacatttagacatttgggttcagttgcttgtagtctgtaaatttaaaacagcttaatttggtacaggttacacatatggccatttatgtaaagtccctctaagactacatactttttgtttaaaacaaaattggaatttgttttcccttcttggaagggaacattgatatttaacagagtttttagagattgtcatctcatatatataaaatggacacgtggctataaaacaccatataagagatgagtagtgcgttttattttatatgccaatctactttgtttaaaaaaggtctgaatcaggacttgtgaaaacctgtagtgaaataccttaagctgttaactaactgtaaggcgtggaataggagttgctcagtggattggttctatgttgtggactacttaagtctgcatttgttactgtgctaataaacaatattaaaaaccacctaat

SEQ ID NO: 11371 - DNA, 1338 bp, Homo sapiens
tataagtaaagtttgtaaaattcatacttaataaacaatttaggacagtcatgtctgcttacaggtgttatttgtctgttaaaactagtctgcagatgtttcttgaatgctttgtcaaattaagaaagttaaagtgcaataatgtttgaagacaataagtggtggtgtatcttgtttctaataagataaacttttttgtctttgctttatcttattagggagttgtatgtcagtgtataaaacatactgtgtggtataacaggcttaataaattctttaaaaggagagaactgaaactagccctgtagatttgtctggtgcatgtgatgaaacctgcagctttatcggagtgatggcaatgctctgctggtttattttcaagtggctgcgttttttttagtttggcaggtgtagactttttaagttgggctttagaaaatctgggttagcctgaagaaaattgcctcagcctccacagtaccattttaaattcacataaaaggtgaaagctcctggttcagtgccatggcttcatggcattcagtgattagtggtaatggtaaacactggtgtgttttgaagttgaatgtgcgataaaattattagccttaagattggtaagctagcaatgaatgctagggtgggaagctggtgagccagtggccattagataaatacctttcaagtgtgagcttagacgtcaaccctaaaatacttaaccgtaatgctaattgtgatcattatgaatcccttcagtcacattagggggaaagtagttggctataagtacgtcattcttagtccagtcagtcttaaaaacatcttgggttacccactctgtccactcccataggctacagaaaaagtcacaagcgcatggtttccaaccatatgtgttttctgcagttatttctcttgttctggccaaacaaccctaaaaatccttaccattccacaaagttggaccatcacttgtgcacccactttgactatgagtataccaccacattgcatttctgtttgcaccatgtcttccaggagactagactactgttgtccagggtcaatttgagtgtaaagaaaatgtagacaaggaattgcccaattttaaattctgactttgctgacttaatttaaatgctcgttctgaaccaattttctcctatcttctctaggggtttcaaaagactcagttaattgatttccaggaagtactcatagcaagttcataaaagttcttgagacctaaatttcttcacaaaaaaagaaaagatcttaagtcatacattttaattgtgtagaggttgttcaactgaaggaataaatgtctattaaact

SEQ ID NO: 11372 - DNA, 2327 bp, Homo sapiens
ggcctttgtttatttaaacatgaactgatggtaactgtacattttgtgctaaaatgcatatttatatgtgtataccatatgtggagatagaaaagacctttaagacaataaaagattgtaggctatctctgtaatcatgcaatagctgttcggattgagaactcttcagccatgattagacgttgactgcatctccctgatagaccaatcagctgtgtcgcacttaaactggagaagttacactgaagtataatcacactgaatgttagactttttcatctgccaaaaccaaaaaccattttgatctccctgtggttatcaatataacgcacaatcacaagtgtatgaggacttagaaattaatcctttgtggtaggagttctgttgaatgatggaaatcttattactaccacaagactatttgatctggtaattggagacttcgggatttaggagatctccatgtctgtatttactctaccactgctaaagtgtgtggtcctgggtagtttacttgcttgcggaaaatgagaattgatggtgtccccaatgccccacctcacagagttactaaaaaatgtctgtaaagcatatttacctcttgggagataggcactatgtaaataaggtaaaatttctgttattacaattattcataataatattcttttcttatttctaagcctttctgggaaatcatttcagtccacaccaaccatattattcagggttcctgccatatgtgtggggtatcctactgatacacacgtattcaaagtttatgggtacaacaaagacatagtacatgtacataatatgtatgtgaatatagttaaatatatttcttcacaatattttaaactgtgaagaactttatcatacaggaaacttaaaacaagaggtgtcaaaagacccaaattaggtgcattttacttgtttatgatggcataaccattgctttaaaatgtttagacagtagaatattgaatttatgctctatttttgtttatttaagcaacacttaatgtaaaagtgcaacaggcaattgaatccaaatttcaacgacaaaaaaaaaaaacatgtattttagagttcatctttggcaaaatctttggttcagggtactagttgtttaaaagttgattcatattcttaccttgtgctgagaaaggttgcattgctgccccttatacacatgctgcagcttgatgttaaagaatttttattctttctgaagaactaattaatgtttaaagcaactgtttaatatgatggcatgtgtgtgtgtgcgtgcgtgtgtatgttctgagtccacttcttttttcctaaataacactacagggattttgtcatattagatttaatttataatttgaaaaatcatctagtgtgtgacctacaggcttagaaatggtatagtcaaagacattttatccacatttctaatagtggacttgattaagtagataagatcagcatctgtttatggtagtaggagaaatagccaaagttgaggattttatgtatgttttcctgtttacctggaaaatagcaattaattggattttttggtaaagattgccttctgtataatgtttggattatataaaattgcaaaaatgataacagcccgctttactgtactaagcctgttactttcatgacgtgtgagcagaatgccttattttgtaatcttgtttaacttgttgctactgggacttgatttactgtggcactagttaagtaagttaaaaaaaagttaaaccctctcattattaaagaggaaaggcgatggtgatgtctgtagtacaatataaaccataattgtgatttaccttaagtaggtataactcttatgggatatacagtatagtttttgtgaatctttacatgatagcattatctttttataattttttttcctaagataaacaaatgcatagttttcttctatgggtgatagaaacagctttttgaagtaatgaaaacctcaaaagatcatgttgattcttaatttttgccttttgcataagcctctttataacatgtatctttaaaacaattaagtctttaggaatgtgtaaccagaactatgttagtattgcttataaaactttagttaggttcaatatatacatatatacatctctatataggtatatagatttgcattttgtcttgtaaaattttatttgaataaattcttcctgtaggtaatgggaaacaaaattaatagttcatatgtcactcatagcatttctatatttgaaagtagcccaatataaaacttttgattctaaaattaaaccagcagcctattacaagca

SEQ ID NO: 11373 - DNA, 1313 bp, Homo sapiens
gacattttctagctacttcaaacattccccagtaccttcagttccaggatttaaaatgcaagaaaaaacatttttactgctgcttagtttttggactgaaaagatattaaaactcaagaaggaccaagaagttttcatatgtatcaatatatatactcctcactgtgtaacttacctagaaatacaaacttttccaattttaaaaaatcagccatttcatgcaaccagaaactagttaaaagcttctattttcctctttgaacactcaagattgcatggcaaagacccagtcaaaatgatttacccctggttaagtttctgaagactttgtacatacagaagtatggctctgttctttctatactgtatgtttggtgctttccttttgtcttgcatactcaaaataaccatgacaccaaggttatgaaatagactactgtacacgtctacctaggttcaaaaagataactgtcttgctttcatggaatagtcaagacatcaaggtaaggaaacaggactattgacaggactattgtacagtatgacaagataaggctgaagatattctactttagttagtatggaagcttgtctttgctctttctgatgctctcaaactgcatcttttatttcatgttgcccagtaaaagtatacaaattccctgcactagcagaagagaattctgtatcagtgtaactgccagttcagttaatcaaatgtcatttgttcaattgttaatgtcactttaaattaaaagtggtttattacttgtttaatgacataactacacagttagttaaaaaaaatttttttacagtaatgatagcctccaaggcagaaacacttttcagtgttaagtttttgtttacttgttcacaagccattagggaaatttcatgggataattagcaggctggtctaccacctggaccatgtaactctagtgtccttcctgattcatgcctgatattgggatttttttttccagccttcttgatgccaaggggctaattaatattaacaactcccaaagaaacaggcatagaatctgcctcctttgaccttgttcaatcactatgaagcagagtgaaagctgtggtagagtggttaacagatacaagtgtcagtttcttagttctcatttaagcactagtggaattttttttttttgatatattagcaagtctgtgatgtactttcactggctctgtttgtacattgagattgtttgtttaacaatgctttctatgttcatatactgtttacctttttccatggagtctcctggcaaagaataaaatatatttatttt

SEQ ID NO: 11374 - DNA, 39 bp, Homo sapiens
aacatataatttgtaattaaatactgatttttaaatgct

SEQ ID NO: 11375 - DNA, 320 bp, Homo sapiens
tgtccaaactgactgtcattgagaaagaaagaaagtagtttgcgattgcagtagaaataagtggtttacttctcccatccattgtaaacatttgaaactttgtatttcagtttcttttgaattatgccactgctgaacttttaacaaacactacaacataaataatttgagtttaggtgatccaccccttaattgtacccccgatggtatatttctgagtaagctactatctgaacattagttagatccatctcactatttaataatgaaatttatttttttaatttaaaagcaaataaaagcttaactttgaaccatgg

SEQ ID NO: 11376 - DNA, 141 bp, Homo sapiens
gcagatactcaaatgacattcaggaactctaatattcatggaagtcattttatagtccttaaataatggactcaagcatatatgtttgctttaccttaattatggaaatattaactttatctgaaataaatattttatttc

SEQ ID NO: 11377 - DNA, 1266 bp, Homo sapiens
acaggactgaagaatgtctgtctgaatctttgccttgaatgaagaaacttcattgaacaagaagttggcttccagtttgcacagacgtcaatggaatgcatttttttgttgttgttgttgttttttttttagtgttataccttacccaatgaaagcaaagtttttatgtgctgtgcaaatggtcttcatgtggtctgacaatttatttttgccatcatttttttaattaaagaaaaaatttccagaagaggaaaaaaaaactacaaaaaacaaaacattgaaggttgatattttatgtggaagaacatttgaattgaattcagaatttttctgaaggtgtagatactttttttttttttttaacagaaaacctgatgtcaagaggtgggcaatagaaatggaaacaaattgtcttcctcaataattaagctactttctctttttcccttcttgttttaatctagtgggttttttattttattttttcttagaaatatgtaggtaaggtttatcttgaatcttaattgccttaattttaaggacgtcaaaggctctcgaggcaagctgtcaacgtcttgttgaaaacaaaaatcaagaaagaattgaaatactgtgccggctttcactggcacagaagtttaagactatgagtttttagggtgaagaaaaaactgtacagtttaaatgaaaatgtttttcttcatttgaagaaaatttgttgataaaccatggcaactgcaagaattggaaaaatgctgggacttttcatgaactttgtcttaagtgttgacatgaatcattctaaaaggctaaaacattttacagtaaagttattaaggttggtttaaaaacaactgcattagaaataatgcgtgtttggggggcagaatgcagatttttttaatttacaaagcgtgatcgctagcaaaagcattagtgctttttatctgcagtcttttttatgagctttacaaagtttttagtcagctttgcttgtcacattgcaaaacctagcttaagagcattaaaaaaaaaaacttaagtagataggagcttatggtcaaaaagtgcaaaaaaaaaaacaaaaaaaaagcaatagatagagaaattgttgacaatttctgtagtctttcctagttgtgatcaaattcagcctatggatggcctattttataccaaagatgaagtgacaccctattacagtccagaagatagaggttgttttcgtttcttttctttttaaaaaaaaaaaaatttatttgaccg

SEQ ID NO: 11378 - DNA, 104 bp, Homo sapiens
gtctgggctgtgctaagctcttttcctcaagatcagccatcttgacatcactctctcatgttgtatgtgttagcttttgctgaaatataaaccatcccaaactt

SEQ ID NO: 11379 - DNA, 2542 bp, Homo sapiens
ctcttctggggcaggctgggccatgtccaaagaggctgcccctctcaccaaagaacagaggcagcaggaagctgcccctgaactgatgcttcctggaaaaccaagggggtcactcccctccctgtaagctgtggggataagcagaaacaacagcagcagggagtgggtgacatagagcattctatgcctttgacattgtcataggataagctgtgttagcacttcctcaggaaatgagattgatttttacaatagccaataacatttgcactttattaatgcctgtatataaatatgaatagctatgttttatatatatatatatatatctatatatgtctatagctctatatatatagccataccttgaaaagagacaaggaaaaacatcaaatattcccaggaaattggttttattggagaactccagaaccaagcagagaaggaagggacccatgacagcattagcatttgacaatcacacatgcagtggttctctgactgtaaaacagtgaactttgcatgaggaaagaggctccatgtctcacagccagctatgaccacattgcacttgcttttgcaaaataatcattccctgcctagcacttctcttctggccatggaactaagtacagtggcactgtttgaggaccagtgttcccggggttcctgtgtgcccttatttctcctggacttttcatttaagctccaagccccaaatctggggggctagtttagaaactctccctcaacctagtttagaaactctaccccatctttaataccttgaatgttttgaaccccactttttaccttcatgggttgcagaaaaatcagaacagatgtccccatccatgcgattgccccaccatctactaatgaaaaattgttctttttttcatctttcccctgcacttatgttactattctctgctcccagccttcatccttttctaaaaaggagcaaattctcactctaggctttatcgtgtttactttttcattacacttgacttgattttctagttttctatacaaacaccaatgggttccatctttctgggctcctgattgctcaagcacagtttggcctgatgaagaggatttcaactacacaatactatcattgtcaggactatgacctcaggcactctaaacatatgttttgtttggtcagcacagcgtttcaaaaagtgaagccactttataaatatttggagattttgcaggaaaatctggatccccaggtaaggatagcagatggttttcagttatctccagtccacgttcacaaaatgtgaaggtgtggagacacttacaaagctgcctcacttctcactgtaaacattagctctttccactgcctacctggaccccagtctaggaattaaatctgcacctaaccaaggtcccttgtaagaaatgtccattcaagcagtcattctctgggtatataatatgattttgactaccttatctggtgttaagatttgaagttggccttttattggactaaaggggaactcctttaagggtctcagttagcccaagtttcttttgcttatatgttaatagttttaccctctgcattggagagaggagtgctttactccaagaagctttcctcatggttaccgttctctccatcatgccagccttctcaacctttgcagaaattactagagaggatttgaatgtgggacacaaaggtcccatttgcagttagaaaatttgtgtccacaaggacaagaacaaagtatgagctttaaaactccataggaaacttgttaatcaacaaagaagtgttaatgctgcaagtaatctcttttttaaaactttttgaagctacttattttcagccaaataggaatattagagagggactggtagtgagaatatcagctctgtttggatggtggaaggtctcattttattgagatttttaagatacatgcaaaggtttggaaatagaacctctaggcaccctcctcagtgtgggtgggctgagagttaaagacagtgtggctgcagtagcatagaggcgcctagaaattccacttgcaccgtagggcatgctgataccatcccaatagctgttgcccattgacctctagtggtgagtttctagaatactggtccattcatgagatattcaagattcaagagtattctcacttctgggttatcagcataaactggaatgtagtgtcagaggatactgtggcttgttttgtttatgtttttttttcttattcaagaaaaaagaccaaggaataacattctgtagttcctaaaaatactgacttttttcactactatacataaagggaaagttttattcttttatggaacacttcagctgtactcatgtattaaaataggaatgtgaatgctatatactctttttatatcaaaagtctcaagcacttatttttattctatgcattgtttgtcttttacataaataaaatgtttattagattgaataaagcaaaatactcaggtgagcatcctgcctcctgttcccattcctagtagctaa

SEQ ID NO: 11380 - DNA, 2794 bp, Homo sapiens
agtgaatcatgcaacgtgttgggggaagttctgcctttctgatcaatcttttgggttcacgtggaaaccaggacttggcaacatgatgtttgactgtaatctcatcacggatatgtatgaatttttacaggttcgtttttgaattgtgagaggcagttcattagcaaagatgtactgggcagtaactaaacacacatgcaaacatgtgaatggtggtttattcctcattctgtggatgtttctatgagccaaaatttgatgtctttttttcaaaattgcttatgaaatttccacacaatcgtagcttataagattggaacgatctcagccaaatattttaggtgtaattcatatgtatttgagtggaggattttttttctcatttttctagtgttaaattttaaccagcattaacatggtagagtggaggagtgagtgtgttcaaagatcaacatatttaacttttaaacactatctcaaagccagcataattaactactttgattgtgggctgacctttgtttttttaacaatcaggcatttttaattagataatccactcatgtatttccccctcactgcagttgtctgcatttttagcctcttttctcttcgttagttgtcagaatatgccttcgtcaaggctcagaggtaacaagacagaaaattcatctgggattttcctgctgtggctggcacattcttctgattaacagacacttgtatgatgctttaggctagttagtgcattttttagcaaacatttatcttaaacatcacagatccactggggggtgcaaggggctactgttagtcctcttgttagatgcagtcactcctcctggtcacctagtgagcagggacagagccaggagtcaagtgcagtgccaaggtgcatgaccctctgagaagtcactgggctgatttgacctccgactcattggttgtgcaaatgccatgtgcagcctttcctgaggccataggagggcttcctgcagctgagatctatgcaggccatcctctcaacaagtgccactccaagggcggtcctcggtgcagcagcatcagcttcacttgtgggggggtgggggaaggggcggtctcagaaatgcaggttcccaggtcccaccctggacttctgaaggggtgtggcatctgtgtttctgatgcttactacaatatgtgaaccactactttagaaaatctgctttaacttggtattcctctaattgtgttccctaggaaatgactgtcccaagagccagtgattattccaggtgttccctggaaaggtcaagtgagtctgggaaacactatgtctgtacacctcttgaaggtgtcgaatgtatgtttatacatcagtggaacccatttttctagcctagcaagtcccaaacacattacactgaagagattttggtgaggaaacttgctggagttttcagggaacactgttctaggcttaggtgaccttaggatcactcaagtagacccttcactccctgcgagaaattaggatgaataactacctgtggcattgttggttctgaacttttacagttcaggcctgctgtgaatctttgatgaagctttaaggtgacactgttgtacaagatgtcagctttgctgaaacgcacattacctggaataagtgctttaattgtagaattagaatgggatttactgtactgttttaaatgagattggcttcagaatccattacagttaccttacatagcacttgatacgtgttaaatgaacatatgaatgtaatttatatattcctagaatttaagttactttgtgagatttgggcctgtccctcaatgccagtttaggatttctttttttctataccttgaaatgattataaaatagattttcatgggaattttaaaaactctatccaaaacatttttggagcattttaaagccccatacacagaagtatacgaaagcacacaaaacactccaagtttcagcagttttagcgccaccattaacccactttgcttgtctcatgaaaaatctttgttaaagtttgtacacaggtaacaaaaagttactttaaaagatatataaagggctgtaagctaattgtggtgtctagtaagtagcataatgagatgtgaggagttggaactttgcgtgttttgcgtattttcatctgcattcagcttcttactctgggtttgtactcgagtgttatttctttacaaatgcccttgtaattaccactctgaagtctgctgactgtgtctcttgaacatacttaggatattctgcacattatggaaaaaggtaaattttagaagtttctgctctactaactgtagatatttatgactctgcgagttatctatttttataaccacctgtggtccattgttcattttaattcacatttcttatgaagtatggtaacagggagggagacacctagattagcagctcaatttgtactacttcagccaatctgtgaatgtaaaaactacactgttgccttgctaggatccaccctcctataatatggaacaaatatctgaatgaaatccaccctaggagacggagtcaaactaaacttgtggtttttcatttaacttttgactacagcatggccccatggcatccacaccaagagggtgttgtgatgaggtgccggtgtgcaaagggaactttagtttttccactggttcttatctgctagccttttacatacatgtgtactatatttgtttatagactgtaggtggatatataatttaaaagcttgatttaataaacatttaacccc

SEQ ID NO: 11381 - DNA, 352 bp, Homo sapiens
tttaccattttgataattaaaaggaaaaaaaaaggaagactctcactgtaaaaacagctgtaggtataatgtatattcccagagaattgtatttaactaattaatgttttttatattcttaaatttgctcacaaattgtggtttgttacaattaaactggatacttatttgcaaagtgttgtagcttataatgaactcttaagtatcttattaatgtattaatgtcttcatagatcatattttcttagacaatgtttaaatagataaattgctaatattgagaatgtgtcaagtttgtaaacctaacttttaagatgccagattcttttttgattaaatgttgcaaaatccc

SEQ ID NO: 11382 - DNA, 587 bp, Homo sapiens
tgaggccacaacccctaggcccctcaggagctttgcagagaggaggacgtgtactccaggcgaggcctctggacctgtgttcctgtgccaaagtcctgtcaggctggtgggcaccaggaaaggcctgcaccctcttcctgctctcccaggaagccagctccctgagctcctgagccagccggaaactcttcctccagccttccggggagaacatccctcccattctgggaaaggaaagcagcctccagggaaatgttttctgccttcctgcttctagaaccacctcaggtactgatgaaccccacttagcacagctgaaggggtttgtgaatactcccgcctaaatcccttctacttcactcctcaggggagtgaagtgccttaagaaacaaagccctgtcctaatttatctagcttgtcagtccggtcttagagataccctctttcctgaagtgaggcgtgcctgtagaaacactatgtggtcagcctgtccccaaggagatcttgtgtctcctctccatctctgcctttgttaccagtgtgcatgtgtttgtgtgttttttaataaaatattgactcggccagtt

SEQ ID NO: 11383 - DNA, 251 bp, Homo sapiens
tacttcacttttggaaaactgttacctgagacccaggggagaatttactggccattttagttgtatcacagcagaatgaataaaagatggtgaaggctgttaattttgagtcaattctacccctgacatttggccaaaagcttacttaaaattaaggatttactaagtcatcatcagctgtttttcttaatttcagccagactattaattttgagccattatgtaatatatgccataggcaattaaaacat

SEQ ID NO: 11384 - DNA, 406 bp, Homo sapiens
aaaaatgaaatggtgaaatgcagagtcaatgaactttccacattcagagcttacttaaaattgtattttagtaagagattcctgagccagtgtcaggaggaaggcttacacccacagtggaaagacagcttctcatcctgcaggcagctttttctctcccactagacaagtccagcctggcaagggttcacctgggctgaggcatccttcctcacaccaggcttgcctgcaggcatgagtcagtctgatgagaactctgagcagtgcttgaatgaagttgtaggtaatattgcaaggcaaagactattcccttctaacctgaactgatgggtttctccagagggaattgcagagtactggctgatggagtaaatcgctaccttttgctgtggcaaatgggccctct

SEQ ID NO: 11385 - DNA, 5324 bp, Homo sapiens
cccacagcaaccaaagagacttcctcttggcgttcaggaaacacagattctttgtccttttcccaacagcccaggctgttgatacctcagagccttctctttactctccaaagtgaaagggaagcccccgtctctctaactgcatgtcatcaggggtgagcctgcctttcctatcttcacacctgccacctcatgttcacacctatctttctcaccttttttttgagatggagtctcgctctcttgcccaggctggagtgcaatggcacgttctcagctcactgcaacctccgcctcttgggttcaagcaattctgctgcatcagcctcccgagtacctgggattacaggcatgtgccaccacgcccggctaattttgtatttttagtagagacggggttttgccatgttggccaggctggtctcgaactcttgacttcagatgatccatctgccttggcctcccacagtgctgggattacaggcgtgagccaccatgcccggcctctttctcacctttacacctgtcttcttatcctcacatctgttttcacaccttcatccctgtcttcctcatgttcacacttgtcttccccatgttcatagctgcctttcttaccattttggtttgaagggcagtcttctctggcttgtttttttgtttttcccagaaaatcagtattattttttaaataagaaaaacattcctagaagatgataattgtgaaaacctcctttggcttatttgcttttccagattttagtctcctttctccccatccgggaaagatggtggaagacataggctaaatttctccagcctcacaatggtcttcacttggtctgacttgtaccaattctagcacccactgaaaaacaagttgagtagagagtgtagagtgcagaaatgtggcttttgccccactttgcatctccaaaattacaacggttggccgatcccatttgaggacaatgcttagttataagtctccgagttggaaaaggaagaaagccagagctgtctagtttcattcattctttcagtaaatatttattgagtacctactgtgtgctaggcattgacctgggaactagagatacttcacagaataacagggaaagttccctgtgctcatggagcttacattctacagggagaaagagatagccaatacataggaataaatatatacaaggtatcatgtagtgataattgctgtggagaaaaataaagcaggggagggagtaagaaatcctggagatgaggctgcagttttaaatggggcctcactgggaatgtgacgttgagcagagacgttagggaagtggatcctggacaaggcattccaggcagaggaacaggatgtgcactgccccaaagtgagaacttgctctacgtggtcaggaaagagcagggagaccaagcagagtcgtgggcaggggtagaatggaaggagaggcggctggggaggacaggtggtggagggccttggcttctgctaagtgagatgggaaccactggagggtttgaacagaggagtgccttgattgatttatattttgcaagggtcattctagctgccatattgtgaaaaactttagtggacaagggcagaaggaagagggaagacctgttaggaagctactgcaaggttccaggcttgggcctgggccacagcaacagcagtggtcaaatatctagatttattttgaaaagagccaataggatttgctgagagtttgaatgtggagtgtaagagaaggaagagttaatgatgacattaaggtttttggcctgaatagcaggaaagatggagttaccagttactgaaatagggaaggatgggctgggtaagtatggaatttggtgcaaagcaggctgtctgtggttggaatgggaggttctggctgcaaatcaaagtggagagttctctcaggtcaggtctgcagcagagctcgagacagggatctgaatgcacttggtttattgttgggggtgctctcagaaggaacctgtgaaagcctttatcagtcatttattggctgtgagaagttctctgggagtgtgggtacatttgaaggcaagtgacttcagttgagggcaagtctctggaaaagaggctgtaggcatctggcagctaccatgcatggtagtgtgttgggggtgggggtcctgggcactggctgtgtgaagggatctggcagggcaccacagcgccccctactgaaccatcagcatgtcagtggcatttaaagccatgcagctggaggggccactgagattgtctctgagtattactgagaagcaacagaaaagagccatggatggagcccttgggctctctgggaaatgggaaatcagccaaaggactgagaaggagttaccttaaggtcagagaaaaccaagagagtgtggtgttctggaagctgagctttctttattcaacctcattcccttctccaaataagccacttgtgtagttgggcccctccagggttgaaggcaagaggagaaaggcacagcgtttgggaaacaagacttttcctgcaatagcctgggaaggaataaaaggatagagtgtttgggtttttgtgtaatggtggttaattggggtggaacactcacacgttgtgctttttctgggcttcccttatcccccagaacactctaccaacctcggggaactcgggcacatccttctgtttctccttcagctctatcctgctttcctcatcccttctgacaccacgtcctcactcacctgcacaagaatccctgcatcaggttctcctttgagggtacccacccaggacagtcccctaccacttctgtcttgggctgaagttgcccacgtccacaaaatctgtactcccagcgggggtgtttggcccgaggagtcagtgttattactggtggatgcaccgtgtccacagcagcccccaatcccagcgatgcgtcagatcttacgtggcttcctgctgggggagatggccttcacccacgggatgccgggttctcctttctttcctcaccccaacctttactccaccagagaaacttccttttgaactcagtggggaagagggtgatgagacaggactagaaagtagtgggggacccagcgagtggacgccctgctccgggattcctgagtctgtaaatagtgtgcccagcagctgtgaactccccttatagcctcaggctgcagtgtccttcccagctgtgtgagaaaatgaaagccgacgtccacagggacccaggcagggttgggtgttgtgactcactccacctctgtgccctgcagaggtactgttgggtccttgtcttgtgagcctggggtgagctctctgtacatgttgttgttccacgtatgggttgacttggcatgctggggggtcctcgttcactctctgaagttggcctcctttcactggggattgaaaagcacctccacccctaccctagtgatgtcccctgaggacccgggtgatagtacagtcaatattgtcagtactttgctttgattgaaggctgtagagctgagttaccaaaatttctatttcaaaggaaaccaaaccttaaaaaaaaaaaacaaaaactgggctgggtcttccaaacctaccatgaaaccctggtgtgcaggctgcactcaatgacctcaacccaacacctccctgagtgtgcttcttggaagagcctagaagattcctggatggagaccccattggttcagcctcaagtctggcccgtcttcgaaaaaacaaacacatttgtaagctttgtgggagcttccaggcctgctctaagatgccttgcttgtcctttgacccatcagcatggagctcagtggttgctgtttggttctgcaggctggtggggaggccgcccatcgtggtggggcatctgtccagccccattgccactcagggcatccaaacaggaggcacccgctgggaagggtctaaagatactccttgtggccactgctactgttcacacttgacttgtggagaagcgaagggctgaggggaggtttgtgtacacccatgtatttaaaagtgactgactgactgaaatgagcacataccgacatatgcaacatactaataccttcctgattttcgagactttctaattactacaactaacctgttgtgctcacctctggaattcagaaagagagccactgcgagcactgaccacaagggctgccttaggaaggaaatgtgtgctttcaggagttcttattaggggaattttaagagcacaaaaattttattgaacccaccttagtgacaaacagaaaatgatttgttagattgtcagttggaaggggtttattatgactgctggtgaaataaacagtgaccagtttctgccaacatttatggaaataacgtttctaggttttaaatgtgagccgtaaactgaagctacttcagttaaaaaaaaaaaaatcaatacttaaactgtagggaaaaggtggattggtgccagagaaaacattatttaatagtgtcagaacatggaactgcaacacagtttgtagcaaggcactgagaaaaacccacaactaatccttcatcgcagctgtctgaactcttgatcatctgccatcccccaaacagtgacttctttttttctggtgactccaggcctgaatgacctagtgtggagagtttaaactatgtacaagggaggaaagaaaaaaaggaaaggaaccttaagtaagcctcagccaaaggttttatgcattggacttcctgtgcctgcccccaggggcaagactgatccccatgcctgtgcccatgacatctccctgaaagaggacaccatgacagcccggctttgccttgactgacccactgctaccccagaaataagaatcaagagcagctattgttatccttagagtgttttccgtctagggccggctcgtgaacagccacatatccttgcacctgacactgtccccacacaaatagctggctttcgttgcttgttgaatgaatgagtgagttggctctatatccccttggagctggccggtaagatattagtgcctcattttacaagaagagaataggaaggaattaagcaatttggccaacagatacaagatagattccagagttttatctcccactttagggtggcagccagtaggccaaactccaaagaccgttgctgatgtctttttctgcctcccctctttgggttagtgtggtatgtacaagctcactcttgttgaaaattagaaaatagttgaaaacaaaaggtttttgtttttctttttaaatcacattaaatgttttacattgctt

SEQ ID NO: 11386 - DNA, 1017 bp, Homo sapiens
cagcagctgcctgggcccaaggggtgatgaggcatcctttcctctagaagacctgagtcttcctgaccgactccaccatcacccaatctgttgattctccattgggaaaggcatttacaggtaaaagacttctgtatggattgcagttactctggtgatagttttcacctttattctgctgtgaaacaatcaaatcaaagccttgtgtcagttaacacatgacaagtggtctcaatgcagctaggaccatgccagaaacctggatctcttaagagattggtacctacctaggtacgaaagttctacccttggcatactcagcattcctcaaaaagaccatcagtgttagcacaaactgagcagaaaaaataagctgttgattttctacctgatacttaagccagtggcctactttaattcacaattccattttgattagcaggacttttccactttgaagataaatagcaactttatcaaagtgactgtactgcaaattaattcataatgcctgatagttttatatatagagacttatgtggaaggcatgttaataggtttccatgagacaccaaagaaaagaggactctatactgggtggagcagggtcttcacctttttgtttctgtcaacttgtcatatacacctccagggaccaaaaacaaaagcagctcggagtctgtgttgcctgattggaaagtagaagctctggtgtatgctacagcacataacacatttttactaaaggaaaaaagctaattatgtccatgcctctcgtaaaactggggggaaccttaaagagaaagaactaaggcttaagttatctgtagtataatcaattagaagtaatgaatggatgcatgtaaaatggatgtgattttttttcaagcttattttgaaatcttaaaaatcaggttacaccatagctactcaaaagttttacacacttaaaactcagatcagtaagtgttggtaccttttagactcataaaattgaataaaccattgcaatgcttt

SEQ ID NO: 11387 - DNA, 3177 bp, Homo sapiens
tatgtctgctcagcagctcagctgattcagatcagagggaaagaaataccaaccctgcaataagtgtactaaactctacgctctggttaatgtaatgtactctcctggactgaatgcagtgtataatttctgtctacagctagaagctgtgccccagttccacatttgattacacatgtgagatttgctgctgttgcagtataaacactaggtataataggatttgaaattgcattacagttcataaaaattgaaaatgagaaattaaacctgcaagtgaaacatttgaaacgattatactttctacataagacatggttgggacatcagatacttacaaagatggtttaagtatggatactagagaaaattaagttttctttctctttggtttattgatttggtttaatttccattatgctattttgcataatcaaggcactgtaaatcttataattttaaaataaattacttaagaacagttgtcattgttatgttttgttattgattctcattactgtctaattttttttctggtattagtctcattttgtatgtatataagttaaacagatactgtttttaagtgcatgaatagtacaagttattatcaaggatgttttacagggaaatcaaaagaatattatcatactttatctttcgtatgctgattagtaaacgatttttgacatttattttagaaagtcctataatgtggaagaaacaaacagttgctaccaaagattcttcaaataaacatacaaataaatgtgtatatttaatgttttattgttagcttctccagaaaattgatgcaaattctggtaataattcttgcattttttccccataacctggttaaaataaatacgccattggcaatacttcataatgtaatggaattgtttggggaacacttactgtaccctctcatcctttttccaccttactgtgttaacttagtgacatttaatgcccaatatgtatgaatagatctaagccatttaattttttttccttaaagattggagtattttataattcaaggagcatacaaaacaatggttgggaacatatgccaattatggaataggctatgtatttaatattaatctctgccattaggatatctactcactgtataaacctcagtaaaaatagtgaagacatgcatcatggaatgagaaaatgagaaaggaatgagttgtctaacatcacagtgggatctgttttttgtgaggttcatttctgaacacattaggcatatgagcagatttccagtgaatctatttatgtttattttctgagtttcaacgctgaccttttcttgcattattgtttcattttaatgatagtgttacttgtcccactgttgttttcattgagtttggatttatattttaaatgttcgaatgaaagtatgattgtaaaagggagtgaattggtttaaaaatatatgtatattttaaactttgttgtgtgtaggaaacatgaaggcatgttaattcaatataaatgacctttgatttcatggaatattaaagttggtttaaagtccaatagttaaaccttagcaaaaatagctttttacttcatcagttgctaagatttaatactttggattcatcaaagtgtgacatgggcttgtttgacttctgtaagtggcatttaagttccacattcttattacttgaggtactttatactaacataagacagtgagagttagaggtattacaagttgctagtttataatgtcttactaatgcagaaacaaggaaaaaagcaaaattggcctgaatattctcttggggaaagagggcaccaaagaaaagggtaagtgcatctgagggccaaaagagatgtataagccttttagcccattccccatgctgggcctgctcacagagccacaggaagatcattcagaaactaggaaaggaggcccccacagctgatcctgccacagcacacctgactcactcggctctgttagtgtaaccttttaaatgtagcaacacaaaccctttccctcttgtcagttcactcatcctttggtttctttttaatcacctgtgtctgggcacagacaatcacaataaatgcagccctttattactgttaaggatcatactgttggtttggagttggaagggtactactctgtgattcaggtgtgttgtacccatatttataattaggctttattatcttcctaaatcaaggaaaggaaatcatccccagaccatttatgctgagctttggaatactattttaaactggattgtacttaaataatgaagctctgcatagaggaactagtcagaagtggggaaaacactgtctaatttttatcagtctggtataaagtattgatctaagagaactctccctgtgccccttggtctttattctcaattaagaaaaacagtcacatgtcacgacaaaccaatcaatctttatgagatattcctgtatccataccccagcttgtttgcaatttataaacctccccttcaaaactaaggagttgcagaaaaaaatggatttcacagagccttgtgtccctaaagttctgtcccagtcagcagtctttatagtccaaacagattataaaaaatgttttccatttgaactttacagtttgcaaaagtgcttttatacattttctaatttcagaaacaggataatttgttaagtgggtttcagtttgctaatagggattttttgtgttttgttttttaattttcagcatctcttgaagaatcttgctacagccaaatggcatctcactttttaaagacgtttgcaattattagttgattcacagtacagaacaaggtataaaggaaaaaaccctgctaggtagtgttataattgctagattaaaaatagactagaacaggttcattttaagatttacttggaagagcaaagaaggaaaaattatatttttaaagaaagagaatattcaggctttatttctggtatgaagtttatattttttaaaaaaatcctatattatcacaccagagattttagattcttttctggttagaaacattgctggtagttggattatatttttattgtattcatttatcttagggggaacattgtaaagaaacaaaaaggtccagatgaatgtatgctagaaataaaagttgaaagattctt

SEQ ID NO: 11388 - DNA, 537 bp, Homo sapiens
gagctctggctgtggtacatttcttcagatatttctcatggcctttgatggaagaggaacaaggtgggaaaactggctgaggacttaagtattcactcaacactcaaatgattgctgctggtattctgtaaaaaataaacaaagactaatatacacgttagctggttaatggtgcatatttctgtcatgtctgctaggtatgcctttatagcttagctagtgacatgaattcatcaaggtaagattttctcctaccactgaataccactgtgtagattataatatccctaatttggattagttttgtactttgtgttgagtttgtgatgctaaaagtatttaaaaattatatactaaatcacattgtaccaaagctgtaatggaaaagcaaagaagaattgatgaattgaaggaataatttatatacattatagagttttcttttttaatggatatatactgtattgtagtgtttaatcaaaataaaactatttgaccttatggaggaaggtcatgtttttaccaccagtttggttc

SEQ ID NO: 11389 - DNA, 1856 bp, Homo sapiens
aaactgcaaatggaaaggaattcaaaagaatttagattaaaagttaaataaaaagtaggcacagtagtgctgaattttcctcaaaggctctcttttgataaggctgaaccaaatataatcccaagtatcctctctccttccttgttggagatgtcttacctctcagctccccaaaatgcacttgcctataagaaacacaattgctggttcatatgaaacttaggaaatagtgaataaggtgcatttaactttggagaaatacttttatggctttggtggagatttctcaatactgcaaaagttgtccagaaatgaatctgagctgatggtgactttaagttaatattattaatatatcactgcatatttttacccttatttttgctccttacagcaagattagtaggttataaaaatttaaatttaaacaaaattatttcatgacaaaatgggaaacttcacatcatacttatttttgtttgcctttcaggcatcatattagcttttataaaaaatggtcttgctgctgaaattgtacttattttatcagaggctgggtgcagtcaagacaaaagtaaaatggtttacctgagcccaggggagggaaaattgattaagatatcattatttttgtttggtttggttttgcttttttcctcttactttaattgaaatactctgaattcccctcatggaaacagagagcattgagagcactttctttaaaaggaccaaaaataaattcctaatagattttgtcctaagagagtgtttttttttctagcatcattttctttacatgccactcatgtcataaggcatggacaggctatctttcagtggccattactatgtttcgtacacatgctttattttacttgggctctgagaaatgtgtggctttccttcagcattttatttgtgcttctctttttaatggagattgaaaagggagaataatgtgaatatcacggcttatattattaaatgttgattgatggcttgtaatgtactgcacacaatatatgttaactctgcagaatgacagaccctgggagaagtaatgccccagttgtcccccactcctaatgccaggcagagaaggacagcctttatagacttaatctgctttttgtcccatttgacaaggtaccaggaggaaattttttaagggatcaactgtatcacagtgcccactctggacctaagtctagtgtatccatacaattggtgcagagaaataaggtgtaaatggtgctttgttcctgctggttccaagctcagaaaccaagactagctttgtaggagagaatgagagcctgcaagcctctctttggattggctgaggagtggtgggagcagggggttgatagaaaacatccagacacacatataagcaagtggccgtgctacctttttagagaataaagaaacagacttttgagtttatatgcaatgccttcattaggtaccaccggcacttacaaaatgtgcggactgaatcccagagaacactggcagatgtatacagtatatggattgtatcgcttccccaatgtttgtaaattcacagtatttggaaaactgccttcattttccagtgtgggaaaaactcttgctacctgtattacttgatctcagacccatacctgatggttcagtctgtccttaagttaaaagaattttgcttttctaatgttatactatttacctgtcagtgtattactgcaacttgaatcactcttttactgttgttggatataaacttatcctgtaccaatgtatttattaacacttgtattttattattgagcatatcaataaaaatattaaaaaataacagattgttttttacc

SEQ ID NO: 11390 - DNA, 1715 bp, Homo sapiens
ttgctggctcctcctccgtttgcagtaggcaagctctgctgcgatgcctctgcctcatctcacactgcgtcaacccaaaggagctgccgcactgacccagccccccaggaaacagtgagacaagaatcaagtatctgagactgtggagtaatagccacaaaacagagggcccactgcacagcatatccaggctgccacaggtggggacgaggctgagagagtcagcaggcagagccagatgccatgcttggcagcagcagtaggactataaaccacagctgtcccccaggatcccactcctttcctgtctgtgtggtgtaagttaacacactggagtgtgctccagtttgcagggtagcccagtgcaaggttcagatccatgtagctaagtattatcctgcttccagacctatgtcaccagtaccaatcagtcagtgtcatcacatttcaggccccaagcaatctctgtgcaaagcatcagaaagacctgcttcccagcccccagcattccagtgctctccaggcttcctctctttgtgattgtgctgtccagagtgtccagcttgttctttctttctcttcagtcctctgagtacatctggtggtgtgcattagatgtgagggctatgttgacatggcatcacctccaaagacctgacctgcctaaagactgatgacaggccatccttcctgctgttctaggtactggcctgggtgacagagcaggacatgagacatagatacagtggggaggagaagtggggaaaggtggagcagagagttcttacttattgaagattatacagccctttcggttatgaagtccctgcttgaaggcaatggacctggggaagagactatcacaaaaagtctccattttcattttacatcctctctattggaggcagcacttttccctcatgctgtcctataggactccactttgaaggttgtgcctacgttgcagggaactaggaacatggaggggaaccaacaacagcatcttagaagaaatgtagccaaattggagtccattcttctttagggcagtatatgaaatcctagcagatgtaaaatggaaaagaatcctaatgcttcttccttcagaaagtagaggaactaggggcccaattagcatcatctaggggaatctctattactctgtacttatactaatgtttacaagaatgcaatatactgtgatgccttcctactcaagcctcctagcattcaaacttccatcctattagtcattaacatggttaaacttcaattcacaatcaccttggaatcaatgtcagtttgatttattttgttacagagcaataaaatcattagaacaatggtttttaaaagacttaagtggatgcatcctatgcatgtaagcattatttcccaaaccaaagcatcattcatctccatttatttcttttgttcccgctcagtgtgaagttgggaactgagaggggatggctgctggtttcacagaagtttggatgccttactcttatcttaaagccagcatccagaatttcctccctctctgatgccacatgcaaaaccaggtgtacgatgtcaagatggattctttgagagccagggtagatcatatgactgcctttctgtaaaattggatgcctagtacaaatgctctttgcctctaattcagtattccatttaataaaaacaatacagtggctggaaaggagcatcag

SEQ ID NO: 11391 - DNA, 191 bp, Homo sapiens
atatggttatttatgcactgtgggatgtgttcttctttctctgtattccgatacaaagtgttgtatcaaagtgtgatatacaaagtgtaccaacataagtgttggtagcacttaagacttatacttgccttctgatagtattcctttatacacagtggattgattataaataaatagatgtgtcttaacat

SEQ ID NO: 11392 - DNA, 671 bp, Homo sapiens
tcatggctccgatcttcatcttgaagaagagtgacattgggtgactgctgcttggaaaactgtccacacttgctactctttgagaatgaagttgtcattcagggcccctcatgtagccaaaagaccaagaaaaatctggcccacagataagttgcagactgcctttaaaatagattttatcagtggagaaatggtgatagttttttcttcagttttctcttgggaagagttttatgttgtttaaaagatattttgataacttaacctgctttatgggcttacataatattcctttcatccattctttttaaagaacggcttacctttcctatttatttttagggtgattttttaaaaagacttgtgcaatacattttgaggtgaaacttagtggattttttctgataaattagagcatttaattgactattttattcaggttgatctgttgaatatttgctaaagaccagttctttaagctaagacatgtaaaaaatcccaaatggcagtacctcattgtttacttagcttttgtacttatatttttcagaggaaaaaacactactgtaaattgtgaatagccaatacataactgtattgtatgcaaatctgtgattgttggcagtgtcatctctgagaaacagataaataaagtttatttactatataac

SEQ ID NO: 11393 - DNA, 748 bp, Homo sapiens
cattcactaatttaatcccaactactactccattttgaaggaaaaaaatgaaggctctgaaagtgtaaatcgcttactgaagggcacacggccaggatgacagcggagccaggatcaccccaggtctgtctcattgcatatgtcatggctctgcaaactggggcaataggtgagcagggagaagagtcatggccaaataaaattgagacataccgatacacacacacacacacacacacacacacacacatttacacggtaacagccttattaaggtacaactaatgtacaataaggtgtacatatttaaaggatactatttgataagttttgacatatgtctgtacctgggaaaccatcactacaatcatgatggtgagcatatctaatactctcaaaagtttcctcttgccttttgtaattccattctgccatcccacctgtccctcccactcctgatcccaggcaaccactgatctgctttctgtcactatagattagttacattttctagaattttatataaatgaaataatacaatatgtactatttttctgtgtttctttcactcagcaaaattattttgagattcattcatgttattgcttgtttattcctttatattgttgagtagttattccattgtatgaatatgccacaatttgtttatctgttcatctacatatggacatctatagatgtttgcacttttgggctattaaaaatcaagttgatgtgaatgtttgta

SEQ ID NO: 11394 - DNA, 367 bp, Homo sapiens
aaatgtccccagagtggagaagttcagttcaatccaacatccttatattgcaatgaggataaagaccacagaccctatggcctgtatgacccagctgcccatttctaggaacccattcctacagaaatgacaacatgcgtgtgcaaacagcaacaatgacaaacataccctgggatgctttccctctgtggtttgttatagtaagatagcggctacagcttatatatcatcaacagaggactggctaaatgatggcacttcattctgcagaatctttttttgtagtcaaaaagaacaagttagatctatatgtgtgaacatggaaaggtgtacatgacttaagtagaaaaattaagttgcagaacga

SEQ ID NO: 11395 - DNA, 799 bp, Homo sapiens
gctgccacaccagtcacatgacctgatcactagcctgtcatccttggtctttgtatcttccatatttggaagaaaaaaatcttctccagatttttcggaggccccactgatgctgttctcttcttcattctatcaagcccaggtgccagcctgaggcagccacttcggccaggtcacacgaccggggccagcaccacttcctttaaagatgaactctgaactttggagagtgagctacagagccgagcaatatttatggatgcaacacgcatggtcaaccctcaggggaaaactgttacctaaagtatttttataaatataagccttttatactgattatgtcttttatatttgtatcgatgttttattatttctattaaatagttatataattcactcaagcactgatatctggcctaaaatcttggaagtacatgtccatgaatacaaattttaaaggatgaaaatcttaccgtactttggaacttgctgtttaaaaagacagatgaaataagttgaagaaacctcatgtaatgaatccaccaggctggcagtggtgcatataaactgtgggtgtggcaagaccccgaagacatttcacatctttatcgcctcgatcaagtgtggagtcacatgctaatgtgtgctaaagaactgtaagtgttttttcatatgtacttttcattggaagattcccaacaagaatttggatggaaaacctgatccctagcaagaagtctgctctgtatcacctttatatagcagacatgtcaccctgcttctacacagatgatggatg

SEQ ID NO: 11396 - DNA, 3601 bp, Homo sapiens
ccctggcctctgcctgcctcccgcctgtgcactctggaacctctggcctcaggggacctgcctgtcctcagctccctgggagctgaaagtgaggatactccgtgctccaggccacagggtgaatgtggccatgcctacctgttttgtttttttaagaacagaaacaactattttaaaagaactcttttaagaaatttcataaagggacatgcattttactgggtttgcttttcttaaaacataccaaaaaagaaaaaaatagaaaaaaaaaaaaaaaaagcttgatctctatcagacttcctttcaactgtcctcccctccaagcagaccacctgtccccttctatcccagctcagagcagctgacccaactcagaatctctttcctacaggatgaagtgccttttgaatgttattttaagccgagagttaatttttctacacaacatatttccagacatcttttagtcttttattgtcttagatactataagaagatgaacatgacaattttctagaacctggtagcgtgtgtgtgtgtggcggggggtgctgagggaggggagtgagtcacaggagcctgtcccccaacaggtgtgactgctctgacaacctgtggcatgctgcagggtcaggctcctgataggaggatttcatgactatgtcattgtctccactcatttttgacccagtttggaatgtatctgcaattgtgtggctcaacactttaggaaacaatagattattttatattattatttctgatggtgacaagtttgtcttgaggtcacattttctccttgaaaagtgacatcctgtcacttctgctctcacactactgccatacatttgtgttttttgttgttattgtttgggtagagcagttacaagaaaccctaaaacccttggatataaaagaaatctgtttattgatttttaaatctttcctttccaaaagctggatacacatggagctgtttgggaattttccttgctgctaccgcgctgccaccaaatggaattgaccagcggctgttacactgttctttgccactgtgcctatgctcagaatatgctcactgctaagctacaaactcggacagggtcagaaacagaggtgtcccatcccattgcagcctccaccacctgtaaccccttcctggcattggccactgaagggtacaaaggcaaaaggaccacagcaccacttaggtgtagcatggattttaaactgcagtcagtatcagatcctgtttgataaataagctgactgttctctcttgagaacctgtggcctcaaccagccaccaagctgatgtggcccaagtccatctcttggtcttctcctttgaagcacagcctatttctgagccaagggttggggaagcctgtctagatgtgggactcattgccccaaaccagggagaggaagagctcccacagggagagcccaggctctctttgcagcctttcccagtttggtgtttaagcagtgccatgttccttgtttgacaacaagacagtctgtaaagtattgctcttaaaaacaattaaaaagaaccctttcatattggcaccattgccttagtcctctgtgggttggtcttcagccagcattctggtgggagtgactggcattaacaagactggaaatcgggggtcaaagtaaaatatctttgttttgctttcattcacaaagtaatgaagccagctgccaattacatcctcccaacagcactttggtctgtggactgctgtgtgaatattcagaagggaagtaagtattcagggggtaaacaggtctcccagcattctgagtgttccaaaccagtaatccacatgccaattcaaatagaacagccccttgctagatattaccacagataatgacagttacatggtagaactgcccatgccacaaatatttatttggaaaagtagtcattaaatgaacccactgccttaaatgtcttgaatgttgcagtcaagtgtctgtcatgtgttgatatccacacagaattaggccctaatgagagccttagaccctcaaccatgcccccttcgttggcatcacagggccttatttggaagagcgggcaaagaggatggaaatcataaaatatttcatgggaatcgaacctagggatagtgctccacttctgacgatggagtgaagacacttggcagacttgagccagacacttcacctagtagttcctgaaactgtgagcaccactgcactaagccagtgcggagctgttagggacgggcccagctcctgcaccacggacacagaatgtctggagagggccagcaggccctctgagggttctggaatctgtgcaccttatttgaccacactccaaaattctgtttttattttaacccttgaatctgctttatgtacataatcaaaatatctatatctatatctatatctatatctatatatttttaatcatctacatgtaaatgaagcaatagaattctaacataaggccaagaaatgagacgaatgtttggggtttatgttttttaaggtaaatacgggtattgtttttaattattaccatgtattaaattgtgggctttgaaacctaatgaaacctgttagccacttctctgtgccatatacttcccatgttaccaaaatacccccaactctttagccaaaagagaaccctgacctcctgagtttccatgctcctttctgtaccaggtttaaatgtagtcttctggagaagtatttttgacattgagctctgggacaggacaccttgggtttgtggactgcagcccactatgatgttattacttctctggccaggcctccagtggaagtgcacaggcactcccaatgttgttaatgctctgtcttccatttgttctggaatcctacgtgttggtctgtggttccatgcattagctgtttgtaaataatgcatttgcatactgaaaaaggaatgccacctgccacagttgatggtgaggaagctcctttgacgtggtgcaattttgatgagatgtctctggggacacgaggatgccctaatgatgctgacttgtcatggttgcagcatttgaacttttggtgttaaaaaaaaaaacctgtaagtctgtaacctggcaacattttacaaccctgtatttttaaagatggctttctaataaaaaatccagaaccacacagccctatggtcaaacaatcctacgtttgtgcctctgcttttaaaggtgctgtgctggacagttggcatgccagggttcgagaagagtgaatggcttgacgtacttgcagttaactgtgcaaaattggctggctgcctctgttcctactgtactgtaactttgatcatgtctgttcctgttccattctcccaggagcttctctgcagactgacacaccctcccccaccccgggtagtggagatgctggtgtctgggtagtcatggatttctgctggacatttgaatgtgataaacaatccagcattacttaggaaatgctacatgcggaatgtgcacgtttccaggggcgagtattgtcaatcaaaaggtttgcaatgatttccttcctgccaaaaataaacatgtgaaactgc

SEQ ID NO: 11397 - DNA, 129 bp, Homo sapiens
acccaagccctctcgactgcccctatcccctggaccccaacatacctacaatgctggggaggccctgcttccactcccctcagaggcttttggtcatcctctgcgtgtcagtaaaagcaggcagcccat

SEQ ID NO: 11398 - DNA, 325 bp, Homo sapiens
ggctccgccccagccctcagccccaggccccagctggagaaaaaacattgcccagggattaggagcagctcttcagcacaaagacacagacttggggacctggggacctctgggcagctcctggaatggaagaacccccttccacaatggtctcagcctaggccctcatgatatgtcctcagagctaacataaaggacaggccacaccacagcagagaccaccacattgagatcactactcagtgcatagcgaagaccagtatggcaaaattagtcttggaaaaaaaccacagccactaagataaattcatgcacttttactatg

SEQ ID NO: 11399 - DNA, 1733 bp, Homo sapiens
agactgttctgaggccctgggtgtgtgtgtatctgtctgcctgtccatgtacttctgccctgcctcctcctttcgttgtaggaggaatctgtgctctacttacctctcaattcctggagatgccaacttcacagacacgtctgcagcagctggacatcacatttcatgtcctgcatggaaccagtggctgtgagtggcatgtccacttgctggattatcagccaggacactatagaacaggaccagctgagactaagaaggaccagcagagccagctcagctctgagccattcacacatcttcaccctcagtttcctcacttgaggagtgggatggggagaacagagagtagctgtgtttgaatccctgtaggaaatggtgaagcatagctctgggtctcctgggggagaccaggcttggctgcgggagagctggctgttgctggactacatgctggccactgctgtgaccacgacactgctggggcagcttcttccacagtgatgcctactgatgcttcagtgcctctgcacaccgcccattccacttcctccttccccacagggcaggtggggaagcagtttggcccagcccaaggagaccccaccttgagccttatttcctaatgggtccacctctcatctgcatctttcacacctcccagcttctgcccaaccttcagcagtgacaagtccccaagagactcgcctgagcagcttgggctgcttttcatttccacctgtcaggatgcctgtggtcatgctctcagctccacctggcatgagaagggatcctggcctctggcatattcatcaagtatgagttctggggatgagtcactgtaatgatgtgagcagggagccttcctccctgggccacctgcagagagctttcccaccaactttgtaccttgattgccttacaaagttatttgtttacaaacagcgaccatataaaagcctcctgccccaaagcttgtgggcacatgggcacatacagactcacatacagacacacacatatatgtacagacatgtactctcacacacacaggcaccagcatacacacgtttttctaggtacagctcccaggaacagctaggtgggaaagtcccatcactgagggagcctaaccatgtccctgaacaaaaattgggcactcatctattccttttctcttgtgtccctactcattgaaaccaaactctggaaaggacccaatgtaccagtatttatacctctaatgaagcacagagagaggaagagagctgcttaaactcacacaacaatgaactgcagacacagctgttctctccctctctccttcccagagcaatttatactttaccctcaggctgtcctctggggagaaggtgccatggtcttaggtgtctgtgccccaggacagaccctaggaccctaaatccaatagaaaatgcatatctttgctccactttcagccaggctggagcaaggtaccttttcttaggatcttgggagggaatggatgcccctctctgcatgatcttgttgaggcatttagctgccatgcacctgtccccctttaatactgggcattttaaagccatctcaagaggcatcttctacatgttttgtacgcattaaaataatttcaaagatatctgagaaaagccgatatttgccattcttcctatatcctggaatatatcttgcatcctgagtttataataataaataatattctaccttgg

SEQ ID NO: 11400 - DNA, 2596 bp, Homo sapiens
accacaaccctggaagaggcggcctaaggagattccacacatgcgtatctctgttgcttctattggcctaaacccactactgccaaagaacccagcaacaaacctcccggctaggagctttagaagtctttatgttcttcctgccatcattcctccttttcccacagggaaagaaaagttggatcactagtggccagcatccccagagttccgttagtaaacttacttcatatgtcccctgtcttcctccatctgagaagtggcccatgtgcttcaaggcccaggagggagatctgtcagctcattcttgccttactccaatgatggcccaggtggaaaagtagcagctgtatcgggcttcctcatcctgcctgttcccccacacctgccaggatatggacatcttgggatatctctttaccactgaagtagaattgattgttcagctggagcccagagaatttaatttaatgttttttctttgtacctgatgtgaattctagcaacctttgttaggaaaaagcacagcctcagatggaggcagcctaaactgtgttcttgttttgttcatggtgtttctaagcgttttgctgaagctgctctcaggcacccccttcttcattgctctctccagaaagggttgctagccttaacttcagctggtgcaaaacatctgactgtagccgaacttcagccatcagatccttcaaagtggaactttggattgtttttacagacaacatcgagtaatggcttgtaaatgtgaattttgccagaggtggtttttgaacaggaaaatcataattcatatcattggagaagtatttattttcaaatatcaaattgaagaaaaactcaatcctcccatgaaaatcagttcgcctggcctccaagtcgtgaggaaatgggtatgcaaggctgagatttctacagcaataaaggagacacacactgggccagagaggcctgccttctgcctgctctcctgcactgaccctttggagggggtctctgtgtgctgaagctaactcaagatggaaagtgaaaccacatgtgccgtgacctttaggttttatgagtagacagtgttcatttgattttctacagaaataatataaattattctttaggtttaaaaaagagcactcataatgcaatatgtgaataatcagtgaggttgatttttcttttttcctaccgtttcatagtctttgtctaactgctagtaaccctaccgagttttatatatgagtgggatactcaatctggccttaaaaagatacacaaagatgggctgtgggtccctggaaagggggagagttgccctttacagaatcactcgagccctttccagcactgttggtctgatgaacaaggttgttttaccttattttctcttggaacatatctgaaaaccttccccacaaataacttgtcacaccttttgtttcattctgagtctttagttttagtcatgggctttcttcacctgctctaggtgcaaaggcatgttgggaaagagatggatgttggggaggaagagaggagatggatttcagttgggagttaggaggagagtaggtgagatgatcagacaccggagttcaacgtcccagcagtcttggtaaaaggagggagcctgctgagccaggagggagaaaagaagattgaccagcttgctagaaaaatacttagcttttctttttctttttttgtggaggggggacggagaggaacaaggatggggaggtaggaatgaggtatagaaaagagatagcatcttctttggcacaagactagtggcttaccgcttaccttagagttttgttttttttttttcaaacccatcaaaatctacttatttatgaatccaaggggtggcagcatcactctgttctagcattctttgtggagatggtctggtgcctagctgggagtgagcagcagcccatcccctgttcactttctctagcccatcattacctgtgaactgcagtggggcagtcatggcaaatagaattgggctggggtttctccttcttttcagttcattgtttgccctgctaggaattagaagacagacaccatgtcccaggacagtgttacttcttctgcatgatgtgtggtagactccctttgctggcttgtgcagtgatactgagaaaatacatgaacagaaactgcccaggtggaacagcacgtaacctagtgagtgactgtactcctttctaggaatgctgattcagagtgcacctctttgactaggtcccaggatccccttgtccctggagtagggactaactatagcacaaagtaatatgtgccaatgctatttgtgaaatgtttggtctttctaaacgactaaaggatttgttgggtttttgcttaagttttgaaccaaatcctagagccagctgataatatttaataatctggaggagagaataatgatgtaccaataagtggagattcctccttatgatgtatgctaggttatggaagatgtaaaatattcaactttttcctcctttttttggactttgtattttactgcatgttttcttcatttttaatcaataaagagtaaattgtcctt

SEQ ID NO: 11401 - DNA, 850 bp, Homo sapiens
ttgaggtctctaagagctggaccatcagcagcagggagctgcctaaacacctccttggatatggccaggacccacagggacacagggcaagaccagccttgcttatggaggcaggacaccacaatctggcccatggctgtcacctcctgccgagtccaatcccagactgggaaccaccatctgagacaggacctcccggcctccttcacctttctcatctccagagccctgcccccaatactctgtctgggttaggatcttgggtatgtcttggaattaacttgtcctctaacaatcttcatggggtatggctctcttgatctcctcaatctggagtcccctgccctcaaaacacagtgatgttcagaacagaacacaaggtaagccctttccaatttgtgggaacaggaggggagaggaaacaaatgtgaagttgtggactctacccaggcaggtggatgaaaatgctgtggataaaaggaaggttatgattccttctagcggatggaccagattcctctggctaacgtatggccccataggtcactgggtcatacagagagaagattcagttcagcctaaatcaaaacttccaccttgtgttcacttcaaagatggcccaacccccgccctacactcagctcatgcctaacctatgtgtggctcagggaccagcttggggaaggaaaggaggtttgttctgctccccgcctcaccccgcctcctcctgctcatgctcagctgcttctggaccttccagggcccatgcagggtgagggaaagggtagaggtcttttcaccgagctgctgctggttgcagttctttctggtgcacattggctaatgccag

SEQ ID NO: 11402 - DNA, 325 bp, Homo sapiens
ggaagcggccaagaatgtcattctcaatgcccagatcctgagattggacccataccctgtctccaaccctgccttgaagcaattcaataaagaggaagcaaacagccaggctccctgagggccaggcccccagaccatcttgggttggaattgagtggccaagtatggggtcatggattccaggccacaaattccaggcctagttcagtctgggggcagggtcagtccttctcccaggccagcccttgacattaaaaaaaatgccccctccttctgcaggagctctgctgtgattcattccaataaaggtacaatgttggtcttg

SEQ ID NO: 11403 - DNA, 1963 bp, Homo sapiens
acaggcatccctgttgcccctgcctgcccagatttactgaccccatttgtcgacatggccccagacaggagggatccacttctctgttctgaacagctcttcctgcccctactgactccttggagtgtccaggaccatcttaaagccgccctcagcacatctgcatgaagatagataggcactcctgtccctgtgcccgtgtgccccagggcaggaaagcatctctcttttcctgtcttttatcccaggaggcaggacaacactgagactgggatatgtccaataaaaactatgacttttccccttgcagaggcagaattaaagctaatctagggactcaaatcagcagaatgggggagacaaagcccggtctcaccccctaacctcatcctatctctttctccaaccctgactgcccactcctccacaaaccgtgacccatagccgcccccaccccataccttgatctaccatccatcctcttccccaatccaaaccccacagtctcttctctcccacaccctgccctccttgtttcagctgtctgaggtgcctcgcagggcctctcttacttgccccatgctcaccctttccatgctgtccccattctctcctttcaccatctctcctctccccctccttcatctctcctccctccccaaactcacttggcataattcacaacctcccacccaaacaatgggcctggtggacgtgcttcctgtgccctccctttagctatgcccacagatcactgagagggaccatctcccaagtggtgcagtttagaacttctctccctttttctccctcattccctctctcttcttgcagtccacttgctgaagaagttgtgtcatttctctggaagaatttccaaaattctggatttcttttttattttggagtatttcatcagctgaaaagtgattctcactttgagttttcttcctatatttgtatagtgagttcctttttccttcctctttatccctcctgttttactttatacctctctattccttgctcaaattattgcaaaagcctctatagaaagtcctctgtgatctgactcctgcagactcttccagatttttctgcccaaggcctttactgagctcaggactccagctaaatcaaaatacgcatgttctcacccagagtgacaaaatcctgcagataggtttaagacctagtggctcagagcagtagctactgggaagttaaaaggaaggggcttagaaaatgaatgggaccaaaggcatcacttctgatggagatgaagccatcttgaaagtgagtggtgtcctttggaggcatggtggatgaaaggcgcaaaggaagcaagaggttaaagataatggcccattagatacaacagcaagcccaagattccgaagaagacagacaactccccctagtaccacctagacattactttttaaagacattttacattattgtccagcagaaaaaggctgtcttggaccatgaaacagtaaactgtaactaaacacttcaacatgaatttgaaaataaataattgtggatataaaagaacaccagagatcagaaattcaaaaactcagaataaaaatgaaaaagctacaagcatatatgagaagagaactgactgaacttgggaaataatttgaacaaaaagataaatcttcacagatatgaatactaaattatatcttaatgaaaatagatatggtcacaagtacattaaggcacgtagaaggtaggagtaagaaaagctaagagaagcaaaacaaacaaagcaatattaaaggaagagccaaaaagacccagaaataaaatgacagataaagaagattgtcaaagaaaagatgatacaggtaagattggaactcatgaagacaaaagataagacagtggcatagagttaatatttaaaattcaaatattaaaactcaaataaaccccaaagaacttttgg

SEQ ID NO: 11404 - DNA, 9808 bp, Homo sapiens
gcccaggacatgagtgtctgtccagactcagtggatctgaagaaaaaaggaaaaaaagttgtgttttgttttggaaatcccataaaaccaacaaacacataaaatgcagctgctattttaccttgactttttattattattattataattattataattattattattaatattattttttggattggatcagtttttaccagcatattgctctactgtatcacaaacagcggacacgtcagcaggcgttgaggtgctgagctgtggatgcagaaccagcgccatgctgaagagcctcagccacctcctgtcctttgggattcgtttttcccgctttctctttgtttgtcgtctcagaatctgtgacacaaagaaacccatctcctgtcttaggaaacctaatgctgcaaactctacctagaggaacctttgaagactgttacataagaacataccttcctcagaagaggagtttcctctgccctctgcccttctcccctgcctccctccctcccctccttttattttgttttagtgagcttaagaaacagcagatgtgtctttcacggatctaacgggtgttgtcctgatcgagaaaaaaactgggatgagaatggtttggactggagttggaaggggaggacggtactgggggtagggtttggaacagagctacactggactcgggcacattcggagcagcatcctttagtatggaggctacttctcaggtaaccaggaattgaggggaaggaccttgtggaggccgagcattaacagcaagagcggggtttggagaaagtctgagattgggtgcagccctgacttacctgctggccctgaccagtttcttttcactaacttggccttgggcataggatgaaacattttttctgccctaattttaaaactaggtgagggtagaatcatcacaggttaggaatacattcttcataagacacgatgctgtaaatacccttaatggacgaaaagttgaaatacttttgtttcctcttggagcagttcagggaaatgcccacaggggattgtcctgcacagatagggcaagaggatttcctgggtggagtctgccaaggcctgcctcgctggggaccccagagtcctgcacctctggttccgccccaggtggtgacattactgtccccgttctgtggctcgtggacaagactttctccagaccccttaaagtggtacatattctaaaaaactgtttttctattatgccataaccttgctctagtcagtgaatgttcctaatgctgctgtttcaacatttgaattctttttaatttatgaaacatgctaaattttttttttcaaacaaaacacacacatccacatatacacatgcttcgctatgtggcttccaaggtttaaattttgaaaagtaaaagaattaaaacttcacgaccacagatcacctcaaaccagaaatacctcagaattttctacttatgtaaggtttattatatattttgttagttgtgttgtcttgtagtaagtatattttaatgtaagttggcttttgtgacaaggaagtttaaaagaaatagagaaaaagaaaaaagtttgcatcttctagggagtgctaccatttttgtttgataacgcccccttgtaaataattgtcatcaactgtaggttggctgtctgggccaagtctgggcatttatcagtcttgtttgtgaaggcttttccttctggtttctttagatcattttatttaaaaacagtgcatctcttcatcgtgagggtaggcaaggcgggggccgtggggagaggttgacctgggtgagaactgaagaggccgcctcctcttgggttgtttggagcttcacatgtaattcacatgtaacatgtaacttgatcggtcagtgttcagaatgacaagtaaccccgcttaaacttggtagaaggatggcccttagacctgaatggggtgattttacttgggatttaacttcttcagcaaattaacagcaacgttggaagagatctgtggcgcctctgtgaagcacaccgtgactcaggccagtcttttagtgcagcgtgtctgggagtgaagggttttgcccttgctggtcttggagtccacagtgtgaggggcactgcacatgcctgggcatctacctagtgtgctatgttcagtgtctggggcttactgccccggggtcctttcctctgggtgttggggcacagggtgctatgggaggcccatttgcttccctctcggagctcagtttttgcttcatgggtcaaaatgtgggctggccaagtggttacaggaacagggtttcggtaagctatgttgtctttttttttttttttttttttttttttaatggtttgattttgtgctgtggtattttttttcccttagaataatttttaatggcaaaacaggccttacagcagttgcttttctttaccatttatttctttaagaagctttaaaatatttattgaaaagtgccatatctaatttctttagctttcgcctcaggcagtgcaggcatctttacttttcatcctcagaagaaacaaacgactaacaaatgtagcaaatttactgcaggaatagttaggtcatgatactacctgaacactaaaccccagcctctttgtttggttttagttcctctgggtggtttttcttttgtgtgctggcttgattcttgtgagaagttttgacctggccaagggagggttgagccatggttctggtgtgggactttgcggtcaagacacagtacagacaggtcaggcctgcgtgccttttctctgggtggcctccccgttaggcccaccgtacgctcagccactatagtgtccctgtggggccttgccatcagattgtgtgtcaggagatggtacctttttggtgtggctggggaggagtgtggtccatgccagttctttgggcttcaggccactcttcccctcatgctgtggtgtaaagtgcacccatcaggtggtatatctggttctgatggcaagaagaaggtgggggatctccttatagggcatgggtctaggagcacagatgggccttttgccccgggtaaatgcttgtctgtttgctgtcatgtgttctttgaggagtgagccatctcgagccctgctttgaatttactgggtcatagagcctctgcctgtgctcttttccataatgacttcatgtgacatgcacttttggtgggctcagataattggtttctttttgtttttgacctcaggctctgtggcagactggggaaaatggggcctggcatcattttccctgtcaatgggaggggctgttccatgcagggtgggaggggaccaagttagcagagagtagccaaggatccttgcttcttcctttctagtgtgctgtcatccaagcaggctcctggctgtagggatgggccttggggaagaatcttctttgaaagcatctatgataactgagaagtcatccctagttggagaaatccagtaatgagcagaaggaggaagcaagtgaggacagaggccattgtattacagtgtcacgcagagggccctcaatgatggggcattggggaaggctgtagacatagtcatcagaacatcctggcctggcataagctgggttttctcctgggaccattggtcctcagcaggagttctttgcatgagttgctcaggggcaagggctgcaagtgggctgtgcttaggagaaagtgacacctggcagtgagggaagatggtgagcattattagcctttgttgtccagcatggccttcttgtcctgtctgctctggagaggagcctgtgggaccagtcctgcctggggagggcatacccacacgtgccagctgattctgactctgaatacatcatgtccggacttgggggtgtttctgcagaaaaaggaggttgtttttcagccttgaacatcttcaggaggatagagactcttgctcacatattcttagcaaagggaagggtctctcatctccaggccacagagatagttcttccattgccctaagaggctaggctaaccctcttgacataacttagacagcaaagcacttcatcctgtagttgggctctgtcacctttctcttcagttggccacattctcgtttcctccatcctgctatgctttgtgtgctcgggctgtgtgtggggtttttccctggtggaaggaagcccagctgtgtattgaatgtccttcatgtgttgtgtgtggctcagaaagcctgtcacttggcccctgtgctctgagccgtgagggtggggaggtggctgttccattaaagtgggagtattggatggccctcttgaaactagaattttgccttttttagtatgcagtataaagtttccagcatctattggtaacacaaagatttgctggtttttaaaataatacagtaagcataagtatgtaagtttttagaattggtactagaagttggacagctagttattctcgagaactttatttcactagaaaaatatactaattggaaagcagtttccaggagttaactcagtttaattttcagtctcagttattttagcctgttgagtttttgatggcacacctttggagagatggccacgcctgattcccatttcaggggcatcagaccatacctttttaagaagctccgtgaatctagtcatctacccttcatcctgggcgaacagccaaaaagagaaggggacaaggtgtctttttctccttctcactggggtgacatgaattcttttagttaatggctgtttgcaaattctaaactaatgaaatacttagcagctaacatgttcaatctagtaatgatgagtttaaatctcaattgacagtaatgttttagataaacaggcccagtaattcagttgatgaactgtatatcttctcagtctagatttgtaaatgtttaatgaattcagggttataagcatagttctttaagtaagattccagatagttgatttgcaaccagcagtctacctatgaatgtatcccaaacctttagaagattggaaaagatttttgaaataatgatttagttttgtaggaaaaacacccccttgaaaattaattcggttgacccagtaacattttttaaaacaattggtggctccaaaaggcctgccaacaaagaaaagtccaaattatctagtgggacattttgaatgttttatgtttattttgggtccactgtaaactttggttcaaaaaagaatttgaatttaaagaatttaccattatttaaattattaccaagtttttacattttcatgatggtattttccaggtatgaatgaaacatgactttttgattgtggtacttcctgtatcccctgtagtgccaaaaccagtgatactttatttgctcctatggcagctcatagaggtaaccgaagtgatttttcctcagtaattgaaacacatattctctaaatgccaatgtgtggtgatgggccctgcactgccttcatttctctagggcagtgtctttggattgtctagggcctaggtaattctgagaactactgtaaaccaaccacagggcactaaagcaatgtacacaccactctttgtgtgtatggaaggggttatataaacctgggctatgctggacatctacagaagagtattacattcacttgcaaagtttacatttttgagctcacagttatgaaaaatatgacccacaagtttttcaggcaggtgaggatgggtcttcttgcaaatgcatgagttctgtcttgagtcctgggaacttctctgttggttgagtgtgggctcattccctgactctcctaatcatgtttgcgtcagaatgttagcattgtaaataaaagaataggttgtataatagatacacaacacttgaaactttactttaaaaaaatcgatagttctacatatatatttagttatatcacttgacagatttcttctacacagtgtggagattgttttataccacagattatttttataaagttagtgaatttgaatgattttgtaatcagagctaatgagctttacctttcaagagaaacgtacactggagcatgagtggtgtggaacttttacttagtgtttatatggattcttgtgatacactggcagactggagtcaatttgcgggtcttttttggccaaaactccacttgtggttgtgtaggacagtgatattcagctcagcttcttgtggattgggaggagagagggcctgcaatgtgttttacattggtgcttcctcctgagatttctgttgaacaaagggttctgaggtcaaaaattagtttgtaagcctttgccataggacatagtcatgtgagagtgtttgggggaacagaaattgtataggggtgcctattggggtgggatgggactcgaataagattcaggtacaaaaactttgaaatgagaatctggtggtttgagtaatccaccagactgaattatctaagatcacattatccaggttggggggcagaattacccagttaagtaattgttcagaaaagtggggagggtggcatgtggatgcagtgatccaattaaatggagagctgccaggcacattttgtcctctctggtcagtgagaatggttgggttggctcgctgcttcaatctgtggaatcagccaggagcccagtgaggaagctcagaaccccagtaacagcagagcatctttcagatagctccagagttttcctgcttttctgaggaagctcagcatcactgccacaatacggaaagtggtcttcattttagcctatttatttttaggcagagagtggatggttatttgtgtgggacttttggtggcgatatataatgaataattaagttaatttctggtatgcataatggccagtcctgaggcccagctgaagacctgtcccccagaccctgcccgctggcttcaggctgctgcttctagacagaggtgcactggacgggatagttttatcaagagaatccctaatgtgtcattttaaaccagctgtgctttttattcattctggttgagcgtataggtttacactttaccctttttatacttggaataaatttagttccagcagatctagtagcactccagaaaccaaccccatctgttccccataaaaagaacattttctctgctctccagccacgtgtcttggaatgtaattctgttgtgcctttgtttttatcactctcttcgccccaaaagcaactgctgtaagcttttttctacttgtcttttctagtccccaacctctacctttttcctttttcccagccctaatttctggatgcacttctgtgatccaggtattttaagaaccagttacctcagacctcatgttgaacagtgtcgccatctgggtcctcttgatactgcagacttttaacgtacacatgcaggaaccctgctgagcgtgggcacttgttttaaagcaaaactcttcccaaggactgaagaaagggcttctggcaagctcgtcatggcattgtggtgggatgggtctagagtgtcatctgaatggtgcttcctgtgttcctctttgaattctgccattttcagtattcttgtgtgtctgaataggcaaagcgatttaattggctggtcttgcacgcaaattagttccaaagataagctctttgtaacacatttccagtcgctaatgctcaaatgtagaacattcctttaaatggcaggataaaaaacccactatccaccatagtgcattttgggaagatgtctgtagcatatgttgctgtgaaattaggccttgtgggatatggctgtttgtcattttgatgtattttaaataaatatatatattttttaaagagccttttttaccagttcaaaaagtttaattaaccagcagtcaccgcatctgaatttttgtctctggggcatagatggcagaccaagattaaaagtggtaactcagctatacgagcatgggctaccttcctgggctctcctgcagtcctgtagacctgctgttccgcagaccatgggacacaaggtcagtgtgttcccagtgagggtcccaagtcagtcatcttaagtgtttgttctctgccccattcagtggactgttgacttcagtccctgcaagtgctttagcccgagtggggttttctcagagcactgccacgagttaagtgtgtgtttagccaaataatttctccgtaagggaaaaatgcagtcacccaaattttaccaacaatgacagagatgagagtagaaaagattaggcaacatctgagttttaacttgaaaagtgtccaagtcatcatgaaaggccgactgggagcaagtgattattagagattcttcaggagacctcatctgaaaatgttaagactgccagtgagggaaggaattgttaaaatgccagcggcttttttttcctctttttttctgtaattctgtaaaaatgcagagaaagttgagtggtacttcagaattgagggagagggttaccgcagagtagaaatatatttctagatttcagttccacaccacaaatccacaacaatgccatttttcaactgtacaaaaatctgcttatgaactggacatgatcttaatggtagtgtcaaaggccaagtttttcacctgttaatatttttccacatttgtccttgaatctgaataactttatacagtactgtaaatttaacttacatcgagtttgttgtcaattcttatgaaaagagctttctgcatgtaacacatacggttaaagaacacagcaaaggacaaaatttgcaggaacagttttggaaccaacagaaaatgtcaccttttatttgccatcttatatatatctatcagttttaccagctacttctaaatttgtacattatttgtaagggaaagaaggaaaaccctaagacttgtctaacttagtggagaatgtgtgtgttgggcttaggatggatagctaagtcttattgagctgtgttacctaacttgtatataaaaattgtaattaaaagtttgggttcacctgtttctcacagtttaaaatgatgagtaattgcaaactctggaaatgtgactagtatatgatttaaggctgtagaagcaaggaagctctttcaagtgctaaaactaaagacttctagtttttggctcaaataagtactgtttgtataccaggatatgtgagatgtaaatgtagtaggtcacttttcacccttgtagctataaaataaaaattttgtagaacagaaatagcttgtactactgaattaacaaaagttatactaaagtatcatgtttaaaaaaaatatatatatatatacagagttaagcttgttgctgttaccctgtctggatttgaaaagtgtgctgatttatatatatatattacacacacacacacacacacacacacacacacacacacacacacacacacacacacacacacacacacacacatacacctaaaatggcctaaagcagacatccatgtaattacagttgcaaaatgaaaacattttggaaagaacattgtatcatagttcattcatttgcagtggatctttgttcctttttactgtggtaattttagaaatgagtgtcaagtttgaaattagatctgctaagttggggttttgctgcttgaactctgcactgggtcctcaaataaaccgatgtgaatgtagttttttccccctgtgtgaagaagcagttacaccccaacaataggaggaaaaatctagaactatttcaagttttatctttttgtatatgaaaataaaataataataaaac

SEQ ID NO: 11405 - DNA, 326 bp, Homo sapiens
tttttatctcaagatgtgtcataccgtctgtaatgaagcaggcatgccctctttaggctaacatattttagtggctttgctttttgctttttaaaaagtttttctctttaagagatgtggtctcgccgtgtcatccaggctggagtgcagtggtggaatcatagctcactatagcctcaaacttctgggcttaagcaatcctcctgcctctgccccctgagcagctgggactacaggcacacaccatcaccctcagctactagtggctttgctttaaagaaacagtggaatcctaaatttatgactaaaaattcccccaaaagatg

SEQ ID NO: 11406 - DNA, 1645 bp, Homo sapiens
aggctgggctaatgctcctggatattcatttacgaccttcctctatggccccaagagtagtcctaggaagcccactgatccccaacgggagcaagacttctaacggctgattggtatggaccgagattatctttcaattgaagtgactaatcgagatgtaatatagaaaccagtctccatgtgtagattaagctgtccccagggaagcagagtgcaagagcagaagagccccaagcagactatgtctttcaagatgtacagaagactgacaacaggccagtgcagactttgcttcctccttttgtttcaaaggaccttatctacccattaacacttgttagagacacctcagtcgggccacaactgtctctgtttcaactttaagcccacacactctgtagcttttctaaaacagtacattccattcatgcagtagatatgaaggctttttccaagtttgtcatataaagtaatcaaattgttttcaccgtttaagacagttatttttaatgggaatttgctgttgcacaatttgagaaccagcccatttcataataaaagattaatgttgggcttgttgttaatattgcatctcagatgtgttcttgtaggaagatctgttgaaattccaggtgctggatcatagcacttggactgttgggccggagtttgtgcagcccatgcctagcgatgctgcacctcccatgatgtcctggctttgtggcaaccccagggaggtgcagcagtttcactccttcctccactgtgtccagttttatttacacaaagcgagctgagaccacaggttcttgctctggatgagcagcatgacaccatcaaaatttaagaccatgatgaaatttcagtttcattcaaatgttacctaaaatttatggtgtcagaataaagggagatcatagtgagttaatttgatattcatatcctggaagtatacatatttgtttttccaaagttttatatgcaggtttttgttgtacctgtatccagatcttcttttcactgttctaacaatctaacactttcatagaatcatttggatcttgtatagagtgtaacttattggggataaacacttcaacttttggcagaaaatactttggattctccccaaggtcatttgtattcagagtaaatcagtggtccacccccataaaactgtaagacaagcctcctgtatgaagccagaagcacaagtgccttcagagggcagttgattccagtccagttgcctccctagcttgtgtgtggcctgcctccaccatagcagggactagggagggaggcagggaacgttttttcttttctacatcttcacaggttcggctgggggcagctgataggcctaaggccataccttactatttaagatactctgatcgcacaactgcagagacagggttccctcactgctagtcagcttcttttggaaactggacaggccattgccacctgcactttgaagaagtgagcaaagacgtggccacatttctaataagttgaaatggtctttctcccttcctcagagagcaaccagcttctttttttttaaaagtcctttctatctgttggatacaacagtgtgcttttggtgcacattttttagcaatagttgtgaattaatggc

SEQ ID NO: 11407 - DNA, 111 bp, Homo sapiens
ctggggtcaaggggcctggaccagtagaagccatcaacctactgaagttgtgtggagggatggaaagtgggtcagtggagaagggattcagaaaatgacacattcttcccc

SEQ ID NO: 11408 - DNA, 1183 bp, Homo sapiens
ggatcaatgaagactaaatataaaaaacattttcttgaatggcatgctagtagcagtgagcaaaggtgtgggtgtgaaaggtttccaaaaaaagttcagcatgaaggatgccatatatgttgttgccaacacttggaacacaatgactaaagacatagttgtgcatgcctggcacaacatcaagcctgtgattgtgtttattgatgatgttgaacaagtggtaactttaaaggattctgtatgccaagtgaaaaaaaaagatgtctgacctccttacatatgcaaaaatataccttcagagactgtcagtaggctggaagaagtggatattgaagttttgacatcaatgatgaggctccagttgtctattcattgactgatggtgaaatggctggagtgattctgaatcaaggtgattgtgattatagtgacaatgaagatgatgctattaatactgcataaaaagtgcctgtagatgacatggtgaaaatatttgacaggcttatggaaggactacagcagcatgcattcataacagaacaagaaattatgtcagcttataaaatcaaacagagacttctagacaaaaaccattgttgatgaggcagatgcctctagaagagacgtttaaaagccatcaaacacaatgcctcatcttccctggaggacccacttcctgatccctcaactgtgtctgatgtttcttctcatgtaagaaataaaaaataaaaataaaataaaatatattggtatgtaactacaggaaaaaaataaaaaatatatagtggacagtaacctttcaatcaaaactcagtatcataagtagagactgaaaacttgccgttattgattgttgttattaacagctgatacaggtattctgctgatgctactgctgcctagttaccatgaacacgttttttcactattaatggtgcgtcatattttttacttttaagtacttacgtgtgagtaagtgtaagaaaatgattgcttatcagtagtatcaatgatttactcaatatctgaatcaccttgattcagaaccatttcagctgtttcaccatcagtcaatgaataacagcctcattgatgtcaaaaacttcaatatccacttctttcagcctactgtagactctggaagtatactttttgcatatgtaaggaagtcagactttttttt

SEQ ID NO: 11409 - DNA, 707 bp, Homo sapiens
ccaagagaggactgggaacgggtgaaatctgttgccctgcttggtttctgccaagggctgctgcttcttactattctgcagtaagatgaagtcctacctggaaaaccaggcagaaattgtgttgcctttgccttcagtaatccccttaaggagaaaatatatggacctgatttcagccttcagaatctccaaaagaggagtcatcaattcatagagcacactagggtgttaggagagagctttgcatactctgagaggctacttggaaaggcattttcccaggagagctctgtcaggtggctgcgcttcagccccacccctacaccacagggtctccttgggtatgttcttgggcaagcaatcacaaagccagagaagctgtaagctgcctgccgggcctgaggagctccaaccagggaagactggatgtgaggagaggagtcactgtcaccaggtcacagactgactgaggtgatggtaggatgaggaggaacagatgcccttctttaattggttctcagttaacttctcagaggctctggagaacgggacagtggctttctagcctctgaatgttccaaataaaattttttggtcttggcccctgtactgttttacctctaaattctggcatttttttttccctgcaattaaagtgctgtactttatttattgaactttatcattgaaagctgtttggaaaacct

SEQ ID NO: 11410 - DNA, 171 bp, Homo sapiens
gctgttcttgcataggctcttaagcagcatggaaaaatggttgatggaaaataaacatcagtttctaaaagttgtcttcatttagtttgctttttactccagatcagaatacctgggattgcatatcaaagcataataataaatacatgtctcgacatgagttgtacttct

SEQ ID NO: 11411 - DNA, 2579 bp, Homo sapiens
ccaaggaggagtttaaactgaatgaacaacctcggctcctggactcattgcttcacaacccatctacccctggatgaagttatctggcttcaaatattatgcaggggcaaacacctgctgatgtggcaactgctgatgctcatggtccccatggcatgggggcctcagggcagcctgcctggaggtgagcagggctatctctgtgtgttgtactccagtcagggggttccagcagcacccgcaggctctagagctcaatgcacagttctttttgtttcacctgcagtcctttcttctccaggatatgcacaggcctccagggtctttcatggctcagggtcagggtggctcaagtgccaacccacatgttgtcctccaaatattcccttctatccctggcatgctgttgctgagctcaacttttaatttttgactttctcctttgtaattaatctctatctgggtttctctctttctctgtgccatttggtttccttaattagttccctgtgccagcccatagtcagagccataattggctctggggaagatccaagttattttctgagtaagatattaggcttccatatgatccagagatgcaaagaaatccctagagagtgtaggagttgtctaaatccatgtgtcagatgtagccaacgaattatgtcagaagcagagagaaaaggcctgaaaagcagctctctcccactcctcaggcccttgtctccaaccttacatgaggctttttgaacatctcctcctggcccagctggggtgagagcaagtcctcgaaggcactgcctttgagccttgctcagcccatctgaactatcccaactctagaattgactgctttcgaattgtgtgaccttgggaatgttatctggcttcaaccacaatgccctacccccagctcctctcccaaatgatcctagatacagggctgcttccccccgaccctaccccacctcgggacacaggctcatggcctcatggcacttcaccaccagaagtggtgctcagagttcctatttccacatctaaccccctaattcctgggaaagtctgaggcctggtccccccagtgctttccctggctggcctctccacattttcatctgatggtggagtgagatcaggaaaaataggacaggagctttgccttgggggagaagagagttaagtgtggaaaggggtgagttataggaggttaagcagtccaagatttctctctctgtgtaggaggccatttcctgatgtgaggggtctgaacccaattatgatgggacagggttgggcattgacttcccatctcttctctctgtttttctcccactatctgtagcccaaaactcttatggaggactttgatctttagtataggctattggtcagggccataggaactaaccccgatcctcactccaccaggatctaccacatcccctacacacaaacacatgctgtggggagggagttttcccctgggtcaagttgaggatccttagatcaccttgtgctcctgtggactggtgtgtgcgtgtgtgtgtgtgtgtgtgtgtgtgtgtgtgtgtgtgtgtgtgtgtgtgtatgttgggaaacttagctttcagagaatgtctatgggctctcattttctctctcacacaaaaatactcgggacttctccaagtccctgaggagcctgaccactgaagctgatcatgagatgactgtatgctgacacacccccttcaggggcctggccttgacttagggctgcactgtatcctcagcaacggccttgcaggagccccttttggactgctttccctattcagcccagagttggggtggtgggagaagaggggttggagtgaatccatctctattcaaattccagctgggattactctaggagtcttcctggcttgttttgggcccaaacttagctacattgtttattggctcccaaagtcgggattgaagagtgaaaagatgcaggcaatgaatccttctgcacactcctccccaacctttccagcgcttttctacttaggaggccagtggaagggaggagaggccatgccctagcccacaggggacaaggttcattgttcttccaggcttggttcactctgcttttgattcagaagctctttccctacccagcaagactacactttcttgccttctttctattttttctttttgtgcgtataaatggtatgttgtgatatattctcagtgcttgtgcccaccttggaactctgttcttgctcttcattccgcatgtgatactctggtccaagatcttggccaggtgccttctgctcaaatatcgtctcagaggtgcttcccttgaaaactcggtgctgtttccatagttactctatttgatcactctaagtttggttgtcttcatagcacttgtcaccctctggaactattctattcatttatttacttgtttaatgcttggctcttttcccctcctaacgtaaactccatgattgccaacacctgtttacttactacagttccccctccccccacattcctgacactagtaagaaccaataaacacttgttgacgg

SEQ ID NO: 11412 - DNA, 2147 bp, Homo sapiens
caccatggaattccactgccagtgacccactgcctccggccgtacacgacagtgccttgacccaacagccatcgagtactgtatgtatttccacctgaggagaaggcctggggaggccacagtgcaccattgcacagggctgtcctgatacctcatccagaaagccgtctcagacttcagcactgcggtcttgcccactctctgccttaggctcccaggggaatccaagacagaaaatgaagacactggcttccaacagcagcgctccatgtttaagatacatattttccctgtttgctttgctactgtatgttgactttaagatctttttttaaatacatttgattcagctagtattccatgtcaacaatttgtccaaaggaaaactgctggagggaggtggagggaggaaggtgggaattattatttaatacatcattaatgcttattaatctctcacaagcatctttgtcttgcaaatcctaagggaaaagcaagtccctgcagtgagcactagggacagtctaatttggggattgctcaaccatcaagactgcaggtctcccttcagccacctccttcctgctaaaagcttagcctaccacactaccagtcattcccatcgctttgcaatcacaagccacaggatgagaagttctgactcactcatgccatgcccagggctatctgaaacaatgtctcattaagaatttagggttcttccatgggcttactgacagttgcccagatctgaaggggaaagggtcttgagaaagaccatcactggctcaactttagggcactgtccagagtcaacatgatgtggtttagcagtgatcacatctaaacaaagtttaggtaaatgaattatcgcagagaaaaaccacatgagaaaatttttgtactccaaatttacttcccaataaatattcagcaaagtagtaaaatgaccttaaagataaaaatgattagggaatagccttagaaaatttataggtataaaaaattcaaggacaaactgtgcatttaatggacacaagaattgactctaactccatgtctgtggtttctttgaacccatatcaaatgtatgactatttagagtgtttataagagataatggaactgaactttcactcaattaattgggcattaacaaccttcttttatgtttgttcctgatatagtctgaatcttaggaagaaggtaaaagaaaggaggcaagagaatagttatgatgaatatgtgttaagtgcctgctctgaaggaggcaatgttcttctcatttgaatccttatggcaaccttattcaataggttttcccatatttcagatttaataactgaaggccagagagattaatttgccaaagccacacctttatgctaattatgattggaatgcatcacaaaagcctaactctgttgttttcaacctctacgttattttgctgctatgtgcatttccagatctgattttctgctaacttgtgtgctatgatccactcctgatgggggtctacattaatcttccagtactccttgctgatgctgtgttatgtgtcatctaacagaaatgactcctttgaaataagtaaatctttggctttttgttctgttggtgtgattcaaagcaaaacaaacaaacaaaaacaaattttaagaacacaacaaaaaagatttgacttccgaatagaatgttttctttaagaggcatgaaaagcaactattgttgtgttacagtgttaaaaatattcagttttctttgacaaaaatgtgtactgtgtaagccttgcaaacaaaaaacaacaaaaaagaagcagcagcagcagcctgctgtgtggcatctgaacttttataaaggtttccttgtgccaaataagtgcaaagatttaatttactattaaaaaccataagcatatgttatagttccagaagaattattttgtcatcaagtgattttgatctttagtgtcaatatttatatttagattaatttttataaatgaaaatattttaatggtttaagaaaatgaggacaacaggataatatctttgatgacttctgaaagttatgcttcccttcatgttatatgcacattgccaagaattactgtcaagagaaatgataagtaaaagtcatttatg

SEQ ID NO: 11413 - DNA, 408 bp, Homo sapiens
aatgaacctaaatacgtggagaatttcttgaatagttttgttctctaaacccggtttggctgccttgtgaaatgattccctgcagtaaacggacttttcatttatttaatcattcaaacttccattcacatctgcatgattacagaaaacatggggtatgtagactagtaacacataagaaaattgcagtaagatggtaacaaaacctcatattgtctttacatgtttccaatggaaaatgttttgagtgtttattgttcagtttattacgtttcacttgattaaatttttttgttgttgtattaaaccatgtacgttgcagcttaacaataaaaaaaaatctatgaatctttgtgagcaattatgctcccaaatctaagcaagtaaaatacacattttgtctttctt

SEQ ID NO: 11414 - DNA, 1110 bp, Homo sapiens
gccttcaaagcagctcctggagtccaatggctgcttagagtcagcctgggtggcaccaggcaatgcaggtgaagtggctgccttcaggaaatacaactaactaaaatcaaacacctaggtcacgtgcctctcaaatactgatttctgccacagcacctcttgaggcatcccttggctattctgtgcatattgttcttcagagacctcactacccacatgctgatctattggggaacagagaagagacaggccacgaaggtcaggctctttatattaagttccccagaggaagagtaagttgagaaggtatcagtttaatgttgaagaattgacctcagggctcagtttccatttccctccctcagtattcttcctggcaagatacccattaagcatttcgccaatcagaatctcattttatagtttttcccattggtctttaactaagactttcttgtagcaatctcgtaagcagtgaaccccctcagatcagtagaatatagtatctgggggagaagacttacttccttcagggcagcagccacagccaggcttctgtcatacaggtagatcccgaagcacagagacataaaaaaggtctcccagaaaactatagaccattctccaagtggaattcccacttagggctctggtcactagattgcaacctgtgtgtttgtcatcatcctcatctcaccattgtattgctatgccctcccataaaaacacattgatccctagcaagattattgcattccagattttactgcctttgctaggcttttgcttagcaaagggctgactttccattgttatcatggtgtatatatttttgtcaccattcccacaagtatacttgatgttgtcatagaacgaacatcctactctatgatttactaaccaattactttcccagatcatagacctctctgcatagtagtcataggtcttgactttggggaaagaaaaggaagctgcaggaatatttatctccaaagtcgaatgagaaagaactccagcaaatccaatggctacaaactaaaaatcagcattatttcatattgctgtttcttagctgaatatggaataaagaactattattttattttg

SEQ ID NO: 11415 - DNA, 135 bp, Homo sapiens
gtggcaatcataaaaagtaataaaggttctttttgacctgttgacaaatgtatttaagcctttggatttaaagcctgttgaggctggagttaggaggcagattgatagtaggattataataaacattaaataatc

SEQ ID NO: 11416 - DNA, 145 bp, Homo sapiens
gccccgtcacgttctcaaaatcctttgcacctcaagttagggattccactggtctcctgattgtgtctattgatattcctctggtcttgtcttgtataagttgttactgttttcctaacttcattttaaattctcacgcttaagg

SEQ ID NO: 11417 - DNA, 684 bp, Homo sapiens
ggctatccatagttaggcccactgtgcctctccttttttctctttattttcatgctttttatcagtgtcctcgctgtccttcctggttagacacttggctttcatcatgaactcttctttaagttttttgaacctgtttccccaacatgaagtctctttatggttagagaagaccaaaaaacaaacaaacaaacttagaaacataaaaggaaatgtaagtttccagatttaaaggacatgctgggtgcccagcaggatggattcaagggaaacctacattaaggaaaattgctgtgaattatgaaaacaccaagtttgaataagaggatcatggagaaaaaatgagaccctaaaaagtttctagagagagaaaacaaaagatcagaaatgaaagcggggccaggcgcggtggctcgtgcctgtaatcccagcactttgggaggctgaggcgggtggatcatgaggtcaggagttcgagaccagcccgcccaatatggtgaaaccccgtctctcctgaaaaaaaaaaacacaaaaattagccaggcatggtggcgcatgcctgtaatcccagctactagagaggctgaggcaggagaatcacttgaatccctgaggcagaggttgcagtgagctgagatcgcaccactgcactccagcctgggcgacagagtgagactttgtctc

SEQ ID NO: 11418 - DNA, 6462 bp, Homo sapiens
gctttatcttggcagtcttacggctcttatgcctagcaaatctccagcctaattttatatatttttttgagaaagggtcttgctctgtcacccaggctagagtgcggtggtgtgatcttggctcactgcaacctccccctcctgggttcaagcgattctcctccttcagactctcgaatagctgggattacaggcacgcctcaccacgcccagctaatttctgtatttttagaagagatggggtttcgccatcttggccaggctggtctcaaacacctgacctcaagtgatccgcctgccttggccccccaaagtgctgggattacaggagtgagccactgtgcccagcctccaacctaatttgagtttcatttgtatttttttcatcaccttacatgtgttaacagctgtttcaacataaactccattataatctatatacatttaaagaccgtgtttacataatctcttctgggtagaaaatggaaatacttaacctttgcattggtccctttcaggcttgaacaacagtggctgtatctgcatcgtggggttgctggtggtagaacactttggtgttaggaaagtttggaaaagaggatatccctgtattaggccattatgattagagataagcagcctgggagaaacatacaagacctgtggctactggtagagaattggaataagcttccaacaatggactgtagagattaatggagattgtttagtgggcccatggctaggtggggtattaatacagttgaagttatgttgcccttggcacagatctttgagaatctcatacatctgtgaaaaagataatgtgaaataaacagtaaaaaaaaaaagtatgttgatggcagtgagagtaatcatgtctttaaacgtgaagtttttttttctttagttttgctcttgatagctagatgtttcttttaacttttatttcgtaagtaaatatacacaaaggcattcatctttgttgaatctgttgtgcagatttttcttgatgagcattctgtttttttttctttgtgagcactggcttctatattttatttcatatttatgaattataaatatgaatttaattactaaagaaataaaaataatggtgtaaagccaactcgaggggaatctgaataagcttccaaaatttttttttttaagaaataaagggagctgtgtagtgggtcagtggctaggtaggttagtgaagtggaatttggggttgctcttggaagtggccttgatgaggatcctttacaactattcagaggactgtgtgaagtagttactggaaaaagaacttgaattatgcatttattggcattaatgtaaacagtaagtcctaagctttgatggaagggtccatacattttttttttttttttgctgatgttgctatctagatgtttctctatagcaattaatagcaaaacctttacattcttggtttttaaactttaccatgtgtctgaattacatagtgtgcttgtaaaaagaagagttttctctcttgcacaaattctgattttggctatctgtggtgatggccagatctttagcatggaccatactttgagagatatgcttcaaacagaaaatgcccacccctcctcctttacccagcataaactctatggttaattcttaaaataatgccttacagtctccattaactcccttgcccttctcttgctttgtcatgctcgcttggcaaaacctcatctctgactaaatgcagttctttgccttctctgttcctgcaccaaaaatgatcaggagaaagcatattaccaggctgaactgtcactttaaattcatgaccagtaacttcatggaggcccttaacgtttcctgatggtcatactacaatttttggagtccacttaactcccctgctttcctaggccactactttatactttctctcttctgtaacttccaaagcatccctctcagttctcatgctcagctgatggttatgtttctgccttcggcgagagaacagcaagctccagaaagtggctgcgccttcagccccgtgctagaatgagaacatatggagccaacttgagttcggaagggctgtggccacctcgtttcgcccatctacttttcaccttgccgtatctgattcttcaccaccgtattctcagtcacttccactaaacagtgccagtgttttaaggttctgtcacactcagtaacccacttctggttcctcattccgtgtcagtgatcagcagtagactgaagaatctaccttagatttgctccatactattaattagcttacaaaatgtctaagaggagctaagctgggatgccacataggcagaagccaggaaaaatgaccaaccacagaaccaagtggttccagtggaaactcagcagctgctggtgcctgctactggactgccaccccccattgaagagactggaccaccaggaaggtcgtttcacattctgtagtaaaaatacccctacaatcattttggtagggtcttctgtcttcagccagggtgtacctgctcggtgggagttggttatatatgtatgtccaagttgcaggggcttctgggaaatacaggttttggattctgcctgggaagagagtcatagtatgaagaagtctgaaaatggggaagggattttcagaatatgttgagcagctgtaaaatatcagatacccattataggcattgaaggttacctaaatgacagaaggatgcactatattcatgggtaggaaagattagtttcatcaagatttcaatttttatcaattcataaattaaaaacaatataaaaattccagaggggtgtgtgtatagagaggcaaaggacacagagtagctaacctagttttgaagaacaagatggggggttttatgctaccagatattatatacaatgatcatcaaacacagaacaaagcaaaaaacaaactccccaaacccaagttgaaacaaaaaaaacccccagactgtaatagtattattattattttttaagatggaatcttgctctgttgctcaggctggagtgcagtggtgcaatcttggctcactgcaacctacacctcccgggttcaagtgattctcttgcctcagcctcctgagtagtgtgtgccaccacgcccagctaattttttaatttttagtagagacagggtttcaccatgttggccaggctggtcttgaactcctggcagcctcaagtgatccacccacctcggtctcccaaagtgttgggattacaggcgtgagccactgcacctggcctgtaacatgatttgctgaaatttttaaaaatcttaaataatgtactgtttagaaatatacatattttatacaaaattataaagaaagcatagagaggtaagcattagtggcacagctgagaaaatataaaaggtagttctgtctctatcctgtctcctttattctgctactgctctcattctgtctcatcccaggaatccagtcccaagtgctgcctgccaatcgtccagcaccctccacctttgccacctatttcttgttgtaaaacagatgtttgtttctaaaatataatgaattaatgattatcaaagtacaggcatacctcattttattgcagtttgttttattgtgtcttgcggatattgcattttttacaaactgaaggtttgtggcaggcctgtgttgagcaagactatcagtgccattttttttcaacagcatgtgctcatttcatttttctgtgtcttacacagaaacttaaaatatttcaaacttttcattatatgtgttttggtgattagtgacttttatgtttctattgtaattgttttggggtgccacagactgcatccatctaagacagtgagcttagttgatgtgtgtgtgtgtgttctgattactccactaactgatggttccccatctctctccctctcctcagacctcactattctctcagacacaacagtattgaaattagaccaattgataaccttacaaacacctttaagtgtttaagtgaaaaagtcacatgcctctcactttaaatcaaaagctagaaatgattaagcttagtgaggaaggctaatgtcaacagctgagataggccaaaagctagactgcttctgccaaacagtcaagttgtgaatgcaaaagaaaagttcttgaaggaaatgaaaagtacttctccagggaacacatgaacgataataaagtggccaggtgcagtggctgacacctagaatcccagcacttcggggagccaaagcgggaggatcccctgaagccaggagtccgagaccagcttgggccacaaagtgagacccctgtctctacaaaaaattaaaaatttagctgggtgtggttgtgcatgcctgtagtccgatctacttgggaggctgaagtgagaggatccctttagccagggagttcgagactgcagtgagctatgattgtgccactgcactctagcctgtgtgacagaatgaaaccaaaaaaagtgaaacagcattattactgatatggagaaagttttaggggtctggatcaaaccaaccacaaattcccttaagccaaaacctaatccagagcaaggccataactgccattgtatgaaggctgagagaagtgaggaagctgcaggaaagtttgaagctagcagaggttggttcatgaggtttaagaagtcatcttatcataaaagtgcaaggtgaagcagcaagtgctggtgtagaagctgtagcaatttatccagatctagctaagttaattgatgaagttgctacaccacgagattttcagtgtattccaaacagccttcttttggaagaagaaaccatctaggactttcatggagaagagaagttaatccctggcttaaaagcatcaaaggacagctcgtctctcttgttaggggttcatgcagctggtaactttaagttgaagccaatgctcatttaccattcagaaaatcctagggcccataagaattatgctaaatccactctgcctgtgctctagaaatggaagatcaaagcctggatgacagcacatctgtttacagcatggattactgaatattttaagcccactgttgagacctactaaatattaggaaaaaagaattctgtcaggtgtggtggctcacacttgtaatcccaacactttgggaggccaaggcaggtggatcagttgaggtcaggagtttgagaccagcctgaccaacatggagaaaccctatctctactaaaaatacaaaaattagctggatgtggtggtgtgtgcctgtaatcccagctacttgggaggctgaggcaggagaattgcttgaatccagaggcagaggttgcagtgagctgaggttgcaccactgtgcttcagcctgggtaacagagtgagactgtctcaaaaaaaaaaaaaatttagttccaaatattactgctcgttgataatgtgtctggtcacccaagagttctgatggagatgtacaaagagattaatgtttttatgtctgctaaacaacatccattctgcaggatccattactccatgggtcaaggagtaattttgactttcaagtattatttaaggaatacattttgtaaggctgtggctgccatagtggttgttctgtacaaagtaacttgaaaaccttctggaaaggattcatcattctagatgccattaaggacatttgtgattcatgggagaaggtcaaaatatcaacattaacaggagttcagaagacattgacctcaaccctgatggatgatcttgaggggttcaagacttcagtggacgaagtaactgcagatgtggtggaaatagcaagataactagacttagaagtggaacctgcatatgtgactgaattgctgcaatctcatgataaaacgtgaacaaatgaggagttgcttctaatataagagccacaaaagtggtttcttgagatggaaactactcctggtgaagatcctgtgaccattgttgaaatgacaacaaaggacttagaatattacataaacttagttgataaaacagcagcagagtttgagaggattgacttcaattttgaagaatgttccactgtgggtaaaaggctatccaacagcaacacatgctacagataaatctttcggaaaggaagagtcagttgatgttgcagccttccttgttgtctcatttaaagaaatctctagagccacactaaccttcagcaaccaccacaccgatcattcagcagccatcaacagtgaggcaagactgtcttccagcaacaaagactcactgaagacttagattatcgttaacatcttttagcaataaaatatttttaaattaaagtatgtacattgtcagatataatgctattgcaaacttaatagactataatatagattaaacataacttttataggtactggaaaataaaaataattgtgtgactccc

SEQ ID NO: 11419 - DNA, 1106 bp, Homo sapiens
atcatcctttaggtaagaagttttaaaaagccagtttgggtaaaatacttttactctgcctacagaacttcagaaagacttggttggtagggtgggagtggtttaggctatttgtaaatctgccacaaaaacaggtatatactttgaaaggagatgtcttggaacattggaatgttctcagatttctggttgttatgtgatcatgtgtggaagttattaactttaatgttttttgccacagcttttgcaacttaatactcaaatgagtaacatttgctgttttaaacattaatagcagcctttctctctttatacagctgtattgtctgaacttgcattgtgattggcctgtagagttgctgagagggctcgaggggtgggctggtatctcagaaagtgcctgacacactaaccaagctgagtttcctatgggaacaattgaagtaaactttttgttctggtcctttttggtcgaggagtaacaatacaaatggattttgggagtgactcaagaagtgaagaatgcacaagaatggatcacaagatggaatttatcaaaccctagccttgcttgttaaatttttttttttttttttttaagaatatctgtaatggtactgactttgcttgctttgaagtagctctttttttttttttttttttttttttgcagtaactgttttttaagtctctcgtagtgttaagttatagtgaatactgctacagcaatttctaatttttaagaattgagtaatggtgtagaacactaattcataatcactctaattaattgtaatctgaataaagtgtaacaattgtgtagcctttttgtataaaatagacaaatagaaaatggtccaattagtttcctttttaatatgcttaaaataagcaggtggatctatttcatgtttttgatcaaaaactatttgggatatgtatgggtagggtaaatcagtaagaggtgttatttggaaccttgttttggacagtttaccagttgccttttatcccaaagttgttgtaacctgctgtgatacgatgcttcaagagaaaatgcggttataaaaaatggttcagaattaaacttttaattcattcgattg

SEQ ID NO: 11420 - DNA, 2358 bp, Homo sapiens
tgattaaagcattctcattgcacagttctgtttttaaatacagagtctgatgcctcctatttgtaacaatgggtgtagctcccctgcccatcttggaggtgcatggcccatcagggatctttaaagtgggagcaggaaaggctgctaaaaaaaaaaaaaaaaaaaaaagtgggcttttgggtccctgaaaacatcagtgcccttcttcctggtctgggtgtctccctgagtctaaggggaagattctcaagtcccctggtgatttccaagtggagctgagcagttttagggaaattgagtgctgggtcattcagaaggtaaatgagatcatctgttacctgtacgctgtattaaaatagaaccaggaaaggctcaggatttcagacatttcatcagccttttcactttcccagcttcaatggaggtatatatgtcattttcttttcagcttacacatgtgttcaaagtggatttttaaaaagtgttttagcaatactccttaaccaaataaaccttcggagaacgtcactaagcttttccagagagaagaccctagatgaagttggaaaagagctctggctgactccacccactgtccccaagcattaaaggtgtggccatgagtttacagaattacccacattccagttgccactgggatgaaaagctttgtgctcagagctctgggaatcatgggatcacatggttactgtttaccccaacagcatgctctgtctagactggacctcccagccccttgtgttgggaaggcaaagcttttgtggagtcaggggggagactgagaaaaaatgaattaaccctgtgttgtcatcctcatgacattcctgaggattcaccaggttagaagtgaggacgtttatctttgtgattcataattttcatttgtgaaggccacaacactccccttgaaatacagggcaggaaagagctgaggttcttggtggtgtctcccattcccctggctaatttcagacagctgtggtcaagggattttacttgggatcaacttttccttttttccttgacattaattttagagaagtcatcaagtcatgtgatttgtttagcacataggtttatttatggtttgattttttttaggcagttatattactagattaagcttgtgagggaatgaaaatgttttttatttgttatctacacactcgaaaaagagaaaccagctgcggtactgtcccatttttgtcatcagcaccagtgtccgtcaggaaggcaggtggtggtgcagaaacatgatgcctggctgattttcgtggctaaaggggtaggccttatgttgattgggatgctcccctacagccttacaggtagaatagaaggtgagttctggaagtgcaaagaagcaccattaagtgcatcttctagaagttgtacagaaggactaaagcttatcaagtcaacaaagaacttaccttggaggatagagagagagaagggaccaattatgaggactgacatcctggccactctccttaaaataaacactgacatttttcttgcttgttctctctgtactcaaacctgtggcaaattcatcctagcaacgttatttgacgaggggcatgaacatttatagttgaaactgtagaaagggtcaggttggaggtgtgtaataaaaaagaattacctaggttgccaaaggtaatttaggaagggtctgatcatttagatgagagttctttggggcttattttctgggtaaggctcatctttaaaaactggcttcagaggggagaggggagaacaatgaattggctctattttctctattgggaattacaggaccattttgattcttagaatgtaaaaagcatatcgctaagtaaatcatcctggaggtcccaagtagctctatgcctgcaatcatggagacacaggcagacagataagcttcatggggaaggcatggggcatcctctgtcttgggatttgtatccatggtggtctggtccctgccttttaatccgtcctctacgcttgggcttttctgttaccaaacagcactatcccaggaactattgtctgcctgggaacactcagtagggagacactttggagacaggaggtgatgaacctttttatgtgcagctggtatgatagaaggaaattgggaaaacttgtatgctaggcacttttgtccagagcctgctgtcccatggagaaaaagttttaagcactgaaaaaatttgattaatgtatttaaatgtattatttgaagcatcattcacttgttgatttttacaatcccatgtcttaaaaaggatgaatccatgttattgtattgtaaataatttagatgattaaaatggattgttt

SEQ ID NO: 11421 - DNA, 1286 bp, Homo sapiens
ccaccaggatcccaggggcccaaggcggcccctcccgccccttcccactcaccccggcagacgccggggacagaggcctgcccgggcgcggccagccccggccctgggctcggaggctgcccccggccccctggtctctggtccggacactcctagagaacgcagccctagagcctgcctggagcgtttctagcaagtgagagagatgggagctcctctcctggaggattgcaggtggaactcagtcattagactcctcctccaaaggccccctacgccaatcaagggcaaaaagtctacatactttcatcctgactctgccccctgctggctcttctgcccaattggaggaaagcaaccggtggatcctcaaacaacactggtgtgacctgagggcagaaaggttctgcccgggaaggtcaccagcaccaacaccacggtagtgcctgaaatttcaccattgctgtcaagttcctttgggttaagcattaccactcaggcatttgactgaagatgcagctcactaccctattctctctttacgcttagttatcagctttttaaagtgggttattctggagtttttgtttggagagcacacctatcttagtggttccccaccgaagtggactggcccctgggtcagtctggtgggaggacggtgcaacccaaggactgagggactctgaagcctctgggaaatgagaaggcagccaccagcgaatgctaggtctcggactaagcctacctgctctccaagtctcagtggcttcatctgtcaagtgggatctgtcacaccagccatacttatctctctgtgctgtggaagcaacaggaatcaagagctgccctccttgtccacccacctatgtgccaactgttgtaactaggctcagagatgtgcacccatgggctctgacagaaagcagatacctcaccctgctacacatacaggatttgaactcagatctgtctgataggaatgtgaaagcacggactcttactgctaacttttgtgtatcgtaaccagccagatcctcttggttatttgtttaccacttgtattattaatgccattatccctgaatcccccttgccaccccaccctccctggagtgtggctgaggaggcctccatctcatgtatcatctggataggagcctgctggtcacagcctcctctgtctgcccttcaccccagtggccactcagcttcctacccacacctctgccagaagatcccctcaggactgcaacaggcttgtgcaacaataaatgttggcttgg

SEQ ID NO: 11422 - DNA, 489 bp, Homo sapiens
tctttcaaaagcaatagaataatcttccatttggctgtcgtgaggagtaattgaatgtaatccatctcttacaaaatggagacagggtctttaccaactcaactggttaaaacatgaatgaaacctctgtggctctttcgaaacgtgaaaatgtgaagaaagctactaacttagctgtattctcatgtaaatattttttaaataattaagcaaatccctcaataagttgagcccaggtgtcctctttcctgaacttggagcatgtttggataacaaagacatcactgggatgttcaagtctactttttagtttcaacctgaagaggaaactcagtaggtgttgggcaggaattggtgagattcctgacttgataccttgctaaatggacatgtaactgtgtgctccttcctatcagtttgtaaatgtggtccccctgactgctgttttcagattgctttgaaataaagcttatttttctataaaatact

SEQ ID NO: 11423 - DNA, 2765 bp, Homo sapiens
aaacgtccggatacaaattatatcttatttgtaaatatctggcaacttagcttaagaaatgtaatgacagtctgttgttctatttcaatatcagaggtgaatttcaaaaatagacacttcttaattgttactggttcatttacatgtggggagaagaatttaaaatacagatatgtctcctaaaaatatttttatgccacattttacagtagccaactatggaaatgaatttcattttcttgaatcaagaaatcgtgaaatttatctatgtataatttgcaatattattttaagtctatttcactctatcttacgtatcccttagaatacagattctttttgcctgtttttccagttttagcatatatgctgccaagcatagaactgtgaaggagaactgttaaaggcggccaaatatttatatactgattacatagagtcttgtacatatgtgctctaaaaacaaaccacccagaattgatactgttggtaaccaggagtataaggcagtggctctggggttcttaattcattcctaacttctttgatacttcacaggattaggaaagtggtcatcatacatcccacacagtctgtattacttcaggcttgtgggcaaggttaggaagaatcaatcagccttaactataaatacctgcactgtctctgaggacttactattttatgttctttttaatcaataccgatcagaagtttaggttataaaaacaattctacttcatgctttggtgcttggtaatttttggtgcgtctttaagcattactcttatatatcatatattaaaataccataaaaatgaaattcagacaaaatcactggcaccaaaaatggtttattctgagctgtcttcactttgactatttggggggcttctctcaagtacagatgtgggttggggtcccctggagcaggcaggattggcagtaagagatattggccactcaagtctactgtgtgtgtgtgcctctggaagagtgaagaatggacttcaaaagtaacatcaaaaatctaactgccaccatcctggagacattttgcagggctttcctttcaagtctttcaagtacaggatattaccacaacagcagctgaactgttgtaaccagcatgtttttcctatttccactgtgacctgcagctgactcaaagccttgcgtgacctgacccaggtgcaagagacaggggaagagggatagagggtatagcataaattacatattttcatggctttgggtggttcctccaaaaataattggacctgtaaaaactagtgtgtgtgtgtgtgtgtgtgtgtgtgtgtgtgtggtttttttttttaatctttactttgaatttgttccccaagtgtacttaatcaccttagtgccagtttaatccagttatgcagaagaaattcatattggttgcctgatgtagagctcagcaccaccctaccacaggccttgtctggtgtatttgggaagtggaaaagagccctcagttggagggagctgacaacccttggtggagggagggtgcccttgaatgtattaaaactatcacccaaagaaggtatgaaaacagggtaaggtggtcagttgtttgccaggtcaatagacagaaagtacattagaaaacaggacttaggccaaacaaacaatactggatactgaatacaaaacagtatgatttatattaaaggtttccaaaggttgcctgcaaaggagaatattactactagtcagcaggaaaaaaatgcattcagaacccaagcagaaactgccaaatgtaattaggttaagaaaagttacccttgggcagtgtattagttttctattgctgtgtgacaaattaccccaaatttagcagtttaaaaaacaatacccatagcagttctgtagctcatgagtctggcacagtgtggctggattctctgctcagggtcttaaaggctgaaataagggttggcaggacaacattccttcatggaggctctggggaagaatctgcttctaagttcattcaggttgttggcggaattcagttctttgctggctctcagctggaggcccctctctcacctcaaggctgcctgcattccttcttatgtggtcccctccagcttcaaaccagccttcctgctctttctcatgcttcatatctctctcccgtcctcctgttttaggggcatatgattagctcaagcccacagatatattttaaggttgattgtgcgatagaacataattgcaggagtactgtctcatctcatcatattcacgggttctggagattagctcattgaaagtgggaggggcattttcaaattctgcctaccacaggcaataactgcccatctcagctgtaggtggaatttttacccagaaaagataggccctagaagcctcatttcttttctccatggaaaaggacagccctctgctgcagcgttcaacttgtgtgtttactgacagagtgaactacagaaatagcttttcttcctaaaggggattgttctacattttgaagttattttttaataaaattgaattatgttgtgtattgtgcttcttaataggaaatgcattattggactgtttttgtaacatcctgtttattgcaaatagctagtatcgttcaaaaactgtataaaatacttttgtacatattagcaatgtctaatttgtatacacttcagttaaatttccctaaaacttgaaaggggaccttgtagaaattaaaatatatacttagtctaagtctg

SEQ ID NO: 11424 - DNA, 2982 bp, Homo sapiens
ctgccgagctgcacccgtgcacccgctggggcctggagtcagggcccactccaggagggacccactgccttcccggggagcacagtagtgcgggcctgggccctgctccacctccagaagtggctggatgtaccctgcctgaggccccgacgaggaggggtatgcaggctggcaggccccagagctggtggagggcatctcactcccaagtgccccccctttctgtgactccttgaagcctttacttttttttttttttggaagtgaaggaaaaagaaactatttacagcactcccctccaggtgaggggggtgctgggggtctgcagcagaaagaaaggggcctgggcagcaggtgtggccagtccctctgccaaggcctgtgccagaggggttggccagttggagcctgggtcagcctcagcagcctatccccatgtcctctatgcccctaatttgcttcctcatcttggagggtttggggagaagttggcgtgccacccccacaacccctgaggaggtgtagacccagtctgagagccgcaagcactgaggcagggcctgagactggacctgggtgagcgtggggggtggagggtggcgaggtgcggagactgcagaccagtgcttcactgtgtggagtggggcaggcaggggctggaccccagggacttgccttccccacccactctgctgccagcaggcccagggatccctgacctgcaccaggtggcaccaagggtcctgagtcctggagatgtccccagaagctgctgtgcctcacagcgctgtgagccagaccctccttgggcagacaggctgactggcagcaccagctttgggggcagagtcctaggatgaggcttgggcagtgctggtagggtttcaaggtgctattagtggggcaggggcagggcggctgctcacagagcaccccagttcctcaccagctactctggccatatatcccacaccagaaggaacaagtgtggctgtgtccatctctgctcccccaaaggcccgctctaggccttatcctccctctaggtcctgccacaacctgtccctggctggctccagcgtcctcgtccctcctgggcctgtgcaccggtgggtggggcgcccatagcactgccggtaaaggagcctgcatgttcaggcccctcgggggattggggggactggggaggcgcagcctagacccaattgcttgcccccatgaggctagcactaataggaaacccttttttgttgtcatttaatgtctttattcctgcctttaatatggggaggaaggttccataagctacatgtttcctagttaagctctttcctattgtgtttatacagttttgtttgttatactctttgcaccttaaacccccaccactccccgacactattgccttcccagcatggctggagtgggaagaggcttgggccccgggggaatggttagggggactgaacccctctgaccttatgaggcccatggcactggggcagggagctggggacattttaatcatcaataaacgaagcactttattctgtacagatttgggcaggcccaaggtgcccgagtgatctgaggatttataatccaagccacaccaccctggttgttctctgggcttggagggtacagtgccagcagcttccttgcccaattgatgttggagctgtagacgtacgctcaggcgctcctgctgtcctgggggagagaaggttcgcccctccccgaggaagaaggcttctggtcaggacccccaccccaaggctggggactccaggctcctgctttactgtagctctttttcttccttgcactccttgatctttgggcttccgtgatgtcctcagggtccccccctccctgttgctatttttaatctctagtcccagtgcctggcagctctttggagctggctcacattttcccaaaaaaagttgatctctcccagtgggctgtaggcagggtcctccatgggtttccaacccccatcactggcaccaggatctcccacaggcactggtggtgtcatcacctgctggccccactacagcctgagtaggcctgagtggccgtggccaggctgagacctgtcaggccatactgacaagcagaggtcagagacactggtggggagctggcaatgaaaccctgtcctgggacatgggtttcatgttcttgtacacttcccctctgggatcaggtgaggggtccagacagctgaccagacagcttgacagctggtcaagacggtcacgggagctctaggtgggcacaaccaacccctctcctgggaggcccctgccccactggggataggagcctgtgtccctggtgctaagcactctcttcacttgggccattgttggtgggggctcctttccggccagaccacaaggccagaagcaataatggcacctcagcagttccagtatggataggggttcctgttttactagcttttacatctttttatttaaaacaaaacaacacaaaaaaacaatgtgcccccagatgtcagaatgaggcgactagggcaccatactcactttccagggctgggggaagggggacgcaggatcatcccctcccaaggagatctgtgggggtcccaccgtccatctggacttctcagcctgtttggctagaactcaggcctggagtctgggtctgccccctccccggctccttggggctctctggtctcaggccagctggcgatgggtggctagagtgatgaactcaagccctgtggccacagttctgggagccttcaaccctggctcatgctgccatagtctccacggtgcccttcacagagggcttggtagtggcagaatggccatgcccaggtgtgtgttgagaccattgacaactgctcgtgtacaggcaccccacagccccagagcatggggcacagcaggcatgcgagtgagaggatgaaggggaataaagtcagtacaactcgtg

SEQ ID NO: 11425 - DNA, 453 bp, Homo sapiens
ccagctcaggcagactgaactaagcacccctcccatcctgcgaccctcactggcctggccttgtgggggctccagaaaagaggctaggagaggccagagtctacctggatccagttatggtgcctcaggggctgcgtcagccaaggaaagggaagtgctgcttagtcctggacttttgggcaagggtgagaaactagaggcttctccagtgttgccatatccccctaggttgtcttgatccatgaaccagaaccacagggcggtatcccaggccgtgtgctggccctgccccagcctagctgagtgtgctggcaaagttccccacaggactcagccttctcgtctttccgatgggagcatccccatcaagtgcagtgtacagtgcagatatgtctccttctttaggaagaataaagtgccttctgagcaagcagctcagggtctgcatcagtg

SEQ ID NO: 11426 - DNA, 1625 bp, Homo sapiens
gtgaccaaattttggtctggtgggaacagatgggaaccagctcaattgggtgtccactcaaagtgctctctccaggggcctcagtgactgtgttgctaaacccagtggtcagttctcagttctcagccatcagcagcatttgctcgccccgccttcttcctccactttcttcacttgcttccaggataccacgctttcttttctgaattgctacaatctttcttccttccttccttgcttccttccttccttccttccctctctccctccctccctccctcgcttcttcccttcctcctttcctcccttcctactttccttccttccttctgacagggtcttgctctattgctctgtcacccaggctggaatgcagtggcgagatctccgctcactgtagcctcctccccctgggttgaagcaattctcatgcctcagcctcccaagtagccaggactataggcacctgccaccatgcctggctaatttttgtattttttttctttctttctttcttttcttttttttttttttttgagacggagtctcactcttgttgcccaggctggacaacaatggcgcgatctcggctcactgcaacctccacctcccggattcaagcgattctcctgcctcagcctcctgagtagctggaactacatgcgcgtgccaccacgcacagctaatttttataattttagtagagatggggtttcactgcgttggccaggatgatctcgatctcttgaccttgggatccacccgccttggcctcccaaagtgctgggattacaggtgtgagccaccatgcctggccctaatttttgtgtttttattagaaacagagtttcaccatgttggccaggctggagaattgctgtaatagttttccaactggcccctgtccttcctctctcttgctctcctcccatctcatctgcacctagcagccagagtgatcctgatactctcggcctttacttccgcctccctcagagcagcagcctgtcaaaacaccagattacaacaaatttagtttaaaggtctcaattagcgttattggcaattctagaatcaggcaacagactcattgaatcaggaacagattcactccataaaatacagagagtgctgcaatgagctgggtagaagaggttagttttatagacaggaaggggctgtcaaaggcagaaagaaatgaagaacaaaaaaaaagattgatttttttttttttgagacaggatctcactctgtcatccaggctgaagtccaatcccacaatcatggctcactgcagccaccacctcctgagctcaagtgatcctcccatctaagcccccaagtagctaggactacaggagcacaccaccacacctggctaatttttgtattttttgtggagacagggtctcagtatgttacccaggttggactggaaacccttggctcaagcaatttgcctgcctcagcctcccaaagtgctgggattacaggcgtgagccactgcacagggccagattcatcatttcaaagttactttctatatgcggccggaacagggtggttgacatcagttttcttcaggttactttttaataatgattaaaacggggaacttcattatc

SEQ ID NO: 11427 - DNA, 2286 bp, Homo sapiens
agagtgcataatggtgatacttgtttataattcttatgctgcaggaaccctagagacaaaatgagatgaccattcacaatttgctgtaacccttaacttaaatagccagtattatcttgcccttttgaacatttaccatgtactctagcaagactggtccctctgttctatgatgttttaacaaggcatcatttagttgggcagctactctgtatcaggtgctaaccactttacatacattaatttgcataacaatcctattaaggtaggtgctcttctccccattttacaaatgagaaatctgagttgaaagaggttataaaactcattcagggttgctcagttagtaagttatagagttgaaattggagccaggcctatctgactgcagagtttactgttctttacttaattgtacatatttatgtctctgcccatttttatttgcttattttcctgtgcttttagtttcccttcatcactcagatctagctccttcaactaagaagatctctcttcctcttctacttgtaatcagtaccacccaagttagtatttaattatgtgccatcttatatttttctaatagtctcatgtcttttaatcttaaccccagctaaatgactctgaggaccaacagtacatttcttttatgtttttcaaatcctgaaacattaatctttgactagatataacatgctcatgataaaaaagaattgaaatagttgaaaagggtgttcagtgaaaagtaaatttccttgtcattcctatctcttgagttctccccagaggcaatcactgctactggttgtgtatctctgtagatactctttgtatacaagtgtttattagtattgcttttcataattctgtctcactgaaaaccttatttgatggaagcaacattgcagttaaattgtgaactctaagaccttttcttcagaagttgctttccttttgaggccaccaaagtaatttagggaaacagcagagggtaatccaggtctttttttttttttttttttttttagacagagtctcactctgttgctctggctggagtgcagtggtgctatctcagctcactgcaagctccacctcctgggttcatgccattcttctgcctcagcctcccaagtagctgggactacaggtgcccgccaccatgcctggctaatattttttatttttagtagagacggggtttcaccatgttagccaggctggtctcgatctcctgaccttgtgatccacctgtctcggcctcccaaagtgctgggattacaggcctcagctaccacgcctggccaatccaggtcttaagagacctcattgcctttgttttatgagatatcattctgggattgggaatatgtaaactcaactggagattttttttcataaaaatttatatagttccagccctctcattgcttcctatcctaaatcctcttccagtctgtccatccctcactaccatgatagtctacattctgataagctgtgaggccactgccaagggagggagaaatggtcactttctggtggtggttaatgctttgttagatagcttcatccagtcaatagttgaaaagttttcacataatccagtattggcatcagagccagaaatgccctccctaggtccaggaccaaagataaaacaaacacgaggaacatgtagcgtctacacaggaaagtaaagaattatagaattaactaattctacttgaaatcaggagttttataaaacaacatttttagacgtggtcatcttttattggtttccatcatctcttccccttctctctgggaacagttacccgggtattctttgggaagctatcctttctcagctatgtggtttggcaccaccaccatcttcatgagtggaccctgtttggcttgtgtcaatcagtttatcccatccccttggccacagagccattgtgatatgaggagatactggctcttctggaaaagagaggcttttcttcatcgagagctaccagaggagatattatctgtcctctgtgtggcacataggaaaatgtgagacctagaattatagcaactttttttttctgttaaaaggggagattctcaagcttccaggtgctaccatatggagcctaaggataaagccaataccaaagaaaacagtgactaaacagagagaaactaggtccttggtgacatcttttgagccactagaccaagctttacctgaagcagagctacctcagaacttttcagctatgtgagccaataaacatctgtcaaacg

SEQ ID NO: 11428 - DNA, 2585 bp, Homo sapiens
ctgtggccccatctggccgctagcacgcttcctgctcagagcagtgaagaccggctcacttcactgttccatttggttttactattttaaagtgggcgttaggagcaattatttattacctttccatttgttcgcctgatgatgtgacaatgcatggtctttgtgcatgctgctagacacttttctttcccagccgaaaagcctattatgtaatttttacattcataattttaatgtggatgatcaggattaaatcaagatatatatctggaacctcttataaatggagcacttagaaatttgttgttctgcacttaacctagagagagaaaaaatgcttttctttgtgaaaaatctgaattcctgtcctgaccttctgtgatgtggaaaccctaggctctgagacacactctctggtgtctgagacagaaccaaagcaataacgttgtgatgcccacaggcctggagccagctagcgaccttgtgccgcccagctgtccatggcccgtgcagagcagaggacagtgagtgtctgcactgagaaccttaaaccacagttgaacatacccacacctgtttgtcttaagctatagtgtaaaaacaaagtttgggctctgaaaatttaactgaaaaagatttccttgtttttgtaataggtgagataaagtacttagatttataaggcagcttcccctgtagtgataaattacaagcagacaatcttattttgtaatgtgatgaagtgatgatgtcttaactctacttagagagtgtatgtctgtctaacagaacaaaaagatgctctgtgtaaattccttcctgtagggcacactgcaggatttccatgtagatagaagaactatagggcctagtacagaaggtgcacacaaatgttggcaaagtcaaaaccccatgaattaaaacctactggaatttggtttttaggagtttggtaattagattatctcttttgttattttcattcagttatatcctttggctcagctagctttgaaattggctgatgaaaaaatatacataaaagggtaaaattcacacatacagcaaacaaaaatgcacaaagcctgcttcgtaacttttttttctggaattgtttttcactttgcctttttctgccaaaacaataatcaaagaactcttgctttaacctattcctgtacaaagactgtttttgaccagataatcatctgttgtggcattctatcttgtaggacactgtatattgcaaattgctgattatggaaggggccagttgctgttttttcatgcagtgccctgggagtcttaaaagcagtgcttagcaacattggtgatagcatgtggctgggacccagggcccttccccactcttcagccccgagtcatgtgtctgaggtgacggactgagacgcatctggtcctgtaattcagagagtgggcacatcaccaaagaactgcattgctgtggtcactgtttcttcaagtacacactgactctgctactttaggataaatatattttactcagaactctgaatttcacagtatacttactaaactaagtaaaaatgatacttaaaatacttattttactttctagacctaggctagatgttttaagctacagctctagttcattgtgatatttataatttgaaagctatgagaatagatgtgtgggtgaagccatagaacatatttgcttgaaattcttgagcagggatcttataaagggccagaaataagatgtgtggttcacatagatagtgagcgtaacatctgtattaaacataggagagaagtttataaagggcattggcaataaactctttgttgcagctgttttccaagcagtgtaaatactttttcctgtgattatgtatagccttggaatggcaccttttaactaacccatatgtgtttggtttcaatggttttttatattcagatgtatatatggtgctcactttaggatcagcagtgttgaccatttatgctgcatagctgtattatagccttattagttgtgtggttgacccttggggtatacaaatgtcagtctgagtggtgtcttactcctttgtttataagtgaatgattgtgcatgttttgtatgtcatagtatgtcgtcacataaaagggagggagcgaaaaaccattacattaagataatattggaccaaactacttacttgctctaaacagttacttgtaccccttaacctgtcttcaaaagttgcatatagttacagtagtgtataaattaaatattgtggaaaaacagtcttgtatttttctgtatgtgtgtatatatatataattatgtacttctggcaattctatctgtatttaaagatgtgacaatcttgacaccaattttaagaatagctgtgagaccgaattaaagataatccctaccaagtgaaaattgatgtgtgttaagagggtacagaattatcaactgatttggtcagttgcttccaatgctggttgatttccctcattgtgtaaacattgacaggtatgtgacaaatgggaaaaaaaatccaaataataaagtgacatattggtgttcagcaatataa

SEQ ID NO: 11429 - DNA, 267 bp, Homo sapiens
acacactgaagctctgatgggaaaacctggtgactgatatagttgttcagcaataattcatagtctgtgatgaagagtagtgaatacaacacacaaccaggcagccttcttgactatactttgcacatgttttctttaggaattcactcacacatttaaaccagttagtgccttctagaagaatggctttcctttctcctacacaaaattgaaatatacaagtctctaaatataatacctttaaataaaaggttatttgtccctctg

SEQ ID NO: 11430 - DNA, 1766 bp, Homo sapiens
cacagaaatctgttttatttttttaagagataagaaaggaacttaaattaaaaatatttaaatccacaatttgatataacagtattatttacataagaacaaagtttctaactgctgctttaaaagtagacttttttaaaaaaattaatttctgctaggagaggttttatatgccaggcgtggtggctcatgcctgcggtcccagctacttagggaggctaagataggaggatcacttgagcccaggaggccaaggttgcagtgggcccagattgcaccattgccctccagcctgagcaacagaacaagaccttgtctcaaaaaataataatgataatttaaaataaataagtaactaataaaaagattttatatcccagtcttatgatgttggttggcaaggctagataaaaagatgttagaatgaaagaacatatttttagtgatatgtaaatgaaggattctacaatagtcatatatttttatatgaatgaatgttgggttgggctggagaggtatgtgtgtgtaaatataaaggtctcacattcagagtatagctctgaaataatggaactcatgtctacaattcaacatgcatctgtatagttacatctcatgtaaatatacacagacatattttgcagccagtaattgacagttaatgtccaaaacaggtgattgataggtaacagaaattagataaccaccaattttgcccaagagaaagactagaaggactaaaagcagttgaatgtatggtactgacattgtcataagcagtctgataaccagtttattgaaacgtgtgcattaacagagaatttaattttaaacccataatttctcctatccattaaaatattataattgttagtagtatgaaaccaacaggaaatgttttttaatcatttagtgaggtgattcatttgtttcatgggcaaacactatccaggaaaagccttgcttgcctgtttcccaaagagctctaagaaatagaatcaagtgtaaaatggttcagaccattcaggatttcttgtcactcttctcaaccacgatcttcctgttattactgatgtttgaaaccctgtcattagccccggcctggttaaagcccctcagagtcacctctcattcatagcaatagaattcaaccccaagtggttgatggtgtccccagcacagccgagagacctgatctctggattcagtgcttttagctcttcgagtttaccctaagataccttcgggcaatatttttaaccaacccaaaagctcttcaggtcatttctgaagaggacaaggtgaatcttggcttggaacaccatttttgggctcttgctactgaatgaatcagaaaggaattttttctgaagagcattagaaagtaaaagagatgttaaaataagttcttgaagtatgttttatatttatctaaaacactgattttaaaagtttacattcaaatgtgtattcaaaagaagtactgatttgtaattattatagtttgtgtgtatcatcccttttaaccgtgcctaacaactgtacttaaattttgttttctagtgtaacaaatgtttcccataagattttctagagccaaataatgggagtgaaaaattccttaagtgttatataagaaaatatattagaaaatcagctttggattatacgatttctaaaatatactaatacagaatcctcagtaatatgttttgaattggattttttctcagaactgttacataataaataatacatcaaccaga

SEQ ID NO: 11431 - DNA, 1538 bp, Homo sapiens
tgcatgctgctggaccactcccctacaacatcagttaatgtgtgctccaggaatacaaactgatatgaaaaatgacttatggtagatgtagttaagacagtcaatatattttaacattagaaaatacagtcagtccttcatatccatgggttttacatccatggattcaaccaacctcagactgaaaatattaggggaaaaaaatacatctgtactacacatgaacaaacttctctttcttgtcattattccctgaacaacacaggataacaactacttacatagcacttacattatattagatattataagtaatctagaaatgacttaaagtatatgggaggatacacataggttatttgcaaatactacactattttatatgagagacttgagcattcgcagatttcggtatccacgggaggtcctggaaccaatcccctatggataccaagggactgctatgtattacaaagccacatgctttggaattacttcagtgttccttctattttcattaacactgatatctagtttaatatgaaaaggaacttgaaatcttgaaaattagaacatcgttatttttttctacttgcaatggaaaatctattttgcttttttgcttctaggaaaatattctgattatgatatgtgatatgttggctactcaaagtcagaacttttcaaagtaatcagtaaattgaatcaacagaaaaatattcattaactcggggatgcattaataaagtttttaaattcaaaatgtatagaaaaatcaagcttagtaatactttaatattattctaccaatgtattttttttaattaagacttctgtatgcagcagggcatggtggcacacctgtagtcccagctactagggaggctgaggcaggaggattacttgagcccaggaattcaagcctgggcaacatagtgagtcctcatctcctaaatttaaaaaacaaacaacaaaaacttctacgtgtggtaaagggttaactcagcaagcttgggttgcttaaaccttgcacattccaaagaaaggtctgaccccagtgctgacctttgactggctactgggaaatgagctctgagcccctggataggaatgtttctgtttgcctgaggcctttgaccatgccagatagtttatgctaacaatgtgatttatagtgaatacctgttttcctgtgtctaagaccctgggctgcactgtattaatttgaccttgggtatttggggagctgagactgagtagctgaagtgagtcacataagcactaaatgcttacctgactgacccccagtaaaactctggacatccagacttggatgagcttccttgggtggcaacacttttacgtattgtcacacaccattgctggggggattaagcactgtctgtaaaactccactgtgaaatgacaactggaaacttgcacgtggtctctcctgattctgctctattcaccttttccctttgctgattttaatctccattcttttgttgtaataaaccataatggtgaataaaaca

SEQ ID NO: 11432 - DNA, 782 bp, Homo sapiens
ggtatggttctctgagacagagagcaacgacctttgagttaagctgtctttataagcaggatgctcatagtggtttcccggagccagtagtcacggtggaccattccctacttgcttttccttggatcactaaggtgggagagtaggagtaacttattccagttcttacccattattaggaaggtaaggactacacatgtcattgaattgtaggtttcctttttttttctttacttttaaattttaacttttaaaatctatttcatttcttagttatgcatctcataatcagactccatgctttttaaagacagagataatatcttctctattctattctacttcctccatttcaccatttatacaaagtcattcaaaaaggctgattcatgccttcctgcctcttggctatggccctccccatctactctttaaactttaatctataacttttcatcagttttgttccctatctagaaaacattttcttctgtttgctaatctttgtccctcacaatttttgaaatccatctcatcactgaaatactttcttcttcaagtacttttttatttttcttcaacttctcttgatttgacctcagtgctttgaattcactggtgctacaatatgtaactgtggttaattgccttgtaaattttgcgtgtctgtatacttttataccaacttattgtaggctctttgaggtcaggtatgtatttctttcccatatagatagtattttgtacataccagttgttaaataaataatttttaaaatctc

SEQ ID NO: 11433 - DNA, 488 bp, Homo sapiens
tcttggctcacttcaatctccagctcccgagttcaagcgattctcctgcctcagactcctgagtagctgggattacaggcgcctgccaccatgcccagctaatttttgtaatatttagtagagacggggtttcaccatgttggccaggctggtttcgaactcctgacctcaggtgatccacccgcctcagcctcccaaagtggtgggattacaggcgtgagccaccacacccagcctattctttttaagtttcttgatgtagtggcagtagtcttgtgctcttcaggagagtgtcccgagttctacgtcccacatcaactgagggtgtgaacttgtggaggacttttgtctgaatctctttttcaatctctatacaatgtggcggagttgtgccacctacatgagccaatggagaagaaagctcctggtatactttaagtactcaacaatattaaatactgaatatttgtcaattgacgaagtacttc

SEQ ID NO: 11434 - DNA, 876 bp, Homo sapiens
ataacaaatattgtgggtagtagggctgactgctgcttttctaaaaagtagttctttagtatcaactttaattctacttctaagaatcatactctacttctaagaaaataattagaagtagacaaagattaatgaaagggatgttcatgacagcatcatatacgactgaaagaagaaaactagattttcaacattacagggttgaaatgaatgatgagctatccatatgatggttctgcagccattgcaaacatttttaaagacaatttaatgccatggggaaatgattggataagacggaagataatgacatacaatccaaaatttaaaaaaatatttttgcataggaaaaattgagaaggaagtaaaccaaaatgttaacagtgatcatctctgggcgataggattataggtgatttctattttcttctgtatacttttctatgctttctagattatctacatgagaatatactaattttatatgcaagaaaaaaagcacagtattttttaaatgcaatgaagacgtgcttattttcactcagcagtgttatgaaaggcacgtagtatatagagcccaaagccctgggattgcaccctgacactggcatttagcagcagtggaaccgcgagcaagtcccttccttttagagcgtgtttcctgttaagtaaaatcataaacaccgatcctttgtcctttttagttttaagacaagctgactttagagttgtcaacaaaatatataataacactgttaggttaaaagaacacagcaaaaattcactgaaccctcctttcccacagttctggaaggatctgcagatgatggagaactacctaggcttcatcttttcaacatatgtctacacaaccag

SEQ ID NO: 11435 - DNA, 1945 bp, Homo sapiens
aagacaccacgagaaacagacacatccagaacgtggaatattgcataagaaagctgccctggattcttcaaaatattattatgatgaaaaagagaggggagtgaaaattgttcaagctgtcttgagtctgctgtgagtttattataccattctctgcttttgtgtatgtatgaaaatttcgatatgaaaggtataaaacatggatgaggaggcttgtttttaaaagataatactagagagccgttaggtactaagaaccagaaatagactcacataaatggccaattgatttttgacaggggcaaaagcaattcaatggaggagggatcgccttttcagcaaatactgttggagtaattggatatccataggcagtaaaccaacaacttcaggacctaggactgagctaagaaggctcagatgactcaaaagcatgctccttagaaggaaaaaaaatgttaaattggacttcatcaaaattaagataatttaccctgtaagagacctttttacaaagatgatattacaggttgggaaaaaatatttgcaaatcatatccaacaagggatttgtatgtaaactacataaagaactttccaaatttaacagtaataagtaaatacaattagaaaataagcaaaagacagacatttcactgaagtatagatagcaaataagcaaatgaaaagatgttcaacatcattaggcatgagggaaatgcagagtaaaatcgtgagatatcacctatcagaatagcttaactttttttttttaatggtggtaactgctggcaaggatgaagagaaacaggatctcatacattgctgggaatgtaaaatggtacagccactctggaatataatttggcagtttcttgtaaaaccacacatgtatatgtcatgcttcaggaattgcacttctgagcatttatcccagagaaatgaaaacttgcgttcacacaaaaacctgtatacgaatgttcatagcagctttatttgtaatggtcgaaacctgtaggcaacccatatatccttccttaggtggttaaaacaaattgtggtttatgtattaccatggaatacttgttactctgcaataaaattgacttattgatatccataacaactcaaataaatttcaagggaattaatgctgagtgaaaataatcacaaaaggccatattctgtatgaaaatattcatataacattctcaaaatgataaaactatagagatgaaaaatggattaatggttgccaaaggttagggatggtgggaggaaaaatggggagagggttggatggaactattaaaaggtagcaccagaaaggtctttgtggtgatggaacacttgtgtatcttgattgcagtggtggttacacaaatctataggtgctatacctatacacacatactgtaccaatgttgatttcctttttcattttatgtaagatgtaaccatgaggggaaagtgggtgaagggtgctatctttgcaacttcctgtgattctatcatttcaaaataaaaagtaaaaaccaacaatggcaacgaaaacccaaaactaaagagctgtaaccaactaaagtgtgtgaaactgatttgaaaaaaagttataaaatacatgttttaggacagttgggaaatttgaatatgactggttattagatggtattagggaatttttgttgattttcttacctgtgacggtggtggtagtttgaagaatattcttaatcttaagggatgcatgttgaagtatttggaatgaagtgttctgatgtttacaactttcaaaaaaatgattttaaatatgtattgagagatcaggcaaacatagcaaaatgttcattgttgagtccacatggaaaatacgggtattcaatgtgccatactttcaactcttctgtactctgatattttcaaaataaaacatttgaggggaaatt

SEQ ID NO: 11436 - DNA, 1038 bp, Homo sapiens
tgtcatatgtaaaatggaatagaatccctgcctacttaagtaactgttggacaaatgatatatatttcttctaaggaaaaagtttattatttactctttactagacaaatgagtagcatatagaagaaagttaataggccgggcttggtggctcatgcctgtaatcccagcactttgagaggccgaagcgagtggatcacctgaggtcaggattttgagaccagcctgaccaacatggtgaaaccccatctctactaaaatacaaaaattatccgggcatgggggcacacaccggtaatcccagctactcaggaggctgagacaggagagtcgcttgaacctgggagggcggaggttgcagtgagccaggatcgcgccattgcactccagcctgggcaacaagagcgaaactcttgtctgaaaaaataaagttcatcccaactttcaagtctacaaaaacataatccaaatctaataacatagttgtaaatgagagcaacaataaaaagtagacatgggctgggtgcagtggctcactcctgtagtcccaggactttgggaggccgaggtgggaagatcccttgagcccaggagttcgagacaagcctgggtaacacggggagacccgtctttagtaaataaaaataaatttattaataaaactaaaaatttaataataaaaagtggacattgttttttaaaatgtgtatagtatgcattttaaagatagtgtcactgctgtggaaaacctgaacagacagtatgatccagaatgtcaggtgtggagttgggcggacaagagtctgctgatgaggacaacctaaaagagcactggatttggaatcagaagacctacctttgattcctggctttcccttaatggccatgtgatgttattaagtcagcctctaaagctttagtttcctgtcagtcaaatgttgacatgatacctacctcacagggttgttgtgagggttaagtgaaaggatctttgtgaaagtactttttgaaatcattcagttgtcaataaagttggat

SEQ ID NO: 11437 - DNA, 843 bp, Homo sapiens
caagtaaggaagaggaagacctccagcattggtcataaccttctgcctccctaatgagacacctctttgctgttttcttcctcctctataaaagtgagggctgtgtccttaaaagttatagttttcaggaatgcagcagaagacacaagaaaagcatttcagaggctaatttaaaacaaaaagtaagcacctaaaggcaaggactttgttttaactgtaccttaagcggtcatgttctctgaagtggaatgtggctttcctaggaatgggtcgtacaaagctaagtggtaatgatgctatttggggaaaggtcttttttgcttaattttgttttttaaaactctgatgattgcttgagcaacaggcaggttatctgcctggttgaattctggttgaaccgtgtattctaatatttctggttaagtggtgactgggtaaggaaaccacttggggtagcagttcaacaattcacttacgaatgtttataagctttccatttcctaggtaattttttaaaagccagtcaaaacaaaaactttactgaaaatggacagaaataggaaatggactttttccttactgtctatacctcctgaaccttggtattgtaaagatctggggacctctgggtctgttctgaccattccctagtctccatggccaagcactcaaggattgatggacaccacacaccagctatattcatttgccaagatcaacagctccttctccaaacaactcaagcccccaattcccatcgcattccatttgggtgagatgcaactaacagccccttcctggatgaaggagtcaaagaataaagcttgcctagaggcatgcccc

SEQ ID NO: 11438 - DNA, 1377 bp, Homo sapiens
tgctgccatttaggttatgacagtttctctagcgaggatgactacgaatctgactgggagtagaggggcaggtagagttcctggagggaaggatgaaggagccttggctactgtactctgagaggaatgtttccagaaatggaggtgggagcttagggaatgcagagcctacttgaggtgggcatctgggaatacagggtagaaagaaattcctgcttttcagataaagcctacacattgccactgtctccccatgtgactcttacagcttgaggaggcatttgttagcacttctgttcactttactacatcctgccccacattctgacttgtcacccattttcgttggctggcaggttgagatgtttttcttaaacactgcctgtcagtgtgaagtggcacagctctgatgtagtgctaagtctagcctccagatttgaggcagccctgaccatgctaccatgggggaggctcccaacctgtggaagtggtcctgtgaaaaggagacagaaacaagtaagagccaaaaaaaaaaaaaaaaaaaatccatatccattcattaaaaaaatgagatataaagcaacaactgggctgacctctatagatctgccagtaaagaaggctttctttcattatcagggtgaaggtctttcctgattcttccaagctttgaggtgactcagagctaagaatgaaataggagaccaagttagaattcatgatactggtttatggggaggcagtcatacctgttcagagaaccaggaagactcaatatctatctcagaggaaatatggttacccaggaaagaaatggtctgctagagtgataagactcagaacaggaagcctgcatgtgactgagcaagtcacctacataaccctgcctgtactaaggtgtacacctgtctattgtaagtttgcctaggctgttggtgtacagagaccagaggagagagacacactaggactaacaatgtcctaacaaaatggtacttagtttgttggtctttaggagaaagcattagtaatgaaagaagaaagaattttcacttggttggacattggggctcttaagaaagttgacatttgtcgtggaatgactttggaaagacttctaaaagaatctttttcaaatccctgaaaatcaggatagcacattttgctactgactgtgacagtgttttattcttttgagagaaatgacatagttttccctttatttcccaaattcctttcatgttcttaactgctacccagaaattgagcttcagaagattgaggatagcctttgattggtatttaaaataatttctaagctgtgaagcttatagcatttttaaagtatggctattaaaaacactaagttgattctgg

SEQ ID NO: 11439 - DNA, 1846 bp, Homo sapiens
aatttggaatataatgagtatgggaagatttgtatggaagcaccttttttttctcctaaattcctaggaatgtaagactcaatctgtagctagtatgaatattttgtattttgaacaagaaatgttgtgtcctaatgtgtcctagtctggagtttgatgccttatctgctgctcagtgggtgtaaccttatcccttctgagcctcagtttccccattccccccaatagaaaaatggggatatttcctagggttgtcctgagaataaaatgagttctgtgtgacagttaactgccattaattaattagccgttctaaaagtttatttacaatatcaaaatctgacaagtaaatcagcattgttgtttggttctcataatgtattgtttcttaagaacattttgtaattgggctatgattttatgatctacagacgtctatttaaactataatgtcttggtttaaataggataatacaatctaagactggtttgtccttgagaaatttcagatttaatcagagaaaaatgtactgattgggatttgagtggacattgtggggtgtatttctggataccctcaagatcttcatttaaattttgatactttctattactagatctaatttgattttaagctctaagtttcacttttccattaaacggaaagcctccctgacattaactgaataaaacctcatgttgtgggacttctgtgtgtgtttagggttggcagcaggtgattaggagaaggcatatgacagtagagaggactggaatatagaggagaatataagcatgtagatgaggatgtggctgtatttgttttgagttctaggagcacagcaccaaatgtggtctcttaagggaagatgagggtagaagatgttaagatcccaggttccagcaactgatgccactgactaacaactagccacttgtcagaggaaggagagaacagtgtcttggggatgctgatgggttggagtgcctaatggctcattaaaagccatgaaaaagcaaagaaatcaaagaatacttttgatggagctttaggctatgctaagccttttaatgtaaacaagcacctctaacgctaaaagcacccttgcaagaaaggtaggagttactattcacatcctagagtcaaggaaaaagagaagatgtttgacttgctcaaagtcaagcaggtaatgtcagaattgaatctcaaatctatatctttatagatttgcagttctggtttatataataccaaagtcacatacaggtaatttcccaccattgaaccttcctgttggtgtgagatgccaaatctgtgaaaaccagacacaggtggccaggtgggtgtcgaactcctgacctcaagtgatccgcctgcctcagcctcccaaagtgctgggattacaggtgtgagtcaccacatctggtcggattttaactattctaataggtatgtagtggtattaattgttttaatctgcagttcaccaataatatatgaatttagcatcttttcatatgtttgccatctgtatagctttggtgaggtatctgttagaggttttgcccatttttaattggattgctcattttcttattgttgaattttaagtgttccttgtatattttgtataacagacctttatcagataggtcttttgcaaatattttcctcccaggctgtggcttattttctcaatccttgattccttctctttactttttttttcttttttctttttttaaagaaatggtagcataatatacacagttgtccattttttaaagactaaaccatctcacagattgttctgtatcagtaaataaagatctttcccccaccctt

SEQ ID NO: 11440 - DNA, 516 bp, Homo sapiens
ggattccggtcagctacctaggcatcaccttgtttgaagatgtttcttctcttttacaagtaagacctactcctggccacttaggagagctgaatttatggaccttaattattaaatgtttataaggtggtggtaaccacctcaagtttctgatgaacattctgcatccatatacaccctgtgacagtcagcagtctgctattaagtggcctacttcaaggctttgaatcaacttaagggaaaaccttttgtctttgtaaaaataaaagcctgtagctaaggtttacagtggacattagccagatcattttcttcttagattatgccataatctcctttgattcttatggaagttctaacaatatatggtggttccaacacctgcagtgagtttaatgactgacttagtagcaggtacaagaagcaaacttgttaatatagattatttttgtattcttactttaggtattttcttgagcattttccatgactgtaaataaagccattttttaagat

SEQ ID NO: 11441 - DNA, 480 bp, Homo sapiens
caccacttggctagacggaccagctggaaagatcatgatggtggcccagccttgggatgtcatgtgggactgtatcctagggcgatccagttgtgcagccttctgaccatcagccaagggaagcaggcctctgatggagcaggctctggctctgtaaggagaggtgcagctgcagcagtgttctaccggaagtgttttgatcatctgtacagtgctttggattcttcctcccaggcctaccccagtgagccttcgcagatgctggagatcctggggttggtctgctttgtgtatggtacttgaaaccacgctgtaattattgtcctgttgccaaacaaaagccagtcatgtaactctagaagcagtgactggtggggctttctgacagttccatgctgatgtatcaggccatctgtgtcatgcttatgtattatggcaagaagaggaaaactggattaataaatacgttttttgtaagtt

SEQ ID NO: 11442 - DNA, 874 bp, Homo sapiens
ccttgtctgatgctgtggagccttagttgagatttcagcatttcctaccttgtgcttagctttcagattatggatgattaaatttgatgacttatatgagggcagattcaagagccagcaggtcaaaaaggccaacacaaccataagcagccagacccacaaggccaggtcctgtgctatcacagggtcacctcttttacagttagaaacaccagccgaggccacagaatcccatccctttcctgagtcatggcctcaaaaatcagggccaccattgtctcaattcaaatccatagatttcgaagccacagagtctctccctggagcagcagactatgggcagcccagtgctgccacctgctgacgacccttgagaagctgccatatcttcaggccatgggttcaccagccctgaaggcacctgtcaactggagtgctctctcagcactgggatgggcctgatagaagtgcattctcctcctattgcctccattctcctctctctatccctgaaatccaggaagtccctctcctggtgctccaagcagtttgaagcccaatctgcaaggacatttctcaagggccatgtggttttgcagacaaccctgtcctcaggcctgaactcaccatagagacccatgtcagcaaacggtgaccagcaaatcctcttcccttattctaaagctgccccttgggagactccagggagaaggcattgcttcctccctggtgtgaactctttctttggtattccatccactatcctggcaactcaaggctgcttctgttaactgaagcctgctccttcttgttctgccctccagagatttgctcaaatgatcaataagctttaaattaaactctacttcaagaa

SEQ ID NO: 11443 - DNA, 131 bp, Homo sapiens
tttgcacatcaactgctcaactgtggattgttttttacttttccttttaaaccggttcgtatatatttttcttcgctgttacgaatttacagcagcatttgtacatgtaaaattaaaggctattttctggt

SEQ ID NO: 11444 - DNA, 146 bp, Homo sapiens
ccggcggggcgggggccgtggggggcctggaggagggcaggggccgcgggaggccgggaggagggtggggaccttgcagcccccatcctctccgtgcgcttggagcctctttttgcaaataaagttggtgcagcttcgcggagagg

SEQ ID NO: 11445 - DNA, 1306 bp, Homo sapiens
cagccaggaggctgcagctaccacgagggcctctgaggaacctccttccaggcctgggatgagggggcgatgtctgctggcccaggggaagggaaaagacaaatgtcttgactgttgacctcggtcctgtggcagactgcagtcaacagtgtgcctctgtagtgtggcctggtgctggggtgaaggtgagctgggcaaaggagaaatatgagctactgaggagggggttggacatcctgcccctcaccccccacccacactgcaggtagaggaggccatctgatcccatgggaagccatcagagacactgctggtgggagcaggaaggagcagtgcccctcgagcagccaggaagcctgcggatctgggaaatggctctgccttaggcacttctcgggaatttgaggccagcctgaggaactgcaggactcaggtgcaatgtgccagccacttggaactgctaactgagcctccagatggtagtgaatggtctctttgccttcaggctggatgaggaagtcatttaggaaatgttcaaataaccaatatgtggaaatggacacagggatcttctgaagttgctttgaatcaaaaggcaggcagtgctggttcctctgcctgtgtccccaccactccccagctctgtcatgcaggcctgtcctccccaaccccagctggatgtgcctcccaggcctgctgtggttctgacacacaggatcccaggcaaggcaccacttcctcacatgaatgaggagcagcaagtcataaccactcccttgggtatacaatttgctgtgtagtgaagtggaaccaggctcaggctgctggtcccaacctcagagccccaccgcagcccagtagggatgcagcacgccccagagggctcatgtgggccccagatggcaatgccaccattgttgatgtgactccagagccagttattaggaagagcaagctcaccacagaggagtggaactgaggccccccagatgttgcctccggtgtccaagccacagcggtctggctgttgggaagatggccaggaatggactcataccattggcacattaggctaatcctggttttatgtgaagtcagcaattaagtgttcccactagaactgacctaagccactgattaatatttaatgagggaaggtaggggagaatctagccattttataatgccagaaatctatatatgttatctgatgccatttttctgaagtagcctcacatgtggtccccctgcagttcagcagttaacagatgacttttttagtgtaataaaatgtttatcatctatg

SEQ ID NO: 11446 - DNA, 4203 bp, Homo sapiens
ccagagccacttgcagacatcacggcaggggatgaggagccggggttgctgctgctgcttccggtggcccctggggtggaagtggggtaggggaagaggaggggcaggagggagagttcctgtgagcatgtggggggtgcctttcctttaaccagggaggtgaacactacctgcctcctgcgtgtattttccaagtgcttttctctgttgccacattttcctcaggttactcaggaaaatgctccagcatgtgcgagcacatgacctgaggttgcatcatagcaccaaaggaatcctcctgtcccctctgggaacatttcatgcttcagagggagaggtttttattgagcttgtttcacaatatccccttgaagggacagctcagctgccaatacattcaaccctttctcttccttcaggaaaatacctatacccaaatgttccctcccccgacatatatcatggcatgatttaaggcttcttttcacctgagagcttcagttcttctgcagaatggctgcaaatttaattgcattaaggcaagaaggaagctctaatgtgtgctttgtatcctaagataaatttgcttagaaaaccagagtcaagatttgaaataggtgaggcagggtttcctccttagacactgacagcattctctgtaccccttcaaatccttactctcctaaaggcagctgagtccgcgacagaaatttgccctatgtgagtaaaacatactttgggagaagaacttggtgcaggcaccaggatttttttttttgcccacgtgtttgcgctgtttttctctggagttctcaagagttggtgacttggaaggccgcttctgcaaggcaagtctcaggaacccatgcaggtacatcgcttgcacctgtttttagcttatttaatgacgggcttttgggaagagctgcccgcatactgagagacagcttcttataaacaaggagagtttttgtgtgtgcgagatctctaagccagcgtgggagggagcgcctcaggataagttattatattcatttcgttggtttctctcctgcccaattcttggcacaggcattatgtttgaagaaaccaggataaggtacactgcttttgtctgtttaatttttttagttgtttcccttcactttcagtcttccacacacaaaaaatacctcacagagcttcaccaaatcacagattcaggaggaatttggctttcacactggactcagataccttcttcagtgtgttggaaatcactggcttcacacaggcccaactccagctggtcagggcagagtgatcgtaactaaaggtcagtggggaatagatccgattcagtgcttttgccttatgcatttcagcatcctggctccccagggtggcaggagctgagggagggccacacactggcaagatttcaagaccactctctgcactgaagaggtaaaatttgcactgcaagtcacatccctgaggccagaggtcagtaccctttggtatttcgattagaagaagctgcaaaagaaaggcagcccattttaccattgccagccaggccggggacacaggagccggtgtgtgcactctgcctcctcaccttgcacccagagcaagaggactgggtgctgggctgcagaggccggtcagtggagcccctagcacgtgtgaactcaggcttttcattgggcccggctccacttctaggccatgttttgactcatttggtaaccattgcctgtaagcagcacagaattggtgccatggattatcttttccatgttgatggaattcattctgttggaatcctttggccagatgtcacttcagccagggtgtgcatcatcattggttctttttcacaggctgagcctcctgaaaacccatgaacgctggggctggggaagtgaaccctgaggtggggaccctctcttcccatcaaatcatccagctcagtgtggggcgtggcaggggggtaaatgaagccagccaatgtgttaacctgtctctgtcaacctaagaatgttggccttactgacacacctttgctccatgttcaagaccagaagtagctgggatttgtttgcaaattgggtaattagtttaaaaatctgtgattacatttttaaatgaaattttcaaagtggcctagattgaggtgattcagataggtttgcgaatataccattttatattgttgagaaagaacaaaaagggaatttccagatgtcctagaaatcctagcaacagatttctctggttgtcagtttccctggagaaggcgccagataggaatctccaatcagttgtttttctcttcgcttcaggcccttacacaaaagccatgaagagatgttcacctacccggtattttaaatgttctgtaaattattagccaaatagaactgtaatggggttgtatttatgggcgcctagaaagaaaacacaaggacttggtaggccaggaagaaaagattttaaaatttagaatgaatagcccttctgggttttctttttgacaattcttggacttgaggtaaaacaaggaggattgtggccggatttcagatcccaaagccagcctccatcttaggcctttgcctcattgtgccttttaggttttcttacccaccgtctcctgttttgtcttttttttcttttctcctacccctatcttgggacattcagaaactgcctgggtggtttgagaagagacaacccagtttgatctgcaatacaaggatccattcgtaatctctctctcactgatgttattcccccatctgccgtcttggttcatctcaccacagaagggcatttagtcctacccagccatcggctgcgtatgacagcaggatggcacttcccatttctctgtggttagtgctcgagtgaaaacctctttcagctgagtcctctgaggttctgctgttgagtcctgggtggctgatggaatgattgaggaggtctggtcaccctcaagcgccgtcatcgccttgtttccatgggcttctgtcacacaaaatgaagaacagaaatgttaggacttaagagaatgtttggaattcacacctctttgcagtcctttcaaggctgctgctctgtgctgtgtcccatgcatgtgaaagtagagctgtgatggctgctgggacgcttgcaaagatcatgtgtgagaattgagcacaagaccacaaattattactgcttgatgcgcttgttaaaactctatctgccaggaaaccaaattttcttttcttttctttttttttttgagacagggcctcactctgttgcccaggctggagtgcagtggcgcgatctcagctcactgcagcctccacctactgggctcaagtgatcctcccacctcagcctcccgagtagccgggaccacaggcgtgtatgactggctacgcctggctaatttttgtatttttaatagagacgagtttcaccatgttgcccaggatggtctggaactcctgggctcaagtgatctgcccacttccgcctcccaaagtgttgggattatggccattagccactgtacctggcacaatttttttttgtaccctcctttatgccaagaatcagtcctaatttctttactatgtgaagtaacttttaaaggtaatagaaaaggccaggcacagtggctcatgcctgtaatcccaggcgccgtggctcacgcctgtaatcccagcactttgagaggctgaggcgggtggatcacttaaggtcaggagttagagaccagcctgaccaacatggtgaaacactgtctctactaaaaatacaaaattagctgggtttggtggcgcacgcctgtaatcccagctacctgagaggttgaggcaggagaatcgcttgaacctgggaggcagaggttgcagtgagccgagatggtgccattgcactccgacctgggcaacagagcgaaacactgtctcaaaaaaaaaaaaaaaagtaacagaaaaaagagtgaaatatattagctatcttttattctgagccaaaacttgacagatgtgggaaatcttcatatagtgtatgaaaatttcattgtacagggaaattattttcctctgtgtcttttcttttactataaagtgattcagaattttactgttactataaaattatgcaaagtattgtgacaaaactgcatcaatttgttgactattaaagtgctccttgaacatt

SEQ ID NO: 11447 - DNA, 1739 bp, Homo sapiens
atttgtatttgtggaaagcggcttggcttggaagattccattgtgcagaactggagtctttactgacccgctttccacatcagcccaaggtctttttaatgcctttatccaaaagcacatcttgtgctccatgcaggatgatgacagaattgatctgatgttactgccttgatggtctctttactattgggacagttagatttataatttgaagctattctgtaattaaaatataacctgaattcagcttgcagaatggaagctgaatctgttcattgtattctattgattgtcaatttaattagctgttgcagaataagtaatatattttaaaaacctagctcctttcattatttaaaacagcaaaattatttttgtagctcagtttcattattgtcattgtagaagcggtcactattagcaggcatacttttccacacatctttggacttttcttaaaagttcagtaataagctaactgtgtttataaaatgtaagtctcttacagacatcaagtagtttgatgagacagtctgtgacttcatgataggaaagaggaggatgaggtctggggttctttaaagtctctggtgggctgcctcatgactttaatcagcttgaactgccagtgcaccagcagtttaggtgtgatgagagaattcagatatactttatctttttaaaaaagtgtaaataaaatcaaagaatgtaaagtctatctcttacgctagaggtccaaagctgcctctgttttaaagattatcccaatgtggaagatgcccatgactggtcagctacttcctcctatacattttggtttctttgagggtcactcattgagacacgcaggcctctgagagggtcttgttctagatttcatattgcacttggagggtaacagctgctttttcacgcatggtactcttgatgtttttcactctgtcaaggattttgttggctatcaatgaatgtgtctaaaacttagtgcttccaggtagttatagtactccaaatcaaggaccaacttaaacgttaatttttgtgcaaaaacaaacctgaaaaatatgcttcggaaactgtgcatagttctaattgtaagtcagattgtatattcaaattgtaattaagagatttaaatattagaacggtatgtaaggtagtataattaccactattttaaataattcagttaaacactgctgcaatatttcagtgttgtgcttgaaaatatgtacagtttttttccaatattaataccttatgttgtccttaaatatttctaaaagcgcctttatttcagcattacctttttttcatcactatcttttataaaacattaatataagtcgttacttttagaaactaaaggaaataatagctggaaaaccctctgtagtttaaaatcagtcattaaactcacaatagggtaagtaaatatagccacctgttaacatgtaaataagcataatttgttccaaagatggaatattgaaacttagttcatgtctgctgtaaaatattatttaaatgctgctgggcatttcacttaaagaacttaatgtcaacagctacaacaaagaccaaatctgaactgctaatgtggctgctttgtagggaatggactaatatcagtgtgttagatcttaaggtatcagtatttcagaatcctgcgacgattttatttctaaattcatgtactgtatgtccataagtgaaaataaaatgtcatattcttttct

SEQ ID NO: 11448 - DNA, 1277 bp, Homo sapiens
ggggtcttctctgaggtgcatggttcttttggaagaaatgagaaatacagaaacagtttccccactgatgggaccagagagagtgaaagagaaaagaaaactcagaaagggatgaatctgaactatatgattacttgtagtcagaatttgccaaagcaaatatttcaaaatcaactgactagtgcaggaggctgttgattggctcttgactgtgatgcccgcaattctcaaaggaggactaaggaccggcactgtggagcaccctggctttgccactcgccggagcatcaatgccgctgcctctggaggagcccttggattttctccatgcactgtgaacttctgtggcttcagttctcatgctgcctcttccaaaaggggacacagaagcactggctgctgctacagaccgcaaaagcagaaagtttcgtgaaaatgtccatctttgggaaattttctaccctgctcttgagcctgataacccatgccaggtcttatagattcctgatctagaacctttccaggcaatctcagacctaatttccttctgttctccttgttctgttctgggccagtgaaggtccttgttctgattttgaaacgatctgcaggtcttgccagtgaacccctggacaactgaccacacccacaaggcatccaaagtctgttggcttccaatccatttctgtgtcctgctggaggttttaacctagacaaggattccgcttattccttggtatggtgacagtgtctctccatggcctgagcagggagattataacagctgggttcgcaggagccagccttggccctgttgtaggcttgttctgttgagtggcacttgctttgggtccaccgtctgtctgctccctagaaaatgggctggttcttttggccctcttctttctgaggcccactttattctgaggaatacagtgagcagatatgggcagcagccaggtagggcaaaggggtgaagcgcaggccttgctggaaggctatttacttccatgcttctccttttcttactctatagtggcaacattttaaaagcttttaacttagagattaggctgaaaaaaataagtaatggaattcacctttgcatcttttgtgtctttcttatcatgatttggcaaaatgcatcacctttgaaaatatttcacatattggaaaagtgctttttaatgtgtatatgaagcattaattacttgtcactttctttaccctgtctcaatattttaagtgtgtgcaattaaagatcaaatagatacatt

SEQ ID NO: 11449 - DNA, 843 bp, Homo sapiens
gccttgccagggtttcgagaagctgctctggaatttgcaagtcatggctgtgccctcttgatgtggtgaggcaggctttgtttatagcttgcgcattctcatggagaagttatcagacactctggctggtttggaatgcttcttctcaggcatgaacatgtactgttctcttcttgaacactcatgctgaaagcccaagtagggggtctaaaatttttaaggactttccttcctccatctccaagaatgctgaaaccaagggggatgacatgtgactcctatgatctcaggttctccttgattgggactggggctgaaggttgaagaggtgagcacggccaacaaagctgttgatggtaggtggcacactgggtgcccaagctcagaaggctcttctgactactgggcaaagagtgtagatcagagcagcagtgaaaacaagtgctggcaccaccaggcacctcacagaaatgagatcaggctctgcctcaccttggggcttgacttttgtataggtagatgttcagattgctttgattaatccagaataactagcaccagggactatgaatgggcaaaactgaattataagaggctgataattccagtggtccatggaatgcttgaaaaatgtgcaaaacagcgtttaagactgtaatgaatctaagcagcatttctgaagtggactctttggtggctttgcattttaaaaatgaaattttccaatgtctgccacacaaacgtatgtaaatgtatatacccacacacatacacacatatgtcatatattactagcatatgagtttcatagctaagaaataaaactgttaaagtctccaaact

SEQ ID NO: 11450 - DNA, 445 bp, Homo sapiens
gtcagatgcagaaaattgcctaaagaggaaggaccaaggagatgaagcaaacacattaagccttccacactcacctctaaaacagtccttcaaacttccagtgcaacactgaagctcttgaagacactgaaatatacacacagcagtagcagtagatgcatgtaccctaaggtcattaccacaggccaggggctgggcagcgtactcatcatcaaccctaaaaagcagagctttgcttctctctctaaaatgagttacctacattttaatgcacctgaatgttagatagttactatatgccgctacaaaaaggtaaaactttttatattttatacattaacttcagccagctattgatataaataaaacattttcacacaatacaataagttaactattttattttctaatgtgcctagttctttccctgcttaatgaaaagctt

SEQ ID NO: 11451 - DNA, 1072 bp, Homo sapiens
agacagaaatgacagatctctgctttggaaatcacacgtctggcttcacagatgtgtgattcacagtgtgaatcttggtgtctacgttaccaggcaggaaggctgagaggagagagactccagctgggttggaaaacagtattttccaaactaccttccagttcctcatttttgaatacaggcatagagttcagactttttttaaatagtaaaaataaaattaaagctgaaaactgcaacttgtaaatgtggtaaagagttagtttgagttactatcatgtcaaacgtgaaaatgctgtattagtcacagagataattctagctttgagcttaagaattttgagcaggtggtatgtttgggagactgctgagtcaacccaatagttgttgattggcaggagttggaagtgtgtgatctgtgggcacattagcctatgtgcatgcagcatctaagtaatgatgtcgtttgaatcacagtatacgctccatcgctgtcatctcagctggatctccattctctcaggcttgctgccaaaagccttttgtgttttgttttgtatcattatgaagtcatgcgtttaatcacattcgagtgtttcagtgcttcgcagatgtccttgatgctcatattgttccctattttgccagtgggaactcctaaatcaagttggcttctaatcaaagcttttaaaccctattggtaaagaatggaaggtggagaagctccctgaagtaagcaaagactttcctcttagtcgagccaagttaagaatgttcttatgttgcccagtgtgtttctgatctgatgcaagcaagaaacactgggcttctagaaccaggcaacttgggaactagactcccaagctggactatggctctactttcaggccacatggctaaagaaggtttcagaaagaagtggggacagagcagaactttcaccttcatatatttgtatgatcctaatgaatgcataaaatgttaagttgatggtgatgaaatgtaaatactgtttttaacaactatgatttggaaaataaatcaatgctataactatgttgataaaagattt

SEQ ID NO: 11452 - DNA, 1049 bp, Homo sapiens
aacgaggagcagtttgattgttgtttataaagggagataacaatctgtatataacaacaaacttcaagggtttgttgaacaatagaaacctgtaaagcaggtgcccaggaacctcagggctgtgtgtactaatacagactatgtcacccaatgcatatccaacatgtgctcagggaataatccagaaaaactgtgggtagagactttgactctccagaaagctcatctcagctcctgaaaaatgcctcattaccttgtgctaatcctctttttctagtcttcataatttcttcactcaatctctgattctgtcaatgtcttgaaatcaagggccagctggaggtgaagaagagaatgtgacaggcacagatgaatgggagtgagggatagtggggtcagggctgagaggagaaggagggagacatgagcatggctgagcctggacaaagacaaaggtgagcaaagggctcacgcattcagccaggagatgatactggtccttagccccatctgccacgtgtatttaaccttgaagggttcaccaggtcagggagagtttgggaactgcaataacctgggagttttggtggagtccgatgattctcttttgcataagtgcatgacatatttttgctttattacagtttatctatggcacccatgcaccttacatttgaaatctatgaaatatcatgctccattgttcagatgcttcttaggccacatccccctgtctaaaaattcagaaaatttttgtttataaaagatgcattatctatgatatgctaatatatgtatatgcaatatatataggctcttgcttgatctctccaggaggtagtgattatgagaagggggtggagaatgatgagttccttcaccaggagcaaaggacggggatcgtgtggaaccactgcagaactatttccgaaatcaactaagtggagagagccaggaaggctgcatcagaacccagtaaagcttcttgtctggatctgagctggtttgttttgtgcttgcttttccctgccttgccactcccctcactc

SEQ ID NO: 11453 - DNA, 2245 bp, Homo sapiens
cacggactcaagtgggctggtgacccagtcagagttgtgcacatggcttagttttcatacacagcctgggctgggggtggggtgggagaggtcttttttaaaaggaagttactgttatagagggtctaagattcatccatttatttggcatctgtttaaagtagattagatcttttaagcccatcaattatagaaagccaaatcaaaatatgttgatgaaaaatagcaacctttttatctccccttcacatgcatcaagttattgacaaactctcccttcactccgaaagttccttatgtatatttaaaagaaagcctcagagaattgctgattcttgagtttagtgatctgaacagaaataccaaaattatttcagaaatgtacaactttttacctagtacaaggcaacatataggttgtaaatgtgtttaaaacaggtctttgtcttgctatggggagaaaagacatgaatatgattagtaaagaaatgacacttttcatgtgtgatttcccctccaaggtatggttaataagtttcactgacttagaaccaggcgagagacttgtggcctgggagagctggggaagcttcttaaatgagaaggaatttgagttggatcatctattgctggcaaagacagaagcctcactgcaagcactgcatgggcaagcttggctgtagaaggagacagagctggttgggaagacatggggaggaaggacaaggctagatcatgaagaaccttgacggcattgctccgtctaagtcatgagctgagcagggagatcctggttggtgttgcagaaggtttactctgtggccaaaggagggtcaggaaggatgagcatttagggcaaggagaccaccaacagccctcaggtcagggtgaggatggcctctgctaagctcaaggcgtgaggatgggaaggagggaggtattcgtaaggatgggaaggagggaggtattcgtgcagcatatgaggatgcagagtcagcagaactggggtggatttgggttggaagtgagggtcagagaggagtcagagagaatccctagtcttcaagcagattggagaaacccttgaaaagacatcaagcacagaaggaggaggaggaggtttaggtcaagaagaagatggattggtgtaaaaggatgggtctggtttgcagagcttgaacacagtctcacccagactccaggctgtctttcactgaatgcttctgacttcatagatttccttcccatcccagctgaaatactgaggggtctccaggaggagactagatttatgaatacacgaggtatgaggtctaggaacatacttcagctcacacatgagatctaggtgaggattgattacctagtagtcatttcatgggttgttgggaggattctatgaggcaaccacaggcagcatttagcacatactacacattcaataagcatcaaactcttagttactcattcagggatagcactgagcaaagcattgagcaaaggggtcccatagaggtgagggaagcctgaaaaactaagatgctgcctgcccagtgcacacaagtgtaggtatcattttctgcatttaaccgtcaataggcaaaggggggaagggacatattcatttggaaataagctgccttgagccttaaaacccacaaaagtacaatttaccagcctccgtatttcagactgaatgggggtggggggggcgccttaggtacttattccagatgccttctccagacaaaccagaagcaacagaaaaaatcgtctctccctccctttgaaatgaatataccccttagtgtttgggtatattcatttcaaagggagagagagaggtttttttctgttctgtctcatatgattgtgcacatacttgagactgttttgaatttgggggatggctaaaaccatcatagtacaggtaaggtgagggaatagtaagtggtgagaactactcagggaatgaaggtgtcagaataataagaggtgctactgactttctcagcctctgaatatgaacggtgagcattgtggctgtcagcaggaagcaacgaagggaaatgtctttccttttgctcttaagttgtggagagtgcaacagtagcataggaccctaccctctgggccaagtcaaagacattctgacatcttagtatttgcatattcttatgtatgtgaaagttacaaattgcttgaaagaaaatatgcatctaataaaaaacaccttctaaaataa

SEQ ID NO: 11454 - DNA, 408 bp, Homo sapiens
actagcatccaccaaatgcaagaagaataaacatggattttcatctttctgcattatttcatgtaaattttctacacatttgtatacaaaatcggatacaggaagaaaagggagaggtgagctaacatttgctaagcactgaatttgtctcaggcaccgtgcaaggctctttacaaacgtgagctccttcgcctcctaccacttgtccatagtgtggataggactagtctcatttctctgagaagaaaactaaggcgcggaaatttgtctaagatcacataactaggaagtggcagaactgattctccagccctggtagcatttgctcagagcctacgcttggtccagaacatcaaactccaaaccctggggacaaacgacatgaaataaatgtattttaaaacatct

SEQ ID NO: 11455 - DNA, 50 bp, Homo sapiens
gccttggaaacatgaagctaagtcagaaaaaaaatcagatacaaaaagtc

SEQ ID NO: 11456 - DNA, 1210 bp, Homo sapiens
tcgacattgacctatttccagaaatacaattttagatatcatgcaaatttcatgaccagtaaaggctgctgctacaatgtcctaactgaaagatgatcatttgtagttgccttaaaataatgaatacatttccaaaatggtctctaacatttccttacagaactacttcttacttctttgccctgccctctcccaaaaaactacttcttttttcaaaagaaagtcagccatatctccattgtgcctaagtccagtgtttctttttttttttttttttgagacggagtctcactctgtcacccaggctggactgcaatgacgcgatcttggttcactgcaacctccgcatccggggttcaagccattctcctgcctcagcctcccaagtaactgggattacaggcatgtgtcaccatgcccagctaatttttttgtatttttagtagagatgggggtttcaccatattggccagtctggtctcgaactcctgaccttgtgatccactcgcctcagcctctcgaagtgctgagattacacacgtgagcaactgtgcaaggcctggtgtttcttgatacatgtaattctaccaaggtcttcttaatatgttcttttaaatgattgaattatatgttcagattattggagactaattctaatgtggaccttagaatacagttttgagtagagttgatcaaaatcaattaaaatagtctctttaaaaggaaagaaaacatctttaaggggaggaaccagagtgctgaaggaatggaagtccatctgcgtgtgtgcagggagactgggtaggaaagaggaagcaaatagaagagagaggttgaaaaacaaaatgggttacttgattggtgattaggtggtggtagagaagcaagtaaaaaggctaaatggaagggcaagtttccatcatctatagaaagctatataagacaagaactcccctttttttcccaaaggcattataaaaagaatgaagcctccttagaaaaaaaattatacctcaatgtccccaacaagattgcttaataaattgtgtttcctccaagctattcaattcttttaactgttgtagaagacaaaatgttcacaatatatttagttgtaaaccaagtgatcaaactacatattgtaaagcccatttttaaaatacattgtatatatgtgtatgcacagtaaaaatggaaactatattgacct

SEQ ID NO: 11457 - DNA, 1023 bp, Homo sapiens
agacatcctgggcagcttgggctggcgggccctggagctcaagccgtggccggggtccaggcatgttggactctgagctcatttggggaccacagaggctgtggtcagagagggaagctgaggcccatggccacatcctcatggcccatcaggggcaggaaccagacaatctcgtaggtgtcctgccccccagcctaggcttggctcctttcaccccatccacatgggtactgtctcggcagaggtggtctggtgccaccgtccctctgcagatacactgctctccccacccagacctgcctgtctcccaccctttctgccagggatggcagtggctgtgaaggagtaatgggatatggggttacttcagccaccctttctggcacgaaatggctgaagtgcatgggtcagggtgtgaggccacacccagagtagccatgaggaggcagagagggtcactgggggacactgtggcagcaggagggactctgtctggccagggaggagccccagtggtgagaagacttccccaagcctggcaggggatccagctcaagggagtaagtagaggtggcttcagaaatggaacccccagcccagcagacatcaagctcaaggcaatgggctaccctcatttcacacgttgtgatgaagctgaggctgctgccaggcccggcatgaggccccgaggctcgagctcggggctgggggctgcagggctgggtcaggggtacacagagctaaggccaatgggctagagggtgccggaaagagagctggagtctgggctcctcttgggaatcagagtatatttaagaagccaagggggacctcgggctgttctggtggccccttctatgcccagctgtgctgggaggtcccagggccctagaagatcacagcagggccttctgcctgctgaccataacagtgccagcttctttgcagcttcctcttctaccatttcccactacgggcacctaaaagaagcatctctgaccagaagacaaaggcccaaatagc

SEQ ID NO: 11458 - DNA, 140 bp, Homo sapiens
ccaggcgctgggggctggacctgctgacatagtggatggacagatggaccaaaagatgggtggttgaatgatttcccactcagggctggggccaagaggaaaaacagggaaaaaaagaaaaaaaaaagaaaaaggaaaag

SEQ ID NO: 11459 - DNA, 2875 bp, Homo sapiens
ggcagaggatgggatgtggtggggcagggatctggtacagacataggcgcttccttccaggaacagtccctcaggagaggcagtggaccagaagagatggcgaaacgtgagctcgccggaggtacagtttttccaggtgcttaagccctcccccactgtgccacccttgtgaccttcaggcttgggtcatcaagatgcacagcatggaacacaagctcctctggatcctgcagctggtgacatggaactgttttctggtccacatgaacacaggctccatccaggcccagctcctacccaccgcctctctgtgggccagctgttcacagaaggccttccatctgatgctccccatcgcctgcttgctctccagccgagtctggccaatttgccatggggaggctgcagtgtccaagcctgctggaaactgggatgtagctggggacgaaaggacagacccaagcgttctccctgcctgagatggtgtggccacagcagtggaaggctgcacacaggcacattccttcttccacagtggggcaccaaggattctgtcctcattgctgggtaagcagggagaagagaagttttccccatgtctaattttgggatttcagtgaggccttttgatctgtccaggagaacagaagggaaaaaaagatacttgaaagaaactgaaggaaatttaaacaaagaaacacttgaaagaaactggaaagaaaaataatttttttatgtgaacaaattttgcaagaagaaaaaagcataaaagacactaacggcaaatctatgtttaaatggaaaatcgtctaactggagaagggcggtatccaccccacattcggatcccagggtcctgaggcctcgcattgagctgggggttccctctgagccccagtgtgtgtggaatcagtgcactcttgactgggcctgtagtaaggtgctcatggggtttgtcttctcacccaccatcagaggacttttaaaatcataggcgtagagagttaggctatctgctgaattactgccactcttcttggtgggggctcctagctgtggctgggggctccaggcgcccctgtgattacctcctactgccaccatggcgctcattcagattccccactctcactaacattgcttccttttttgaccagcaggaaacagcaggtctggccagattctcacttgcccatcaatctcgttcttggatgatttccctcattgtgatgcttctggggcacgttgaccatatgcacctctagaacctaaccagggcttccttctaccagctgtgggcgggcttggtctggtaaccttgtctgctctgccattccactgctcctccatccactcgccaatcccaagagtctggcctccctccagccctgggcagactgaccagcaaggtggacctttacattcaagcacagctggcttttatgacataaagaactaaaggccgaaagaatctcttgctgctgcaaagaacagattttatatttcttcctctaatcttggcaaatgacctttaccttttggaaagatttcatattgcttcctcctccctggataggacctaatgtagcacagcgggactcaaagaggaggacattttctcttgccagtgcactgggcagtggggctgtccttcaactgctgctgccaaaattggttttctaaaattcttccagtagagactaaaagaagattcaattcctgtaacccaagactgagtcttagggctccagtctccacctgcttggtttcctatcctttgctgcctgcctggggtggcctggaagcctgttcagaaaggcacaatgtggagcctggggtgtctcccccaccccaggaccgtcaggtttaccagtgtgtgcaatcgccatgtattcagagggaagtacctttgttacctacaacttaggagctaggcctctgctacaagcacttgaaaatgatatttttatttttaacgtctcaacaatctgatatcggatgtcgtttaacctgggctcgtggtagggctccagcatttctccctccttcctggtttgcctgtaggggtagactcggaaggtgggtggggtgtgcatttcctgttaggagtgtatcagtgcttgtcttattataagcccctttcttttgtgaatttgaagtagcaccaacaagcctggattgtgaaggtattaagaatcggtctgtgggctactgagtgggtccttaggatactggcccagattttgccactgggtatggcagatcattttctaccatggcctgctgctcttgtagtggacttcctgagtccaatcccacctcctggtgtagaatttacactgctgcacctgaggtcgatgtttcaaagtaagatcaagccagtgttttgatctgggctctgagcacaagtcaggaaacaccaacatattcacactctcccagtaggttcctcagtccgatggtgaatggctattcgtaaatggctggtctggctctttggtgttggagcctttccaatagccccatgaaaagaagcatcacccaaggatattgtaaaaaggatgtaacaaggagatagggtagacattgtactcagtgggccttggggcctagcccagctctgagcagaggactgtggcattcactgtccttgagtgtttcaccttcttggataacacacgggccttctcttctggatttcatcagagattacagccagatgggggctgaagaccatcctcttgaccacagaggtgtgactgtgggaattcctcccaatttatggtttcccagaaaatcttagttccttttatttatagaatgcatgtcttttgtgttaagaaaccaaagagaaataaagagaacactcctaata

SEQ ID NO: 11460 - DNA, 256 bp, Homo sapiens
acaggttttgcctacctggtccttacactacatcatcatcatctcatgcccacctgcccacacccagcagagcttctcagtgggcacagtctcttactcccatttctgctgcctttggccctgcctggcccagcctgcacccctgtggggtggaaatgtactgcaggctctgggtcaggttctgctcctttatgggacccgacatttttcagctctttgctattgaaataataaaccaccctgttctgtggcccgt

SEQ ID NO: 11461 - DNA, 72 bp, Homo sapiens
gccctgcttctgctggggctgtgtacagagtgcaaatgtttatttaaaataaagttctatttatcccttgtg

SEQ ID NO: 11462 - DNA, 61 bp, Homo sapiens
tgtgtgccctaccctggctcaggcttctgggctctgagaaataaactatgagagcaatttc

SEQ ID NO: 11463 - DNA, 2203 bp, Homo sapiens
ggccgaggctttgtaaggagatcatgtctcaacacacaccagaggatacattcagatgagaagccttttgtttgcagagagtgtgggcgaggctttcgtgctaaatcaactctcctcctacaccagtggacacattcagaggtgaaacctcacgtgtgtgaggagtgtgggcatggatttagccagaagtcgtcgctcaaatcacatcggagaacacactcaggggagaagccttatgtgtgtggggaatgtgggcggggatttagccggaggatagtcctcaatggacactggaggacacacacgggagagaagccttacacgtgctttgagtgtgggcgaaactttagcctcaagtccgctcttagtgtacatcagaggatacactctggggagaagccttatgcatgcacggagtgtgggcaaggctttatcacgaaatcacagctcatcagacaccagaggacacacacaggagaaaagccttatgtctgcggagagtgtgggcgaggctttatagctcagtcaaccctccactaccaccggagtacacactccaaggaaaaaccttatgtgtgcagccagtgtgggcgaggcttttgtgataaatcaactctcctcgcacacgagcagacacattcaggggagaagccttatgtgtgtggggaatgtgggcggggatttggccggaagatactcctcaacagacactggaggacacacacaggagagaaaccttacgcatgcatcgagtgtgggcgaaactttagccacaagtccactctcagcttacatcagaggatacactcgggggagaagccttatgcatgcgtggagtgtgggcaaagctttaggagaaagtcacagctcatcatacaccagaagatacactcggggaaaagctttagaggtgcaaggagtgaggatgtgattttagcaacaagtcagccatcagccacaccagcggaaatgcttagggagaagccttgtttgtaaggtaatgtggacagagctgtacgtggacatcattacttgtcacgtgtcagaggacacactcgggagaaaccttcatggagtgagagtaaggtgttggctggaagtggccccttaagagatacttggagtcaaatctatccactgtacgcccaccccactcttgttctaagagctttggggacagtcttttgaccccttacattcctttagatgtgaagatgacagagatctaacttctgagagcagaggtgtcaagtgacggtccccttggaggaatggtctttgcatctgactacttccttctgcaactgtgttcttccattagcttccatgacactctcctgctttatttttttctacatctctagcctttgctgtttcctctcctaccccacctttagattttactcagagttcagtctccagccctacaatctgagggacacctttaccaggtccccttcctaaccctccagtcccaaatccaagattctttaaccacactctaaaagttcttcagactcaggacttaaacatagccacgccaccttggccttcaatgacagggatctagcaatgctgcatcatcagccttccaataccaggtttaagggtattttaaacacagctcctcttaaatcctccaatctcagtacccagtgttttagccatgctcgggtggctaaattacatccaggaatggtgccagggcctttagccatttgtctctcctcacactccagggcccatatggcccaggttctgacagtttgccttactcccttgggctggggctagccctacctgataccctgtgtcaatgagtgtaccttggagagctatccactcaggccccagtgcctctatttgctaagggactctgccacagaaaagaaggggagagatgttcatgtaacctcaaaatacttaggcttggttttgatgctagagaggaaaaaggacttggagagagagaaggaatggctggtccagaggcttttgtccactccctctcactggaagtggttgatctccagggaatccccaaggttagcctgcttaggggaagggctaggggtacctggaatgtaggatctcccccatgcctggcctaccaccctaatgtgtctggaattggtgggttcttggtcttgctgacttcaagaatgaagccgtggaccctcacggtgagtgttacaattcttaa

SEQ ID NO: 11464 - DNA, 64 bp, Homo sapiens
tatggaaactaacaaaattgaccttgcatcatcttctgcaatgtagtaaagaaattctatttgc

SEQ ID NO: 11465 - DNA, 247 bp, Homo sapiens
gctgttccttgtgcctgaggagatggtgaccctttatttcatctgtatttaaacctctctattccctgccataacatcttttgccacgtatagctggaattaagtgttgtcttggagctgttgtacatttaagaataaacttttgtaaaaaaagaaaaatcttacagtggctcatcatctctttagttgttttcactaagtcattcctaccataactgtgaatttaaagtaaaaccagctcagaatc

SEQ ID NO: 11466 - DNA, 101 bp, Homo sapiens
ggccctgagtgtccagccacatggtggcaccagcaccactcctttccttaccacatcaactgattaaagcagtgaccagcaggaactgcccagagaactgg

SEQ ID NO: 11467 - DNA, 45 bp, Homo sapiens
gccaagaaggaaaatctgacgaataaagacccccgctgccccata

SEQ ID NO: 11468 - DNA, 2266 bp, Homo sapiens
gttgggatgtggatgtgccggggtgaggaagatgtggctgcaaggtctcccggctgccatactgcatgctgcaggctctgcctttcatgaccccaggcaacagccagggccccactcctgagagacactggcaacacctcttagttgatttctgttttcttctcttttcactttttgtttctaccagggtagaggccatgttgaactggcctcttttcaggacttttatttccccctggatggttgttgggagggagggaaagtgttttctgaatggctattaatagtattagatcattacaacttatgtaactttcaaaggttgtacaattatacaaaaaaaaaaaaaaggcaaactataggataacacagagccctttttgaaaataaattggcattggagtgttttaccctctagctgttttacttagaatgtaacatatgctgcctacccacctcaaaatgtctgtactgcaagagggccctgggcctctgctttccatattcacgtttggccagagttgtagtcccaaagaagagcatgggtggcagatggtagggaattgaactggcctgtgcaatgggcatggagcacaaggggtcacagcatgcctcctgccttaccgtggcagtacggagacagtccagaacatggtcttcttgccacggggtgttgttgtctctggtggtgctgcatgtctgtggctcacctttattcttgaaactgaggtttacctggatctggctactgaggctagagcccacagcagaatggggttgggcctgtggccccccaaactagggggtgtgggttcatcacagtgttgccttttgtctcctaaagatagggatctacttttgaagggaattgttcctcccaaataaatttgctttaccttggtcctttcttttgtgccagtattcaagtggtatagctctgagcagggtcacatttggccaaacctgacactgtcttgctgcattctcctttggcaaacatcagggtcagaattcaggatagcccttcctagggcactggactttctggcatgggggctgtgtttgcacaagttattttcatgttacctggagagtgtccagaggctgctctgaggctgaggtgtgttcccccttgcctggttccagctgtcagagggataccatcctagggtctgggaatccaaggccacgagactccttggtttgtggtccgagatcctgtactaaggagggtctggccagaggaacagaccagcttttgcacaatgaagcgcaagggaacaagtggtttgcctggtgtcctacctgtcctgaacctggtcctgtgggccattgaaaagttagatctgtgatctctggggtttttgtggctttgttcaatgcttccactctagggcaggcagagcagtctatactctcccaagcctgcttgacctccaagtagagctgatacagagatctgtgaatattgtgatagaaattctttggtattcatacatttcagctgcaagtcagcaatttcccaggtaccatgtaagctataaaacagtcattcttaaagacagaggatagctgtgactcatgggatcatgaggtccatggctggttgcaggttccctttttccttcctcaggttttgtctcttcctgtgttgtccccagcaagggagagactgtggggtggattgggagaacagattaggagtatagcaaatgaacccagaatggaacagtggggagctaactgtgaatgaggagagtacctgctgcaggacctggaggtcaggtgtgaatgctgtattggcacagggaataaatatcctggcgtctggagccttcacctctccgtcaagtccttcctgtgatactgccatggcacaggatctgagttgcagctctgcaccctaaatcacaccctgggcattgtctgggctgcagggctgccaggttctgtacttgtgtccagctgtggccctggatgctggagctggagggttttctgtgctcagactgtagcctgtagctcttggcctgtgtagagccccctcctgtgccctcagtggctgtcgtttgttaacatcatcaggaagatgggaaaggtcaggcagaatttttctgccctacaaagggtggaagagaaaggacacagtattttcatgaatttaccatatatctttgtttttcttcaacgaaaaagttaattgaggcaatgtcatctgctcaaagttgagtggtttattcacaataaactgtaagtttctgattat

SEQ ID NO: 11469 - DNA, 239 bp, Homo sapiens
gggaagagttagccccggttcccagccgcgggtcgccagttgcccaagatcaggggtccggctgtccttctgtcctgctgcagactaaaggtctggccaatgtcttgccccaccccgccagccgcgatacggcgcagttcctatattcatgttatttattgtgtactgactccatctgccccgtcaaataaaaaaccacaaggttcgagccgccgggcccgacaaactccgggtcggcg

SEQ ID NO: 11470 - DNA, 661 bp, Homo sapiens
ggtatcctgcggtggctggcgtgctgggcatggggcctgctcacagacagcatggagcagggatgggctgtctgtgcccatgctcagcatgccttgaggggaggaggtggtggccgtgggttcctgatgtcggtgcaggagctgaaggtgagtggagtgctgccaagaatatgcccgactccccatgacaagacagaactttgtaacaaacagtaccaatttattttggccgtgggtttttgctttttttccagttgatgactttgtgaacattcccaggtattggagcctctgtggccttaaatgtggctcagtggagggagacccagcatagccaggccagtatggagcacctcacgcacagctctcagaagctgcaggcggacgaacatctgaccaaagaggtgtggtcgaggctcctgaaagagaaagggcctgctggtctcatcctctgcttcctttgcctttaccctatacctctctgcacgtcccaccccattttgctgtgtgctcacccccaggatgtgtacccggttgtagtaggagctgaaatccatgctgagctgtaccaggaacttgcatatctagagacagagactgagtcactggcccatctctttgctcttgtgccccaggccagaataaagaatagagtgtagag

SEQ ID NO: 11471 - DNA, 319 bp, Homo sapiens
accgccaggaactgacctgctgactgcactctgccaggcttcccaatgctttcactcttatctaccctttggcacttatcttgcttatcaacataataatttatacacttctcccattttgtatcaggtgtgttgctggccaggagctgatggctcactgggctcttggaggggaatgtgaagaaaccaaggagtcactttttcatctagattacttaggattccttgacttttcagaagtcgggaagcagtatgtttgcctgttgtagacctacttgctcacatgcagatttgagaggacctcaacggcttttctcac

SEQ ID NO: 11472 - DNA, 684 bp, Homo sapiens
aggcttggtgggagctgtccactggagcagctcattgccagaggcagctatttctatggctccttttgctgctgaggacactcactgtggctctgtgggatgagagaggcatgggggtgagcacttgaaacactgccttggggccttgggttaggggagcctttgtctttagtgcaggacacacatatgcttacacctacctttatcaccattcgttcatgaatcatgcctagctccatccttgccctgggacctactaggccttccatccaactgggaaatggggagaagcaaagctggcctcatgctcttcagggtcagttcctatctggagttgaccaggcctaccccagttgccattcctgaaaaatctcagctgccaggctgcctttagggtccctgcagacccaggagagttgagagggtgggggacacagagagaatagagaggatgtgggaactgccagagggccggagcgcaggagttcaagtggaggaatgctggctttgagccctctacactgctggttgtatgaccttggacaagtcacttcacctctctgtgcctcagcatcctcatctataaatggggatctctgaaaccttcctaccctacctacctcacagggctgttgtgaggacccagggagtttggatgtggaagtaaaagtgctgctaaaacct

SEQ ID NO: 11473 - DNA, 440 bp, Homo sapiens
ccagtccacagttgatttattggtctcagctagaaagagaaattgcaggacatttgggctggccaacagcagaaagtccctgaagcctgccaagtacccagggtcagaggccctgctgaggtggggcaatgagcacgagggcagggaaggtccagcattctgggtaccaggtgctgcccctgacaaggattaagtgcatccttatttattggaatgaaatgtgaaaatggtgctgatgaaaactgaggcagcagcctggttgtggggcatctggagcagggtgcctgtactttggcgaaaggcaggcaggcctccttatggaatactgtgtagcagaagggctctcataaaactgttgcggtggcagcatgactccaaacaacatttttgggtctttaaaatattccctacacatgaccaatacattttcaggcctcagg

SEQ ID NO: 11474 - DNA, 1614 bp, Homo sapiens
gggaaggcagcagagggtctccaagggcatcactgggtctgctggcttctacactgggttctgctactccccagacctcagggacaactgccgggggttcagggttggtagcagggagtacccagtgcctacagggctgggcctcttctgcctcttaagcctgctccctcacccaggcactgggcaagtgaagagtttgcctgtactcttatctgggtgccttaaggagagagattgtgttcttcctctctcaggggtgataactcaggaagcctctgggttgggaagaccatcagttcttttgtcttaggtttcttttcctgtccctcttccatccccaagatgtgaccccataaaaatttttcctgagttggccaggcatggtggctcacgcctgtaatcccaacactttgggaggctgaggcaggcagatcacgaggtcaggagttcgagaccagcctgaccaacatggtgaaaaccccatctctactaaaaatacaaaaattagccgggtgtggtggcacacaccagtaatcccagctactcaggaggctgaagcaggagatttgcttgaacctgggaggcagaggttgcagtgagccaagattgcgccgttgtactccagcctgggcaacagagcaagacccatctcaaaaaaaaaatttttttcctgagaggaagcctgaggttgaccagctctggggtttgtaaggcaggtctgttttctcctaggccctgagttttctgaatctctggttttgctttgttggcaaggagccagggaatcctgacctgagccagaccttaagctctatggttatttagctggccattcaggtataaggcagggtggtgtacctgctggcactatccagatggaggcaccaaacacccacatacctggcccaaccagacttctcccgtgagccaggcaaaggaaattgtcatctgccaactgtcctactcatattcctctcagtccttcttgggggtaagctgattacctgaaggacagctgaacccctggggtagcctcctatccaccactgcttaagtgcctatgggaatgtgggtctgcaccttgtcccctcataggatggtaccaagcatttagtgcacagtggccccatcatagcctgcagcctcatcatttcccatctggacctggtacaaatgcacgtcacaggctcagctcctccccactagcattttctctaccttcaagaaccaggcagccctgccatgtcacaataggccaggggagtttccaaagatgtgggtggcaaatgcccctatagaaacaccagtacctgaaagcactgtagccctggacctgcctccttccctcggggccatacttctgtttccatctgctgggccaccagccactttagtgacccctgcctacttccttcctgttggatatcatacttccatctggctgcctttgcttaagccatctttgtggtagaggggccctggaattgcagctgtactgaggatgatgttattcacagcccctggcccacccactaatactactgcacagagtcaggatctcacatttcaccccaggctcaactgaggatgtggcttattaaacacggaagtgca

SEQ ID NO: 11475 - DNA, 2416 bp, Homo sapiens
cccgcaagcgcctgggtggaggcagggtagggcaggggcctggagacgacatggtgttgtctgtggagaccggtggcctgcagaccattgcccaccgggagccgacacctgacctagcacacactgacacaggggcctggacaagcccgccctctctggtcctcccaaaccccaaagcagctggagagactttggggacttttttatttttattttttgcctaacagcttttggtttgttcatagagaattcttcgcttcatttttgatggctggctctgaaagcaccatgtggagtggaggtggagggagcgaggaaccatgaatgaactcgcaggcagtgccgggcggccccctggctctctgcgttttgcctttaacactaactgtactgttttttctattcacgtgtgtctagctgcaggatgtaacatggaaaacagtaactaaagattaaattcaaaggactttcagaagttaaggttaagtttttacgtttaatctgctgtttacctaaacttgtatgtataatttttgggtgggtatggggaattgctttgctaaaaataagctcccagggtgtttcaaacttagagaagaccaagggacagtattttttatcaaaggaatactattttttcacactacgtcaacttggttgctctgataccccagagcctgattgggggcctcccggccctggctcacgccaagtccctggtgctgggtttgctctcccgctgttgccaggggctggaagctggaggggtctcttgggccatggacatccccacttccagcccatgtacactagtggcccacgaccaaggggtcttcatttccatgaaaaagggactccaagaggcagtggtggctgtggcccccaactttggtgctccagggtgggccagctgcttgtgggggcacctgggaggtcaaaggtctccaccacatcaacctattttgttttaccctttttctgtgcattgtttttttttttcctcctaaaaggaatatcacggttttttgaaacactcagtgggggacattttggtgaagatgcaatatttttatgtcatgtgatgctctttcctcacttgaccttggccgctttgtcctaacagtccacagtcctgccccgacccaccccatcccttttctctggcactccagtcccaggccttgggcctgaactactggaaaaggtctggcggctggggaggagtgccagcaatagttcataataaaaatctgttagctctcaaagctaattttttactaaagtttttatacagcctcaaattgttttattaaaaaaaagatttaaaatggtgatgcttacagcagtttgtacgagctcttaagtgttgattccatggaactgacggctttgcttgttttgattcttttccccctacttttcctaatggtttaaattctggaattacactggggttcttttgccttttttagcagaacatccgtccgtccatctgcatctctgtcccatgactcaggggcgcccactctgcttcgattctcctcctgtggaagaaaccattttgagcatgacttttcttgatgtctgaagcgttattttgggtactttttagggaggaatgcctttcgcaataatgtatccattccctgattgagggtgggtgggtggacccaggctccctttgcacacagagcagctacttctaagccatatcgactgttttgcagaggatttgtgtgtgctgcctcaggaggggagggctggtaggagggggggagaggtctctgtcctactgctctccagagggcatttccccttgcgccttctcccacagggcccagcccctctcccctgccccagtccccagggggtactctggagtgagcagtgcccctgtgggggagcctgtaaatgcgggctcagtggaccactggtgactgggctcatgcctccaagtcagagtttccctggtgccccagagacaggagcacaagtgggatctgacctggtgagattatttctgatgacctcatcaaaaaataaacaattcccaatgttccaggtgagggctttgaaaggccttccaaacagctccgtcgcccctagcaactccaccattgggcactgccatgcagagacgtggctggcccagaatggcctgttgccatagcaactggaggcgatggggcagtgaacagaataacaacagcaacaatgcctttgcaggcagcctgctcccctgagcgctgggctggtgatggtcgttggactctgtgagatggagagccaatctcacattcaagtgttcaccaaccactgatgtgtttttatttccttctatatgattttaagatgtgttttctgcattctgtaaagaaacatatcaaactaaataaaagcagtgtctttattacaa

SEQ ID NO: 11476 - DNA, 3960 bp, Homo sapiens
catctacaatctggcaaacccttggcccaaagactcaccaggtgggacgtggcaggcaggcctcagttgaggacgtgatgttttctcacagcagctgcctgggtgaagcatctgctggacaagtcggaccactggccaggggacctttgattgtctttccagagatgctgctctctgcagggcaccaccttcaaggcacagcccttgttgggagggagaaccctctccagaaaccctgccaccatggtgtcttgccgtacttcccacagccgcctttttgcggcctggccggccaggcttcccgtgcgttatacacagagtttgggcacacactgccctccctccgagatgccagaagtttttccacagccttggagaggggctttgactgagggctgggggccctgggctccgtttccttcacattccagctggcccggatccctctgtggcacagggccctgcccgtcacatgccctctgggtgacatcggagcagacctccatgtggccaggggttgggagaactttacaaacattaggacctaacactgtctcatcgctgaaataagaggccatagcaccgaaaagcagcgtgggcgccggctgaggcttctcccagcccgtgggtggcagcgtgctagcacactgccaccatctcaaagccatccccctagccatcgtgagcatcccagcggcaccgccattgtctcaaccagccggctcctcgtctgtacacctggggatttcttttgatttcaagaacagccttaatcattccagtttgatttacgtgtatacctcataaacatttttcttttgtttctctctccccctttctctcttctcttggctcactcccttgcctctccccctccaccaccaccttgtgactgatggtttggtttcctctctgctctgcccctgctcagcacagggagaatgttgacttagaagcaatagggggcagcaggccaccaagagcacaaccccagggcgaggtctggggaggcctcccagcccgcctctgtttactgtgcaattccagtcgttcttaagccatcaccagtgggtgtactcagagcagaggggccaggacttctgccagccaagggaaaggcccagagccctgtgcgggggaatgtggcactgtctatccatccggtggactgggcagcattcctccccagggctcttcccttgggggcctcctttcatctggggcacagccacaagtctcatctctaacgttctatgcaatgaaatataaaccctcaatgacaactgttaatatttaataaattccatgttatgtataaggagttaattgcaaacatgcaattgagaaactggatagatacactcataaaacccccacccctccccaccccacccctgctcccattgtgtgtgtgaaattctcagtctgtggcatgtttgacctgtggcaggactcgctgctgccaggtgagtcaccgcctgtcctgcagtggagcatgcacagctcgcagcctctttgcacgatttcatccattttaaatgcttgaccctcttgcttggagttctttttgcctcagaacctctccttcaggagcacttctagctgacttctgcacaagctagtgaggacctgccagaattgttgcctgagcgtgccaggctgcagggcaggcagtaaaaggcccccacataccctgcagttttctctgtccaggacagcaggtaaaaaggaatccccagagcagacgcaatggtaggagcctgcacaggatgtgtgtgtatggacattctgaaggtttgctgtaggatatctgtctgtctgtcattttcccttcctaccccaaccctgagccagaggcatctgacagccctttcccagagggcaccacgcaagggcagagctgggcggcatccacagccagagaggcagaggcaagagcagagccaggctgtgcccgagggaccccagctcttgactgcacctgtttcatgcctctcctctgtggctaggaggctcaaaggactgtgagccaggagatctgggctggagctagggggtcaatggatgctcaggaagagctgggcctttggcacttgtggtgagaacagttgacagtggtcatctggaactgttcatataaacagtggcttcaagctaagtttcttgtgaagtttctcaatagcaaatcttacagaaggtcctgtgtgaccctctctgcatctgtccccaggacctatgctccctgctcacccccttctccaaagcccaagcgtcccgctgctcatcagcttttttaccattgagccaggagtgcggcaggcagtacctgcctgacccttcaaggcctgaccttcgtccagagtgctctggtttgcaccatgcatttctcaggggtccgcatttctcatgcttttctataagatctacacaccccttcagagagggctcctcgctcacctctggtagctatggatgggacaggaagctgccaacctttgtgttggacttaacacccttgcctttctgggacttggcctcaccccacccatggaatacctgcctcatcccaaagatcaggtatgggctgaatgcagccatctgagcaagggctgagggaagccatcacctaacacctctggccacccaggaccaggtctgtgtggggatgtgccttggagaccaaggcaatagtcctttccactacaggccaggggatgggacaagaagtagggaacaggcagggaaatgttaggaggtcagcctccagcaggcctagtctcaggctctaaagtactgacttttcagcaaatttcctttctggccaagccctctgagtttgaaattctgacatctgccactcctcatcccccactgtacccacaggatacatcatcgcccctctgtgaaggtggctggagcaggcctctggtccatggactgtccttcctggcccttgcatggatgcagttgtgactctggggacaatgcagccagaagctgagggaccagcacttggtgccttggaaagtagagagcaacagacacatctccaaatgggcaaggagtctctagcatgcagcccaggccttctccatacccctctccccagcatcatgagcaagggcattgcctcctctctctgctcacttcagggcccagtgcactcacttcacagtgacagccctcccctacaatccttgggcagagcatgtggtctgagggcccacagtgaaagaacagcagtggtggcaactatgccttgccttctggagcctgtagggagttttccaggcaggtcctttgccaggacagcatggtcctgccctgttgtcccgtctgctctcctcttacccacccccatgctgtaaatacttgtcatcatggactccaacagggttagagggacaggcctaatcaactgaaactcctcggagatgccatctctgtctccctgggtgccagcagccctgctgccatgtgcactggggtggcactggagagccatggcagtcgtgagatattgtatgtgtatgcacatgatcatgtgtgtatgtgcgtgcgtgcgtgcgtgtgtgtgtgtgtgtgtgtttctgcctcattcagtttctggggtcaaatcagctccttctctccaagtgcactaccctggagagtggtggccactcaataccttttcctctagctttcatgtcttgtttttgctttccccttcctcctccctctctccctttctttccttctctccttctttatttgaggggggaagagtgctgtacaaagtcaaacaaacaagtttacagttgtaagtgcaatgacccgagtcctccacatgaccttgtgaattgtgtgctgtccttctgtgctctgtgagaactcgtggtacttcagtgtccctccccctgtattgtgacaaggtaattctgtggtatcagaataaaaggacttgatataaacaaccta

SEQ ID NO: 11477 - DNA, 158 bp, Homo sapiens
agccctgccattctgcatgagctgatcagcctgtgccacacttcgctcttgaggagctcaacggtctggcagggcagcaggaggctttctgggctctggactccacggatgcgtgggcagaggaatgtgggctatgtagtcataataaattaggacac

SEQ ID NO: 11478 - DNA, 223 bp, Homo sapiens
ccctcacagcctgtgccatcctggaacctccacctttgaacccagagccaggctgggccctatttatgagctccctttgcccttctcctgtatcccacaccaccacatccaacctccttgcctgcctgtatcctcattggtgggagcccagccatggccctaattgtgcctgagcttgactttcagtcagggccacagtgagcattaaattattattccatac

SEQ ID NO: 11479 - DNA, 43 bp, Homo sapiens
ccctgccctccagcctgggacaataaaagccttttttctagac

SEQ ID NO: 11480 - DNA, 115 bp, Homo sapiens
gaaaggagacaagttccatgggatacaacctccctcttgttttgtttgtctctccttttcttttgttactgttcttgctgctagaacttttttaaataaactttttttcaatgtg

SEQ ID NO: 11481 - DNA, 501 bp, Homo sapiens
gagagagagagagagagagatgacaaggagcacaagaagtggtccatctcccgaattcgctgttaccgcctgtctctttaagggcatgccttgtgctgttaatagatcttagggtgaaccacttcattctgcagggttctccctcccaccttaaagaagttccccttatgtgggttgcctggtgaatggccttccttcccgccagagggcttgtgaacagaccggagaggacagtggattgtttatactccagtgtacatagtgtaatgtagcgtgtttacatgtgtagcctatgttgtggtccatcagcccctcacattcctaggggtttgagatgctgtaggtggtatgtgacaccaaagccacctctgtcatttgttgtgatgtcttttcttggcaaaagccttgtgtatatttgtatattacacatttgtacagaattttggaagattttcagtctagttgccaaatctggctcctttacaaaagaaataccttgag

SEQ ID NO: 11482 - DNA, 959 bp, Homo sapiens
ggccagctgcctgtgcctgccatgggccagcctagcccttgtcccttttaatataaaagatatatatatatatatatatatataaaatatctatattctatacacaccctgcccctgcaaagacagtatttattggtgggttgaatatagcctgcctcagtggcagcatcctccaaaacttagacccatgctggtcagagacggcagaaaacagagcctgcctaaccaggcccagccagttggtggggccaggccaggaccacacagtccccagactcagctggaagtctacctgctggacagcctccgccaagatctacaggacaaagggagggagcaagccctactcggatggggcacggactgtccaccttttctgatgtgtgttgtcagcctgtgctgtggcatagacatggatgcgaggaccactttggagactggggtggcctcaagagcacacagagaagggaagaaggggccatcacaggatgccagcccctgcctgggttgggggcactcagccacgaccagccccttcctgggtatttattctctatttattggggataggagaagaggcatcctgcctgggtgggacagcctcttcagccccttctcccctccccgcctggccagggcagggccaccccactctacctccttagctttccctgtgccactttgactcagaggctgggagcatagcagaggggccaggcccaggcagagctgacgggaggccccagctctgaggggagggggtccgtggtagaggcctggggccggtagaggctccccagggctcccttatgtccaccacttcaggggatgggtgtggatgtaattagctctggggggcagttgggtagatgggtgggggctcctggtggccttctgctgcccaggccacagccgcctttgggttccatcttgctaataaacactggctctgggactag

SEQ ID NO: 11483 - DNA, 1249 bp, Homo sapiens
gtgcctgaattcatgcgtgtcagtcaccctgagacctggtagccctagctgccttgcagccccaaaccccaggaccctatcagccccctgggactccctggccccaacctgccacctcaccaaagctctgagccctgctagccttgaggcgcggaccctcccccatacctcccacagtatcccagcgcctcatgcccccaaccccaagccctgcccttcaccgcccggctgcactggcctctaggactcacagcagccagccccagctaggaacgggcaggacttggggcagctgaagctcacggtgactcagcagtgcccaactgaccaatctcccgcagctctcctgcccctgggggcccacgactcacctggtgggcctgggctcagcaaacagccctccctcccagtatttcatcaaggacagggaatatccctcccacacacaggccagctgctcaccctgccacctccatgtgacaagtttgacacctgtctacccagagccagtgactgtccctcccagcagcctccaaagggtccaaagtccaagctagctctggcctgtgtggcccccacataaataaattagtggggagggggcagacctgggggcccttgggtgccagagtgagacacagcaggacccttccccaaatactaggctcagagcaacctccagccttctccagcaggatctgctccctgtgtccttggacagcagatccacacaccacttccccacccacacacagtaccctgggctggttggacaacaggatggtgtgttaaggggttaagggagggtactgttgacaccagctatggccaatagctgggctgtcctgaggggtggctggggacagagtccagctcccttggatcagcccagaggattcaggataggacaaaggccctggctgtgcccaaaagggtctacctcaggtggggttacaagcaaacctgggtgaccctcttgtccctaccagcagcttctcttgccccttccattcagggttccctggcaggggaagctgagagccatggctgaactatcagggacaaaggcccatgtccccacatccctgctccctccttcctcatccagcaccaaatctttgcttatgtccacaggccagggcctgtgctgcagtcggggacaaggagcttccgtctggcaaggccggggcacaatttgcactcccctcagctagacgcacagactcagcaataaacctttgcatcaggc

SEQ ID NO: 11484 - DNA, 793 bp, Homo sapiens
ggtgaccctcatcctgttctgtctactcaccctagcagccctgcccagactcttcagcccctgctcccatccagtggccagtcgggggaggagaaagacgcgattaacactgtggcattcagccaggccccatgtcctctctgtggaaggtttttgttcaagagccaggaccaaggcccttgggccactaccctgctaggctctggagctgtagaggcttcctgaactgggagcagggtagggctgtcgccttagatcccgcccaagcccctcattccctccttgcacagatgcatacactggggcccagcagctgcctcctgaggtgacacagcctgtaggaacatacacagctgggatcagcctgcagccatcccccgaccctgctgctaggccacggtctgcgccctggggcctcatctcccccagcccacttgttttccccccttttattccctaggcccttttcagactcctgggcccttggatactcttctcccatctcccttcacaggatgacaccctcccataccccatagctggggccagcaggttctgctgagggtggggctggtgtagggacccccaagagacccctgtcctgtcccttcaccagtcctggggaggctgggactccccctgccacaagcctgggccacagctcacattccactgctgggagaagaaacaggccgaggcccagagtggcctgcccccgggagccaaagaccccagtggccacactgggatagggtggggaggctggcagccctcttttataaatattatacat

SEQ ID NO: 11485 - DNA, 987 bp, Homo sapiens
ggccaccgccgactttgtaccccccaacccctgaggaagatgggggcaagaagatcacgctccccgcctgttcccccgccgcttttctcctctttcctctctttgttctcagctccccctgtcccctcagctccagacgtaggggaggggttgccacaggcctccctgtttgaagcctgcccttgtctgagatgctggtaatggccatggtacccccttctgggcatctgttctggtttttaaccattgtcttgttctgtgatgaggggaggggggcacatgctgagtctcccaaggctgcgtctggaggggcccctgcttctccagcctggacccccagctttgcccaacaccagcccctgccccagcccaagtccaaatgtttacagggagcctcctgcccagtcccccaaccccagccgctcggaggccccaaaggaaaaagcacaagaagcgtgagacgccaccattcctggaaaccacagtccacctgctcattctcgtagctttttaaaaaaatgaaagtaaaggaaaaaaaaaaaactgcaaatctagaaaactttttagagaaaaactatttaaaactgtcagatcctgaccagcaagcccccccccagccccccttccaagtgactccgtgccttgagtgtgtctgcgtgtttacacccgtccctctgctggccgcccccgtgcgagcggcacccctgccctgccctccacagaattgggttccaagggctgttccagacaactgccaacgtcactgagggccctgccccagcggccctggccccaggctctattaacctaaaatgtagctccctagcgctaacctaggaaccgccgctgcctgctggggggccacgcccctcatgcccttgtcccaggcccggggccttcagcgttgaacacttccttgcttttttcacatgttttatggaattgttcacctggtttgaaataataaaatgtagaaagaaaaaaaat

SEQ ID NO: 11486 - DNA, 433 bp, Homo sapiens
ccagactgtccccacgccgggaaccaagcaggagacgacaggcgagagaggagccagacagaccctgaaaagaaggacgggttggggccgggcacattgggggtcaccggccgatggagacaccaaccgacaggccctggctgagggcagctgcgcgggcttatttattaacaggataacccttgaatgtagcagccccgggagggcggcacaggtcgggcgcaggattcagccggagggaagggacggggaagccgagctccagagcaacgaccagggccgaggaggtgcctggagtgcccaccctgggagacagaccccacctccttgggtagtgagcagtgagcagaaagctgtgaacaggctgggctgctggaggtggggcgaggcaggccgactgtactaaagtaacgcaataaacgcattatcagcc

SEQ ID NO: 11487 - DNA, 911 bp, Homo sapiens
gatgccatttggatctggggcctgggggtgtgtgttggtgggggaataaagtggctatgggcaggtctctccttccctactgctggctgccacatctacactatttccttggtgagatttttgtacaagaacctgttgttaacttaatggctgcctccctctcctgatctcttcaagccaggcctagccaagcctctggtgccaaagcctcgctttgggtggcccaaggtcaggggaaggggcaccagcctcctggctcctcctgtggcctgtcaacactctctggccaccccagatggcaggttctgaagtctagaaatagctgcccccatagcaatcacccaaactctgccagggctcccagtgagggtccagcctcagctcttaaagacaggctgggctctgagtagggggagaggcaccacctggggaagactgccttggagggcaaaggtgacatcgtggaagaccagttgggcccaagcctgggatagtagatggggagggagaacagaaaaatacccaggggttaagaccacagaaggctgaccgttctgtttaattatctgtaataatccttaaaaatcagcacacaaatccattccaggtagctttgccaccccacctgctgtggtggcatttgtccagatgccaccacccccctaagagtgggtcatcctgggggagcaaggcctgagaaaggaaaggaagggaaaggccccctagtgcctgccccacagccctgaggaaggcacatatttagcctggcctgagacaggacaggaaggggccacagggctgagtgcagggacaaaggggtcagggtcccaagtgtccgggcccccagctacccaccccatgtctgtttttggttttgtcattaaaaaaaataaagtgacaaatactggtgg

SEQ ID NO: 11488 - DNA, 319 bp, Homo sapiens
gctcttcccagcctaggggaagcctggatttgcccctccatgtaggagctgggcctagggacctgttgaactctctcagctgagtcaggggacacctcaggcactgggacagttgggcatttggaggcccgtgtgtgaattcctgctcctcatgctggagtgcctcccatttccttcccctttctctgtcatcccagaggaacataggcatcatgtgtctggatgaagctggggctgcaagactgcctctcctgcaaggcagctcatacttgtactgtatgttcagaaattttaggagagaaaaaagtaaaaaatttgt

SEQ ID NO: 11489 - DNA, 4571 bp, Homo sapiens
catggctgccctgtggatgccttgtcagtgccgccagcctgaccagaggggaggtggatggcactttccagagcccaggttcttatggcatttcccagggttctgtgatttccccatgctctgcatttctaggatatttctaggacacctggattggctccatcacatcagagtggctgagggcagttgctctgtgttggtgaaattgctgtgggggtatcgggggatatggccagtaaagtattgagagactaacaaatggtgacctaatgttttgtccatgacttgcaggtcccctgacccccttactcccaggtagcactggggcaagggtttccttctgccccagcagggctggccgtcagtcccctgcttggtagtggtgtgggggtgcagtgtggaggaaggcacgtgagtcctcactcctggccttggataccatgggtcctggcatagagcagctcactcccagggattgattagtcctccactgccctgggtgcatgcgtacacaattccctggccaagcctggctcgagcacaggaagctcatctgcgttttggctcaaggatgactgcctgctttctggaggggagggtctggaggtctttgctgcacagttcctgggtcgcacatccacgttcatttaactgaaggcttgagccagtgaggggtgtttcctttttatccccatagcttttagctaaaacatccctcccgagttgaccccctggggtttcaaataacccatgtgtccctggttggggctggggagagtgagaagctgagatactgggcacagggttgtggcctccaccccagctctggtctgtgcagactcatggccaccaggaggcctgcagatccagccttcctgtcaacagcgacaggaaatctctaggttggtgagtgctggtgatgtgagcctacatcagggtgggtcctaagaaacatggcaaaccaggctgtctcattccactagactgccccctgccaccctggcacttcccagggcctggcagtatggtctgatgggcagtatggtccaataggcagcatcctctgctgcagctgggagagctgagttccagggctgtgtcctgcagtgggaccttgggcaactcctttccctatgagaagctggctcttctgagtccagggccaacgccaactggcaacctctttactcttagtcaagtggaatgtgcatgctggcatctgaatgtccattcgccaggcatggagagcaagagaaggtatgtactgcctgaggtcacatgacagtgaccaagtggagacagtaagttagatccctccctttggggagcctatattgctggagtcatacccagcctaagtgttgccctgcactatggctggaggacacatttggtagaggtcacactgcagctcccagtgccccagtgtcctgccctgtgcccagccccagctgcatggactctgagctgcccctggcttcctttaaggaggctgctccagaaggaacctgggtggggagggcgaagggggtgcacaaccagggcaaggctccccacttccttagtcccccatgctcacagacctttgcctgctaaggtcctcaccagtattgccctttctgtctttctccttgtgccctttggctcttgctgtcttcagcagcatctcagggtagctgccctgacctcggagcagtctgtcgcccccctacacctcagccagtcctggcttccctgatggtctctccctcctggcctcaggcccattcctgaggaagggccttggcgagcttgtggatgttgcaccagaagagagtgcagtgttggagagtgacactgtcggggcagctggggccacaagcaggagccggcctcgggcacaactttctgcccagaaaaatgtgcagcttgactctgctgaggaaaaggtccaagccaagaggactggcaggcggggcctcaagcctgcagccactggcttgattgggccctggacgttgagcccagatgttggagccacaccagcctggatttcaatcccagaatctgcccctcacgaggatgtgaccttgggcagatgacttcacctcactcagccttggcttctaaggctgagaaatgggacttaatgctttattttataggatgcatgtgaggagcccatgggatgtgcctggcttggcacattgtggcatttttccttgccttcctcggagggcagacacagggaggaaggacccagtgccctcaggcgtccatctgatgcatgggaccaacataaggcaggcagggatacaaggcagtctggaaagaagggaaggcaggagtttcagtcttgggctcttgactcctcactgttgtctagagatggagccagcaggctggtagcctggcagcctacatctcccctcagcctctcctcactatggccccagtgccttgaggcccaggccagggcagccagtggctctagctcagggaaagccaggcccacctgccctatcccctcccttgctcctgaggccaaagccagagactcgaacagcctccccaccaccaccagcatatgtcaaggagcacttgcaggcagaatgggaggaggacatggagctgatggagtccaggctgtgcaagcccctgaggtcttgagagatgtgcccactgcccgtgcagcctccttcagccagagcccagagcatagacaggagtgtaggagtccctgtttgatgtactctgggagagtaattctatctcctcttctgatagttggggaaactgaggccttgtctcacagttggatgcttttcccagttgtcagtgggtttctccatgggtctcatacagctgccttattgaaataggccccgaaccccctaaatgcaaaaaatactcttttttgctcctttacccccacctggaccctgggctattggctgctcccaatccttgccccaaacacttagctggctccccatgacttaagtgtgttctcttgtgtcctatggaatccagttctgaagaggtgggggaggacaactgtgggaaaagccctgggggcccctcccaaggccccatcagtgctctgagtaggctgtcatcagaacaaagggctccactgctgacaaggtttgagaactgctggcttgaggtgagaacccctttaacctctgcgggacagcatgtctttccctatccaccttcgattcttttctcttttttttcttcattggctccttcttagtggattctcttctctactgccctgggcttcagcctttgtgcagtactctcgatgccctgaacacacaccttccctttgcccaggcggtgcaaacaatccacttcttcaagctccaacacaaatgctgcctcctttaggatgcctgctctgtgctctccctgcctcccctagcccatacctctgctggcaccttctgtaccatgccttcagaaaccttcttatccccctcatctctggggccccctgtggatctggcatacccaagttcagtaaatgtctatcagtaagctgatggtacatgcattttctagaatagagctgggacttcccatgtggcccacatctgacctggcagcccatgtattccggtcattagggatgggaagccatgaggacctggccttctgcccgacccaggcagccattcaagttgagcaatggccacttcgaagactcaagtgcacctgatccctgcgcaacagccacaccaggagaacaggctgtccttggcggcagtaggagcaggcgccaggtttcctggagctcttggcttcagccagcccccagccagagtcctggctaggacagtgacctgatctcctcctcatgaccttctgccctggacaagccccctgaactggatttgggactgtcaaagcaactctacccctgctctggtaggctgaacagtgaccccccaaaatggcagtgtcttaatcacctaaaccttaacatgtgactatattaccttcacatagcaaaatggactttgcagatgtgattaaggatcttgagatggaaggagtatcctggatttttcaggtaaactgagtataatcacaagggcctctgtaaaggaggcaggagtgtcagagtgacggaagaaaatgtatgtaacaatggaagcagaggtcagagtgatgcaattgctggaggaagagccatgagccgaggaatgcagacagcctcttctcctctggggcctcaagaagaatgcagtcctgccaataccttgattttaagccctgtgaaactgatttcagattgctgacctccagaacagtaagatcataaatttgtgttgttttcacatgtgtgaaaacacatgtgtgataatttgttacagcagccacgggaaacgaatatagattgtggtgcccaaattagagtgctgctgtaacacacgcctactgattgaagtggctttggaattgcaacgtggaaatgggcagaggctggaagaattttgagagtcatgataaattgccttaaccacctctcttctgataggtgatgtggccaggggaactcttcctcaaccttcagacct

SEQ ID NO: 11490 - DNA, 1242 bp, Homo sapiens
ctcatggggccttggaggagcctggcctctcagcctgcataacagactgaaatgtgctcaggccctggccaggagggcccagggtcattcttttaacaaaaggattattttgttgtgttttaatttgtcactcggaacttcaggatggaggaccctgaccctaaacctccttcagatctctggcccaggctcaagccctagagatgggcagggcctaggggctgggagctgcctgctgccatagcagcacctttagctaggttggcccgagtgaggcctctgtgctgtcctgccctggtgcatggccttagctttctaggccactgggagttgtggctgggcttcccatcttccacagagacatctccctgtgggatgggcagatgggcctggccttgagaaaggcattggccattggttgccatggtgaccagggaccacgttgctgcctgtgaatgctgagtgagcgagtaagggaggaggggcgattgagggttcacctctgccttggggaggctgatttctcacacactggctggccctctcattctcactcctccttgggccctgaggctgctggatccggtctgcctgcctccctgtgcagtccagccctgccttgctgcagccccagcccagatggcactcagcgctctcccctgagggagtccctgggcctagccatcccctcactattcccgacccaaagggtgacttttcatctgaacttaaggtgggagatatttttaacttttttccactttggaaaatgtcactgtgacaaaagccagcatactttccctgcacccatctgctcaccagatctcaggcaggaaagcccctctctgttgaagtcaggggctatcttttggtatacttgtgtgaaagtggctggttgggagcagagctaagtggcttcccattaacctgaggtctctttctttactctgggtcagacctgaggttggggaaggcgactgagccatgctcagaatgtctggtcctggcttgggcctgagtagggcagagagggcctttcctggctgatcagagcttaccagccccaccccaccatggtagccttagggtgctgagtgcctgatactgcctgacaagtgcctgacacgcagcctagttccttcctggcccctctctcactggctgggaaaccctagaccatgtcagataggacaacactgctgggttttacatccagatagtaataaacaccatttcatcatt

SEQ ID NO: 11491 - DNA, 2638 bp, Homo sapiens
ggggcaacgaggcggctgggatgccgccctcagtaagcagcttgccaatcactccaggtctgaaaagcaagtcccccagccccaccccagggagccagagaggcttgcactcaggagagaaccacccccaagtctccgttctactgccgtgaactcatgtgttgccatgtacagaggccacagcagcatgaagggttgtggcttccctttttatttttttacatttccatttctatgggttttcctttctttcctttatgcagtagatgctttcttcctcctgcagttctggaccatgtggagctacatggagaaattgcacagacagaatcactttgccacactgcagggcccaggagtgggagcccaggccctccctccagggtagagatgcaccgaatggaaattgcactaaggacctcttcctttgctgtatggacagaagagttcatggttgcattcagggattgcaaggaccatatagacatgtcacaggtggaaaaagggccacaagccgttttgcacaaatgcctgcccacctgcccctcttccatccaggagtgtgctactgaggggctggctggaccaacctgctggctcaggcatgtgactggcctaactgcatgcccagggcactgccagggttcaatgggccagccgtctcctactccaccttggatttttctctccatcacatcatttctgaccatttgctcccttccattcttgaaacacctcatgccccacaggagccccagtggtgactggatctgcaagggttatctcccgccctctggggtttgagtggaggtatggagccagagaggctatcctagctaccttcctcctagggggagctggtccccttcctatgtggtagagagactggtgtaagagtgtggggtgtggcaggcgccggaaatcctcaaagctttcagaagcatccagaatgcctaccatcagctcctgaatcagggattttcagcactacctctgagccatggggttggctgcccagccaggcttccaggccctgaggacatgtggtcaggttcagcaggctcctgggtaaagagggtgggagggggcttctccttttggaagcagatagccatgcaggtagaattgtcatctcccaagtggccacatacagcaacccactccaggccatggggaccaccactcagggttcggggctggcaggagggtagtttctccagtctccccagtctgttggtgtctttataggaaactataaagcagagcagtggtgtctttagaggaaactcattcaagtcagggcactgattttcctctcagtttattatttggggggatagggtcaggtgggtatagtagtactttaccagggtgcttttaagttactttaaaaaaagcctacaaaatattttttttcttttatttgctcgagttcacattaatgatggtcacaaggctgccttgttgggcaggcgtattgcccccagttcctcttctgctggcctgtatgacctccacagccaggccctgggcccaagccccttgtcccttctccactgcccctctttccagacagtaaaggccatggtcagtgtgtttttctcttgtaaacaaaccccagcttgtttaacagaaatgctaataacctactgggaaagatggaggtctaaattacctccagggtttttctgggggtttatcaccagtgtgggtcccttctgataccaccaggttcactccaggcagagtggggcggaaggctgctgaggatatgggtcagttacagcagccctcacctcaaagggctggcctgcttctcagcctacattcatttgcaagcttcaatctctggaccatctggtgttcacaggtgttagagggttaggggttaggggctagttttggatttgattcataggtaggagggcttagattttaaggcacttctgaaagtcaatccctggacaaggcagtcatcacataagaacagctaccttctccacttggtggcacaagaggtagggaggggagtatgggttcatttggcttcgcattatgcaaggtgaaaccgtttgttttccctctccattttccctaactaaatgaaaaggacacattctgaaatcccttttgttggagaataagtcagtctgaggggaaatgggaggccagagatgagaaccctttgaaaagattgtaaaatactgattttcattctttcaagcttatttgtaaatacctatttgaatgctgtgtatttgtacaggaatttgagcaaaaaatgtatagagtgtgatgtccaattggtattcagcactataaatgtgtttttaacctcccgcattctgtgcttatttaaaacaaggaaacttctaaccatttcttttgtgtattcatgtttaaagaaaaaaagtgatttaaaaatgatcttacctgtaccagaaaagcaaagttaaaggaaacaaaatttgtaccattgtcccaagaggtattttactgtatatattgtggtagcatgttcaaaatccaacaagtaatgtgaattttagatgtaaatatctgccacttgattttttttccccctttccccacttccttgactgctgtgatgtgaattaaagataaatacgtgatactg

SEQ ID NO: 11492 - DNA, 255 bp, Homo sapiens
tctgctcaatctctgttgcacctgagggggaaaaaacagttcaactgcttactcccaaaacagcctttttgtaatttattttttaagtgggctcctgacaatactgtatcagatgtgaagcctggagctttcctgatgatgctggccctacagtacccccatgaggggattcccttccttctgttgctggtgtactctaggacttcaaagtgtgtctgggatttttttattaaagaaaaaaaatttctagctgtc

SEQ ID NO: 11493 - DNA, 3831 bp, Homo sapiens
cccaagcctgtctttcccagcgtcatgtttgtgtcacaaaagcagttattttaaaatctgatcccctctctaccctaccactttggtttgaattatctcctgggttattttggttcatttgggtggggatcaaagtcctgtccaccaccaaaactaagttcttagattttgggggatttttttttttaaacgatgagaagggaatccggttatgttgatttctagtgtacaagatactgtctgctgtggttctgtatttttttattttttgaccaactgtatggaaagttgtcagtaaaacctttgacagaggatggatttttaaacctgttcagagtcctggtttaatcaatcaagctaaaagaatcgaagacatccctagtgcatgtacacgaatgccctacgtcatccttccagcaccactgctgcatgggtcactctcggcctctcaattcttcaggctcagtctggactctacttacactcatttttatcttggctgacagcaggcaagcttcagtttgggctgtggacgctgccacacaagcctgagtagagcccatgcaaaggaagggatggggtgagcgcaaggcctgtggtcagcagctactgatggttttttctgccttaaaccgtgtgtgtgtccatcatcatcagtttgagctgtggctgtttgtttgggacagagtgcccactcagcatgtttggcagcaggtagccttcagcagctgtgtagtcttgtacaaggagaagctgtgcactgttgatgccagggggtctcggggcccctgatctgtccaggctcctggttcggcctactttctagcctcactcagcccagggatagccagtgttgggagacagagttgcctcaggttcccaggggcccgggagtccaaatactggaatggagggttggaggcagccttccttggatttactcatgaactttgcctagttgtttgtgatttttggctttctctggtcgttcaggggtgatgggtaatagagcaggcccgtgtccagtcatacctagagatttgtggggggatactgaacctctagactgaagtacttaccggggagcacagtggactaggggatgcccttgataatgacggtttcctaggtgcaagatcagagcatgtgcctacaccttgtgccctgatgccgaggtggagaccattgggaaataattaatagatatttttctggggggaaatcacaagtcactgaggtgtttgtttgtttgttaggcagtgctagagcttgaagccactcaagccagttggggaggaaagggatgcggaggtaccctctagctgggaagaagggtgagattccgtcttcttccctgtctcaagtaagtaaggaaggtactgcggacagtgtgggccagggaggaaaaccagagcacacagttttgtcaccatggaacaccccaaatgccattcttcagcgtgtctggtaccttggatgttcaaacagggaacactgtcagggctgaggagaacagaagctctggtaagcgaatgagcccctagatgataaccaggaactccaggttctgctggccgtggcatcctctctccaggtctgctcccttaccggagctaggataaggtagcatgagtgacacctgagattagaggctggggctcactgcaggctgtggagaggtcatgctggtccacaggaacacttggcagtgctctcgtagacccctcggtgatgtggaatggacaggtgcctcgcaagagagcaagcacgttcataacaaaacagcaacacaaagacatgttaagcatgtttatttatttgcctgtttttgtttttttacttgagctgtggtcacagctgccaggtacctaagcaagtcagttgggtacagcaggacacgccaccattccagggtagctggtaccgccagaaacaggagtgggtcttgtcctgttgcaggcacactgcagtggttttcctgcagctctccaacaaacgcctgagtcacaggccagagctgccttggtatgttgttaagtccaaaacttcttctctgggctacctatcttccttcatgaagcaggtgctcaggacccggaagaatcatctacctcccagctttgtgagacagaaccaagtaaaaggaaacatgctagaaaacgtgcctagagaagacacttcaacctttgccttatccaacccctcttcagagaaaggtgtcccatggccccaaaaagaactgccaagttttggtgaggagtaacaccctggcatgacattccttctctttcctggccctcaaccacttccttcctttggctcttaagacctagcaggttctgtgaactctcaggccttggccagcactagttaggggaggtcaggtggtcaatgtcctggtgattttatgagactgccccactgagaaaacttacttacttcaggcatccagtgcccccacccagggttcaggccctgtctaaggtgttgcttaaagacaaaaaggcaacatgtgcctcactggtggtgtgccactgttctcatgctgcctcctaagtgactccgattttcagccctggtagaataaggaagacagctgatgcctccttagccccttagcacatgttcctaaggtgtgttgtcaagccaacctgaattctgcctccctgttatagtccctgtctcccccacagagacctgtgggtgctcccagcagagttgagactggctccgttgagttaatgactagaatatagtgctttcactacttgattgttaacctgttttcttctgatgccatcagtaccagcagtcagactattccactggttaagtgtttactaccattaaagcgaggcatgaagcaaagagctgagtgagtcctctgctctccagaggaccaagaaatacctgtgtgacacagacccacttcagtgtgtacagcaaattctatagtgcttctgagcccagcagggctttacctgcccctggagagttttagccgtcttgtgtttcttgtttacttcacaaccaaatttgtcccctcttctctctgttaagggagagaagtcactttagctggataatacctatgtaacaaactgagcagctgttatttgggcaaaatcaaaggaagaaagagactatggtcttctatttattgtgggaaggaaaacagggtggggcgggtgagtgaaaaggtggaaatccctggtaccttgcctggtggttacacagtttaaccataggccaattttaggggcctctgaagtatctttctacaaacgcagacaagctccactacccctaacctgccaggatgctcaagtccactgtcacaatccctttcagaaaacattagtggccgctgccccagctacagagacggccgaaatgctttcactccttagctttgccaactccatcctccaaaacttcccagaatacctccctttccagttctaccaaatctgtacttgggagcagcctgctggatccagaacatgacaacagagagctgcgtccacagggaacaaagccctgacctctctctccacattacccttacaaaaacaggccctccccatgagagagctacacggcaggggcagacactgtgagtataagctactttcctccctggagtgctctatgtgggcagaacatgctctccttgcctctcctggaaggtgtcttctctatggcctggctagagctgcaaaaaagggacacaccccacttcggtaaaagaaaatagggaaaggccataaacaaagacagacttgtagtttattttgtattttttttaaataaatacactttacattaaag

SEQ ID NO: 11494 - DNA, 174 bp, Homo sapiens
ctagggagcccctccccacctcacttggggcccccagcaggttgcccaccaagctgaaaggcagtgatttagaccttttgagaataggacacttggcaggagggaaaaggaagaggacaaaggagggtggttggccaaagtggcagagctctgttgctgtttaacaaaagaggc

SEQ ID NO: 11495 - DNA, 305 bp, Homo sapiens
cccatggcctgcaccctcctgcagtgcagttgctgaggaactgagcagactctccagcagactctccagccctcttcctccttcctctgggggaggaggggttcctgagggacctgacttcccctgctccaggcctcttgctaagccttctcctcactgccctttaggctcccagggccagaggagccagggactattttctgcaccagcccccagggctgccacccctgttgtgtctttttttcagactcacagtggagcttccaggacccagaataaagccaatgatttacttgtttcacctg

SEQ ID NO: 11496 - DNA, 495 bp, Homo sapiens
agaccccatactcccgccctgacacagctgctcctgggaacctagtgcagacccacgtccagggccaggaggaagttggctggagcactgcaataatttattacccaccctatgtctgcccccaaagtcacttacccacctccttaccccagctcttcagactcagaagtcaggagccttggccaggagcctctgcagtggccactaactgcccttgtagctgtgtttcctcctggccaggcccagggctcagagaggagcaagccagggttcactctgccctggacccgggtggctgaggacggcaggccccagtcctaaccagcaaaggtgcttccagcccagcccctccccccaactagggccttttttattttttatataagttactctgggatggggagggtggttattgtgggggctgcccctccccctgcacagtagtttgtcctgtggtttattttgtattacctgtaaataaagtggctttatttt

SEQ ID NO: 11497 - DNA, 54 bp, Homo sapiens
gggctggcaagaagggcactgtgtctactgtccctattaaaggtctaacctggt

SEQ ID NO: 11498 - DNA, 385 bp, Homo sapiens
gtgcccgccctgtcccccggggtcctgcaaggctggactgtgatcttcaatcatcctgcccatctctggtacccctatatcactcctttttttcaagaatacaatacgttgttgttaactatagtcaccatgctgtacaagatccctgaacttatgcctcctaactgaaattttgtattctttgacacatctgcccagtccctctcctcccagcccatggtaaccagcatttgactctttacttgtataagggcagcttttataggttccacatgtaagtgagatcatgcagtgtttgtctttctgtgcctggcttatttcactcagcataatgtgcaccgggttcacccatgttttcataaatgacaagatttcctcctttttt

SEQ ID NO: 11499 - DNA, 745 bp, Homo sapiens
gcaggagaaaggagggtggtttccgtgggggctcatccaacccctgcacaggtcacagcaggtgccctgctggatatctgggtctggaacaggaggagaaagggtgtctgctgcctggtgaggcccacggacttctgagagccaggaatcctgcggtctgggcccaacactgcatagcactgtgcataggccgacccttccttaggcctcagctttcccatctgcaccctgcagcatctctaagggcccctccagcataggtggtttgtgaaactcacaggtggtccccaggccaagatgggcaggtgtcacaaagaagagggccctaagggctcacaaccaaagtgatccgccaagcagggcagtatctgggttacagccacagcaggaagaaccactggagagacactcagaaggacttccctgacatctgcaccaaggagagtctggacaaagctactgaaactcctccacctgcttctaaaatgcccagaagacaactggaccagtttggtattagaagtaggaggctggacgacttcacccccaaagggtcctgaagccccagaactggcatgtggaaggggctgaggcctaattgaggttggtggattcacacatgggggtcctccaggacctcagctgcacccattttctggaggttttgctgcccacaacaccagtatttcacaacttcctggtcgctgagaatatttattcaaaaacagggattgaaaaaactgta

SEQ ID NO: 11500 - DNA, 176 bp, Homo sapiens
actaacccactcccagctcccagcctggcatgagcttggacagtctggaccgccaccctccctgaaccagggagacagcctctgggattggaggccagaggccagggtcagacccagccaggactcctcatttcatctcacagacacaataaaaaagcatatttgtcctgcctggg

SEQ ID NO: 11501 - DNA, 126 bp, Homo sapiens
gccctggaactcctaaacctttgcccctggggcttccatcccaaccagtgccaaggacctcctcttcccccttccaaataataaagtctatggacagggctgtctctgaagtactaacacaaggac

SEQ ID NO: 11502 - DNA, 147 bp, Homo sapiens
gcatgacctcaattatttcacttaaccccaggccattatcatatccagatggtcttcagagttgtctttatatgtgaattaagttatattaaattttaatctatagtaaaaacatagtcctggaaataaattcttgcttaaatggtg

SEQ ID NO: 11503 - DNA, 1212 bp, Homo sapiens
ttatggctgagaagacagagcactgacaatgagctggcagctggccaggatcagggctgtctcaagcttcttggaggaggcagggagaccgtgggttccgaaaatccctggatttagactctcatggtccagcccgtggccctcccagacttgctgcttgcttggtccacagtcggactgcattgcttgggtccccatgtccagccttgtgcagtgagttctcctaaggtctggccttgcccctttgctctgcccctgaagtctatctgcaggatggtcttcacaggttctcaaagctggcccagatgctgatacacagcacacagggaaaggaagacagtctcacagaggaagggcaggtgtcctacgatgacgtctctgtgttcgtgattcccttgcacagtcagggccaagagagcagtgaccactgaggattcagacactgtatcccagaactgctctagtgcccgggtgtggtctgggcatccctccagtgtgaccaagagcaaatcctgcctgccctatccctagccaccgcccagtgctctcactatccacctcaacacacatccatctcaagaggaacatttataccaggcagtcagagctggaagtgtatggagagcccagcccaccaggtcctgccttttgcggtgataaccttctctggcagagtgactttacaacttaactaggaaacccatgtgaggctcctcagacaggatcttgaacagcccaaagtatcattctcagataggggcacccaagctaagggtattagccaaagatgccaggatgggtagctagcccatgtttagatccaggtctccaattcatggttatcagggcatgtgttcaacaacccccaaagtccacgcaggtggcttgtagaaacctttgggcagcctcatgtctgctaaaacagccatcttcaagacagcccctgaaaagagaccagttcaggtcctgccctgctgttctttgctggagatgaggaacaggtgctggggctaaagtttggggtagagcacaagggacaagaggaactcttggagttggctgggtgagagggctctccatttgctacctgtagtagcctgcctcttaactggttgcttctccctagttccagccctgccctggtctgatgccccaacactgcccttgctttgttttccctgtcacctccctattattaaatgttttctacag

SEQ ID NO: 11504 - DNA, 350 bp, Homo sapiens
tggcataggtcacattttgggagttcagaggaggcctacaagggcaaggtcagatggcagagcaaggttggtcctcagggcctctctaagccttagggcccctcctctccttggccttggctgtttggttaactgtcaccttccactcagggcctctgctctatatctattcccttccagccagactggcagatgggggcttccccctacccctgaggatgaggacaagcccctcggccagttcagcgttcccgtgcttctcccttgggcagcctctctcttgagcccctcaccctgtttctttctgtgaagcgagaatgtctgaaaataaataggaccatgccatgggt

SEQ ID NO: 11505 - DNA, 45 bp, Homo sapiens
actcagacagaagggctggggccattaaagctgaattttctaagc

SEQ ID NO: 11506 - DNA, 323 bp, Homo sapiens
caccttctgagtagctgctgtcccacacaatagggtatgaagctgcgctcctccatcgggtttggggagggagcactctgggactgtgagacaaggaagcagggccagcagtgagactatgagccaagcaaagagaagtctcagtggagcatgaggagggagcagtccagatgccaacaaggaaatgcgtttatggctacaagagtgcctctgctttctcctcctctcctcccaccaaggattcttccaccttaatcttgttttcatatgcctcttcttacttcacccatgtttgttgttatgcaaataaaggttttctctcc

SEQ ID NO: 11507 - DNA, 590 bp, Homo sapiens
cccaggccacagccagcctgtcgtgtccagcctgacgcctactggggcagggcagcaggcttttgtgttctctaaaaatgttttatcctccctttggtaccttaatttgactgtcctcgcagagaatgtgaacatgtgtgtgtgttgtgttaattctttctcatgttgggagtgagaatgccgggcccctcagggctgtcggtgtgctgtcagcctcccacaggtggtacagccgtgcacaccagtgtcgtgtctgctgttgtgggaccgttgttaacacgtgacactgtgggtctgactttctcttctacacgtcctttcctgaagtgtcgagtccagtcctttgttgctgttgctgttgctgttgctgttgctgttgctgttggcatcttgctgctaatcctgaggctggtagcagaatgcacattggaagctcccaccccatattgttcttcaaagtggaggtctcccctgatccagacaagtgggagagcccgtgggggcaggggacctggagctgccagcaccaagcgtgattcctgctgcctgtattctctattccaataaagcagagtttgacaccgtctgca

SEQ ID NO: 11508 - DNA, 137 bp, Homo sapiens
cgaggctggggctgaaagcagaagcatgcacagggaggagaccacttttattgcttgtctgggtggatggggcaggaggggctgagggcctgtcccagacaataaaggtgccctcagcggatgtgggccatgtcacc

SEQ ID NO: 11509 - DNA, 217 bp, Homo sapiens
cagaacaatggctttttatgattttttttttaacattttaagcagactgctaaactgttctctgtataagttatggtatgcatgagctgtgtaaattttgtgaatatgtattatattaaaaccaggcaacttggaatccctaaattctgtaaaaagacaattcatctcattgtgagtggaagtagttatctggaataaaaaaagaagatacctattg

SEQ ID NO: 11510 - DNA, 381 bp, Homo sapiens
ggttttcatgattcagcacctgcttttgtttctgtgagatgagctaaattgctttcataccccagataagagctaaaaccacctaatgctcttatggcacagctgtgtatagatttagttctctttatacttcatttctagcccagttgggttttgatttatataagtagtttagaccttctcttcataatcttgctctgagatggggaacagaacacacaagtatgaagtttctttcaggtgtaaataatgaaaaataaatgcctcataaatgatagtacaatgtaactatcaaagttttataattcattatgagttaaccattttaatgtttccaattaaacctcatagtgcaagttctttgtctaaagggtcttctgt

SEQ ID NO: 11511 - DNA, 150 bp, Homo sapiens
gccctctggccagcacgcctgtcctcccccggggccaaggcagaggaggaggacgacatcctgacctgctgctgaggctgtacctccttgactaagctggttccttgtgtcaaagcacctcatgccttccattaaagagaggccgtgtcc

SEQ ID NO: 11512 - DNA, 328 bp, Homo sapiens
gtagacacaccagctcctgttgggatggatggcccggattttatggcatctggaacatgggcacagagaggggcctgtgggaggggctgggaaaataaagtccaaggtcgagaccagacagctgccagcctctacatgccttcatgagcctctgctccagggaacaggcaactgggacccacagcagctcaaaagaggggatggctagcaggaaggcaacttcttgggcctctccactgacacagctgagagacagagttggttggactagaactttagggattcaaatgtatgacagcttgggggaaaaaataaagaactgactctg

SEQ ID NO: 11513 - DNA, 449 bp, Homo sapiens
ggttcctggacagatcaggctagccctgccctccacccacacctgcccgctccccacgataagcaccagtgggactgtggtgacttctgctgctggccccgcccctgcccccagagcgtccttggctgccgtctggccgggctctcatggtacttcctctgtgaactgtgtgtgaatctgcttttcctctgccttcggagggaaattgtaaatcctgtgtttcattacttgaatgtagttatctattgaaaatatatattatatacatagacatatatatatatataataggctgtatatattgctcagtagagaaaaaccatgggggactggtgatatgttgatctttttcaaaaaaatatatatatgacaaaaaaaaaaaaaaaggagcacaagctgtttgaaccaccaggtttatttgtgtgtctaaataaacaccaaatagtacc

SEQ ID NO: 11514 - DNA, 527 bp, Homo sapiens
cccccagcgaggggcagactggctctggcctcaggtggggcgcaggagagccaggggaaaagtgcctcatagttaggaaagtttaggcactagttgggagtaatattcaattaattagacttttgtataagagatgtcatgcctcaagaaagccataaacctggtaggaacaggtcccaagcggttgagcctggcagagtaccatgcgctcggccccagctgcaggaaacagcaggccccgccctctcacagaggatgggtgaggaggccagacctgccctgccccattgtccagatgggcactgctgtggagtctgcttctcccatgtaccagggcaccaggcccacccaactgaaggcatggcggcggggtgcaggggaaagttaaaggtgatgacgatcatcacacctgtgtcgttacctcagccatcggtctagcatatcagtcactgggcccaacatatccatttttaaaccctttcccccaaatacactgcgtcctggttcctgtttagctgttctgaaat

SEQ ID NO: 11515 - DNA, 491 bp, Homo sapiens
cccacccatgagaagcaagagaccttaaaggcttcctatcccaccaattacagggaaaaaacgtgtgatgatcctgaagcttactatgcagcctacaaacagccttagtaattaaaacattttataccaataaaattttcaaatattgctaactaatgtagcattaactaacgattggaaactacatttacaacttcaaagctgttttatacatagaaatcaattacagttttaattgaaaactataaccattttgataatgcaacaataaagcatcttcagccaaacatctagtcttccatagaccatgcattgcagtgtacccagaactgtttagctaatattctatgtttaattaatgaatactaactctaagaacccctcactgattcactcaatagcatcttaagtgaaaaaccttctattacatgcaaaaaatcattgtttttaagataacaaaagtagggaataaacaagctgaacccactttt

SEQ ID NO: 11516 - DNA, 349 bp, Homo sapiens
cactgactgagatgttctcttactgactgagatgttctcttggcatgctaaatcatggataaactgtgaaccaaaatatggtgcaacatacgagacatgaatatagtccaaccatcagcatctcatcatgattttaaactgtgcgtgatataaactcttaaagatatgttgacaaaaagttatctatcatctttttactttgccagtcatgcaaatgtgagtttgccacatgataatcacccttcatcagaaatgggaccgcaagtggtaggcagtgtcccttctgcttgaaacctattgaaaccaatttaaaactgtgtactttttaaataaagtatattaaaatcat

SEQ ID NO: 11517 - DNA, 186 bp, Homo sapiens
atgtagaaaatcaaatccttcacatttgatttgtgtcttccaaattataaaatgtgctcactggctcaactgtatttttcaaatagcctagatttacttatttttttaaatgctcattaaaaacttgtatactatgtagtaaaatgctgtacttgttctatacaataaaacagatacttcttttgt

SEQ ID NO: 11518 - DNA, 1165 bp, Homo sapiens
tcaataataatcctgcaacatctgagagtctggcagctgtttgtctgggcctttgcacatgctatgccctcccttccatcccccacccccaccaggggtgactcgtagccatccctttctgcatcttcttagatatcactttttccaagaagcctccctgtcacacttccccaatatcacagatgaagaaatcaagattcagaaaggttaagttactggcacaaggtcacacaatccagatctcatactcttagcccccggggaaccttcactgtattaaatgacatcaattgatcaatcaatcgatcaatcaatgaaagagtgggaggcatgcatctcctgatccccgatcctatacattttcatctctttattgtttctatcaaagcctgctaagtaattactttccctctgggtaagtgccactaggtgatgaggtgaggtaatcaaatgacatagaagaggaaggagtccactgccagggtaggtgcagtggagcaagtcttacaatgtgcaggattataactccagcaatgacccctaggctcatgctcattccccaggtggcagtttcagaacacattgctcaggtctcaccctgtaaatgtaggtaccagccttctagttgaccatcagaacacacaacgccaagatcttactccagccacctgccaggacctggagggcaggaggagagttctgcctacattgtctcattttccctccccttctgcagtgagatagaccatgtccagtgctcaggagttgactggccacactggggagtttgaccacaacattgggctccatatgcatggaatgaggttgcatgcaattgtccatgaggctgctccctcatttgtctgggtttctgctccaatgctatctcctcagaaagaccttctctgactgaagccagctctgcctccatcccatcactctggatctccttccccagcttcatctccattacactggccactctccctcacatcttattactgatctagttgtctactgtccatctccaccactgggatgtaaactccacaagggaggaatgctgtcagtttctttgactgctgtgtggtcagtaccagggcaatgcctcgcacagagtagccctctctccctaaatgtttttgaataaatgaaataaatgagc

SEQ ID NO: 11519 - DNA, 3783 bp, Homo sapiens
gcttatacttttggtagatattcccccttggaatttgacagtttctatggtgaaatggcagaaggtaacaactatgttgaaatatcaaggaggagattaagctttatatttgcttatttgttgtagctacattttaaaaaaaagattgaacttgatgacttaggtttgcattgatcttttttcccccttaaacataatgtactatgtattaacatctaaaggaaacctgctcatctccctgaagcagactgctgaggaattacatttgctcaagaattttttccgtcaaattgtgaacttttaattcttgcattgtaattggctgtgtccataagaaatcatttattcttcaggcttagacattcatggatatgcttttctttcattaggaacattttgctggtgatgaggaagcatttagctgaataagtttaaagccctttatacagagaattctacaagtttgcaaatattttaacaatattaaatgtgcaatagaacttttataaaataattagaacagagattttacagttaaggtttcaaattgtggcaggtggtactgttgatctcagggtactttctgggattgctcacatttctctaatgtactgcacttgatgccagtaggaaagaagcttaagtgtcttcagttcaagattgatagagcccttggcattttattatcacattcttagttctcaggttgggacttcaattactgctgcagagcagtagtggttaaaaataagatattggaatttattaaaagatttttgttcaatacattttagattaggattgacaagtaaagatactgctatggaatgatacattgtattttctgcattgtgtgaaatagtttttattgaaagtcaagtgacatttcaaaagaagttctataacaattatgtttcatgcttaaagtaaaaattcccagagtttagtttagaaaatgtaatcttttaaatttcagactgatatattcccagtattttcataatgccatgttttgataaagtactgaatcaccactttatatccacaaaggcaaataactaatgtatgataatagaataatttgcactaattattgtaaatatgtctactcttcaaatgagtaaaaggtccaattttgtgaaagattgaaaatgaattgaatgcctagtagagtataggagaagttgaccaaggaaggatttaacctggtgccaaggttaaaataacatttctctactgcctattgtttatgttaaaccttaattttttttctgtaatcacttttaacactgctaatagaaattatgttttcatgtgtttcacatgaaaaagtatatatatacaaagttaatatagtgggtaaaatactttacatagtcacacatttacaaatttttcaagaggttagccactaagactttaataattttacaagggaaaaagcctttttttttctttgatatacagttttttcttcttagttctgcattagaaatggcatctgttttaggtctcaaaatataactcagctgtttcacactgtatatgtacattgttttctgtaggaataggataatgatatataggatcatgatattccttctatccatgtgccaaatgggtgtaatgtttatttactgatgctttatgttaccaaaacatacagtaaaaaagtagaaatttatgaaatacttttgataaaaagtttattttgtgcttaccaaaaggaatgctttcacaatagtgtatcagttcttttgttttgttaaagttggaatttattctgttgccagcatttaagtagtcatggcaagtcctgtttttaagaccttttggagactggagctttctgttccattaagtcttttgtttatactacaaattgtcacctcacttagttcagatgaaatctgttactctacaaggaaggtgttcatcattaggaggcagctttactaagctggtgctttgcatggtagcaagtgctgccctttatcagcaccctgggtcatagtgtaggctagagttaaggcactggcagacttagggatgctggacagacctgtagttcgttttaagtcatgttcacaggaatttctacaataataaacccatcatctccataggtcagatcgaagtgcattccaatgctaaatagaagttatgagtgggtttaacaattttagatgattcagcttttgttccattactgttgaactatatgaactattccattactgcagagatttaagtatctgttttaataagctctttttgttatttaaaggctgcccatgggtttctgcctagtggtaaagctgattgttaccctcctttgaaatcccttctagttctgagatgctttgagggtaactggattcgattttgggatatcttttctcacattcagacttacacttaatggtgttagaaatcaacaaaactcctttttaaaaagaaaagatattaagcctgcctacttctacaatgcattctgttacctatttgaacagtatgtttgtaactatggcaatgaagtcagtagataggaaaccagttattccttctacctttaaaaattttgagaacttgccaaccagggattaaagctattatcttgaacagagtccctaaagctagtctagtttttgccacatctgcaatgattattgtttaatttcaaaagaatcctcaggctctacaatctaggggtggtaaatgtgtttccactatacttgggaaaaggtcagtaggatgtgcatcctagggaagataaaatcgtatatggtaaaggcatttgagttaattttgcattatatctaggaaccatattatttaaaatttgaatcctattaatgctgagagatcctaagagctagtatgttgtaaaacctgccacctgaataaaatgaaaaaaaaagtgtttttttgagacagagtcttgctctgttgcccaggctggagtgcagtggtgtgatcttgggtcactgcaaactccgcctcccaggttcacgccattctcctgcctcagcctcccgagtagctgggaccacaggggcccaccaccgcgcccggctaattttttgtatttttagtagagacggggtttcaccgtgttagccaggatgttctcgatctcctgacctcatgatccgcccgcctcggcctcccaaagtgctgggattacaggcgtgagccaccgtgcccggccctaaaatgaaattattaatgttggttctgaaacagcctcttagcattcagattgtattttaaatacttaaacacaccaattgtagaaagcaaccctttatttttagcaagtttggtttactcttctcccatgagattttgtctttctacattaactagtaagacataaagatttgaaactggaactatattatactttttaaccaatctctgtggcttcactcatgaaatttacttcagttaatatgagactgggggttaagttgtaactaatatgcaaaattgctttgtatatttggtgattttgtaatgtaagtgaattgattcttatttcactgatactattaatcatgcagtgtacaattcaaaatcatgcaatgtttcactttagaattggatttgaagaactcgactttatgtgatcatggtattggtatacatgtggggtggagaacttattttttcattttgtcacaataggtatatactgacaaggcttcaggaaaaaagttgttagaagattttttaatgtataataaagtccatgatttttgtacagtgttttttaatgaa

SEQ ID NO: 11520 - DNA, 1950 bp, Homo sapiens
atgtgtgtttaatggaattgaagtctgaaaaggaagtagttattttagcagaaaatttaatatgaatcaaagcttatatgtaaacttcaaggaggaatggtaaaatgttcagccctcctagttatgttcctgatgtcttcgttatgaaactgttgatgtttgcatcatacatcttctctttccttgttttcctctacaattggaggagaaacaaatatatttcttactagcaaaatagaaaattgaattatttttctccaaattgagactctcagaaaaggaagattgaattagcgtgttttttgtttgtttgtttttgtttttgtttttgtttttttgagatggagtttcactcttgttgcccaggctggagtgcaatggcacaatctcggctcactgcaacctccgccccctgggtttaagcgattctcctgcctcagcttcccgagtagctgggattacaggcgtgcgccaacatgtctggctaatttttgtatttttagtagaaatggggtttcgccacgttggccaggctggtcttgaactcctgacctcaggtgatccacccacctcggcctcccaaagtgttgggattacaggcgtgagccaccgcacccggcccttgtgtacatttttataagagaatttttttagctaggagttcagaatttttaaagtaccatttgaatgatcttaatttttctttcatgacaacacattccaaaatgaatcatgcttatgtactaagagggaaaatgtatttaagttaagggtgagagacttaagttataggtgaccttagagacctaaggtgagagacttgacacatggaaggagtaacattagggtctacctctacctcaatttagttagcgatttactacaatttcagagctttaacaaaagataaaaataaatcgtcaccaattgttattgcttctcatctttcatttttcaatgaacaagtaaggtattttcattcttatttttaggattttagtttttagtgtatggtacaaatgaacacagtttatattctaattcttactgcagctcattttaatttttaggatgcaagcacaatttagtattcaaagtgagtagcaacatattcaacttgatcccattgtcttcagttactcttgcccatgaaaaatgttcataaatgaacagggtatttgaccatatgatattagaaaatacagcacattactttatgagaaactacctactgatatgggcttgaaattttggatgaatcattgagcatttctacactagaagtaatttcaaaattgttggtttttataaacaggaaaaaggttgagtagtgggacttttaagcatctctgaaataaaaaacttctttttacagacaagcattatagtttgagttacagacaacagtgtgtatatatgtaatatatatatagtaaaatgaaatttaaatatgaagccaaactttttaaaattagaaactacaaatggttatactgattagtgtctagcctagagtggtaaccatgctttactaattcagttatgaaatacattatttataatgcattagctgtattagctgttgcttttttgatgttcaggataactatgttatctcatttctgcatttaattaatagctcgagtattaaaagcccactcccttcaagaaaagctttgattttccccagtcatgaaagcccttgtttcaaattctttaatctctgaacctagtatcataagaatttcctcttttgataacatctgtactttcatattctgctcactatcaaatgtattgttaacacttagtaagtttgaaaatgaaggggttttatctgcatttgacattgaaccttgaagtactttaagtactccaaggggaaaattaaagtggaagtttcttcggatcttgtttagaaaaaactataaataaaaaattgatgctacc

SEQ ID NO: 11521 - DNA, 1779 bp, Homo sapiens
gagcgttccttgagtccgtacaccgtcctccctctagaagctggcatcacactcatgctggggacaaacagaaccattttcttcctctttacctcttaaaacagcagaagtacaagaatacagctgtagggtcattgctttaaattatataaaatgtatctgtctataaagaagatataaaattgtgactttattctactgtaagcaataatttgcttgcaatttttcatgtaatttttaaattagtatgttaagattctgaatattatggtggcctaaagtaggcttcttggtacaccagattatttataacattaaatttatgagtattttactctgaattctgatcaccagataattcatttttctgatttgataactacccaaaccaaacaaccaatacatacatgggaagagaggccctgtgtgctcagtgcctatcagtttgaaatatatacacatatatatattttttacatatttacgccatttttacttgttatgaaaccactgagctattgggaacaagacttagagacaactatttgcgtggatttttttttttttaaggaaaaatacgtttggaaaataaactgttatggtgataatttggggaatatgtgcacgcttgttcagccttaatgtgacttgaagatgtggaggacatcaactttgaaaaactttccatgagagtgtattttcttgagcaaactgaagtatttctgggagcaaaaacatagtaattacacaatttcagtgcagtcaaccaaaatgttgagtcaattggaatgtaatttattaaaccatgtatttaaagagatatttttctttaaaagccaagttactttctcatatacagcattttaggaagcatgattttttttttctatcatctattcctccaagcatgtttaattgaagaaagtattaatatctctttagataagcttgtattgacctaatttggtttatgatgtgtcagagctaattcatgttcagggtgagcgttgtacctaccaacaaatttcctggttgggtatgcaaatggttattttctttttattgttgttaattgggactttctgttaatgaaaagcactattcccaagattaatagtgttctatgcacaatgaagcacctaaaaacactgcttgatattataaatttaaaacacaagtgaaagtttagccatggttttgtgcggcatcatagttatgtcaataaagtttatttaggtcatagaatatcctaaagtatcacatagttaaatttttcagtcagtgaagaccgggagggaatgtcagtgaattggcttgaatgttctgtggcaatccacaggtctagccaaatattgaaataggagtttagggtataatttgccttgtgatgtttggcagtcactgtttatactttaaaggttatattttaagctatttgagattgcttttgggaagatcactagatttatggaggaattagtcacaaatgacttgtagaaaatactgtcatatagttcatttcatcattttctgttgcaggaagccactccaccacagaatgctaatatgccagtggtacccagtacctcttgtatataggttattgcaaatattgttctgaaatgcttaacttcagaattacattttttaaagtaaataattgttttaaatctattttgtaaagatataaagtacaatagaatttctggagtacagattaaactatttgcactaacacacgtgacgtgcatgatttaataaaataactttactctccct

SEQ ID NO: 11522 - DNA, 1486 bp, Homo sapiens
aacagttttctcaaatcctggagagagttcttgtggttgcttttgttgcttgtttgtaattcattttatacaaagccctccagcctgtttgtggggctgaaaccccatccctaaaatattgctgttgtaaaatgccttcagaaataagtcctagactggactcttgagggacatattggagaatcttaagaaatgcaagcttgttcagggggctgagaagatcctgagtacactaggtgcaaaccagaactcttggtggaacagaccagccactgcagcagacagaccaggaacacaatgagactgacatttcaaaaaaacaaaactggctagcctgagctgctggttcactcttcagcatttatgaaacaaggctaggggaagatgggcagagaaaaaggggacacctagtttggttgtcatttggcaaaggagatgacttaaaatccgcttaatctcttccagtgtccgtgttaatgtatttggctattagatcactagcactgctttaccgctcctcatcgccaacacccccatgctctgtggccttcttacacttctcagagggcagagtggcagccgggcaccctacagaaactcagagggcagagtggcagccaggcccacatgtctctcaagtacctgtcccctcgctctggtgattatttcttgcagaatcaccacacgagaccatcccggcagtcatggttttgctttagttttccaagtccgtttcagtcccttccttggtctgaagaaattctgcagtggcgagcagtttcccacttgccaaagatcccttttaaccaacactagcccttgtttttaacacacgctccagcccttcatcagcctgggcagtcttaccaaaatgtttaaagtgatctcagaggggcccatggattaacgccctcatcccaaggtccgtcccatgacataacactccacacccgccccagccaacttcatgggtcactttttctggaaaataatgatctgtacagacaggacagaatgaaactcctgcgggtctttggcctgaaagttgggaatggttgggggagagaagggcagcagcttattggtggtcttttcaccattggcagaaacagtgagagctgtgtggtgcagaaatccagaaatgaggtgtagggaattttgcctgccttcctgcagacctgagctggctttggaatgaggttaaagtgtcagggacgttgcctgagcccaaatgtgtagtgtggtctgggcaggcagacctttaggttttgctgcttagtcctgaggaagtggccactcttgtggcaggtgtagtatctggggcgagtgttgggggtaaaagcccaccctacagaaagtggaacagcccggagcctgatgtgaaaggaccacgggtgttgtaagctgggacacggaagccaaactggaatcaaacgccgactgtaaattgtatcttataacttattaaataaaacatttgctccgt

SEQ ID NO: 11523 - DNA, 967 bp, Homo sapiens
ggccccgactgcagcctgcattctgcacacagcatctgctcccatcccccaagtctgacgcagccaccactctcagggatcctgccccaaatgcggtcggagcgccagtgaccctgaggaagcccgtcccttatccctggtatccacggttccccagagctttggggaccacgcgaaaacctccaagatatttttcacaaaatagaaactcatatggaacaaaataagaaaccccagccatgaaatctaccatgaagtcttcaagttcatgtcactgagaagcttgtgcaaagcagccaccttggaccataattaaatcaaggacattttctttgagacattccttatagttggagactcaagatatttttgttgcatcaggtgtattcccttgcatgggcagtggcttttataggagcattagtcctcattcgctgaaccctgttgtttaggtctaatttaagttttacatagagacccatgtatgactgcagcccattggctgcaagaccagggaggaaagtggcaagctgtagaaaatgtttacacgcatggaggggcattgctctagccctcagagcgtccggagcagcagggtacatgggtgggaggttcattcagcacccaccagtcaggtatgttctgagtgaacccacagcagtcgcagaatgagcacctggcagggtgggtttcctaggaataatttattatttttaaaaataggcctaataaagcaataatgttctagacatctgtctaagtaatcagactcaggttccacacacaagcaacaactcgtgggcctcttttctatttcaatgtgctactaagaacccttggatgtaacatactagttagttaatgaattctgtgaattctgtgaagagtaatgtgattgaaaataagtctaaacagctgtaaaagtgaccacaatgacatgaaataaatttaataagtctagatcagc

SEQ ID NO: 11524 - DNA, 2697 bp, Homo sapiens
atgaatagtcttccattttggaaacgttcatccactctcatatttattttttggtgcctgcatgtttgaagactgaagcaggctaaaagctcttgatgaaatttgagggtgctgaagatgttcccactaatttccagccatcacctttggtggggtgggcttcggaggacagtctgtctgaacctgccagtgctgaccctgcagcactttcagcatatgcacatcaaagttggagaccgcgctgaacttaggagggccttcacacagactgatgtggctaccttctcagaattaacaggggatgtcaatcctttgcatttgaatgaagactttgcaaaacacaccaagtttggaaatacaattgtacatggagttttgatcaacggacttatctcagctctcctaggaactaaaatgccagggccaggctgtgtatttctttcccaggaaattagctttccagcccctttatatattggagaagttgttttagcttctgcagaagtgaaaaagctgaagcggttcattgctattattgcagtgtcatgttctgtaatagaaagtaaaaagactgttatggaaggctgggttaaagttatggttccagaagcttccaaatcctgaaatagatgttttaaagatgcaacctcaaacaccaatgctgttgttaaagagcctatggggaattgctgctctttaccaaagaatggttgataggcccagaagcccatcttagttaggggaagggagcaggaagagggttgttcaaatgcccactttccagtttggccttatgcttcatgcagacttgagtgtatgcaggatttcattatctgcctgggttttttgtttgttttttgttttttaattcaagaagtaggctgggcccggtggctcatgcctgtaatcctggcactttgggaggctgcggcaggcggatcacttgaggtcaggagtccaagaccagcctggccaacatggtgaaaccccatctctaccaaaaaaaaaaaaaaaaaaaaagtgcaactagctgtgcttggtgacttggccctgtagtcccagttgcttgggaggctgaggtgggagaattgcttgggcctgagagctggaggttatggtgagaaactgagattgcaccactgcactgtagcctgagtgacagagcgagaccctgtctcaagaaagaagtattgggaaggttatttaaagactctacttttaaatcaggcgtggcagctcacgcctgtaatcccagcattttgggaggctgaggcaggcgaatcacttgaggtcaggagttcaagaccagcctggccaacatgtgaaaccccatctctactaaaaatacaaaaactaaccgggcatggtggcgggcacctgtaatcccagctacttgggaggctgaggcaggagaatctcttgaacctgggaggttgcagtgagctgaaatcacaccactgcacttcagcctgggtgacagagcaaaactccacctcaaaaaaaaaaaaaagattctacttttagaaattcagacctagatagatttgcatttggataacaaatccctacctatagccatgtggaagcagcttgtcactgtattttaactgtgtaacaattattgaaggcgaaaatagaagttgggtcatctttgaacacctaccttttatcaatgaatatttttagactgttcttcagtatctgagtcagagtttattgtaatttgttatttacaccaaggtggcatcttagtctaccttcagtgagacttgcgtttcaggggaggggcgtatgtgcatcctcggtctcagttatgtaaacggtctgatctgtaaaatagtggtagcacatgccatgtgggatagttggtggagatgatagatggagttaagcacagggcccagcctgtcagcagtagctactattattgttgcccatttcccctgcaactgaggtgagaggttttcctgagtttgaagctgactggcccacagttaaacgtaacagaccagtttttcagggtgtcagccaacctctattagtgttcttaagtacagtttctgttataaaagttcagattattccttgaaaatttggatctacctcccattattatgagtaatacatgcttatagtaaaaaaaaaaaaattgtaagaaataaatattaagaagattatggaggccaaattcttaagactttgggggctggggtcagggaggttatattgaaggggagatgtgcctaacatgttactactaaatggccatcccaacacagccaacacttttgtttcccatttttttttgtttcccgttttttaataaaattgagatataattcacataccataaaattcaccttttaaaagtgtacagtttagtggttttcagaatatccacaaagttgtacaaccatcaccaaatcaattttttatagcatttttcatcacccccaaaagaacctcccattagcagtcaatccatttctctcctccagtctttgggaatcaccagtctactttctgtctctatgggtttccctgttctggacatttcataaaagttcatacaatgtatgatcctttggaactggcttctttgatatagcatgttttcagggttcatccatgttacagcatgtatcagtacatcattttattttatggctgaataatattccattgtatttacccata

SEQ ID NO: 11525 - DNA, 191 bp, Homo sapiens
agcttcctgtttacacttggagggaaaagttcttttttattcctactcacccctaccccccaaactaccctcttcctgggaaagtaattgctgagccagtacagccacaaacagtactattttgcagatgctcatgtaagcagcttttcgagagaaataattctttaagcagaataaagttaggctggcat

SEQ ID NO: 11526 - DNA, 720 bp, Homo sapiens
tctccgaccctgccacaggttcctggaaagactctccaggaaatggaagatactgatttttttttttaaatcacagtgtgagatattttttttcttttaaatagttgtatttatttgaaggcagtgaggaccagaaggaagttttgtgctttggcagactcctccatgttttgttcccttccccctgagtatgcatgtgcctgttcagagtctccagataccttttttataaaaagaagtctgaaaatcattatggtatataatctacccttaacagagcttttcttattacagtgctaaaatgatttctgataaaatggtccctaactcaactagaaggctaaaaatacaagaatgaaagaataagcagagtactcatgatgcctttgagaaaaatcaaaacatcatgtagggtgacctagtttccaaaccaataaataagtagtattgtaatattaaaggaaaactgttccaatcatttaaaagtacttattaagtactgctttttacagttatgacaactgtttctttctatgcatataaatcaaggaaccaaatatctgtagccatggaaatgtctgactagaaatatttatattgaattctgaatacaaaatgtccctgtggtagaaaacttactctttatgcctggtgcagtataattcccaagtgtactgtctaccagaaaaaaaaaacaaaactaataaaaaatgaaatatg

SEQ ID NO: 11527 - DNA, 715 bp, Homo sapiens
ctggaatcctgaaagggcacttaatttgtaaacttctgaagactgagaacttttttgaggccttttttgccagactctaggttatacaataacccagttacttttttacactgataaaagttttgatatttattttttgccattttatgtcttaatggtatcctactgagcatttgcacctctgttcatttcacacagtgaaacgcaattttacctagtttgcactatatgatcagtgttactgcctataatcttatacaacagcaaaccctgatgtgacattccatgacgacatacatgctacttttttttagttcaatacagtgaaggtctttgttatgacagtgaatattgcttttattattattattgctgaagtggttgcattctactagcaggcaatgctgtacttttcttcagtcctcctctcctttttattttaggcactgttcaatactgtatgccttctgtattttaatggagtggatagcattgttttcttttacagactagcaggctactgggacctaaaaaggtctgttaatgtcatggccttgaaacagttccatttatgctggttaagagatcccttaagaagttagaaggcttaagaactgcttcatgtgaacatcccttattagttacaaagttatattcacagttttttaaaaatgtgtcaaaataaaggataactctgtattacagctttcacagt

SEQ ID NO: 11528 - DNA, 254 bp, Homo sapiens
cttcttcacatgctatttcaaaaagcctgtttaataaagctgaatgttaaggtgtatgtaggttattgcaggaactttaggaattaaatatgttcatattcttcgattatctcctaagtgacagtgaagatatgagaatttactggcaagtcacatgttatcacctactactatttcaaggtcatgaatttgctttctaccaaacccatagatgtgttaaacacgaatattaaaaggtggactctttattaatt

SEQ ID NO: 11529 - DNA, 1439 bp, Homo sapiens
cagagtagcatttgcattcttctgcagtcgcctcaccatcttccatttcagtggcagaagaattttttaagggtttcaatcaattattaatgcagagagtattgaatgtaaatcagagctctctagtcttcattaaggcagcaagtcctgggttgtgaaaaatgatacttagagatgaggcgacatgaggagatatattattcatcatagatggctaattggagagtaccttgttatatatacagatactttcatggtcattttgtatgtatgttaaagtagtagaagtattttgtagcttaaagtctctagtatgtaatatgcataaagtaaatcaaatagcgttgagttttcttatgcattttgatgtgaaagatgttataataatttctagaagacaatttggtgtatcacaacatgcatgtcttatttttttttagttttaagtcctataggactatgagtctctaagttatttgtttcagaaaattattctttttttatgtgataaatcatatgatttaagtgcatgaataagcattttcccacacaatgaacatttgaactgtgtttatgaaaattttctggtttgcaccatgaatttgtcaaatggatatttataggaatatattcactactttgtatactttgcaaatttgtctctctggctttacccaagttctgaatgcattgtaattaaaatttaagtttttcttttcccccattagtaaacatttagtgctacatatgataactgcccaatatttattctatttacttagctaaatatttgcattcttgtaaccttctatggtgttttgtggctcttatcttgtggaccataaataacacggcccaataactctttgtgtttatggagtgttgttttcttagaataatggagatgcagatatagataccatagtcaaggtaccgccttgctgaagtatttatttataaagaatattctgtagaacctctactaccagctatatttttaaatcctgtttatttgtaaagctaatatgctcctcaatgtaattattaaaaattctcaagtcacagctaaacttactaattctgattttagtgtagcccctaaattaaaaatggcttccatatgccactctgtaccccaaagagagttctcatgaaatattctccagaatgtattcattatcaagaaaatgtcaatcgtcacttcctcgttttaactcagctgaaacaccaggacccaatagagagggcaagctgagcatctgtatttccagataaaagttgttattgatgtataaactcgttgcgtgattagtgatgttggaagcattttagcacaaaacagccttgtgtcttagatgatatctgtaaccagtttctgaatcccgttggataaaactgtattgtgatatctatttgatgttaataaagttattgcatac

SEQ ID NO: 11530 - DNA, 1183 bp, Homo sapiens
cagctgaaaatagcacggggaggaataatgcggacacttttgaggacaagttacacctccactcagcactctggactccacgatgcctttgagtctgttttcccaacctcctgtgggcctcaagggtagaaacctgccgggctgttgttttaacgaggatttccctgaagctatgtctctagcagtgagtactcataaaggacactggatcaagttcagccaccgaattgcttttatcagtgttaaagtggtctgaactgcttgctaccaatctgtgagaagtttttgtttttgttttgttttttaacttgcagtatatcacagagccactcttcaagtagattggctgggcaaaagaatgttttggcaagagcgttactgtagacctttctccctccttccttttactaccatttttttttaacactgtcatctgtaggtcactctccagcagttaggcaccttaactggagaccagaaaccttccagagaacacagggctgcatcccgagcaaccctctgaagaagggaattaggctttagattttgatagcaatgttccaggaatgaaatatagatgttagcccaagacaccatgacaaaatagcccagccttttgagagtaatttgggaaaagaagctgtcagaagtttctaacttacaaactggtttgaaatttttgatgcccagacagcaagtataaatcattttggaggcttacttttcatgatacaaaagcaattctgtgtgatttttttttttaagaagaaagaaaatgcaagctagttttgagaaaggaaggccaaattgggtcgggggagggtgggagtgaggaagttaaaatcactatagggagaaaaaacttttttcaagatttccaaagagatgaaattttcttaatccttttaagttttcatagtaaacagtatggcagattgggttggttgtcctacctggtctatttttaaaagtcaccttttaaagtgacattattagatacacttaaatgtttccaaggcactctctacattacccttgtttttctctttggatactgtcctgggactaagtgtagatttctgcttcaagcacttctggcattgtgtgtttttgtatgcactccccttcatgccacttcagatgtttatttggatgtggttggggacgagagcagacaccaagg

SEQ ID NO: 11531 - DNA, 1117 bp, Homo sapiens
agcagagacaagcctcacctccacttctgtcaagagaggggcctgcagtgcaaaccctcttccgctgagcagctgtctgaactataggccccagtgctgaagaccagttgtgctaagataccggcatggagattgtgccatccgtggtataggctggctggtatgaagtcattggcctgtatgccagagagctaagagaagaaaacggggtctgtggcggtactctgaacaatttcctcagaacctcttaataaataagtttggtaatgctgaggccaggccttttagagctttcatttgatctgtatctgatctttcatttcctgccacctgatggtggattcagcagaaggcaagatggttataattctaaaagaatagcttgtttgtttgtttgggaaaaggagacttggggaagagttgtgtatgtgggtgtttctccccctagttaattcctgttgtgtaagggtaggctttgttgaaaaagaaagaaagattgaactacaggtgcatagcaagcactctttctgggtaactaggctgctggttttaattaccctcagatttcacccataaaaacgcacaattgtattattttacagagatgtgtccagcgccccctgtggtgtgtgagagaaagcagctgcaactcaagtgactaggtgggcccagctggcttcgtgcaggagggcacggtgggtgagccattctcgccattctcatgtcagactgaaaggagggcctgggccagctttgaaaaggcaggatgaaatggaaaggtcaccacacttagggattttagaccttgactaacaagctccaggtgtagaaaaattcaaaacaaaatgtcaggaatctagcagtgttgtctgccctggagcaaacaaacagtatgtgattttgcttcgcctattttttttttcttttttgggggaagataattaaaggcagaatgactgcgtttgtaaaagaaggaccaccaactatactgacatttataaatgaacctttattaaagacacttcaatgccatttgttagacacttcaatattttacatggttttcaatgtacactgtaccaaaatttctataaataaataactttgtacataaaag

SEQ ID NO: 11532 - DNA, 2821 bp, Homo sapiens
atgagtagcaggccttagtgcatcactggcatctcattcttaggaaacttgtctttgatacaaaagagtgctgacagtatttcagaaagctgagagagttttatacatggaaaatgggtatgcttaaagattgcagggtagggagggattttccttcatccttgtgacatttcatttcagtaaggaaaagataacaaagtgcaattatcagcatttttttttcctggcataaaattaatcatttcattttataattttgtgataaatagtaactgaggtaccagatgaatcaggacaactatgcactcttataagagcatttagggtattattgggtaaagacgtctaaacttgtttgatgtgacttttaattttaaatacgggtaacaatctgaggcaatatcactaggactttagctgtgacctctctaacacagagaagcactaacttagatcctcattcttaatatttatatgtatctatttttgtgtactgttttcaagtgtactgagatttaaatgtgttctattattagagtagatcgaagaaaaaattagtctcagaaagagcttttagtctgattgtttccatttcccatgtaattttaagttaagctaaagttttaaagtggcagttttctgtcgatgactttttcaagtgctaacactgtctcttttgtgaaaatctggaaaagtgctcatattcacaggtggctggtgctagtctaacttaattcatgtgtataactagatggatttaaatggtctgagcctatgcctatctttcaaattggtgtggatttcatggccatagtactttacctgttgaactcttgtgatttcacaagattctctacttatgtgataggagggtatggccagttattcatctaactggactcaatcttagaatagtaggaacattatacccagtttgcactaacatgggccatttgtagcccaaccttctcttccatctacctgtccattcattattggtacaaggaaaggtaacttatttctcttctgcacagagcataatgtgaagttttatacctacttttaaaattctgctttccagaaacaaaattcctgcagtggtctaatttaatgtctttaagtttcatattacaattaaaacctcattttttttttccatttttgcacttaacagtgatgaatacttttacgttggaatcctccttctagctgaaggtgattgaaaaggaaaagagtgagtgaacagaaccatagctttctaggtactaaagcattttttgcatttaactgatgaaatttctaacaatcatcagttaggaatattaacatgaaggataaaccaacttatttgtatacctaaggcaggcatttggatcagtaacatgttttactaagcctagagtaattcgtaaagggtataagcataggacagattttgccctcaatcacaatatttgtattcacttgaaagcaaactggcatggttcgtattttaaaaatcttgcacaaattgtaatgtgatactgtgaaacaaattgaaaacattgcctctttgcatcacatacctcgtttttcagaaactttccaaactgctttacatagacctctacaagtagggaatgttttctgaagcagaagttaaaatggacagcatttctagaattaacattttaaaatctagtcttagctagatatgtggtttcttcttattggtgttgatagtatgtctgtaatctctgtataaactttgtcaacatttttacctccccagttttatcttctgttttgtttttgtttttatcatcatgatgttttggagttattactgtgtattttagaaatcattctttacagttttgcattgctgaggagagagaaaaaacaatttttttgcaagagatgttcatgtaatttatttttgaaagctttgttgaataagatttcctgccgctttttgacaatcttgtgtatttagaaaaatgtattacttgaaaacatgacatagaacattgagttagcaatttacatgggctgtatgttatataagagaatgacatactgtggctaattcaacagtagatttattcttttagcctgcacaacagttgatcttttggctatgacaatttgtatggagggtacgatctaagttaagtgtgtcaaaagcaaggcttaggatttgttatgggagtagaatatatattgaattttgtatgaagaactatttgtttaaattatatagctgggatattttgccactgttaaaatggattcagaagaggtcctagaaaagtaagattagtgacatgtgtgggtttatatttagatatttaaggtgcattttcatagtgtggtaagaccttaagtaaaaggcacaatgggtactacagaattaaaatgtaggtctaacataatgccagttccactttaactttgtttttgcatttgaagaatgtatgtagcactttcctatatatttgtcacacattgaaaactggactgggtataactatgttataggaaagtagaaattgtattctttattttccatctttgttttctgttctacaaagttgatgcttaagcatcaagctgattttattggtcatgagaacaaatggatgtgatcatgaaggaatcagattccctatgtaaagcagtttaaaatggaattcaatgttcagtgctcaggtatgtagtaagtactgtagtcctgtgggggcaaatgtgtagatatttttaaacattttgccataattgcacaattttttgcatttttacctgatgtcattgtttcttataataaaaccttttctgattg

SEQ ID NO: 11533 - DNA, 1115 bp, Homo sapiens
cagaagcatttgtggtagtaaaggaaaaccaaccctctggaaaatacattttgagaatctcaaacatctcacatatatacaagccaaatggatttcttacttgcactttgactggctaccagataatcacagtgcgtttactgtgtgtaacgaaatatcctacagtgagaagacacagcgttttggcaacaccatggaaagtgggcttaaaaaagggttttctcagtgaaatttttgggcatcatgaagaacgatcaactatcttctaatttgaatctatagttactttgtaccatttgaaatatatgtatatatatatatataatattttgaaatattatctattctcttcaagaaatgaacagtaccacagtttgagacggctggtgtacccctttgagttttggatgttttgtctgttttgctttgttttgttagtcatttctttttctaacggcaaggaagatatgtgcccttttgagaattcaagatggcactgacacgggaaggccagctacaggtggactcctggaatttgaggcatcataatgatactgaatcaagaacttccttctgcttctaccagatggcccaaggaagcacatcgtcctgttttattgctttctaccctgtgcaatattagcatgcaagcttggcttacatagtcatactttatattcaattgatatataataaccgttctaacctcttccaggaaaatatttttagaactactagcttttccacttagaagaaaatgaggattcttaagggagccactccaccatgctattaagactctggcagagttatgggtaggatatggatccctacatgaataagtcctgtaaatacaatgtcttaaggctttgtatagctgtcctagactgcagaaatgtcctctgattaaatccaaagtctggcatcgttaactacatagtgctgtagcaacaagtcttatcatggcatctctttctatgtttggtttgctttttccaagagtattcaggtctcctcttgtgagataggaaggccatgaaaacaattagatttcaagatgatctatgtgaccaaatgttggacagccctattaaagtggtaaacaacttctttct

SEQ ID NO: 11534 - DNA, 1450 bp, Homo sapiens
acataacttacctgagctagggttgcagcagaaattgagttgcagcttgcccttgtccagacctatgttctgcttgcgtttttgaaacaggaggtgcacgtaccacccaattatctatggcagcatgcatgtataggccgaactattatcagctctgatgtttcagagagaagacctcagaaaccgaaagaaaaccaccaccctcctattgtgtctgaagtttcacgtgtgtttatgaaatctaatgggaaatggatcacacgatttctttaagggaattaaaaaaaataaaagaattacggcttttacagcaacaatacgattatcttataggaaaaaaaaaatcattgtaaagtatcaagacaatacgagtaaatgaaaaggctgttaaagtagatgacatcatgtgttagcctgttcctaatcccctagaattgtaatgtgtgggatataaattagtttttattattctcttaaaaatcaaagatgatctctatcactttgccacctgtttgatgtgcagtggaaactggttaagccagttgttcatacttcctttacaaatataaagatagctgtttaggatattttgttacatttttgtaaatttttgaaatgctagtaatgtgttttcaccagcaagtatttgttgcaaacttaatgtcattttccttaagatggttacagctatgtaacctgtattattctggacggacttattaaaatacaaacagacaaaaaataaaacaaaacttgagttctatttaccttgcacattttttgttgttacagtgaaaaaaatggtccaagaaaatgtttgccatttttgcattgtttcgtttttaactggaacatttagaaagaaggaaatgaatgtgcattttattaattccttaggggcacaaggaggacaataatagctgatcttttgaaatttgaaaaacgtctttagatgaccaagcaaaaagactttaaaaaatggtaatgaaaatggaatgcagctactgcagctaataaaaaattttagatagcaattgttacaaccatatgcctttatagctagacattagaattatgatagcatgagtttatacattctattatttttcctccctttctcatgtttttataaataggtaataaaaaatgttttgcctgccaattgaatgatttcgtagctgaagtagaaacatttaggtttctgtagcattaaattgtgaagacaactggagtggtacttactgaagaaactctctgtatgtcctagaataagaagcaatgatgtgctgcttctgatttttcttgcattttaaattctcagccaacctacagccatgatctttagcacagtgatatcaccatgacttcacagacatggtctagaatctgtacccttacccacatatgaagaataaaattgattaaaggtttttttggtgagactttattt

SEQ ID NO: 11535 - DNA, 3087 bp, Homo sapiens
cgaatcctccctgcactgcattcgcacaaactgcttcctttcttgattcgtagatttaataacttacctgaaggggttttcttgataattttcctttaatatgaaattttttttcatgctttatcaatagcccaggatatattttatttttagaattttgtgaaacagacttgtatattctattttacaactacaaatgcctccaaagtattgtacaaataagtgtgcagtatctgtgaactgaattcaccacagactttagctttctgagcaagaggattttgcgtcagagaaatgtctgtccatttttattcaggggaaacttgatttgagatttttatgcctgtgacttccttggaaatcaaatgtaaagtttaattgaaagaatgtaaagcaaccaaaaagaaaaaaaaaaagaaagaaagaggaaaagaaatccatactaacccttttccattttataaatgtattgattcattggtactgccttaaagatacagtacccctctagctttgtttagtctttatactgcaaactatttaaagaaatatgtattctgtaaaagaaaaaaaaaatgcggccttttcatgaggatcgtctggttagaaaacataactgataccaaccgaaactgaagggagttagaccaaggctctgaaatataaagtctaatcttgctctcttttattctgtgctgttacagttttcttcatcaatgagtgtgatccagtttttcataagatattttattttgaaatggaaattaatgtcctctcaaagtaaaatattgaggagcactgaaagtatgttttactttttttttattttatttttgcttttgataagaaaaccgaactgggcatatttctaattggctttactatttttatttttaaattatgttttactgttcatttgatttgtacagattctttattatcattgttcttttcaatatatttgtattaatttgtaagaatatgcatcttaaaatggcaagttttccatatttttacaactcactggtggttttccgcattctttgtacacccatgaaagaaaacttttatgcaaggtcttgcatttaaaagacagctttgcgaatattttgtaaattacagtctcactcagaactgtttttggacacatttaaggtgtagtattaataggttaaaaccaggctttctagaaagaataaacttacatatttatttttaggacatgaaaatagcaatattcttggagattgataaccatagcattaatacgcccattatggtcatttaaattggggtttatttcagcaaacttgttgaatttatttttaagaaagaaatactgtattgggaagttactgttacttgataacaatgttttaacaagaagcaatgttataaagttagtttcagtgcattatctacttgtgtagtcctatgcaataacagtagtgttacatgtatcaagcctagatgttttatacagatgccatatagtgttatgagccaggctgttgaatggaatttctcagtagcagcctacaactgaatagcaagtggcataaagcatatccattcagaatgaagtgccttaaatatagcagtagtcttttttggactagcactgactgaactgtaatgtaggggaaagtttcatgatggtatctatagtcaagacgaacatgtagcatggtgcctatgtagacaatataagagcttccaattttccttcagatatttttaatattaaatatattttagtgacagagtgccaacttctttcatcaggaaaccttattcaggagggtttttaaaaagtgtttaaatgtcaaatgtgaattggtgatgggtgatggagggttcagagaggagtgatcgtcagatgtgtgaatggacggtttaggtgaaaataatcaactgcatagttcccatgcacgctgggcaatgagaatccttggaaacattggtgatgctatcagttttatagctttatttcttaagggggtagggaaaattagttcccattctttcaacccccttaactgtatagctcttttcctagaatagtgacgcaaatctgcatgaacagctaattgtaccatagtgttcattgatacaatcatagcattgtctatttttctcttcatatttatatgggggggagggcgctggatgcaaaagttgaagatcgtgatgctatgatgttagttttccttagctgattttgagggtttttaaaaataaagcaaggttgactaacctacggccacgggaacaggaccatggttaagcaaccatatagaaagctttgttgaaagaaagtatggcatcttgtaccactgccctgactgtcacaactcctaaccttgccattgcctgcctccccctccccttctccttaagagacaatttctgcaggtggcaggtgagcaagcccaggagaatgctgcaatcttgggggtggttttatttatttcttttttgccaaatagagtgtggattcatttcaggggctagctaagccaagaggcagtggtttgggcttgttgtttgtaacaagaaaatgatccacaccactcccccgattcccgggtgcagaattgtaactcggggttgggcctctatatggagtgaccaaaatgccaaaattgtccatctgcctctgagtagggcaatggaaataccaaaccttctgactttgccaaaaagcatacaagcaacctggtcatacataggatgacaaaattctttctggttgtttttaaacaataaagcaataagaacaaatacaatacataggaagttaaaagcacaaaggaatgaacttattaatatttttgaaaaatgcactgggaaaaagttgatgtcaataacagtataaaacagccctatttcttgataaaaaatgacaaatgactgtctcttgcggatgcttggtactgtaatgttaataatagtcacctgctgttggatgcagcaataatttctgtatggtccatagcactgtatattatggatcgatattaatgtatccaatgaaataatcgacttgttcttgatagcctcattaaagcatttggtttttcacat

SEQ ID NO: 11536 - DNA, 138 bp, Homo sapiens
ctatttagaaacatttagatgcagtattttacatacagttctggttttaacactgtataaaacttttgtgtaataaaatggacctttagttttacaagagaagcaggttgtaaaataaagtactttatggataattcc

SEQ ID NO: 11537 - DNA, 418 bp, Homo sapiens
ttgccaagaaagcacagatgacaacctattaatgctgtgagaatgtttctagatcagtgcatggatggctccattgctctacgggccattgtgtctgagatcccagtctttgaggagaaaaaaaacaatggttaaaaaggcattggggaaatattttgagtttgggggtgtactttgccaccccattattggggagctgtcaccacgaatgttcccaaacttagcaacagcggcaaactactgggccaagatgagcaaccccacatttttgggatttaaagctcctgatgttataccaggatcaaccatcacactccctttgcttcaaatggcatctaccccgtaagatcttgaggggggagtgttgggtggaatcatagatccatgcactcctaacatgaactaattctcattattt

SEQ ID NO: 11538 - DNA, 1455 bp, Homo sapiens
taaatgagaggagacatacaaagctgctctgaaggaccatcaggtccggactcatggaagtgatgactctaaacagtgcaatgaacaatttatttatgtactattaaaagaactgtaaatgcaatgtaaagacacacagccacacatatcccacagatattttcattgtgttcttctcttaagtacaccacccaccttaactctttcttgtcaggagtatataaaaaagaaagaaaacaaaactcgccctacaggaagaaaaggattctcctctgtatataatttcttttgtgcattgctatgcaagctcactctttttagctctgctcatattattgtctgttcttattggtctgttgtactatatgtgaattaataggctgtggtgccatatattaacttttaattgtgtaacttttatgtttaaattttgcactgcaattttatttggtgataagcacaaatctctactcctcatgacatgaagaaaaagactgaatgtgaagggagtttctgtactgtaagctagattggataatgatggctgtaacaaatcatgttagatggttttcagttggggtgtagaaataggaagatgcaaaggaacaatggtgttggcaaagtcttctttgaatatcagggactgagtcaataaaaaaaatagtagaaaggtggcttttactattgacaaaagccggggtcaaaaaaagtagtttaagtcttaagactgaatatgcattaaagtatgcaggtagcaaagatgtaataaatttgcttaaaaaaagaaattaaagttttatttagaatcaattttacctgtcattgtaattgacccatctgagaattacaataagcaagaggaaattaaggtgttttgcaagagctgtatttatattacagttttttaaaaacattttctgaattatcgtaattaagctctccaactcgttaagtcagaatataatatgaagttccccaaggaaacgaacaaaatgaactctagaatatctagcaaatagttaaagaagcaatttattattagggcatactcgggctgtttccaaatataaactctattgcaatatcttatttcatctttctaatacatgtacagtgcacactagaggatagagctgcatcacttaaattcatgacttaaaaaataatacagtttatatacaacttgttttttatttgattaagaagtgaagtttacgccacccaatgtatagccaaattgtacgtgcttaaaaaacagtgccgagagtatgttcagttcgcagtaagtagatttattggaataaatattctatggtacattctcagaaattggcttccaactaaaatacgtttgacccattttgaataaggaaattgaaaagaaaaatttaaaaggagaaaaaaatgcatgtttataaactttttaaataaaaccagaccttgtaagtggacatt

SEQ ID NO: 11539 - DNA, 2015 bp, Homo sapiens
gatgcaggccaagattctgagttttactaccaggctgaatgctggagaaaactggctatcatctttcagaagtcatttctaccatcgtctgctacccttattaactcccatactgtactgctatcagtagccagtgtataccaacaatcagctgttgaaagcatcattctttaattactgtaccatccataatgcaggacatttcttactgcctaaatttcacaccattgctcttttaacatacagtgcttgaatatacagccttaacaatgttaatcatctccttggatcattatattgagtggtttttatacattaaaaaatgtatgcagagtttttttcccccattttttcccctttaagtcatagaccttatcagtttgccattggacagctttcacaagtaacaggattagggaaggacataatgtatttaagaataagtgaaggttagaggtttacaattaatgttttctacatgtctgtcttcaaagacaacatgctttggaaacatatgtcctagaaaacataaaattaaaaaaaaacactatagtgtagtttttggaatgttggagattatactggtaaagctgtatcgatttgctattgaaatatagtatttgatacaggagccatgtgtacgaattgcaatcatgacatggtattttctataattatagagatcttactattaggatattgtagcttcatttaccaataaattattccaaatgatttactgcttttggaatcacaaatatttaattcatttctctaatttgattctataatttatttgcttcataaagattcacctgcctaaacaatattgaagtatccatagggcacaattttcagacattttagtatctgtatatagtgcatataataaatccaattaaacattatttgatacatatttaacttttttggctgtatgtaattcagtcataagtaagcattttctaacgtccattatatccctttaggtattacttaaaccaatattataagtagataacatgtattagtatttttgtctgtatgtcctagcactgttcaacaacaaatttttctagttcttgttaatttttatttgttatacaatggaagcacaatgttataaggaaaggtaattttaagctaacaaccagtgcacagcctcaggttttaaattacaaccacagttgaataataacctaaaaataaattttagtttgctaaaaatttacaaattttcattttgcagttccagagctgcttacctatgttggtttgccaaaaagaagtgtttaagatatgttttctgtataaatgaactaattctttatattaaattcctgtctatgcattttgtgaggtacaaactgatgaaacagtgagtgatagagaatttctgccatgcttttaactccaaagtgaaagtctctttctctggattattttaaaattttggcgtgtttaaccattaagaaatgctgtattcttaaatatgaaacagttaatctaaagtcttattatttcttctagtaaaataaaatattgttagattagttctcattaaatttattatatgctaaagaataaaactccagttagatttaaaaaaatcccatttacaagcattgcacctttaagaagaaaacaaatatgacagtatggtagctatacttgtgatgtctgacgcatgatggcctatggttttaaaaatagtattgtggaatatatttttgggtaataagaatggttgagtgcaacatcatgtattaatatcaaatgaaagacaagggtgctgtatctttgattatttatcaaaaaagtataaatcttttaaggaaaatgttagaattttaaagtttttttttgattgttgaagcatttatcttgttgatttcttacaaaagaaaaaggacgatgtcagtcaagcagcactttttcagaatatacagaacataaataatatgatgtggttgagtgttaacataataaatcatatacagtatgacattttaagg

SEQ ID NO: 11540 - DNA, 1676 bp, Homo sapiens
tcaaaagaagtcatactattttgcttacttataattatgtagtataaaccaagcacagtgcagatttcttttacaaaacacatgtattttgcaaaaaaaaaaaaaatgaagaccatgagtgaacagttgtttcctaacccatggctatttagaatcttttgccaaagaatgacaatgatgcaaaaatgggaacagtttggattttaattagaactgtttaggagtgatgatgtgtaaaaagttgacttctcttttgcatggcacagagaaattatattccttacttcatgtcagtttatgttctaaatctttttcactgaatataaaaatcttgttaaatgccattaggcaccaacttaaagagggttgtaaaaatattaaaagtatatcgttaattctgtatctgttgcttgtcttttgtaagtgattatgtgttatgaccataggtggttacagctgccaaattatttttaaatggtcaaaaagaagagtgctatttaaacatctgtcttaaacaaaaactgtcataacttttcttttttctttttccattaggagaacattctagttggtaaatttcaaaatgtgcttgacacctgccttaaatagcacagacctattgtgcacatctttaaattatttcagctggcagaaaagaattacatttaaaactgaaatcaaggcctcaatacaaagattatcctggctcttttctatctctgtgggcctaattgaaatatgtactcttattttagacacgcctctgttaaaacagaccaggttttcctggtctcagacctatgatgacttgtccctttgatgtcactactgtgaattgaatataattagtaaaaatagacgatgaataaataacactttatagtaagaaaacaatatattttggccatctaaaaatgagaattataattatatgaattataatttaaactgtttaattttgtttaatgtgtatattgaatcttccaaattgaagccattattctcaattaagtactacaactatgacaatgcttgacctacatttctaaaataaaaattcacattttttgataaataaactacagttttaccagaaattactatctaaatgtgtattagcagtattttttaaggtgaaattgccttggtatctaatgaatgtgtagacagggagataaaatgaaggattgccagactagttagaatagaatttaggattaggttagttttgaaaaatgatgttgtaatatatgggttctaacacatcctaccataaaaactggaggagatatgtgtaacctggttaatttgggatggtggacattttgggctaatactgacaaaatacatcttaggactagtatacatgtgacacggattgctaggaggaatgaaaaactaaactgtatagtttatattccgtaaaccattttataatgttcaaagattaggttttgttattgatagtattaaatacacagtttctcttaacagtgatgggtgaaaacattttaccggattatggaatgtttaccagaacatgttttgattcttgaatgtacataataatgccatctaacttatttacgttcttgtttacatgtgggagcttttgttttcaaaaattattttgttaaaaaatctcaataaagatttattattgttgttcttttctt

SEQ ID NO: 11541 - DNA, 1919 bp, Homo sapiens
ttttaaaaatgtttattattgaaggatgggggtttttgaggggaggaataactagatgaatgccaaataataaaacacttaagcttttagagggaaatacatgaaaactgctaaattgataaggctataatttatattttaatagcaatgtgaatataaaagttattgatcaccactattctagggtattcaaaattagaaaataatttatgtaggttataaacaatattttgcctatgcaatgttcctaaaaagctaactggaaaaaatatatatatatacaatagtaatgacagtgattttccatgtttacatcttacaataattatagaggagttttcaattaacaacatacctccctccataatttctatctagtcctactgttttataatataattctattattttgtataagaaaatataattcaccacaaagtacacatttctcctgtctccattcttgtcccttctccatcttaccctgagcaaaagggagggggaaggagcaactcttacttagtgtgactgcagaaaatgtaaaaaagtcagagcttgaaattgtccttgtgtttaggtagcaaagagtaatcataaagtgggttaggtacagcaaaataattcaatactgaacttgtgcatatttaatgtattatgtttgatataaacttctagaataatattatcttatccttatattatcagcatttgaaatcaaagccttaccttagtaacaataactcaacaaaggggcatgggtgacgttgttataattgctctctgtttacttaggaatcaaatttaaagcactaaatatcatagattactcaccacagttatactcttaacatctttttaaaagtataaaatgtatttcatttctgttaataagctcagttattaactaaattgtctgtggtattttgcacttcagtattttccatacctttgatttcaacattatttcccgtttactagacagaatataatggaaatttttagaactttccctttactttaaaatatttctacttttccaattggtagaaatgaacaggaaaaaagactcatattacactaattaataaatgtacacacatatatatttttgtaattagtcactctactagttcagtgagccaaagcaattccataagtttttcttccatatttataaaaggatttgaaaacaatagaaccatgagtttgagaggattttattttatttgaaccagcaaggtcatagactacctttgggaagacctatcatcaaccaagatcgtttgaaaaacaatatatacctttttttaagttgtacatttatgtgcattgtaaatattccttcctgatggtgtggttaagagtacattacatcaattttatgtatatatagatctgtgacaaattactctcaatctaacaaacatttacagagttcccattttatacaaggcattgagacatatactagatagaagatatacgaaataataaaatacagttttttttcctgaatatgtttacagtctaaaaggagaaacaagaaaaaataaaactataatagaaaagagcaaactaaaatctggcatggaagttgtttacacagttatgatggtgcagaggaaaaactgatcgcatcttgtttagaaaaatcagaaatatttcacaaagaatgtatctagaacacatgtcaaatacacagcactggggcaagaaaaatggaagagcacactccaggttgtgacaacatcaggatacaaactgcaccatgcaagtatttggtggggcatgttcataaatagcaatgagtttggcaactatttagagcaatagaggaaaaggatattaaaagaaaaattgggcatttttgtggctgactttgaacgtcagaaaaaagtctacagtcaattttattgctg

SEQ ID NO: 11542 - DNA, 3010 bp, Homo sapiens
tgaaaacggttcagaaagatctgtcaatcaagcagtagtgtgaaaaaagcactataagaaaatgcatcatcagtttgctatttccctgatggccttaattttagagtggtcttggattactaaagataaagacaaagcacattttctagaatgaactcacagagatgtgctggcttagactccaaaaggattataaaactcccaaagtaccagttttccagaaaaccacattttacagtttatgatgattaatagcagcagcatgttcagtttcgcttatatgagaaacatgtttaggcaactagtcagaaaaccagctatggccttacagaaagggaaaaattaacccattattaaaaagtgtgtgtggggaggggggctggtttacaatattaaaccatttaaagtattttattctacaaatggggtttgttttcttgtcatgcataatcagattatgtcccctcccttctggttaaacatggtttaaggaaccgctgctgtttggtttgtgattgatttagaaacttatacattaacttaccacagtgctatcaattaaagattgtaacaggtttccagatgattaattaggtcaaagttcaatgaatggcacgccagcattgaaaattaaaaaacaaaacaaaaaaaaccacagtgctttgctaataagctcttgatagaacctcccactaaccacttttgtggtacaaattagttaacatttaaagggcagcagtgtcaataaaatagaaaaaaaccgatcagtactctggggagagatgaaaggaatctaagactttacaggctttgtagttgaaggaaaacactgaattgcaaattattcaatgtgaataatggtaaaagcacactgggatacttctgtttgtgtatatgttgggacattgcttgatgattcatagtaaggtcctttagacattaatgtgagttatctaagtacagtcctattaaaataactggctcaaaaaatcagctaagaatcaggttgagaaatcattcattttattctattaggagaggtaattccaaaataagccatactattcctgtttttttaattcattagtgatgactctggtctgaacagtaatttttatatgtaaaaggaagtatttacacaaaacatttgcacaagaacacagtaagagatacattcaagcattgttttccttagtgatgttattttcctaagaagattttaacttaataaagtgttaaaacaataaatatttttaaaaataccctctcagatgttttccatttgtccattattgaaaggaagatgcttaaagacttccttttactaatagtgtgtaaatctaaaacagggattaaaataacaaaaaggcagtgtttcaaaacagatctcctaatgtcccaatgtcaaatattccagttattctaaataataaaatctttgttcaaggcagataatctcatcagaccctattagagcttcttgaatgaggctattacggaagtggggaatttcttccaggtagcatccatattttattaaattaggatttccagatcatgatagatcagatgatttttttttaatttcccggttttattggtttatcatcagcattcactactatgcaatgatggtcataagtccattccaaatttaaatttgtttctgttatgtagcctatattaggctgtggaatttacatttaggtaactaaacacagctcataattaaaatcttttctttaaggtcagctaaaaaaaatgtttcctgtatttcttgatactaaaaatgtaatgatttttattttagttcattctaaaagtatgtcttgtaataaaaagtctgtttggaaactggttcatttggacagtgaagtcttttgaaatatttctgctttgtacattttccagaagtttaatattttatcacattttccacaagttgtaacaattgatataaatccatgcccacaaagtattccattttcattacttttactgttcatgccaagatgtttcaaatatattccatttgtaatctgtctttaacttgaggtttatttctacttttgtgttgctaaaattatttctgcaagactgagatcaaactggtttatatataactaaatcaaggaatgttttataaaattctatttgaccacactgtcttaacctcggtttatatacttctcaaatagctattgaaagaatgtgttcattttattacatctgtcttttaaaacataaacctacatcattttgcttttatagggtgcataaacttccaacagttctaatttgagcgcttcagaagaaaaggaagcttgcttcttattcctcagattcttctttttttctgttttgaggatgtattcatcctacatggaccaagtttcaaatctttgtttttaaataaaaatttccttcaaaaaattaaatgttaaatttctgctgtgtgtcagtaaggtgaagaaaatagcaaatctgaatttttgctgctcagatattatggaggaggtaaaaaggggaatctccgtggacaaggacactggtactttgggctttagccatattcatttttttgaaaccaccaattatataatacttaaataatttatatcattgaacttgtgattcttttcaaatcacactgaaggttcagccgtactcctttcatgtttggtttaatactgttgtatggatgaaaaacctaaaagggatgatagtgtttattttttaatttatttggtactgtaaaacaccttttcagaatgagtaaatgctgcatatgcattttggagttgttaatatgtgaaagatattacagattcagcaagaaaggaaatttgtgcttccttgttgaatgttaaattattttactttgcattttataagagtacaaattaaaactgagccattgaactgcaataaatcaacaatagtgtctcatttcaagaaattttttgtactgtacatagatttgttcaataaaacgtccttgttggtaatc

SEQ ID NO: 11543 - DNA, 280 bp, Homo sapiens
ggtagtggaaatgagacattgctgaacaaaagagaactgggtttacctgaccctctaaagcgctaagtactgtcagcctgaaaaaaatcttctatacagaaactcttccaaatactatatcagtaatgtctgaatgatttcagatgtgaaaattgacatattttagttgaaatacctttctggactacagacttacatatcatgtgaatacttacctatttctacccgagttgcagcaagtattctgaaagcttaatgcaaataaatcccactttagatc

SEQ ID NO: 11544 - DNA, 2632 bp, Homo sapiens
agcacgggacggaagtgcttctggacggaagtggtggctgtggaaggcgtagcatcatcctgcagacagacaataattctggagatactggtggaagttccaagtccaataagacactcaaatatgagtacaaatgccttaaaatggaattgaaaaactctttattttcccctatcatttattggatgggtgggtggggtatttttttgtaattgcttttttaaatattagttaatggattaaatttaattcttcagcgtaaaatggtgaagaactagcatatagccattgatcataaactgactatcataaaatcaaaacaagtgaaataacaaaatggacatggtggctttgtttaggtagagccacaaaagaaaagacttgtaatatttttatatacagaggaaatctgtaacaggtattttgtttcttttaaagcaagcaacacagaggaatttatacctcaaactatctggccatatttactaccttatcactgcattattctcttttatctgtttaaagcatatagagatgaagtttgtagttgttttaagtactacacatttttaaattgttagcttccttaagtatatcatgtaaagaaatgtcttaatttttgaaaaaagtacatatttattttcttttgaattgtttttattgttttctatttatgccttgatgatttaatatggatttgttacagccaagtgccaaatgctctctcaaattgtcagcaatttaactagacacagataataatgggtttctttcagattttttgaaccatccacttacatatatttttaaaaaatgaaatccttttcctgttcatacactaaccaaatctctcaaatctgttatcccaatcattgttgcctctccgtttattataaactgtatgctcacaacttagtgtaatataccagcttgtatgcaatggattttcaaccagataacatacctttcctgctctggtgcttagagactatcaactccctcctttagtgaaggagccgtgttagagcttccgagaatagctccactggagagaagtggaatcctatatagaatgctgcactaattgacaacacagcctataggccaatgcatgagtaaaaaaaaaaacaattactggctcactggctttgaaaagtcacttactattgttgctgaaacttgctgagctgtttatagagaatgatgataacagaacttttcctctgtatcactggtgtttaggtgaattaattaaacattgtgatcattagtaccaggtattattatctttaagagtcttccacttcaatgcacatggtgcagttttggtgtgtaacttagaaggattgaacttctttgaatttactggacataacattttcagaatagttggtcatctagcaaccgcctcaaaatgtgtaagcaggagagaaatttctcatcacagggatttagacttactattacataaaggctaactatgagcttgctcattaattttgaaaagatgtacctggtggatatctagctagtaatatattctgaagcaacattttagctctattgatactctttctaatgctgatatgatcttgagtataagaaatgcatatgtcactagaatggataaaataatgctgcaaacttaatgttcttatgcaaaatggaacgctaatgaaacacagcttacaatcgcaaatcaaaactcacaagtgctcatctgttgtagatttagtgtaataagacttagattgtgctccttcggatatgattgtttctcaaatcttggcaatattccttagtcaaatcaggctactagaattctgtattggatatataagagcatgaaatttttaaaaatacacttgtgattataaaattaatcacaaatttcacttatacctgctatcagcagctagaaaacattttttttttaaatcaagtattttgtgtttggaatgttagaatgagatctgaatgtggtttcaatctaattttttcccagactactattttcttttttaggtactattctgagcatactcaacaaaacccatgcatttcataaactaatagaagttgaggattgttgaatctatttcacttattttggctgtggtttccatctgaaagtagaggttgtatacaccatatactgttcttcattttattaatatttttctccttgacctctcataaatttactttacacaattcttaccctgtacatatgtaaacataagtgtacgattcttaaccatggagtagaggtactagaatgcttacggccatctctttgtacaggaactgcattgactttcagtaaacataaagccacaactcctacatgatgttatgtaccatatgatctgttttgtatcttaaatttgatttacatatattatttatttctggtaactcactcagtttatgctgtgctaaatatcaatcaagccatgtataaatgtgatatgattggcaatatgtgtttactttaaacttgtcttttcaaaatattactcagtttatgttgtacaatgtagatggcctcttactaatgtaaaatgatttgtagtggaaacatttatatttttataataaacataatgaaaatattttttacagattggaa

SEQ ID NO: 11545 - DNA, 839 bp, Homo sapiens
aggagggggcagggatcttgcaaaagatgtctgatcgtttattctcactgtttctaagttttaaacaaatgtgatacatttaaggtatattgcttgggacattgcaatttgcagagccctgtgtctgtatacagtatttgtgtttgtgtgggtgtacattttgtgtttctttttttcttgtatgcaaatcaaacatattctaatgcctgaaatgcttctgttttttttttttagccataaattgcttttgaggaacattatttaatatagtaacacacttccagtgtctgtcatttcagatattccaggttcattgcgtgattcaatgaaccacaaaaaagaaacttgctgatccatgagaatcttaattttgttttaatccttaacacattcaatagcatatcacagagagaataaggattttctaaaatgtgttttatcacttcattcacattcagaagtaatttgaatagcctgttcctttaaccccaaatttggctaaaattggcctaaaactggcaaacatttttccagtaacttttctttttttcaaatgaattttcttcatacttaaaaaagccctttgctaaaatataattttcaaaaaggtaaaattatgtctatggcactaatataaaatgagtagaagttaatgattttacttaactcatttttttctttctttctttttttttttttttttttgagacggagtcttgctctgtcacccaggctggagtacagcagagcgatctcggctcactgcaagctcctgcaagctccgcctcctggcttcacgccattctccccctcagcctcccgagtagctgggactacag

SEQ ID NO: 11546 - DNA, 2014 bp, Homo sapiens
acaagacgtatggaggagttctcttaatatcagcaaggtgaactgggacattcttctttctcagaagaagaaacatcttgtaaattgatgactggggcaagataaccataataattttagtgagaagattaatactcaaggacctgacttgataattacttatttgtgtttttcatggttaaaaaaataaaagaagcacaatgaccagtacatgaaatcagcatttggaccaaattagcaagatttactgttgactctggtttatacatccccactcatgagcatacttctgaaggaaaactttacaaaaagagccaatggactcagcactttctttactatttgttcaatagcctatatttctagatattaaatattttttgtaagatatatgcacatagaagggggacttctaggaatttataaccaaaattttaaaactatttttatatttttttaaatctttaaaaattttaattactgtgatattgattatacaccttttttatagatgatttgtttaaattatatctggaaaatagagttgatttactttcagacatgaactatacaaacaggatatatttatatggcttgaggtatgttttgtaatagcgttgttctttaagtgtacatcgtaatttgacctaatttaaaaataatatattttcgaagtagtagattctcagatctttattctaacaattacatgatttgaaaacagtactcaatgagactggaaataccttttgtacctaaatgttttttaaattaatcaaaatacattctgtgagatactattaaaagtctcagtaaagtcctattttaaaggttagacactttcagagatcaaggtgctccctatactcccttgttccatcagaagctgcagtgactcttttaggtgattctaattctttcatgccttgaaattaaactatgaaattaaaggcagaaaaactggaaaacctactgcaggtccagagacttctgttttacaactgggaaacagcttgtgtactaaagtaatgagaataaaaatgttggcccaaaattacttttataaataaataattccaaaataatttcttaatttaaaatgatagcacttctcttgcacttaagaatggcatccataagattctgtatttggcatttagactaacttctagatgtatatttttaataatagattcataatgttacatttaattgaaaacaaacctttatatccaatgaaaatagtataaacagaatgatttttataccaccttgttaagattggtgcttttggtaacttgtactgacacaacagacatgtgctagtatctgataacattaagtacattttatgtcgtttaatataattatttactttaaaaattgtacttcagaacatcagattttattcacattttttaactcactgaactttaataatcaggtcacctgtactctagtcagcactgtatatattcttggagtttgtacatgggacttagcaaccacactgagtgaggtaaaagcatttgatttcagatctaaaattcgtaacaacctaaatttgagaggtggctgaaatgtgatgaaaagcaatacgaaaagacaatgtaaactttgaaaaggattttagagggaaaattgcatagctttttgtaacatttacttaattttaaaactaaactcatacttttgctatctttttaatatttatctcgtttgggagtatacgtgtttttaaaatttgtgttttctatctgtttactatagtgtagctactggcttcatttaataaaaataaatgattttgaaattaaatataatatagaattcacattttatatagctctctcaaaaattaatttttattccttaagcattttaaaaacattttaaaaaatgttttgtaaatccaggtgtattttaacaattaaatgcctattttgttatatgttatacttttattcttaattctgaattttgacattttcacacaataaaaataatttatatc

SEQ ID NO: 11547 - DNA, 296 bp, Homo sapiens
catgaatttgtaaactgtgtttatgtgttattatatttatatttctgaactcagtacatgttaatatttaaataattatgcagtaactttctctgggtctgtttggaatcctatttagttaatactttagcatcttagaatctaggcttgagaattgttcaggtgtatttttttcctagaaatatatctgtaacaatgatttaaggtggtgcagatggtgtttgttctatattataaatctgctgtctttgcttggcattttatagttaaattaattagaatatgtggttttatgc

SEQ ID NO: 11548 - DNA, 476 bp, Homo sapiens
aaagataatagttggaaacctcagcaattttcaattcaaggaatctatctaagacaaatagaatacattttgtaaaagatgtttatgcatcaaaaaatataattttctgcttgcatttatggactctgacctttttaagaacataggacttcaggtatgctaatttggccattaattatttaaaaactaaatattccctcaaaagggctccctagaattatcaagttcttagtgaaggtctacatttgattgtacgtagaatgtttaaaagtcagttataagccatctcatcccatcataatttatgatatgtttaatatattttattttttaattgtctttttaaaaaatttagtttatgactttgcagtatgaattgtgcttgtgaaaaagaactttaaatatttataagggaccatgggtaattaatatatattcaatttttactatgtgtcactgtcaataaaatgtaaaat

SEQ ID NO: 11549 - DNA, 24 bp, Homo sapiens
tctcaagaaagatggaaacaagtg

SEQ ID NO: 11550 - DNA, 629 bp, Homo sapiens
ctctacagactcagaagatgatgctaacagtgttagttttatttttgtactgcaatttttagtttaaaatatgttggatgcactcgtcaaataattatgtatactgtctgttgctgcctggtgattcataaccaccagcttaatttctgtgaatactgtatatttaacttatgaaaaccaagaaatgtaaagataacaggaaaataagttttgattgcattgtttttaaaataagctagttttctgaggtgttttcacacgtctttttatagttacttcatcttagatttttgaagggatatgacttcctactaaggatttagtttaccacaacaattctgactacaataagacattttgaggaggatatttggctactgtaaacatggctggtggaaaatcacgattgtggcttgatgtggcaagccgaaaccacttggctctggaaatctaagttcatactggtttaattaagctctctcctgacaacccccagaattaaatgaaccatgattgtgaagagtaatttggtacaatgaaggcagtgtttgtttttaagttaaaggaaatgggctaaacataaagttcttattagataagtaaataactaaagaaagaatacaattact

SEQ ID NO: 11551 - DNA, 178 bp, Homo sapiens
aaacaaaaaaacaaaaaacaaagaaaagaaagagattttatagaagaaaatgacacaccaaaaaatccaaatgaaaaacataattgcttcaaaacacttacacagttggaaagttatatgtaagtgaaaatttggaccattgtgtacaaataaaaactaagatgcatgtttaatactc

SEQ ID NO: 11552 - DNA, 214 bp, Homo sapiens
gtctgtgtcctaatgaagattccagttttcacagtagaagttgcatcttatttaatgactctgatacattgcaagcactcagtaaatatcagcaaatagtttatgttaattgtgtcaacagatggatcactggaatgtggggattctgaaacagaaatgaaactgtccttttgacaactctcttatataataaagtatcaccggcttgtgtatg

SEQ ID NO: 11553 - DNA, 81 bp, Homo sapiens
agtttatgtttctaatgtgtcacagaataggacgatatgattctacaacataatcaactccctattaaattctttaatgaa

SEQ ID NO: 11554 - DNA, 423 bp, Homo sapiens
ctttgatgagcttccagtttttctagataaaccttttcttttttacattgttcttggttttgtttctcgatcttttgtttggagaacagctggctaaggatgactctaagtgtactgtttgcatttccaatttggttaaagtatttgaatttaaatattttctttttagctttgaaaatattttgggtgatactttcattttgcacatcatgcacatcatggtattcaggggctagagtgatttttttccagattatctaaagttggatgcccacactatgaaagaaatatttgttttatttgccttatagatatgctcaaggttactgggcttgctactatttgtaactccttgaccatggaattatacttgtttatcttgttgctgcaatgagaaataaatgaatgtatgtattttggtgc

SEQ ID NO: 11555 - DNA, 420 bp, Homo sapiens
acagtaaaacttacctgttgtggtctttttaatcacctcgtttgagttttatctgtttctctcctttatttcccagtcctctcagaaagtcttcctcaatgtattttgctcaggattaagaattagataaaacctgttgtttattattattcggcataatggacttggtagtttttctatttttcaatagatttgtacttgaataaggtgaagaatttcacacaacatacaagagtaccattgttccttatatcgttaaatctttgtgacacactttgacaaaaatgtagaacctataacaaattcttttacaagttactataaaggacacaaagagaaaactttaccttccagaacaaaatgactcctgatgaacagtgtgtggggatttgcttgtatgtattaaacttttgacctctg

SEQ ID NO: 11556 - DNA, 435 bp, Homo sapiens
ggaggctcctctacaccaattaatgtagctgctagctattggcctcccaaaagactccagtactattttaatttgtattgaagaagttcagaaatttaaaagcagagcattttttatgatatcattgttggtgttaattgaaagtataatttgctggaacacaaagaccaaaatgaaagttttttcctccctgcttaaaaatgtagcagcttcttagttactttggaacactactcttacatgtataaagtgattgacttgactttctagcttcccttgtccggaggatattaaaatgctagggtgaggtttagccatcttacttggctttttactattaacatgatgtactaaagtagagccctttgagaatacaagatattatgtataaaatgtaacactgatgataggttaataaagatgattgaatccatt

SEQ ID NO: 11557 - DNA, 250 bp, Homo sapiens
ttcattttcaaaaggttctctgaatgtgcacagaacacgtggctcaaatgagaacatttgatggcttaaaaagtaaatgcgttagaaatacagttctgttaatgtatttcttcccaaacaattcatttttctcttctaaaggtagtctttcccaactgactgtagggttgtgtcttttcccaattaaatatctgcagaactttgggattatactttgtttactgtagaaagataataaaaagagttgtcc

SEQ ID NO: 11558 - DNA, 1682 bp, Homo sapiens
atgatgttttgaaattggggtgtggggtgggtgtaaagttaaaaggaacagtttccttttttaaagaatggtataagactatctttggagccgctttttttttctttttcatttttttaaaagattgagtggtacactaataaatgagagtttgaaattagaggtaatttatgttttatatacagatttcaagacatttgctaattttgtagtttcatgtgattagtttccaaaggttacagataataaagaaatcagaaatggtacctttttaagaattgcatatttttttagacacaactattagtacattaagagggaagcaaagttactgtctatttaaaactgcaagcagttaactctcttaactcccttattacctaaacttgtctggctcccaggaacagccttatagagagagggagtattgtattgggaagaaaatgttactgaactattgactgaaagtaaatttagataaaatacagcttttttccttatgggcatttgttttgtttcaagtcatcataaactaggtattgcattgctatccgtggatacagacgcttagctcttaaaagattttttttttatgtaaactgttgaatatttgaaatagtccacttcaccttaatgggtcttgtctatcttcattagtcttcaaagaaaaaccatttgctaccaaagtaaatcagtattttgaatgtgcttctcttgttttttgtttattagctagttcctgtaagcatttccaccagaacttgaggcaaatcgtaaggaagctgtttcttttaaaacacaaaccaccaccaaaaatttaaatgtacatattgcttaagtatttggctgtttttattttttaaaaggtataaacaccaaaaaaaaaattaacattgtatgaagatggaaaataagaagatgcactttctgtaactttgtctaaggatttaaattactaacttatgaactccaatttgaattgaacttaactatcggctttcttactggtaaaattatatggtttattttaaatgcgtacatattgaccaatggcctctgaaaaagcacattttagatactgaaattgaaggaaagaaaatgcatcttcaaacattttttggaatctcaccacatatactttgttagatttgtgtattgtagggtgtttgttttgtatttttgtattgtatatgaactttttttaaatgtgacagttaaacacatctttaaaagcatagtcacagacaaaagcatacagtataaaaatttccttgaaaactcctacaatattatatttggaggcagcttcagactgttttattggtggtagctgcttgctgaggtcttttagttggtaataactccagagaagcagcctgtgtatattcctaacactttgttcactagcatttaagtttagaataagcccaagtaagacaatggaaatgtatatagaactcttagttcttacatgatttaattatatcgatacatgaatttaacttactttaatgtaggcaaactatcaattttttgtccattttcctgtttgttaaaataacatacctctcctacgtattattttcttgacccaaatgaaatattaacctaaggtcaagctgggagagagaaatgactgagatgaatgtctttactaaagtaccaataaatttgtcaaactc

SEQ ID NO: 11559 - DNA, 1786 bp, Homo sapiens
catgtcttttgggaggcagatatccacttaacttttcttaaaaatactttcagttgcctttgcttttttttggagggaaatactccctacccctaattttgttactacttatatagaatttgtattcatgtcttatatttttcagattctagatattgagctgagttttcattttgattttgttagctttttacttagctgtaaggtaccaaactatttatattgaaagctatatgcactttatttcttaactgaattgcatcaacaatgttcctgtttctttcatgtactcatttactttcaaaaataagctagaatatattaaagaaaatagaaaaaattaccttaaatatataaataagagaattttggcccttctgtgtctgagaaaattaattatatagcaaggaatgaaatttgataaagcaaatataaatgagaaatatgaggattgtgaattattgaaatttgccagtctccctggtgtaaaatgtttttttaaagccttttttcctcctttcggagtcaaggaaagcctttctataagcaaattaaggaagaaaaggtaggattataagatttctcaatggggatgattaaattgtctcatggaaaacttcagttaatgtcatgcatcagttttaacatatgaagtaaagtgttctatccaggattaaagtcaagtttacttaggcaacacaagaatatttcacttagatatgaagaaaggaaacactagtctccattcacttgaaatactctcatggcaaatatttatcctctcattaagtgctttttcaccctataggtaagcatttttgtgccaacatgttgtcagaaattaatgtatgttcatctcctctgttcctgcttatttttacttatatatttcagcagaaggtccgtggccattcacttcaattttgacctctgtcccatagtgaagaacatttaaagtaatactactggtcgaatatgaatgactttttaggaactactttttgtctaacctgaaaaagttccacatttggaagacaatttaatgatggtgaagaaataataaacctcactttacttgttaaaagggatatatatatatatatatatgtctgcaacttcagggagaaataagattgtgtttgaatattgtaggtagatgcatttgtaattaaggataatatcgtttaacaacatgtatttggtttccctcaacttacagacatacagctatttaaaactatggcaatacttaagcatctctaaatttaggtgctaaatatctattattctgttgtagtcattaggtgcccttctctgaagttatgtaaaataaaagcatctgatccttcaaggataaagttgaggatcacatggtacgtggcatttgttgttattgttttttaaagagatggaggctggctctgttggtgcggtgccatgatcatagttcactataacctcgaactcctggctcaagtgatctcccacttcagcctcccgagtatctgggattataagcaagagccactgctcccagctcatggtatttgttgatagtcataacatttttcctgtatggtaagacgtatttttctcagtttataaatacgtagcactcaggttgagacgacttggattttattcttagaaatccagaatcccttgaaaaggaaatattttctgtttcttataaataaaagagtaatcttactttcagaaggattttccttagtgaaacatgtgtaacattgaatgcatgttaaataaaaatggaatttctaacttt

SEQ ID NO: 11560 - DNA, 1653 bp, Homo sapiens
cctgtcttggaagggactggaggaatcatattcaatgaccttctcaattgacctgagttacagaaagtggccccagtgagagatgactgcccttaataagtataaaatttcaaaaagatctggacttaatatgatgacttataaggagcttagaaaatgcaggttacatttatatctacctataggattttatccaatgttgacttagccatggtagaactcttaactgcatctacacactatattgctcttgtaaccaaagatgctaatgagtgtatttgaattagcttctcctaggaggggtgactactttgctaaagagtatgaaaaatgttttgatggaagggacaagtttggttggtagtagagtgtttgtagcttatctggtaaaggaaattgagtgcatctgcatgcatagcacaagtaatccatcttctggcggttaactagagaaagcttatagtcagaggctcttgtgaatgcactgaagactgctgtgtctcaggagtttctcttgatgatctaccttttctgaattacttgaaaaggccaatgtgcttggttcgagttttttagtgaatatttacaatttcctgcttttatctagaaaagaagcaaaagggaaatatgaaagcagtatatataaaatctgtgctttggaattgatatttgcatttggtgattgttttttatttgattcagctaaattttatgtgttgaatacttactctagaataactacttttggaactggaagggggaaatctgtaaatggaaatttatttttatgttctgaaatttgagggtttaggaattgacttttgtgtaaagaatgctacgatattataaagctgtggaagttttttccactagtttcaggtgtttttttttttgttgttgttgttgttattttgaactacttaccaaaattagaagttaaaatctaattagaaattaataagatactaaaattcatgacagttttttgtttgtttgtttgtttgttttttggtatttcttgatttgggcataaaaggcacacccattctctcatgcttggaagaagctgctattcctactggctatctaagaagaatggaattattaattttatttgacttattaattttaaacgagtttaatttgggatcatttagtaagtactcttttctttttgagctgtgatagattatagtctagtttaagttgctcctaagtagacagatgaagaaactagggaggctttagagaggaagacagatgcttgaagtatgaacaatatatacccttagaagaatgggtcaaataatttgggtttttaatttaaaataggagggccccagatcttactttcctgtccttgaggaacaccttcaagtttttaaagtattttagggggaaagaagatttttaattgtttctgagcctaatgaggtaataaaatatattaaaatagtttaattttaatggtccttacgctttacagtacctaaggatcacttgtagtatctgacaaaaatgcagaattaaagagtcatggcagggtgtggtagctcaagcctgtaatcccagcactttgggaggccaggcaggaggattgcttgaggccaggagtttgagaccagcctgggcaacatagtaagacctcatctc

SEQ ID NO: 11561 - DNA, 1650 bp, Homo sapiens
ctccattagcttggagcctggctagcaacactcactgtcagttaggcagtcctgatgtatctgtacatagaccatttgccttatattggcaaatgtaagttgtttctatgaaacaaacatatttagttcactattatatagtgggttatattaaaagaaaagaagaaaaatatctaatttctcttggcagatttgcatatttcatacccaggtatctgggatctagacatctgaatttgatctcaatggtaacattgccttcaattaacagtagcttttgagtaggaaaggactttgatttgtggcacaaaacattattaatatagctattgacagtttcaaagcaggtaaattgtaaatgtttctttaagaaaaagcatgtgaaaggaaaaaggtaaatacagcattgaggcttcatttggccttagtccctgggagttactggcgttggacaggcttcagtcattggactagatgaaaggtgtccatggttagaatttgatctttgcaaactgtatataattgttatttttgtccttaaaaatattgtacatacttggttgttaacatggtcatatttgaaatgtataagtccataaaatagaaaagaacaagtgaattgttgctatttaaaaaaattttacaattcttactaaggagtttttattgtgtaatcactaagtctttgtagataaagcagatggggagttacggagttgttcctttactggctgaaagatatattcgaattgtaaagatgctttttctcatgcattgaaattatacattatttgtagggaattgcatgcttttttttttttttctcccgagacagggtcttgctctggcgcccaggctggagtacagtggcatgatcttggctcacttcagccttgacttgggctcaagtgatcctcctacctgagccttctgagtaactggaactacaggtgtgcactcctcgcctggctaattttttattttttgtacaggcaggatcttgccaccttgcccaggctggtcttgaactcctgagctcatgccatctgcctgccttagtctcccaaaatgctgggattacaggagtgagccaccatgcccggctggcagttgcatggaagagaacacctctttatggcttaccctctagaatttctaatttatgtgttctgttgaaatttttgtttttttacctttattgaaacaacaaaaagtcagtattgaaacatatcttcctgttttctgttgtcaaatgatgataatgtgccatgatgttttatatatatcattcagaaaaagttttattttttaataacattctattaacattattttgcttgccgctggcatgcctgaggaatgtatttggctttgattacacactaagtttttgtaataaatttgactcattaaaaaccttttttttttaaaaaaaaaaaaaaagaaaatctcattagtgaacttatctttgcagctgagtacttaaattctttttaaaaagataccctttggattgatcacattgtttgacccagtatgtcttgtagacacgttagttataatcaccttgtatctctaaatatggtgtgatatgaaccagtccattcacattggaaaaactgatggttttaaataaactaattcactaat

SEQ ID NO: 11562 - DNA, 2223 bp, Homo sapiens
ctataacagattcctgctctctggagaaggcttcactgactaaactatgtgtgactgcagtcagtgttccgtctgaatttcatgtcagtccacattcaatatttgtaggtttgataaatttcacagtatagcttgtcagcataatgatagtgaaagaagtttattatattgctattgtcacttatgtacgtggcgagccgtatttttatgccaccagtgaatatattgacaataagtgaaaaatattcaggacttagggcttacaggatcagtaatatttcattttatttcagttttcttttgattgttggttaaaagataaaaggtgggagtagacaaaaaatgaaatgtgttgcatttcccccttaagcattaatggcatttagatttgcacacgtggtcctagaataaatgttgctttttgttttaatccggatattcccagcttcaggatgtgttttaataggactggccaatttggatacctgagatttaactactcattctatgacctcctgtgtttttggccgattttcatgtctgaccatattcattttaaaagaaactcttgggacatatctcttaacctggggcacccttttgtgtagaagatagtgaaaatagttgttagcttccaaggctactgctaagtggccctagatcattattcattagaataggaatggctgcgatcagttttcttcttctggttcaggtgagaacaccagcacatgttaactctcctcccaggtaaacagttcagctgctgttgcagctgtgcttccagcagtgaggtaactatgcaaagattatttttaattcaagaatcatcacatgtgaaaacaagctgtagttgtgaaaagagttcctagaagggtttttaacaatttagattccctttttcctaaaacaaaaaggaaacttaggttaagtgtagtttgcagaacattgttggaatctacataaaaagatattccttcccccatattttcgatgccaggcaataatcaggagagggtttctttttaaggtatcttcttgtaggtgtcataattgccatgaataaacaatattttcctctaacagtaaactgcaagaagcttctgatcctttatcagttttgcaaaaaagcaagctttaagcagcccatgttcttacaaaaaaaatcaacattctctttgtttaagctacctatgcactgaacaaacaaaacaatttaatagccaacaccaaaacccagcatgtgaagttactagaattgccatgttaactataagcaattgctgtaatcactaatttctattcaacatttgtgacccattagtccggacttaatttactatactgcatgcaaatcatcaagcaattgcttcaaaggaaatgtctacaatgtgagttaataattaaatcaatcctcaagttgaaaaacactttttctccaatttgcctgaatatttcaggaggaagtgtttatattataataattagctatataattgcatcaactttttatttcaaggtatagttgccaagtaaagtgggatctggaaagtctctggataatttctttacaaaaaaagtttaaatcacataaaaagccaatctactcttccctgtgttactttaaaataactttgaagtgactattctgagctttatctgtgttaacatgattaactgaccatactactaatgtgaccctgtatatacatggatagtattgaaatatgctggtaaatctatttcagatactttaagtgaattgccattgattctacgattaagttctgtgaataggacattatatcatttaagctgttttgtcaatttgatttttatgcttttggaacggctgctgtttcagctgttggccttttcaattctatactccattttatagaattgaataatggacacatgtcacttgggaagcaacgtaagtatcacattattttttgccaccctttcatcataaatggaagaatcagagttataatgagataaaccaggtctgttttttacaactttgttcttataaatctgcagttatatggagtatttagttatactgaattttacagttattatagtgtgaaaaaccttacaaaatatgtgcaaatgtttcttcagttttaatacctcaaactgttttttgcacttcaggggtaaggtctgatgacatgtaaaagatgatcgtttaataaaataattgtttaaaatgtt

SEQ ID NO: 11563 - DNA, 2423 bp, Homo sapiens
agataaaaatcatatagaccaattgaagcatgaacgtggattgtatttaagacataaacaaagacattgacagcaattcatggttcaagtattaagcagttcattctaccaagctgtcacaggttttcagagaattatctcaagtaaaacaaatgaaatttaattacaaacaataagaacaagttttggcagccatgataataggtcatatgttgtgtttggttcaattttttttccgtaaatgtctgcactgaggatttctttttggtttgccttttatgtaaattttttacgtagctatttttatacactgtaagctttgttctgggagttgctgttaatctgatgtataatgtaatgtttttatttcaattgtttatatggataatctgagcaggtacatttctgattctgattgctatcagcaatgccccaaactttctcataagcacctaaaacccaaaggtggcagcttgtgaagattggggacactcatattgccctaattaaaaactgtgatttttatcacaagggaggggaggccgagagtcagactgatagacaccataggagccgactctttgatatgccaccagcgaactctcagaaataaatcacagatgcatatagacacacatacataatggtactcccaaactgacaattttacctattctgaaaaagacataaaacagaatttggtagcacttacctctacagacacctgctaataaattattttctgtcaaaagaaaaaacacaagcatgtgtgagagacagtttggaaaaatcatggtcaacattcccattttcatagatcacaatgtaaatcactataattacaaattggtgttaaatcctttgggttatccactgccttaaaattatacctatttcatgtttaaaaagatatcaatcagaattggagtttttaacagtggtcattatcaaagctgtgttattttccacagaatatagaatatatatttttttcgtgtgtgtttttgttaactaccctacagatattgaatgcaccttgagataatttagtgtttttaactgatacataatttatcaagcagtacatgaaagtgtaataataaaatgtctatgtatctttagttacattcaaatttgtaactttataaacatgttttatgcttgaggaaatttttaaggtggtagtataaatggaaactttttgaagtagaccagatatgggctacttgtgactagacttttaaactttgctctttcaagcagaagcctggtttctgggagaacactgcacagcgatttctttcccaggatttacacaactttaaagggaagataaatgaacatcagatttctaggtatagaactatgttattgaaaggaaaaggaaaactggtgtttgtttcttagactcatgaaataaaaaattatgaaggcaatgaaaaataaattgaaaattaaagtcagatgagaataggaataatactttgccacttctgcattatttagaaacatacgttattgtacatttgtaaaccatttactgtctgggcaatagtgactccgtttaataaaagcttccgtagtgcattggtatggattaaatgcataaaatattcttagactcgatgctgtataaaatattatgggaaaaaaagaaaatacgttattttgcctctaaacttttattgaagttttatttggcaggaaaaaaaattgaatcttggtcaacatttaaaccaaagtaaaaggggaaaaaccaaagttatttgttttgcatggctaagccattctgttatctctgtaaatactgtgatttcttttttattttctctttagaattttgttaaagaaattctaaaatttttaaacacctgctctccacaataaatcacaaacactaaaataaaattacttccatataaatattattttctcttttggtgtgggagatcaaaggtttaaagtctaacttctaagatatatttgcagaaagaagcaacatgacaatagagagagttatgctacaattatttcttggtttccacttgcaatggttaattaagtccaaaaacagctgtcagaacctcgagagcagaacatgagaaactcagagctctggaccgaaagcagaaagtttgccgggaaaaaaaaagacaacattattaccatcgattcagtgcctggataaagaggaaagcttacttgtttaatggcagccacatgcacgaagatgctaagaagaaaaagaattccaaatcctcaacttttgaggtttcggctctccaatttaactctttggcaacaggaaacaggttttgcaagttcaaggttcactccctatatgtgattataggaattgtttgtggaaatggattaacatacccgtctatgcctaaaagataataaaactgaaatatgtcttc

SEQ ID NO: 11564 - DNA, 60 bp, Homo sapiens
agttatgttctgctttgcttggcacaaaataaatgtaacctggaggctccaagtattcac

SEQ ID NO: 11565 - DNA, 401 bp, Homo sapiens
agcgccctttcattgtaaaacattgtgctttacctactaccctagccttgtctttaccgagggatgctagtgagtccaagtggtggaaaatatagactgcaaacaagtgcttgttgccccacacggcccagattcacttgaagcagaagttagcatcctgggccagtttgttctctcagaacccagaatctttgagggtaaggttatctgtctgatactgagcagaaacagaatgatcctggagctttgctttctattgaaggcttttgacggtaataggtggtaacttggtaaaaggctgcctttactgtagctcacccagcatctcttttaccaaccagagagtgtgaaactagtttcatatattacctagttattctttcaaaacaaaacaaaaaaaa

SEQ ID NO: 11566 - DNA, 1000 bp, Homo sapiens
gaaatgagagaagactgtgacaactcatgacctgcatccttaatatccagtgacttcatctcccctttcttcaccacaattccaggcaatggcctgtcggagcagacaattctaccactgcaaagagttgtaaccattttctggtatcacatttatttttcaagacatacttttcaagacatcattcactgacccactacctgcattgagtataaatgcctggatgttaaggattccaatttaactttgaaaagaactgtctcattcatttacatttctgttacagtcagcccaggaggttacagtgagctctccactaagaatctggaagaaatgcatcactaggggttgattcccaatctgatcaactgataatgggtgagagagcaggtaagagccaaagtcaccttagtggaaaggttaaaaaccagagcctggaaaccaagatgattgatttgacaaggtattttagtctagttttatatgaacggttgtatcagggtaaccaactcgatttgggatgaatcttagggcaccaaagactaagacagtatctttaagattgctagggaaaagggccctatgtgtcaggcctctgagcccaagccaagcatcgcatcccctgtgatttgcacgtatacatccagatggcctaaagtaactgaagatccacaaaagaagtaaaaatagccttaactgatgacattccaccattgtgatttgttcctgccccaccctaactgatcaatgtactttgtaatctcccccacccttaagaaggtactttgtaatcttccccacccttaagaaggttctttgtaattctccccacccttgagaatgtactttgtgagatccaccctgcccacaaaacattgctcttaacttcaccgcctaacccaaaacctataagaactaatgataatccatcacccttcgctgactctcttttcggactcagcccacctgcacccaggtgaaataaacagctttattgctc

SEQ ID NO: 11567 - DNA, 1486 bp, Homo sapiens
gtacccatgaagagattatgaactacttgaaggtggagactgtacggtggtgtgttggagctggcttgtaatgtcttatgagtgacaatcgttagtttgaggaattttgtgagacagttgtcaaattgttgctagcttgaaatctgcggcaattggagtatttacaccatagaaatgctataagtgaagacctacctttcccttaagagctagttgttaaacctttaccagcataccactggaccttgtctaaaatttctttgtgttcccagtgtcttgcccagtagatacaagataaatattgccagaatcagatatcaggaagtagtaagaaaaggagttaatatgcaaactaaatcactcgctcaattgaataattgagatcttctgttcatttgttccttggaccttaatcatttgcattttggagaaaattttttctgctttaaaagtctgtaatttcagtttttgtgtcggggagagggaaaaactatttgtctgtagttgctttttgtgacaaagtgaatacccactgggctaagtttcatatctaaagcttgtcactaagaattttcatttttaggggtcaaaaacctattttgaaaatagtgttgtgtgaatgctgtaagtgttgtacatgtctctggtttcagaattaaaagaattcagagttaccttgtgagataaatgttctttgcttcatattcacagtttcacctccatttaaatttatggggaagaataaatgtttcctgactcagaaacaattttgcctccatatttcagtgcaaatatattttgaagttacttttaaatatttatttaaaacctctgtttctgtaactgtatgttaaacgtattcttctgtaatgagaatagactggaacatgtgagggaaaaatatttaaaaaaagatggcagtcatctagacatgtaaaatgccaagaatgtcttagaattgcacaatttagaatttatagagcctttaatcaccttgtctagcaccttgtattagtccattttcatgctgctgataaagacatacctgagattgggcaatttacaaaagaaagaggtttaacggacttacagttccacatgactaaggaggcctcacaatcatggtggaaggcaaagaggagcaagtcacatcttacatggatggcagcagacaaggagagagagcttgtgcagggaaactcccatttttaaaaccatcagatctcatgaggcttactatcacgagaacagcatgggaaagacctgcccccgtgattaaattatttcccaccaggcccctcccacaacatggaataatgggagatacaagatatttgggtggagacacagagccaaaccatatcacaccttaaggtcatggtcatatagctagttatcttgtaaaaccaatgtttcttagttcatacttacaactgcaatttcactttcatttagaaaagaataaatgtttcttaattgaacaact

SEQ ID NO: 11568 - DNA, 990 bp, Homo sapiens
ctggaccatgatctagttcaatgatttggctcctattgaagatggcttctaagaaaacaagatgcacagaggacacagaaggacttggcagcagggtgatgacctgatcatttgttgatgggatggtggcttacctcttattcacagcttacacttatgcatgccaaatgtaaggccatgaaaatcagtatttcaaataacttaaaaaatgctttactactaaaatgtaaaaaattaatgtgctcacctcggcagcacatatactaaaaattaataagacccagcttgaaaattgagcctgataacaagattacaaattcacaatacctaatacttagggaaatataaaaatttaagcatgaatgtgttctggaacacgttagaagaaaaataaaagccaatgagtttttttttaattctcctttctcaccaatgggcaatagcccataattgaaataaatttctgattgaaaggtataggaaacattaaaatgcattactaagagaagtaatataattttcttacaaagtatttttcccaaagatagctttactatttcaaaaattgtcaaattaatgcatgctccttacaacaaacaaatatcaaaaagagtttaggaattctactagccagagatagtcacttggagaaactttctatatatccttctaaatatttttctgggcatgcttatgtatgtacatcagttgtttctttttattttgaaccaaaaatgtggtttcttttgtacacattacttaaactttctttccagtcaacaatatattgtggatttattttcactgttatatttaactatatataaatacgcatatattgtaattttaatgtctgcttagcaccccactgataaccaaatcacagtttatttaaataattttaatgacttttcaaaaacaatttattgatgcaaaaagcaaggttgagatgacaatgtttctttcaataattaaaaaatactgcttcac

SEQ ID NO: 11569 - DNA, 2552 bp, Homo sapiens
tctcgtgagactttgccccatggcagaactctgctggaatcctattgagaaggtagacattgtgctttattaatatagtcgctcttcagccatgcctttgctgcagctgaaatggaagtcagaagtgagtgacctgttttcccagcaactcaccctcttccatctccaaacgcctgaagcttaaccaagagtgagaggatatgtcatgttcacactcaatgcaattcgtagtggttttcttgcttatgtaagaagtacatattagtctgccatctttaaaaaaaaatacagtattttcatttaaattctctgatggagggacaacaatggtttcaactgtatgcccatgcctgatcctcttatttgaacatctatcaacattgtaaactctttgccaaaatcctggggctttgctgcattccctaagataattacaggaaaaagaaaatgtaaaagtgctaacaaggctgccaagtaatggagaagtatggttagtcttcatattgaaattctgttgcttattttcatggaaggaaacagaatactttgcacaggaaccacattttcaatcctccttcactgtcttcctaccatgttcagcccagactcctgccacatggaccaggatgaagagggatcaaagagataattagccaaaaacccagtagcctagaagatacaaaactccactggcctctaaaattatattagccaagagtggtttcatttgagtgccttcgtgtgtatgtccatcaaactggaaccaaactgttttgtaagtaaacaggcagcctaagcccaaccctactttctaattccagttattctctttttcatctggggatttacctgttcatttaatctgcctgttttgatctgttttgaaaaagataaagagcctcaaatcagaccagcactgattaattaaccctgctcctaccaatcttttttaaagcagttgaagcagaatgtataggtgtcagagaagaaacctagtcagccagacgtgctctgtattcagcaatagtttgtgaatgaataaattactaatcctccttgtcgcttgaaaccttcccacactccctgctccaggagggaaaaacagatgttgttgacagatagagtgataggcaaattctgtgtggactttagtcccaaaaggaaactttagttcacttgcagtatgcttatccttgactgcacatgagaatgccttgtgcagagttatttggagattatgtctttttcttaaacaccatggctgtcacacttcagttcaattaaatcagaatgtctgaggagtgagacacaggcatcaacactctcaaatgattcacatgttcagccaaagttgagaaccatcgagcctgtggaagttctttctcatggctcagaatcttaggtaggtgcttaactcttgtggtggccagcctccaagatgagccccagtgttcttgcctcctactattcacatctttatgtggtcccctccaatgctgaatacagatgatttgtgtaacctgaggccaggattaaggggaggcaatcaatgcacctagggaaaaaatttaaggaggtattcacactcagggtcatgcacttgcacaatgttgagaatgagtaccactctcaccattggtatagccaaaaaagcttggaagtgaccaaggctaggtcacaaaatacactgtggcttcttctttgatctctctttgaccatactgacactgggaaaagcccattcccatgccatgaagacaccaaggcagccctattgagaaatctacctgtcgtggccgggcgcagtggctcacgcctgtaatcccagcactttgggaggccgaggtgggtggatcacgaggtcaggagatcgagaccatcctggctaacacagtgaaaccccgtctctactaaaaatacaaaaaattagccgggtgtggtgtcgggcacctgtagtcccagctactcaggaggctgaggcaggagaagggtgggaacccgggaggcagagcttgcagtgagccgagattgtgccactgcacactccaatctgggtgaaagaccgagactccgcctcaaaaaaaaaaaaaaaagaaagaaagaaagaaagaaagaaatctacctgtcaaggaactaaggtattttgctaacaagcaccaacttgccagccatgtaagggagccatcttggaagcagatcctccagcctccagtcaagtcttcagataattgcaacttcagttgatcttttgaccaagacctcaagagagccagaactacccagctaagccttttactaaatttctgaacttctaacactattagataataagtgcttattgtttaacaccattaattttgagtataatttgttacatagcgacagataactatacagctcaacaactagaaaaataaactgtttacctgccttaattatttatctttagttccttattagttctcaagaaacaaatgctagcttcatatgtatggctgttgctttgcttcatgtgtatggctatttgtatttaacaagacttaatcatcagt

SEQ ID NO: 11570 - DNA, 578 bp, Homo sapiens
tggaggaggaggataccaagagagaggtgcccaaggaagatggagttggtgatgtgcaacatttcggtgagaactttattgtcagaggttttcagtacatatttacaagttcttactccatcatacatattgggaatgagctggcattttcaagcatatacccaggagtccagcaatcattggggaagagagcctgaggctggcaatccttgcccagaactttggtcacctgcttgttcacaggccaccatatcttacttcactgaagtcatatgctgaggttttatttagtccagatgctgaaggatgggaagacccaagcagctggtgtggaggtctttcccagtgactcatcagtcattcagaaatcaaagcctgcacaagaaagggtgggatgggatgtatagagaaagacaccaagcctttagactccagcagagtagctgatattgacatatctgaggagggaggaggctccaatacgactactcccaattcacagggtttgtggttctggatgaaatctttgcaaagggtttccctggcactcaaacagaataaataggcttataaagtgt

SEQ ID NO: 11571 - DNA, 1709 bp, Homo sapiens
tgaactgaggcaacagtccacttcagggcagacggcaataatctcttacaagaatgaagccatattcaaccccagatgagaaaacccaacagatccatcccttgagctgtaaacactcagaactcctttcatatcaagacaagttatttgtaaaaaataaagaaggggttttaatacaaaccttcataataaatagcaaaataattgaagcttccatgagaaagaaaacactattttgataaattggatcacttataggaacatttctaataaactgtttttaatcagttgtcggatttggtgaaataaactaaacaggttacagaatatctgtatgtacttggaaatacagaataactttatcacccaaatcactggcattgacattattggtaatcaactggctttttttaaaaaaggtagcattttgttgacagttattttgtaaacataagcaaataagggcttggagggaaatacattttaggaggagttttgccttaattttttaagtactgcaccaaaaccaaagagctgacctgacttctgtggaacagtagtaactgcaagtgatgaactgcatttcgtattgttctgtatatttcaaaatggtattttgatgccatcaaatgcccaggaaattgactttgcagtgtcaccactggtgtaagctactatatatgtatatatatatgtagtaaaccactttttgtaaaagaagaaagagcaaaaagctgtgtgttttagaaaaaaaagccaggttacgcaacaggcattctgtcatgttgaacaattttaaataaagagaatatctggtgttaggagcttgttttgctgaagatttctccattcctggtgctgagaataaaggcaaccagtagccaatgtcctttagattgtctgatttctttttgttgtggagcacacctgctaactgctccctcaacataactatgaaatcatagctctgttttcaccaaagaacagaccaattaacatacttatttgcagaagtggtgtagttctataaaacggcaaatgaagttcaacttaatattctctataatgtattattttattttattttttacaattagccttttttttagttaatttttgtcaaatgaaacgacttcaggcaagtctcttttataatggtttttcaagtgccatttattctagtttatcatgttttgcatgtttgaaagtatgaatgtgctctttcctaaaacatggcaaatgaatagatgtagagaataacaatattacttacaagatgaaatgattagattagaagtgtccctttattaaactttgtcagcctgactgggtacaattcttttgttaatttgcagtgtggtttgtatacacgtatacgtgttatcaataataagattttgcaactggatgacacaagattttacttgaacagtgaaggacaaaaatcatgattgtggaagatatttttaaaatctgattttgcagcgatcacttttaaaccctgtagtgatgtaagactaaaatataattgctaagattttgttggttaatgtaaagatatgacttttctgcactgtactctcttcataggattgtaaaggtgttctaatccaattgcatgatgtagtaagcctcttaaatatgtgtgttaaatatattgagtttggattaaaatgttgacatgatttcacatttgaaaataaactcat

SEQ ID NO: 11572 - DNA, 1638 bp, Homo sapiens
tatcacatgtttagttggtatgtaaactaatgtatccagaagattggaagagggataagaaatgaaagatcctgatactttaggtttttccctttcctctattttgtaaatataagatgagtattatttaatgatgtatttgcataagtaatgcaaattgtgaagaaggaccagctgctgtttagaaaattttctccttccttctgtccttgattttttttcattaaagtatttcctttttttaattcaagaaaagtttacctttcttatgcttatgttagctatgccagctcttaattgcatccttttctaattaggattattaataaagcgtgaatattttgttttttattatagacagaaatttgtaacattacttctgatttgaaaatgcaattcacaaaatatagggaaatttttattgaagtaaatttgaaatgatggagaaatttcagaagcataataaagttcacaataaggataatactttatataatgtataaagtatatataatataatatatatgttatataaactgcacattatattcaaacttaaaattgagctttttttttaaaggcccaaaattgtacagtgatacaaggagctatttctaaaatttggcttatgtataatatatttaaatggggaatttcatctaaaacaatgatgtagtatttttaatattctgattggtaaaattaaagaggaaattaatctttatatattatttcttgcagaaacattcattattttattaatattgccctaagtacaactaggcaagtgattgccacctaaatcagaagacgttctaaagtcagtaagaaagtgtgaaatgctagtataaaggttattttttttctttcctaaataactaaagtgaggtgtagattgagccttgatattatttagttaatgttttttattaattaattttggctggactttatttagcttgattaggttattatctgtcaaaccttttaagttgacaacatgactcatatatatacatgtgtataagatgagcatgtgtcgaagacttattcgactcattaatgaggaaaccagcagatagtaaacctggttcaaagtacaattcaagaaactgagtatttatgggcattgaagaaaaaatgttgagataaaattgctgtgcagaaaaaagtgttaatgaagccgacctgactacttaaccttagagacctgctttacaaggttggcccttgattggcatctgggaacttggagttcagggggcttccaccattcccagaactgatcaaagtagcttactatatctaaactgtaaaacaatatagtttctcctgaacacctgctttccttctgggagtctggaattttggtatgtgccaggcagagactacctttgtgaccagctcccagtaaaaaccccaggcactcagtctctaacaagcttttctggttgacagtgtttcacaagtgctgttacaactggttgctgggagaattaagctcatcctctgtgattccactggcggaggattcttggaagcttgcacttagtttcccctgacttcaccccatgtgtcttttttcctttgctgattttgttttgtatcctttcactgtaataaatcatggccgtgagc

SEQ ID NO: 11573 - DNA, 336 bp, Homo sapiens
gacgcggcatcctgcccctggtagagaggacgaatgttccacaccatggtctctacgaaaaagaaatagttagtcaccttctgaccttctcctctttctcaaagccttctgtccctggtttttgcaagtgctgcatttccgccgagaatccgcgttgcctactgctgccacctcctgttcatttagaactatgcaaagactccgcttccgttttcctgagctcctcgggccccagagtctctgtttgattatttatttatttatttatttatttgccaaaaattctcctcttcaacttatagaatgcacctaataaagtaattagtcttgtgtctt

SEQ ID NO: 11574 - DNA, 1550 bp, Homo sapiens
agtgatggaggctggtctctgtctgaaagcagtgctctaccaagtcctggagatgaagggaattcactctgttttgcagaaaagattctgtggattaatacagaagcaccagcaacaccagaggggtggagactcctttctctcccgattctacagtctggctctaagcccagtaaaacagctcccgagcactgcttcagctgggtccagtcttgacaaaggcaggaagccagctagggtgggggcgatagggtcagcgggtatgtcccactgttggaggtcactggtattctgtttgtttttgttttgtttcgttttgttttttgagacagggtctcgttctgtcgcttagctggagtgcggtggcgtgatcatggcactgctattcttgaagcactccacccacctgggctactttttctttagtgcagaggtgcactgtcttcttttaggtgggatcgcgtaagcatgagctggtagagcacggagaggcaggcagccaggttacgaagactaagccaattattcactgaagtcatcctcctcccccccaccattcgatttgatctacctctaagccaggctgtgaagaaaaggaaggcactttagaagacctcagcagtgtggttctgtgtctacttccatgacctgtacctgagtatcttagccagccagccttaggaacaccaccaaggttactttgaaatctatgtatatagctagttacagacgggagctatgtgtttcttcattattttgcagctcctcgttgttcctgtgattcctgaacacctttttggaaatatgggtctctgtgagttttgagcacactactatcactttggatagtcactccatttatatttttataaacttccattagagaatcattaaggctgtttaatatctgctctggatattacgcattggctttttgttgcctagtgctacaaaccttcctgtgggactcagtgtcttcaggcaatgattgtgtatcctgttacagatggttgtgatacaagaagaaccactcttctttgaaaataaactcttggaagcttttgccagctatttggggggtaggaggaatattagcaactgtattggttgtctacagatacagaattgcctgttgtgagggaactgattgttttgttgggaaaagaaatttaccaggagaaagagttttgtgctgtattgtgagagatctcgcctctcagttaaatgagccctgggttaaagtcagtgtgaagggcagctgtgtgcgggcacgagccagagtgtctgcctcagactagatttgacttgagttctttatgacccaggactctggataatgtgaatttgctttcctatttaactagaagatacatgtactatagatcattgtctcattttagtgattgttccttaaactagtgaaactagtggatttctcttcttcctctttattttctgcatgttaaatgtgaaccttagtgtatttgtattttgtagaaaataatgaaaaattttaatggagaatgatttaaaaacatttacaatacatt

SEQ ID NO: 11575 - DNA, 1259 bp, Homo sapiens
ataagtcacacagcaccctgaaagtgattccctggtctacttgaatttgacacaagagaaaagcaggaggaaaaggggccattctccaaaggacctgaaagagcaaaagaggtgggagcgaaagccttaaggatcccacgactttttactgccatctgagctactcagtgtttgaatcccaagaggaagtcagtttacctctcaggtctgttgtaggacttgattttgtaaagcaatgccatgttatgtggttgaaagggcactggacttagttagtatcaggagcactgagctcacagactgacttgggctcctactggtggggacctctgttagtcactttacctcatccaaagtataaaggaattggaccaaataatttaccacatagctctaaaacttaatttaaaatgtaattccagaaaaaaaaagggaataagcaaagggggaagaattgaaagagagagagaagaaagaatacagagagcttaccttttgcctttctgttgatgttacatctcttcttcctatgttcttaggtctatgagtctgtttccccatcatttggtatctagtccagttcctgcttactgctttgctaatagctggccttgctagaatccttggtttcactgctgttcttcatgtgcttctatgagatttactccaacacaaataggactgaatttattgtgaagtaacattggcaatcttaacttattcatttaacttatttttatagctagataaatattgttagtcttagacaatagctcacattttttgagaagcatgccctccctgtccatttgtcttataacatgacccagccctattttacgtcattctaaattcagcctcatataatgaaaatacattatgaaaacagatgtttaggagatttcctgtatagcagtcagccaattcatatgctttgtctctgctggcttctttttccatgcgttaacttttcccaatagcagaggaggcaaatatgagcatacaatccctttgttctaaagatattgttccagctagtggaatgatgttgaatctttaataaccataattagttgctttttcagtatcttctgctttgtctgtgtctatccagtggcctaggaattaaagtgtaagttgttttcgctgttaaattggatatttatatatatatatagcaagattttcatgtgttatttaattctgtattgtttcttatatttgtagtaaaatattgaacaattaaaagtgttgactcc

SEQ ID NO: 11576 - DNA, 1419 bp, Homo sapiens
ctggtacccacatagtttgcagctctcttgaaccttattttcacattttcagtgtttgtaatatttatcttttcactttgataaaccagaaatgtttctaaatcctaatattctttgcatatatctagctactccctaaatggttccatccaaggcttagagtacccaaaggctaagaaattctaaagaactgatacaggagtaacaatatgaagaattcattaatatctcagtacttgataaatcagaaagttatatgtgcagattattttccttggccttcaagcttccaaaaaacttgtaataatcatgttagctatagcttgtatatacacatagagatcaatttgccaaatattcacaatcatgtagttctagtttacatgccaaagtcttccctttttaacattataaaagctaggttgtctcttgaattttgaggccctagagatagtcattttgcaagtaaagagcaacgggaccctttctaaaaacgttggttgaaggacctaaatacctggccataccatagatttgggatgatgtagtctgtgctaaatattttgctgaagaagcagtttctcagacacaacatctcagaattttaatttttagaaattcatgggaaattggatttttgtaataatcttttgatgttttaaacattggttccctagtcaccatagttaccacttgtattttaagtcatttaaacaagccacggtggggcttttttctcctcagtttgaggagaaaaatcttgatgtcattactcctgaattattacattttggagaataagagggcattttattttattagttactaattcaagctgtgactattgtatatctttccaagagttgaaatgctggcttcagaatcataccagattgtcagtgaagctgatgcctaggaacttttaaagggatcctttcaaaaggatcacttagcaaacacatgttgacttttaactgatgtatgaatattaatactctaaaaatagaaagaccagtaatatataagtcactttacagtgctacttcacacttaaaagtgcatggtatttttcatggtattttgcatgcagccagttaactctcgtagatagagaagtcaggtgatagatgatattaaaaattagcaaacaaaagtgacttgctcagggtcatgcagctgggtgatgatagaagagtgggctttaactggcaggcctgtatgtttacagactaccatactgtaaatatgagctttatggtgtcattctcagaaacttacacatttctgctctcctttctcctaagtttcatgcagatgaatataaggtaatatactattatataattcatttgtgatatccacaataatatgactggcaagaattggtggaaatttgtaattaaaataattattaaacct

SEQ ID NO: 11577 - DNA, 454 bp, Homo sapiens
tggttcccggtttagctgaagattcaaaaaaaaaaaaaaaagctttatgctaactggagttaaatacctagaagaatttcaacattgttttaaatgttgtgcatctgtaacttcaggaggatcacttgagctttaaaacctgtgccttctcgaaacaagaatttgtgcctgaggtgaaaaaagtttgtaagttattgaattatggtgttcattagaacagctactagctgattcccctattttaacaaactgacaagagcacatccataaaatgaaaacctgttacaactatgtacagaagggtttgacgttttattgggcttttgtcttttaaagaatatgtctactatgggtattttttttttaaatgttaaaatgggctaggtaaaagggggctgcttttctgttaagcatcgataggtaagttgatggataaaagttactatgtaagcct

SEQ ID NO: 11578 - DNA, 594 bp, Homo sapiens
gcagaagctgatatcccagaaagactatatattgttttttttttaaaaaaaaaaagaagaaaaaagagacagagaaaattggtatttatttttctattatagccatatttatatatttatgcacttgtaaataaatgtatatgttttataattctggagagacataaggagtcctacccgttgaggttggagagggaaaataaagaagctgccacctaacaggagtcacccaggaaagcaccgcacaggctggcgcgggacagactcctaacctggggcctctgcagtggcaggcgaggctgcaggaggcccacagataagctggcaagaggaaggatcccaggcacatggttcatcacgagcatgagggaacagcaaggggcacggtatcacagcctggagacacccacacagatggctggatccggtgctacgggaaacattttcctaagatgcccatgagaacagaccaagatgtgtacagcactatgagcattaaaaaaccttccagaatcaataatccgtggcaacatatctctgtaaaaacaaacactgtaacttctaaataaatgtttagtcttccctgtaaccttc

SEQ ID NO: 11579 - DNA, 1866 bp, Homo sapiens
acctccaacattaagagaggggagggagcgatcaatcttggtgctgtttcacaaaaattacagtgaccacagcaaagtaaccactgccagatgctccactcaccctctgtagagccaactctgcattcacacaggaaggagaggggctgcgggagatttaaacctgcaagaaaggaggcagaaggggagccatgttttgaggacagacgcaaacctgaggagctgagaaacacttgctccttccatctgcagctttgggagtgcaacagggataggcactgcatccaagtcaactcaccatcttggggtccctcccaccctcacggagacttgccagcaatggcagaatgctgctgcacacttccctccagttgtcaccctgcccagaaaggccagcagcttggacttcctgcccagaaactgtgttggcccccttcacacctctgcaacacctgctgctccagcaagaggatgtgattctttagaatatggcggggaggtgaccccaggccctgccctactgggatagatgttttaatggcaccagctagtcacctcccagaagaaactctgtatatttcccccaggtttctgatgccatcagaagggctcaggagtggggtttgtcacacattcctcttaacaagtaactgtcactgggaccgagtcctgggtgcttacatattccttcgtgtcttcatctcactgacctgtgtggacctcatcactctgactctgccttcttggaaaggccctgtcactccacagatgtctggccagcttcaaggcagaaggaaaaacaggaaaagctcttttaacagcagcaggaacaagagaaatgactaaccatactaaaagactggtaacagcagcagcagccagacaggcctcaccttaaggacttgggctgccagagcaaattcagcagagcttatttggcctcccattcacacagctcagttctgtgcccacatcacctttggggaagaaatcagcattctaatcagggacactacttcaggagtcctccacagcgagtccgtcatctgtcactttatgtagatcagggttctagacttcttccctgaggttctcagaagcagctctcaggatgaacgtattgtcctcttcccctcttcttgcaaagtgcacagctaatctaatgttgtctctcggttgcacctgacattctctccccagtaaggtgttggcaagctcagcatctgggttccactctcacactgtctggcagctctgtgtctgagaagttctacattgaccaggcccccttgttgcctggagtatgacgtaatcagaaaatagacgtataaatgtgcacatgcgtatgtatttgcttgtgaaattaaagtcacctcttgcctctgctttcctgatcattcgttagagaaatggatcaggcatttttttaaattattattctttctctaaactatttgcattgtgttcaaaaacccattttagaagtttgaacagcaagcttttcctgattttaaaaacacaaagttgctttcaatgaaatattttgtgatttttttaaagtccccaaatgtgtacttagccttctgttattccttattctttaagcagtgttggcttccattgaccatatgaaggccaccaattaaatggttgtgttaatccaacatgtaaaaaactttttggcagggcacagtggctcacgcctgtaatcccaacactttgggaggctgaggcaggaggatcacttgagcccaggagattgacgccgcagtgaactatgattgtgcccctgcactccagcctggatgacagagtgagaccccatctcttaaaaaataaaaaaaaataaaaatttgaacctgtttc

SEQ ID NO: 11580 - DNA, 2627 bp, Homo sapiens
aagccttgaagattacaactgtgatttccttttcctcagcaagctcctatgtgtatattttcctgaatttctcatctcaaaccctttgcttctttattgtgcagctttgagactagtgcctatgtgtgttatttgtttccctgtttttttggtaggtcttatataaaacaaacattcctttgttctagtgttgtgaagggcctccctcttcctttatctgaagtggtgaatatagtaaatatacattctggttacactactgtaaacttgtatgtagggtgatgaccctctttgtcctaggtgtaccctttcctcatctctattaaattgtaaacaggactactgcatgtactctctttgcagtgaatttggaatggaaggccaggtttctataacttttgaacaggtactttgtgaaatgactcaatttctattgtggtaagctcattggcagcttagcattttgcaaaggaattgctttgcaggaaatatttaattttcaaaaacataatgattaatgttccaattatgcatcacttcccccagtataaatcaggaatgtttgtgagaaaccattgggaactatactctttttatttttattttttattttttttattattttttttttggggacggagtgtccctcttgttgcccaggctggagtgcaatggcgtgatcttggctcactgcagccttcgcctcccgggttcaagtgattctcctgcctcagcctcccgagtagctgggattacaggcatgctccaccatgcccagctaattttgtatttttagtagaaacggggtttcaccatattggtcaggctggtctcgaactccagacctcaggtgatccgcccacctcggcctcccaaactgctgggattacaggcgtgagccaccgcgcctggccagggactatactctttttaaaatagacatttgtggggctcacacaatatatgaaatagtaccctctaaaaaagagaaaaaaaaaatcaggcggtcaaacttagagcaacattgtcttattaaagcatagtttatttcactagaaaaaatttaatatcaaggactattacatacttcattactaggaagttctttttaaaatgacacttaaaacaatcactgaaaacttgatccacatcacaccctgtttattttccttaaacatcttggaagcctaagcttctgagaatcatgtggcaagtgtgatgggcagtaaaataccagagaagatgtttagtagcaattaaaggctgtttgcacctttaaggaccagctgggctgtagtgattcctggggccagagtggcattatgtttttacaaaataatgacatatgtcacatgtttgcatgtttgtttgcttgttgaatttttgaacagccagttgaccaatcatagaaagtattactttctttcatatggtttttggttcactggcttaagaggtttctcagaatatctatggccacagcagcataccagtttccatcctaataggaatgaaattaattttgtatctactgataacagaatctgggtcacatgaaaaaaaatcattttatccgtcttttaagtatatgtttaaaataataatttatgtgtctgcatattgcagaacagctctgagagcaacagtttcccattaactctttctgaccaatagtgctggcaccgttgcttcctctttgggaagaggaaagggtgtgtgaacatggctaacaatcttcaaatacccaaattgtgatagcataaataaagtatttattttatgcctcagtatattattatttaattttttaggtaatgcctatctcttggtctattaaggaaagaagcaatcagtagagaattcaggatagttttgtttaaattcttgcagattacatgtttttacagtggcctgctattgaggaaaggtattcttctatacaacttgttttaacctttgagaacattgacagaaattatgcaatggtttgttgagatacggacttgatggtgctgtttaatcagtttgcttccaaagtggcctactcaagaggccctaagactggtagaaattaaaaggatttcaaaaactttctattcctttcttaaacctaccagcaaactaggattgtgatagcaatgaatggtatgatgaagaaagtttgaccaaatttgtttttttgttgttgttgttgttttgaatttgaaatcattcttattccctttaagaatgtttatgtatgagtgtgaagatgctagcgaacctatgctcagatattcatcgtaagtctcccttcacctgttacagagtttcagatcggtcactgatagtatgtatttctttagtaagaatgtgttaaaattacaatgatcttttaaaaagatgatgcagttctgtatttattgtgctgtgtctggtcctaagtggagccaattaaacaagtttcatatgtatttttccagtgttgaatctcacacactgtactttgaaaatttccttccatcctgaataacgaatagaagaggccatatatattgcctccttatccttgagatttcactacctttatgttaaaagttgtgtataattgttaaaatctgtgaaagaataaaaagtggatttaaatt

SEQ ID NO: 11581 - DNA, 1696 bp, Homo sapiens
tgatctgaaggactaaaaccgcagagatacttggaacttaaagaaaatacctggaagaaaaccagacgaatgaaggattttggcatagaacatttctatgttttttcattattgagatttctaatatgaacatttctttcagtaacatttatttgataattagtttctgctggccttaataatccatcctttcacttcttatagatatttttaagctgtgaatttcttcagtgaaccatgaaatatattatagaactgaatttctctgatacaaaaagaaaatgacacaccctgaattgagtggtatggtctcatttctacagtgaagtctgatgctttgttagcacagaatccgtacatgtccaataggtcgcttttgtaactgagataagaccaagaggataaacaggacaatataagaagaaacctctatgtcattactgattttaaaggttctgttttcaggcatataacatttccaggtttgtgtactgtaaagattataatgtcttcatttatttagcatgcaaatttaatagtcaaactttttgaatctgcatgttgatgatgattatcagaaagggtcttctgccatgctgtatctttatgaaagaaatagttgttttttcttaaggtaactatcagaggtgggattatcttgcctcctcacttagaataccaacagtcaaaaggaagaaccatcctctgagttttaaaaaccagaaggttatgttaaaatctgggcatttagtgacagatcaaatgcatacttgaactaagattggcttcagcttagcagtctttcatggtggaagtgacacatctggttgaaaataatttgtgtattttcagtaaccatgtatggcttccttctttatgtatgtgtgtgacttgttttgattggtaagttataagccagacatagattttagctctttaataaaaacttcaggggcacgtatgtcccagtacaagtgtactgactatcaagttttaactcagatgcaagctttggctctttcataaaaagtttttatgcatatgtgtctccatacaagtggctcattaaaataagaactttgtaaactgacttaaaatcagatattttttcaagagttagggaaagttgaagtgttttactgttttgtctcttgagccctttctctggggaaaaaatacatatccatctatctatctatatataaactgtgtatacattcttactgtttgaacaactattgcctttaattaaatgtttcatttttctccagagtccccaaagccacatggcattattatagtcatttttgagatgcctgtagagaatgaaagtattgactccgttagagggaaaatgggtttctctgggtgaattccaacgaagcatacctaggggtaacagtgaacctacctgggtttgttttgttttggtaaggatttatgtagtgtctggctgtaagcaagaatgagtggattataaacttgaagatttctctgttaaagtcacaaaaatgatcgacaaacaatatttttgtgatgtttatttaaacgttgtattttataacatacttcaaggaagagtatcgaagtaagttgctttataaattaagactaaattcgtatggatgcagaattcaattaataaaatttgagcctgttacgtaaattgaatattaataaaattgaaaatttctga

SEQ ID NO: 11582 - DNA, 2245 bp, Homo sapiens
gccaactccgcttccttcccatggataggaagggactctgtgtattattcaggtttattggcacgaagatacttgttttaagttccttgagaacccatgatggacagttgacagaatgcttaaacctgtcaaaagatgagtgatcttgtgtgggaaaagccttcccaggcgtctgtaccgaaaggagcagcaaacaaggggctaatccatgagcagtgttctgtaggctctgtgacatctttggtttataggattttggagccttttatgatctggaactatttgaggggtttcattataggccttggttctctccaggggccagatgagtttattgtggaatctttgaaaggacaaggcctctgtgaatgaatcagtcccagggaagcatttggtggtggcggcagtggaggattgcccggtgaacctataaatcagcagtctcttgggcagaggagcaagcccctcgaacatgatttcaaacaagcaggtcctcttctctcatctcacgtccttagtctctgttaatgaacatactggatgtggagtttaataaattacctactatcatctggccacttagattattatcacaccactgtggactgttcctggggggagaagaacagaccgatttgaaagattcaagggagaaagattaaggatcaggattgcatgaaagaagaaaatccttcaatatttaaaatgtttcttacaatacccacggagcacttttatggttccagccgagcgttcctgaaatgaactgaccattaacagcgcctctttgataggttaccctgatgctgctaaagtaaagccttaagtgtgtttttgggacaacgtgctgcttattccacctcagccacatatgtgtttgtgtttaggatattgtaaatctttgctaagtagtgttttccttggtgaatgaagtcattgttgtcttcaagtgtaccatctgcctagcaaaaaattgctacaaactttctcttatgcaatagtccttggtacttctaatatttttagcaagagacaattttctgtactagaatcttccactgccagaaaacacagtgccagtaaggttctacataccactgaccatctgcttaatagacatgtatttcctttgagtaggacattagcttttgattataaagctcaactagtataagcaaaaatataacatctagaagcacagttttagccaggatgtttaaaaattacagttttgtgagacttaagggtctttttaacctaggtaagtttatatgacctaacttaattgtagccatattctggtaccttccattttgaaaagtagaggttgcttaagcaagcaatggataataagagacttttcctgaggcacctgtttggaatctggttttctcagcggcagcttgacatgtgcacccttttgtattaaacactgcaagggtgatgcaggggagcaggaaagccatcctaaactcactactgagtacgattcagtatgttcctgtggatgtctgctgtgactaatataaatttcttgcagaatcagctacacttaattatgttgctgatagacaagcatccacgcttcagctggcactaagtgttttcattgtaggatcagcagcaggttaaagactgaacggttagtgaagacaaatgtcttaagaggctgcgatgtctaggttgggcttgtgacttcttagtggcctagccttcttgatggcaccttgaaagtgaacttctagaaatctacatttaaaaggcaaagctttaaaagcagagctagtctattctagttactgatgcaactaaaattctgtatttcttaagatggagccactgacgagatgtcacagtatagagcctgcagtctcaactcattgtgatcctaatggtctgggtgattggatggtttgagttgttagggattttgagtttttcattttattgcatatctgggttggatgttagactaaaggaaacccaggaatatttacctggtgttacatttaatatttaatgtaactggtctagcaacattaagggggatttctgaagccaactccggaggctgtgggctgcacattttgcactgtttttatatacttgtattcatatcctcttatcacctcagactcagacacaaggccttttacatggaaattttacaaattacttccatttatgtaaaataacgtcctgtgaccaagttgtttaaatggaaaataaagtgctttctttaagg

SEQ ID NO: 11583 - DNA, 2515 bp, Homo sapiens
gatcttgcaaatacaagtctcactcttcacactgagcctgtaccactgttgtaacatgggaagacgtgaagaagaaataatctgagctttaattatttatatttggatataaggtctgcttaaataaagaatctttgtaccaaactgcccacatgagggtgaagagatttcctcaaaagacttaaatgacctggattgatcagagagaattgaactgtgacctttaagacttctagactaattcttttagttgatagagattcatttagtcaaagacaaaagctttaactgtgagggcacagccttgaagtgggagtgatgagattctgagggacccatgaattggattgaggcttgaggggaaatggtgtgagacgaatgggctctggacatatgcctgttgatttgagaagaaatctggctggtttgagggtttcctttagttcaccctcatactctcaggagactcttctggatacttttgtcttccaccctgccctggcagtgcagccaatcagaaatggctcttgtgacttaactgggcttggatatccctggaatgtggggcttgaacattgctcctgtgatgatcatctgtcccaggtcacactccttcatttgaccacatggcctatttgcaacttctttttagagccaatgtaattgcctgttaggagccagaagtttgcccagctgctttcttctggttgtacagatccattgtggtctgccttccaggctcattaatagtctaactacgtaataactgaagacctatctcttgtgaagattcattctcaatgtgttcacttggacagagccctgcctggcctaacgattagagggttagtctccatcctgctcagatatgactcctgggcaattcacttaacttctccatggctgcttcctgctgaataaatagggacaggcataatggataggaatgaatgaacttttaagatactgtctagctctaaaattggaagaacaaaaagttttagattagagtcatagccttaatagccctagttgtcatcctgggagacaggcaacagtagagatatttgagagcctaaagagaggtttggcctgtgggtttttaagtggttattgaattggtatcaggagatcctgaggctggtaggggaaggtaattctttctaagttacctctgtatttttcaagttttctataaggaatacacatacacccacatgcacacaccatagtttttatacaaacagcaataacaaaaccaaaaagatgcccctttttttgtagggataagaaatacatttgttttatacttctatgctatattttgctattcaaaatttagtgggcattacttaacattgtttctaattattttgtggctgctgtatgttttatgtgttgggagcccattgtattaggccgttcttggattgctataaagaaatacctgagactgggtaatttggttttttggttttttggggttttttttgagacggagccttgctctgtcgcccaggctggagtgcagtggcgcgatctcggctctatgcaacctccacctcctgggttcatgccattctcctgcctcagcctcccgagtagctgggactacaggcgcccgccaccatgcctggctaattttttatatttttagtagagatggggtttcaccgtatgagccaggatggtctcgatctcctgacctcatgatccacaagactgggtaatctgtaaagaaaagaggtttaattggctcatggctctgcaggctttacaggaagcatggtactggcatctgcttggtttctggggaggcctccggaagcttatagtcatgacagaaggtgaagggggagcaggcacatcacatgacaaaagcaggaacaagactcagagcaagaagtcacttatcaccaaggggatggcccaggccattcatgagggatccacctttgtgctccaaacacctcccaccaggccccacctccagtattggggattacatttcaacttgaggtttgggcgggaacaaatagtcaaattatattacccatctacatggttttctttttcttagtatgggagtgtccatgaataaattcatgggcatcctcataactcttccatgaatggcaaggggtacttatggaaaacagttttccaaagatctgattgttttgaaatgtgttagattggacttgttcaaatgttcatatttttgttctatgctaaatgcatcgttaggggagtagtggtaaatattccagaatccatatgaaattcatgagtttatttatgtctaaaacactgaaaactgtgtccaatatcgttcagtttcctgggtctttttcttattagcacatttgagaaaaatattcctttcctttattgtagtaaatctattaaaggcaatagccaataaaacatttttaattttaaaaatttactgtgtttggctttctgtaaatgtagtaggtctgttaaacaaaatattaaatttccatagtaccag

SEQ ID NO: 11584 - DNA, 1370 bp, Homo sapiens
caaccagaggcatcttctggaagatacacttttgtctttgctattatagatgaatatataagcagctgtactctccatcagtgctgcgtgtgtgtgtgtgtgtgtatgtgtgtgtgtgttcagttgagtgaataaatgtcatcctcttctccatcttcatttccttggccttttcgttctattccattttgcattatggcaggcctagggtgagtaacgtggatcttgatcataaatgcaaaattaaaaaatatcttgacctggttttaaatctggcagtttgagcagatcctatgtctctgagagacacattcctcataatggccagcattttgggctacaaggttttgtggttgatgatgaggatggcatgactgcagagccatcctcatctcattttttcacgtcattttcagtaactttcactcattcaaaggcaggttataagtaagtcctggtagcagcctctatggggagatttgagagtgactaaatcttggtatctgccctcaagaacttacagttaaatggggagacaatgttgtcatgaaaaggtattatagtaaggagagaaggagacatacacaggccttcaggaagagacgacagtttggggtgaggtagttggcataggcttatctgtgatgaagtggcctgggagcaccaaggggatgttgaggctagtctgggaggagcaggagttttgtctagggaacttgtaggaaattcttggagctgaaagtcccacaaagaaggccctggcaccaagggagtcagcaaacttcagattttattctctgggcaggcatttcaagtttccttttgctgtgacatactcatccattagacagcctgatacaggcctgtagcctcttccggccgtgtgtgctggggaagccccaggaaacgcacatgcccacacagggagccaagtcgtagcatttgggccttgatctaccttttctgcatcaatacactcttgagcctttgaaaaaagaacgtttcccactaaaaagaaaatgtggatttttaaaatagggactcttcctaggggaaaaaggggggctgggagtgatagagggtttaaaaaataaacaccttcaaactaacttcttcgaacccttttattcactccctgacgactttgtgctggggttggggtaactgaaccgcttatttctgtttaattgcattcaggctggatcttagaagacttttatccttccaccatctctctcagaggaatgagcggggaggttggatttactggtgactgattttctttcatgggccaaggaactgaaagagaatgtgaagcaaggttgtgtcttgcgcatggttaaaaataaagcattgtcctgcttcctaag

SEQ ID NO: 11585 - DNA, 423 bp, Homo sapiens
actctaagaaatggctttccacatccccaccctcccctctcctgagcctgtctctccctaccctcttctcagctccactctgaagtcccttcctgtcctgctcacgtctgtgagtctgtcctttcccacccactagccctctttctctctgtgtggcaaacatttaaaaaaaaaaaaaaaaagcaggaaagatcccaagtcaaacagtgtggcttaaacattttttgtttcttggtgttgttatggcaagtttttggtaatgatgattcaatcattttgggaaattcttgcactgtatccaagttatttgatctggtgcgtgtggccctgtgggagtccactttcctctctctctctctctctgttccaagtgtgtgtgcaatgttccgttcatctgaggagtccaaaatatcgagtgaattc

SEQ ID NO: 11586 - DNA, 163 bp, Homo sapiens
aattggagaaaaagaacaacctttttattctctttattgtaaaatacagcacacatacagcaaagtgtatagaacaaagtacgtacaactctgaattcttatgaagtaaacatacctgtaactaccattcaagtttttaaaaaataaataaaacataaccagc

SEQ ID NO: 11587 - DNA, 1185 bp, Homo sapiens
gcataaagtgttgccaccatacctccttccccgagtgactctggatttggtgctggaaccagctctctcctaatattccacgtttgtgccccacactaacgtgtgtgtcttacattgccaagtcagatggtacggacttcctttaggatctcaggcttctgcagttctcatgactcctacttttcatcctagtctagcattctgcaacatttatatagactgttgaaaggagaatttgaaaaatgcataataactacttccatccctgcttatttttaatttgggaaaataaatacattcgaaggaacctgtgttatcacagtaacccagagctgtatttggctagcaatctgcctgtatctctcactattatctaaaagaaaccttccaatgcttctgttgatctcagtattgtcaggggaacagagaagttgggaaaagattactgaaatataccttttgcatttctttctagagtagctcccatatatggagatgggtgattctcttgatgccaccttcagatccttttattctccagaataattcttaacagtggttcaaatttcctttcataccttgaagtatgtgtttagtagcctcaattctccattaattaaaagtgtgggctgggcgtgggggctcatgcctgtaatcccagcactttgggaggccgaggtgggcagatcacctgaggtcaggagttcaagaccagcctggccaacatggtgaaaccccgtctctacaaaaatacaaaaattagccaggcgtgatggcaggtgcctgtaatcctagctacttggcaggctaacgcaggagaatcacttgaccgggagacagaggttgcagtgagctgagatcgtacctattgcactccatcctggatgaaagagccagactctgtctcaaaacaaacaaaaaagcgtggggacttctggggacagacaaggtgcctgttatatatttactcagtctttgccctgaatggtctcagcttgagaccatttcaaactggagagaagcaagccagccaatagaatggggtgatttacagggatttctgtttactgtcaaaatatttctcatctgcactatgtttccatttgtggtcctgaaggaaattcttataactcaacatttgtctggtcttataagtaaagacagctttaaaatctgttcactttc

SEQ ID NO: 11588 - DNA, 1453 bp, Homo sapiens
tttcggttcacctgctggtgtctgaaaaaaaccgtgattcatctggaagttattacagggccagcttgccatattccaggcacacgttatcaagtttgggcctattgtggcctctgacttctctttcttcagccttttgaccacttattaattagtccatttgctagaagagtggtcaagggaaaaacgagagatgaaatttagttaagtctatgtgagcaagtgagagaaggttaggtaaggggagaggatggaatgcttgcctccaatgaactttggagcttgtatgtgagtcagattgctcccctattgctattatctattactcttgagagctggctgtcctttgaaagaaagaagtaatgttctttgaaagaaagaaaaatctcttgctgtgtcaaacctcaaaatgttgctattggggttagaaggcctcctctttatgctttttaatgctctttcaaacgtgttcttttagaccagttttctaataagctttgtaaaatgtactatccaaattagaagcggatttggaaatgcaaactaacgtgcacttagatatccaagtgggtgagcttagccactcttacccatgctctttccctggaatccctggagacctgtccaagatgatttccatataccagcatagaaaatcagaatcaagagcaaactctgagactggcacaatccaagaagatttcctggctctggcttttagtaatttgggactccaactgccactgtactggactgtaatttataaatccagtagctacgcagggtggaggctgggctgaggattaccataatgaaatgtactaaatcttcatttaggtatgcaattgtgaagtgaaggcatctgctttctttacagtatcagagtccaagaacaggatgtcaccatagataaaagcctcatacaaaggcagaactacactccaaatttaatgtgtttaaattggtggggcaccagcagaaaatattctagctcagctttactcttcttccacactaggctgggcccagcaatacaggagaggatgaagggaggagctccaggaggcgagggaagagccctagcagggcggccatcacaaccactcactgagagttgcccttcttaaaaatgtattttattttagccagtgggtcccttcctttctcctttcctctctactgctcaagaacagatttgaggccaggtgcggtgcctcacatctgtaatcccaacactttgggaggctgagatgggtggattgcttgagcccaggagttcaagaccagcctgggcaacacagcgagaccccatctcttaaaaaataacagacttgaggaacccctctcccttccataattcccctcatccaccgcccactccaggcactcactcaaacttgctcttcaactctgtatacaagcagaagcaataaaccaatctgattttcttttc

SEQ ID NO: 11589 - DNA, 2267 bp, Homo sapiens
tagtcatcataggaccatagtcctctttgtggcaacagatctcagatatcctacggtgagaagcttaccataagcttggcacctataccttgaatatctgctatcaagccaaatacctggttttccttatcatgctgcacccagagcaactcttgagaaagatttaaaatgtgtctaatacactgatatgaagcagttcaactttttggatgaataaggaccagaaatcgtgagatgtggattttgaacccaactctacctttcattttcttaagaccaatcacagcttgtgcctcagatcatccacctgtgtgagtccatcactgtgaaattgactgtgtccatgtgatgatgccctttgtcccattatttggagcagaaaattcgtcatttggaagtagtacaactcattgctggaattgtgaaattattcaaggcgtgatctctgtcactttattttaatgtaggaaaccctatggggtttatgaaaaatacttggggatcattctctgaatggtctaaggaagcggtagccatgccatgcaatgatgtaggagttctcttttgtaaaaccataaactgtgttactcaggaggtttctataatgccacatagaaagaggccaattgcatgagtaattattgcaattggatttcaggttccctttttgtgccttcatgccctacttcttaatgcctctctaaagccaaaaaaaaaaaaaaagacaaagcctcttaataaatttaatggaactatacatagaacagcagctcttcctcaccctttgcatacctttaatatttttccttcttaaattggccacagcaggggtcattcacactctcactgtcttgcaggaatcacaagaagtcttcatatgtgaacgtgccattcagttggtagttaagagcattcaacttcaaatatatagaagatatttgttttagtgcaaatccatgatggagtgcctcccttttccttttttcactttttgaaaaagatgttttgggtagtagtttaatatctcagggtgctctttctaacatagtaaaaaatgaagaaaaatgtttagattaaaactctgtagtctgatgacttagaaccatccttgacccttaggcccaacctttccacagagaaatcacctctcttcctttgtcttttaagaactatttggtattaactagtttcagaattagtaaatgtgagattcagtcacataattatcagacattccatttgtcagaaatgtatttggctttttaaactcctttccacaaaagtttaagtctaatgaccttcttagagaagttgagcatgcctggcaagatcatttcatggaataagcagatgtttaaagttggatttttttttttttttttttttgagtactagcaatgcacagggaccgtgttcttaggttcttagtctgtgaatctagcaataggcagtccagatttctgagtcgtactatggttttgccttgtcactgtgaggccctactaggtgtaagcattctctctgaattttaatttcctctcattaaaataggaacaaaatttgctatcctttagattaggagctgaagattcatttccctgggaatgtttcccatttagcttcaagtttcagctcaaacatcaccttctttctgactcctttcattcattcctccaggcagtaaggggctaccatagtactttgtttatgcctgtattatatgacatcactgtagttgcttgactgtttctcctactgttctgtaaacttattaatgggtgagaatctaattttactcatcttgatggcttcatgatccagcacagtgcctcacacaaagaactattgggtgggtggatggatggatggaggaatggagacagttggcttaaccagatcctatatacagattattactggctccaaaggatgagtagataagaccataagaattggatcaatgtaaatcctcacctgccctttgaagagccaataagggcatctttgtctttaaatacagcaaatgttattcagattttgtacttgtctatctgtttacctcagtgtagatgatatgaggatggtataactatgtaaattgtttttgaaaataatttgtttccccacaacttttgaaggttttatttgttgttgttattactagttcagtcccaaacttaccctttccttttcagagagctaatggccatgcttttcttcaaggaaagaataatttatttgaatgaagtgggatacttgcataacac

SEQ ID NO: 11590 - DNA, 520 bp, Homo sapiens
aagtgctctgaacttgaaactcactggagagctgaagggagctgccatgtccgatgaatgccaacagacaggccactctttggtcagcctgctgacaaatttaagtgctggtacctgtggtggcagtggcttgctcttgtctttttcttttctttttaactaagaatggggctgttgtactctcactttacttatccttaaatttaaatacatacttatgtttgtattaatctatcaatatatgcatacatgaatatatccacccacctagattttaagcagtaaataaaacatttcgcaaaagattaaagttgaattttacagttcgtatattcatgtggtcctttgaaagggtattctagaaatcactggaaagaggagaggaaagaaccaggtaggcaaatggtctgtgaaacccttgggtcctggaagcagtgtgagtgtaaatgtgtagtgtttggtttcatctaaataaacaaagatgatttctttgacacttgaaataaaatacaaattcaac

SEQ ID NO: 11591 - DNA, 2066 bp, Homo sapiens
ggagacgtgatgttcacttctgatggattcttcttttgtgtatttccttttctgctatttcttttcagtttttccaaagtcaagagtcttaaccttgtactcagggaattttgagataacaagtcccttgggcaccttaagctcagttttttcaggctcatcctgttcttccagaatctatcccttttcttacactgaagagtcctttagctcaattgatagggtcagcgtctcgcaagcaaaaaatctcatgacctcatatttgagtcttcattttcatcatctacttgttctaaaagttttttctgtttgtctcaagttgggttcccacaaagtggactttgagacaaagatctgaatgcaagcagtttatatgggagatgattccaggaaataccgatatgagaatggggaaatgaaaccaggaagggaagagagctagtatggggtatgttaatgagcaggtttccactgtgggcggttggcactctgccatctgagtcctctgcctaaagcattcctcagaactgtcccatttgaagggcaagcaaacctggggtatttatccactgacttccatctgacactggttgaggaccactgccagggatgctaactccctggtaattcttggcttaccctttgtacaaaccaaaccttagtgtcttcaggtaaagactcagagatacttgcaggggcaagctgtaaagggcatgggaacagtgagggacatatgtggggtcctaacaatatctgctaggctggtctacctcctaaatatactctgaatctatcacctctattgccttcttgcactgaggatttttcagctggatttctgcaatccaagctactcaagtctgggagatgctgctctgagctgctctcagtactctcctcatcatggcagttaacacattaccaattttgttattgtctgtttgcttgtttgcattatttctaaacagaacctagcacagtgcttgggcagccaataggcattaatcagtatctattgagtgttatgaactagcctcctagctcgtgcttccctcattaccctccagagttatgtttacgaataacaaattgaccatgctaaactaatcatgttccaatgaatacatcacctttcttcatttcttgatgctcttcccaatccttgtctacctgataataaattcttacttgtccttcaagacccaactcagatagatagagcttcctgagtgaaacctgctttgattgttcaggcacttggccaccttctcctcactcctcccacagccttctgtcttggccttgtcatcacatcaatcctgttgtgtggtgctgtgtgtcttctgggtcagtcctaggcacatgctgcccagcacatgtccacctgggaaatgagatgccatcgtcacattcatttggtcaccctcagtccagccagtgggcttgctctcatttggcctgttctcaggggtgggaaggaagagcgtcccttccttctccttttgagaaaaccacagaactatgactctcatgatttttcctttgtgaaatccctggttttcagctggaagcggtgggtaaatgaggtctgatgatagcagtcctgccaccttctagttcatcccataggaatgtttttccaagtccttccagtctttttagaacgtggtggaggagggttgtgtgtgccccagggggtcgggggtaggggatgcagggaggatcttagcatttgttgttttctagtgcagggctttagccacaattgtaaacaacaggaaaaggctctttagagatcctattagatttgctttgccgattgtcactcttcatcacaggcacatttcaaaaagaggttagactttcagacttcttttttctcaaacctcaaaacttccaccccaaacttcgctctcagctggtgactttgcttctttatgtgtgtgtatgtgtgtcagagaaagagagagagagagagagaagggaggatgagaacgaatggggggaagagataaactttatgcataacattagggtaaatcaataaagatggtctgacacatcgt

SEQ ID NO: 11592 - DNA, 336 bp, Homo sapiens
tttaacctgggcaggacacatctccctgcattttttttttttttttgagagagaggtgtgatgagggatgtgtgtgtgcagcttattgtagaccattactactaaggagaaaagcaaagctctttcttattttcctcataatcagctaccctggaggggagggagaactcattttacagaacttggtttcctttgccgatcttatgtacatacccattttagctttcccatgcatacttaactgcacttgctttatctccttgggcattcgtacttaggattcaatagaaacatgtacagggtaaacaattttttaaaaataaaacttcatggagt

SEQ ID NO: 11593 - DNA, 2051 bp, Homo sapiens
attgtgatttttttgtaaaagaagctgtacgaatcatcataaataattccaatagtctgcacttctcccaaggtgtgcactgctcataaacttgccagtgtgtgattcatgagaaaggagatttattttccttaaacatccaataatttaaaatgattttcaataataataatcaaatgaaaaagcttcattctcttcagtgtcttctagatgccctacttaaagagaacattttcttatgtctcatttcaatattttgttaactatgaggatgtgctggtttgttgaatcaaacaaaaggaaatgttgtggaatatttttccaagtagttttggttcactattcacaggacattggcattatctactaaggctgaaaatgtgcatattccatgactcaggattttatctcctagatatatattcaacagaaatgcatgagtatgtgcaccaacaggcatgacaaaaatatttatagtagtggtgttcacaatagtcccaaactggaaacccaagtgtccatctccatcggaacagaaaactatactttggtctgcttctacagtggcacatcaacccacctttgagctttagatctaagaagtgtgttcatgcaacagccatagagatggtgctattgaaaggcaatctgcccatcctgtgtattgacaagcatcaggattccaggaggattcttcctgattcaaagactgtcaaataggaaaaaagaaaacagtaaatgaacaaaaacatcaacatggagtccaagtaatgaatttatagaggaaaatgtatgctactctgaaaacaaagcttatgttagagaatatcttactgtaagaaacaaggaaaattgcagaaacatttgctgagtgtttttaataggagtcaaaaagaaagggtcttttcagaaactgaagtaggaaataataacagacaaggtcaaaaaatagatgcaggctgaaaagaaaaggaagtgggctaagatgggaaaaatataaaaagatttaaaatccagcaacaaaatttacacattcatttggatgcagtgaaaagggcagaaataccacagcagagaataaaattgataatgttggcaacacatttattaagtgatccaacatgggatgggaaggaatgggcaaagagattaaaatgacagaagttagctgtagatgacctatcccacagcaatcggagttcttgaagaagaaaccagaacaaataaaatagaaacaataatcagagtttaataattaattttctgagtttttttttaaaaaaactaattatacaaacttgaaagggttcaccttgccctagcaaaactaggattgggacacctttttttccccctgaggatcactgacaaaaaacactgcaccagtaaggaagcaactaaattttgttttgttctttgaaaaaggctaacctgagctaggtaaaggttatatcattcacttttgaaataaaccatcgagaacacaaaatgacaagtgagttaggttgggctgatgggatagaaggtgggaggggaatgctatacagctgggaacagcagactttctctgaagggccagatggtaactacattagggtttgcgggtctgatggtcgccatcataactgcatactcaactctgccgttgtagggtaagagcagcactcgatgacacagaaatgaatgcacatgactgtgttccagtaaaattttattttaattaaaatcaattcatgtttgaaaaaggatttaaagtagcttctaataaaggacatgtgtaatgaaacttaaaatatgatattttctttaaaaatctttatccttatgtagacttctaaaactatgttttgcatttagacagtcaaggaaaatacaagttgttatacaattctcattgactaattgaagtttactaggagaggaaaactttttcttgataccggcaatcttttacttataatggcttgagttaaaatgctccaacttttctaatttttgcttttgaaaataaaacacctatagtgacaataaaaacacacatttaaagccaa

SEQ ID NO: 11594 - DNA, 1273 bp, Homo sapiens
gcggctgcccttgggtgacacctccgagaggcagccagacccagagccctctgagccgccactcccgggccaagacagatggacactgccaagagccgacaatgccctgctggcctgtctccctagggaattcctgctatgacagctggctagcattcctcaggaaggacatgggtgccccccacccccagttcagtctgtagggagtgaagccacagactcttacgtggagagtgcactgacctgtaggtcaggaccatcagagaggcaaggttgccctttccttttaaaaggccctgtggtctggggagaaatccctcagatcccactaaagtgtcaaggtgtggaagggaccaagcgaccaaggatgggccatctggggtctatgcccacatacccacgtttgttcgcttcctgagtcttttcattgctacctctaatagtcctgtctcccacttcccactcgttcccctcctcttccgagctgctttgtgggctccaggcctgtactcatcggcaggcgcatgagtatctgtgggagtcctctagagagatgagaagccaggaggcctgcaccaaatgtcagaagcttggcatgacctcattccggccacatcattctgtgtctctgcatccatttgaacacattattaagcaccgataataggtagcctgctgtggggtatacagcattgactcagatatagatcctgagctcacagagtttatagttaaaaaaacaaacagaaacacaaacgatttggatcaaaaggagaaatgataagtgacaaaagcagcacaaggaatttccctgtgtggatgctgagctgtgatggcgggcactgggtacccaagtgaaggttcccaaggacatgagtctgtaggagcaagggcacaaactgcagctgtgagtgcgtgtgtgtgatttggtgtaggtaggtctgtttgccacttgatggggcctgggtttgttcctggggctggaatgctgggtatgctctgtgacaaggctacgctgacaatcagttaaacacaccggagaagaaccatttacatgcaccttatatttctgtgtacacatctattctcaaagctaaagggtatgaaagtgcctgccttgtttatagccacttgtgagtaaaaatttttttgcattttcacaaattatactttatataaggcattccacacctaagaactagttttgggaaatgtagccctgggtttaatgtcaaatcaaggcaaaaggaattaaataatgtacttttggcta

SEQ ID NO: 11595 - DNA, 56 bp, Homo sapiens
gtctggcaatgatgactatatgtattcctgcctaaataaatcatctattaatcatt

SEQ ID NO: 11596 - DNA, 1599 bp, Homo sapiens
gctttccctaattctttctcctttctctaatgctcagttcaaaaaggaatgtctcatctttgaagaaaagtatttaagtggctttctgcccctcttgatgtaagcaactgtccatccttgtgcaaagattgatggtagagagtttgacttttatgccagaaactttcccagcaaggtagggtgctgagaatcctacccttccttgctgtcactacagtattaatattttactgtattttcttttcttttttttttttttttggagatgaagtctcactcttgtaccccaggctggagtgcaatggcgtgatctcggctcactgcaacctctgcctcctgggttcaagcgattctcctgcctcagcctcccgagtagctgggattacaggtgcctgccaccatgcctggctaatttttgtatttttagtagaggcagggtttcaccatgttagccaggatgatctcgatctcctgacctcatgatccacccgcctcggcctcccaaagtgctgtattttcttatctgatttttttcttgccttattaagacataattttctcccttctgaaatgagtgagggaagttcataaggtaaatccttcccatccatctgtttactacaataggttacaataattcactgatcacatccattttatctgttctagccaggcattccaaacaatttcttatactgctgcccaccaaagcagcttgccaacagtcaaatcactgattgggggaaaaaatcctgaaattttgcttagaatttgagcatttcctcaaaattgagatggatcaatatgtaaggggaggtgggagcgtgtgtggaagggggagagatatacttgagtcttatgattaatgtctaaaccagaatttgtgtctttagaactgaccagactggtagattttattgtattgcttaatgtcttttggtttggatttaggatgatagaaaacagaagtataattggtaaacccttaggaagaaattagaaaaacatggacgtaagacaagaagtctctgtgaagggttgaagagtgacaagcattggtaacagtgccttagaactgtgtcagttagtctgatttggaaatcctttatgtaaagctgagactggtcctggttttgttccctttgggtacagacctcttgtcagtgctataaattgtttaatgaggccattccagcagaaatcaacagaataattgattactcttctctctctctgtcactctccctctttctaaacatcattgaaggctgtctctcttttaatttttgtcagacacagtattttagggtgcatccagtataccattgagcattgtaacctcaggaaacagtttattttgggttctgatatgtagcatggtattttccctaaggcagaactttaaaaataaagaactttcacacaagggtctgtaacaattgtatatcttacaatatttttccttgcattgtaatttttaagtatttatcattttatagtacacatgtaaagaatatatgagccttgtatggagtgatgtttcatttacctgggttgtgttaatgactgaatgttgacaataaatctgttttatactga

SEQ ID NO: 11597 - DNA, 4021 bp, Homo sapiens
ccagagtactaataaatatagatcatttagaaaagtggtcttcttgcctcttgtacatgactgtttttttcctttgtctcattttaacccaacatctgggtctgtgtctctgatttccatgtaaatgttgcaaaaagagttttccaagtagagctgggcactacgtaatcagccccacaagtctccctgagaagcctgcctagtccctttcatggccaatgagactccaaaattcccttcccaaaactatcttggattttctaaaagtaggacagtggttttgggggttatccacttttatttttttgaaactagctctcattctgtcacccaggctggaatacagtggtacagtcacggctcacaaaagccttgacctcctgggctcaggtgatcctcccacctcagcctcctgagtagctaggactacagatgctcgccaccacacctggctaattttttttttttgagactgagtctcgcactgtcacccagggtggagtgcagtggcgggatctcagctcagtgcaacctccacctcctggggttcaagtgattctcctgtgtcagcctcctgagtagctgggattacaggcgtgtgccaccatgcctggctaacttttgtatttttagtagagacggggtttcaccacgttgcccaggctggtcttgaactcctgacctccagtgatccgcctgccttgacctcccaaagtgctgggattacagacatgagccaccgagcctggccaatttttgtgttttttgtagagacgaggttttgccatgttgcccaggctggtctccaactcctggacttaacgccatccacctgccacagcctcccaaagtgctaggaatacaggagtgcaccatcgcacccggctgggttatctagtttaaaaacactttttttcaaggaaaccgaagaaaccatcatccacttttctctctgtatcattctgattttagtatatgtgttgtggaagtgagtacactatcatccacttttaatgacagaaagttataaacttacattttgtttccaatttttcattttttgtttgttatttgttttttgtagacagcactctgtcacccaggctggagtgcagtggcaccatcttggctcactgcagcctctgcctcctgggctcaaacagtcctcccacctcagccttctgagtagctgagactacagacatgcgccaccatgtctggctaatttttgtatttttagtggagatggggtttcgccttgttgcccaggctgaatttgggtttttttaaaatgagactttcagtcctaatttgaggggaaattactgtcaccactagttttaatatagtacaatgaaaaaataatatatatatatatagtacaatggtccagacataataagaggtgtaaaaactatcacaggaagaaataaaaacagatttttgaaggtgagatgataaacttgcaaaactcacaaaataaagagtcaaacttttagaatgacaagttagcatattttccagccacatgatcaacctacaaaattaataccatttctgaacaccagtaataaagaaacataagggctgggggtggtggctcatgcctgtaatcccagcactttgggaggccgaggcgggcggatcacgaggtcaggagattgagaccagcctgactaacatggtgaaatcccgtctctactaaaaatacaaaaaaaaaaaaaaaaaaaagccaggcatggtggcacacacctgtaatcccagctactcgggaggctgaggaaggagaattgcttgaacctgggaggtggaggttgcagtgagctgaggtcgcaccactgcactccagcctggacaacagagcaagactctgtctcaaaaaaaaaataaaaaataaaaaataaaaaataaaagaaacataagataagtacctctcaatgaaaaatgtaaaagtacctagaaattcacaaaaaaattaatacctctgtggagaaaacttcaaaacttaaaaaaggacatagaaaatgttttgaataggccaggcgcagtggctcacacctgtaatcccagcacgttgggaggccaaggcgggcagatcacgaggtcaagagatcaagaccatcctggccaacatggtgaaatcctgcctctactaaaaatacaaaaaaaaaaaaaaattagctgggcatggtggcacacacctgtagtcccagctacttgggaggctgaggcaggagaatcacaaggattgaaactatgcagtgtgttctccaaacatgatggaacgaaattagaaatcaataaaatttgggaaattcacaaatatgtggatattaaacaacacattcctaaataaccagtggttaaagaggtaatcacagtctgagcaacatggcaaaaccctgtgtctacaaaaaataaaaaattagctgggcatgacggccagagcccatggtcccagctactcgagaggctgaggtaagagcatcccttgagccacagaggtcgaggctgcagtgagctgtgactgtgccactgcactccagcttgagcaacacagtgatactgtctcaataaataaataaatagaagaaatcatgagtaaaattggaaaacacttttaactgaaaaaaacaaaagcacaacaaaccaaaacatgggatgaagctaaatcaatgcttagaaggaaatttatagcttcaaatacttatatacatattttttaaaagtagctttacataggaaggaagtggcatagttttatcaatatctgtcaaattaaacttcaaggcaaaacttttttattgagatggagtcttgctctgtcacccaggccgtgcaatctcggctcactgcaacctccgcctcctgggtcaaatgattctcctgctttagcctcccaagtagctgggactacaggtgtacgccaccacacccagctaatttttgtatttttagtagggacaggttttgccatgttgcccaggctggcctcaaactcctgagctcaagtgatcctcccgtctcagcctcccaaagggctgagattacaggtgtgagctacctcacctggccaaaacagtttttttagaaatgaagtatattagacaacaacaaaaggaacaactaacctgaaatatataataactttgaacttaaatatacttaacaacatataccaaaaatatatgaggcaaattttagcaaaaattaaaattcttaagaaaacttcactaatatatagtcataatgtggtatattcatagaacattctcaataattgataataacagtccaaagaaagcagaaagaaggaaagcctagaacagaaataaatgaaatagagaatagaaaagcaatacagaaaaaaaattatgaaatcaaaagctggttctttgaaaagatctacaaaatggcaaacatttagctagattgaccaccccctcaaaagactcaaattactagaatcagaaacaaaagtcaagattttattaccaaacttatagaaataaaaattattagaaagaaatactatgaacaattgaatgccaacaaattagataaatgaaatggacaaattcctaggaagacacagaataccaaatctgactccacaagaaatagatgttgtgaatagagcttgctatggtatgaatgtgtcccccacagctcatgcgttggaaacttaatccccaaagcaacagctttgagaggtgagacctttaagggttactaggcagagcccccatgaatggattaatgccattattgtgggagtgggttagttatctcagaagtgggttcctgataaaaggatgagttcggccttcttcttccccaaaatctttatccccacccccacctctatctttctctctctctcttacctcctcctctcccttccttctgccatgggaggatgaaacatgaaggccctggccaggtgtggcccctccatcttccgtctgagactggaagacttcccagccttcagaactgtaagaaataaatctctcttcat

SEQ ID NO: 11598 - DNA, 1165 bp, Homo sapiens
aaattcagatgccactcgatgcacccttcttggatttcttctcggagttcctgaagtaggacagagtgtgtggttttgaggactcccttctgtaaactgcctatttgcttatcggggtgtattggaacacgcaatgtccttcgaaacctcaacacgaggcctaagaatttcctaagccatgtcttgtaccatagtgccacattgatgacttgtttccttttttcttttcttttcttttcttttttctttctttctaaaatagattggtctgagaagaaaataagtaatttgaggccatttggaagatgggcccaatttcttaagtgatgagagagcacgaaattccataaccagtacaggcctgtgcttttacatgggctttttagttcacaaagcactttcaaatttatgggacaggaaatgcaggatgggactccccagggaacgcagggtgaagggaacaaagctggaggctctggagctgggtctgttttgacggtcaagtccagggctcattttggttattctactgcctctaggccagggtagtcctaacacagcctgacataggagagcccctggctgagcatggcagccttgaagacaccacaggccaaaacatgaggggcagaaatgggatcacagagtctgttgctagaatcttggcaacatacagcaggaaagccttgataaatcgggagtccaaaggagacaccatatttatggagaacattaggacaaaaagtcaccaacttactttgtaacattttaataatgacttaagggtcaagatttttttcttctgaaaattatgttctgagttaggcagaacatagccatggccctgggccaccctgtgctatctgaaatgacctcaatacactaatgccaacctcagcgtcatgccagaatgcacagggcagcccagggagatcacacctttggcaaagtccagacaaggcccactgcagttcctatggcgccagtcaccagctcctagacagcacttgggtaccccattggggtcttggagaggaagacatgtgaacataacggctccctgaaattgctcctacccatccatatttctggtcatgctttcagtctgacaaaaatggatgatactgctgtttttggtaacaaacagtgaatattcataagaaca

SEQ ID NO: 11599 - DNA, 137 bp, Homo sapiens
agaaatatttagctataaataaaaatttatacagcatgtataatttattttgtattaacaataaaaattcctaagactgagggaaatatgtcttaacttttgatgataaaagaaattaaatttgattcagaaatttc

SEQ ID NO: 11600 - DNA, 603 bp, Homo sapiens
tgactccctagattctgtcctgaccccaattcctggccctgtcttgaagcattttttttcttctactggattagacaagagagatagcagcatatcagagctgatctcctccacctttctccaatgacagaagttccaggactggttttccagtacatctttaaacaaggccccagagactctatgtctgcccgtccatcagtgaactcattaaaacttgtgcagtgttgctggagctggcctggtgtctccaaatgaccatgaaaatacacacgtataatggagatcattctctgtgggtatgcaaagttatgggaattcctttataggtaactgccatttaggactgatggccctaatttttgaggtgctgatttagaggcaaaattgcagaataacaaagaaatggtatttcaagtttttttttttataagcaatgtaattatgctattcacaggggcctcaagaattggtatgtatgatgtgatctggtccagccagggcctggcttgtcagctctctaggtttgatatgactttagtaaatttgtcaatatagatggtaggaagcagaatgccattttattaaaacacaggagaagtt

SEQ ID NO: 11601 - DNA, 1601 bp, Homo sapiens
ttaaagagtaaagcccatacaagtattcattttttctaccctttcctttgtaagttcctgggcaacctttttgatttcttccagaaggcaaaaagacattaccatgagtaataagggggctccaggactccctctaagtggaatagcctccctgtaactccagctctgctccgtatgccaagaggagactttaattctcttactgcttcttttcacttcagagcacacttatgggccaagcccagcttaatggctcatgacctggaaataaaatttaggaccaatacctcctccagatcagattcttctcttaatttcatagattgtgttttttttttaaatagacctctcaatttctggaaaactgccttttatctgcccagaattctaagctggtgccccactgaattttgtgtgtacctgtgactaaacaactacctcctcagtctgggtgggacttatgtatttatgaccttatagtgttaatatcttgaaacatagagatctatgtactgtaatagtgtgattactatgctctagagaaaagtctacccctgctaaggagttctcatccctctgtcagggtcagtaaggaaaacggtggcctagggtacaggcaacaatgagcagaccaacctaaatttggggaaattaggagaggcagagatagaacctggagccacttctatctgggctgttgctaatattgaggaggcttgccccacccaacaagccatagtggagagaactgaataaacaggaaaatgccagagcttgtgaaccctgtttctcttgaagaactgactagtgagatggcctggggaagctgtgaaagaaccaaaagagatcacaatactcaaaagagagagagagagaaaaaagagagatcttgatccacagaaatacatgaaatgtctggtctgtccaccccatcaacaagtcttgaaacaagcaacagatggatagtctgtccaaatggacataagacagacagcagtttccctggtggtcagggaggggttttggtgatacccaagttattgggatgtcatcttcctggaagcagagctggggagggagagccatcaccttgataatgggatgaatggaaggaggcttaggactttccactcctggctgagagaggaagagctgcaacggaattaggaagaccaagacacagatcacccggggcttacttagcctacagatgtcctacgggaacgtgggctggcccagcatagggctagcaaatttgagttggatgattgtttttgctcaaggcaaccagaggaaacttgcatacagagacagatatactgggagaaatgactttgaaaacctggctctaaggtgggatcactaagggatggggcagtctctgcccaaacataaagagaactctggggagcctgagccacaaaaatgttcctttattttatgtaaaccctcaagggttatagactgccatgctagacaagcttgtccatgtaatattcccatgtttttaccctgcccctgccttgattagactcctagcacctggctagtttctaacatgttttgtgcagcacagtttttaataaatgcttgttacattc

SEQ ID NO: 11602 - DNA, 1304 bp, Homo sapiens
aatggaaggagaagactgggctagggagaatgcagagaggtttcttggggtcccagggaagaggaatcgccccagactcctttcctctgaggaagaagggataatagacacatcaaatgccccgaatttagtcacaccatcttaaatgacagtgaattgacccatgttccctttaaaattaaaaaaaagaagagccttgtgtttctgtggttgcatttgtcaaagcattgagatctccacggtcagatttgctgttcacccacatctaatgtctcttcctctgttctatcccacccaacagctcagagatgaaactatggctttaaactaccctccagagtgtgcagactgatgggacatcaaatttgccaccactagagctgagagtctgaaagacagaatgtcaccagtcctgcccaatgccttgacaacagactgaattttaaatgttcacaacataaggagaatgtatctcctcctatttatgaaaaccatatgatattttgtctcctacctgctgctgctattatgtaacatccagaaggtttgcacccctcctataccatatgtctgcttctgtccaggacatgatactgatgccatgtttagattccaggatcacaagaatcacctcaaattgttaggaagggactgcataaaccaatgagctgtatctgtaattaatattcctatatgtagctttatccttaggaaaatgcttctgttgtaatagtccatggacaatataaactgaaaaatgtcagtctggtttatataaggcagtattattgagctctatttccccaccccactatcctcactcccataagctaagccttatgtgagccccttcagggactcaagggtccagaagtccctcccatctctaccccaaagaattcctgaagccagatccaccctatccctgtacagagtaagttctcaattattggcctgctaatagctgctagggtaggaaagcgtggttccaagaaagatccaccctcaaatgtcagagctatgttccctccagcagtggtattaatactgccggtcacccaggctctggagccagagagacagaccggggttcaagccatggcttcgtcatttgcaagctgagtgactgtaggcagggaaccttaacctctctaagccacagcttcttcatctttaaaataaggataataatcattctttcccctcagagctcttatgtggattaaacgagataatgtatataaagtactttagcctggtacctagcacacaataagcattcaataaatattagttaatattat

SEQ ID NO: 11603 - DNA, 399 bp, Homo sapiens
cagcatgtacccaaagtgttctgattccttcaactggctactgagtcatgatccttgctgataaatataaccatcaataaagaagcattcttttccaaagaaattatttcttcaattatttctcatttattgtattaagcagaaattaccttttctttctcaaaatcagtgttattgctttagagtataaactccatataaattgatggcaattggaaatcttataaaaactagtcaagcctaatgcaactggctaaaggatagtaccaccctcacccccaccataggcaggctggatcgtggactatcaattcaccagcctccttgttccctgtggctgctgataacccaacattccatctctaccctcatacttcaaaattaaatcaagtattttac

SEQ ID NO: 11604 - DNA, 282 bp, Homo sapiens
cagaggtatccgtgttggctggattttgaaaatccaggaattatgttataacgtgcctgtattaaaaaggatgtggtatgaggatccatttcataaagtatgatttgcccaaacctgtaccatttccgtatttctgctgtagaagtagaaataaattttcttaaataatgactgtgttttattgttttgatccaagtcaagtgtagcctctcagccttttggagaaaaatgaaacaatttatttcaacttgaataccaactcttcagagaagcaggtaccat

SEQ ID NO: 11605 - DNA, 2682 bp, Homo sapiens
gacaactgctggaagatgtcttaaatcaagctttcaaaaaaatatattttaggaggctgatttaatgccagtctaaatccttatgtagaaaggactttgaaatttttcttctcaagaaatggtttgtataagaataacaatctgctagtctgtcatttctggagtgatacttttttttttgagacggagtctgctctgtcgctcgcgctggagtgcagtggcatgatctcggctcactgcaagctccgcctcccaggttcatgccattctcctacctcagcctcccgagtagctgggactacaggcgcccaccaccatgcccggctaatttttgtttttgtatttttagtagagacagggtttcactgtgttagccaggatggtctcgatctcctgacctcgtgatccgcccgcctcagccttccaaagtgttgggattataggcgtgagccaccgcgcccagccctggagtgatactttttatggaagacaaaagccccccaaatctgtgtaaaatctgctgcaaaggtgtcatccctcttgtgtcatcactggggttagaggtgggtccgaaataatcttctgtgtccttcagttggactctcggctgccaattgatctctttttcattgccatctctggggtggttctttggttttttgtgtgttttccccttcatctctacctgtgaaagtgaaattctattgtaaatgggaggaaaaagggttggttgtgaaaaattaaagacccacattctgctttcttactcatggtaagaaaagtggccatgagtagagattgggcaagcattggtaataaatggaataagactattattattattatttgagatggagtctcactctgtcacccaggctggaatgcagtggtgtgatcttggctcactgcaacctccacttcccgggttcaagcgattctcctgcctcagcctcctgagtagctgggattacaggtgtgtgcctccacacccggctaattttttgtatttttagtagagacggggttttgccatgttggccaggctggtttcaaactcctgagctcaaatgatcctcctgccttggcctcccaaagtgctggaattacaggcatgagccaccacacccacacaagactatcatttttaatgaccaagagcctagtatatagttggtgcctgtcttagtctgtttgtgttgctataaaagaacacctgagactgggtaattgataaagaaaaaggtttgtttggctcacaattttgctggctagaaggttgggcatccggtgaaagcctcaggctgcttccattcatagcaaagggcagccagtgtgtgcagaaatcaaatgacagagaggaagtgagagagagaggtgtcggggaggtgccaggctctttttaacaagcagttcttcaggaactaagagtgagtcactcccatgagaacagcaccaagccattcatgggggaatctgcccccatgacccagacccctcccgttaggcttcacctccaacactgaggatcaaatttcaacatgagatttggaggaggtcaaacaaactaaactgtagcagtgtttcataaaattgtttgcctgactcaggttgctagtaagccagcagagggatatttgcctcctaaatctttggcagaggcaggagtaaggaagccatttctggagtccttgctactaatttggaaaactgagcttctttctttcattgctttttcccttaagagacaagtccttactatattgccctgtctctcaagggaagacatcaagactggacttgaactcctgggctcaagccatcccccaaccttggcctctcgagtagatgggattataggcatgtgccacggtgcctgacttgagtttcttattctagaacacttggagcctgaactctgaccaggcccctcacttgagcctttgctttctgctccttgtaaactgccatattgggtgcacttgccctgccacagtaatgctatatatttctgagcattgtttttctctagataattttatatttttgagtataccccacttccaagtgttttttgttttgttttgctttgtttttgttgttgttgttttgagacagggtctcactgtgtcccccaggctggagtgcagtggcacaatgacgactcactgcagcctcaacctcctggggccaagtgatcctcccacctcagcctctcaagtggctgggaccacagaagtgcaccaccatgcctggcttttttttttttttttggtcgagatggggtgtccctgtgttgcccagactggtcttgaactcctggactcaagggatcctcctgtcttgggctcccaaagtgttgggattacaggcgtgagtgaccatgcctagctcacttccaggtttaacagacaaaataaacttactctagtttccatctctatcattttataataaccgtagcccacattgtagtagtttttcagctctttactaagtcccaccaattcatgttttcacccttaaaatctttctcactgatactctctctggacagaaaaaaggtgaaataagcctactataaggaatatatgacatgctaaattttatttttaaacggttcttcaagtcagattaaagtaataatagcaaattatgtgattatccatgtcccagcctctctcc

SEQ ID NO: 11606 - DNA, 589 bp, Homo sapiens
aaatatttttatcatcaaagagatgatttaagtcatctgtaagaacaacatgcaatctttgtctttgcttctggcctgtgtaagcagatgaaagtttcccttttaggtgccaaaatgctgaaaattacctttttaaagtgctctattgctgcgatttgtagcatacctttttttctcagcaaattgatgggtggaagctgagaaatgtatggtaaatgtcacagagctacaaccattcacagacaccaaatctctaggagaataaaaagcacattattctttttctatcagaaaaaaacaagatgcatcaccttaaaaccaagatgacattgttcttcttggaacatgttaagacatcgaatggtggcgggttaaactgtactgcttaagtggagcggctaccgttatgcatctatcacagttggggattttgccttattaaggaaaacttgtcaatagttcagctgaaatgactgaatcacagaatattaactctgttatggaacaaatcataacagattttacctgtttacatttcaggtaaaaatgtatcgcattgttatctaatattaaaaaattacccccaatt

SEQ ID NO: 11607 - DNA, 2243 bp, Homo sapiens
cactttggtatccttcccacaaaattattctccatttgtacatatctagttgtaaaacaagttttagcttttttttttaattcctcttaacagatttttctaatatccaaggatcattctttgtcgctgaagtcagtctttcttcagcttccctttcataatggaaatgaacttattatcttgagagcaaataacttggaaaatttaaatgagataatgcagttgcaactgtgtgtccacaagtatggacatcaaatctgtgggaaaagaacaggtttgtattttcaggaaggagagaataacagtcttatagacagagggcacagctaagcacagctgccactgcaggagacaggccccatgtcaggatgccatagtgctgtggggagcacagtattacccagtgggtagggcttctgtcttccctgggagcagggatggtatcttagtcaatttttttcccttgagatgaggtctgtgcctgatgtacaacggatactccataaatgtttgacaaaccaacgaagaatgaaaaaaagcctagtcagactcccatccaaagtaggaactatctctttaacattcttgactcactatcactttacctcaaattgaacagattccatgacggaacttcattcttcacaaactagccagtgacatgtgggacagctctggccagggctctgggactgcagtgtacttgcgctctgcacggtccaggagctgtgatgtggctgtggtctaggggaatcctgcctgccccatggagttgcgcagcacaaccctggctccaattgccagaaggctctttttaatgctgaaccaaaatgtgcctttttttttttttttttgagatggagtttcactcttgttgcccaggctggagtgcaatggcgcgatctcagctcactgcagccactgcctcccaggttcaagtgattctcctgcctcagcctcccgagtagctgggattacaggcatgcgctaacacacccagctaattttgtatttttagtagagacgaggtttctccatgttcgacaggctggtctcgaactcccacctcagcctcccaaactgctgggattacaggtgtgagccaccgtgaccagccaatgtgccttcttatagtgtctactcattggtctttgttctgcccagtgataacaatgggataacgcctgctacacatcttcattgtgaaacccttcccctgtgctgagattaaatgaactctaagattattaaatagtatattttccttgacagcctagcgtttgatgattttaaagccttatgtataaataaaccaaaggaagtaagcagtcatattgctaatttgctaactcctatctattgaatggtgaagttttaaaaatttccccaggtaagtttaagattcaaacaccatctattgagcacctacattgtgtgccaggtagtaaaataggtgctttcatacacattgtctcaattcctgtgaggtcagaattatctctgcatttgaaacttgaggaaacatgctcagagtgcaagaagcttccttgcctgagatcacctagaaaggaaccctcagagccggcaactgaatcttggtccctgtgatgtcaagcccattgctctcccactgcagaacatggcctctagattaatgccaccgattcaggaacacctccgacagtcttgaaatacccccatgttgccttgtttgttttttccttctggcttcttctattacagtctcttcattggaagctctgtaggccaaggccagagctgatactgacacggagccaatgcagatagcacatcagatgctaggggtcgctgggaggattaagggacttaatctgctaggaacacctgtacttgaagtggaggaggctagggggccacagttgctgcttcattaacatagaggttttggatttttttctcttgtggtttgttttttaagtggattggcagactccttgttgcttaagagtggctttctaggcaggccactggcatctgaattcatcattgacaataaatgtaagaaattggaataaaaaagagagacctgctgttattcgcttttgttctccagtgatttgattaactcagggcaaggctgaatatcagagtgtatcgcactgaagaataataatccattcagtaatgttatagttatcctcaatctaaatatgtcaactgtcattttgctacttttcaaataaaatacttgaaaactgtca

SEQ ID NO: 11608 - DNA, 536 bp, Homo sapiens
tagcacagacttgaaggagtttaaaaggaggctggaaatcaatactgcacactgcacatttgctcagaattgcacatctaacaggaaaagagggagaagaaagaaacttcattcagaggttttgttaggttacagattatcacattaatttaattactactaggtaataataatgggagacttgagtgataataggggattttaaaactctacagatggcatacctgtgcctgcttctggggttggaagtgtgacttcttacacataaagcactacctaagtaattctctctctgttttgtgccagtgctaaactactgattacttgtaattatgaaaagaaataaagggtgtctatcatatgaagataacgccttccctaagtcacatatcagaataggaagatatgccactaacttctaaagaagttcaaaccctgtatccaattttaatgataaaatagccaagaggtatatcgatgatggaaattagccacatgtacactacattttttctaataaagccatttcttatatg

SEQ ID NO: 11609 - DNA, 68 bp, Homo sapiens
ttcctgcctcagaaaaagcttttccattacactgtgaatgatacctgttttgttgtttctgaatttcc

SEQ ID NO: 11610 - DNA, 784 bp, Homo sapiens
caccatccttcagatctattgccttggcttcagggggataaggagggaacatatcataactgcactgtgatgaagaagctgttccccacagaggagaagctctgctttctttctctccaactttccttttttaaaatcagcatgatgtgcctgtgagcatggaagagtcctctcagaagaatgttggccatgagactatcattcagaggaggaggggatttctctcttcaaggccgtaacagtggaagaacagtcatatgccattggaagtcttggccagcagtcctgaatccttcctgaagagttcagaaaatagatgtggtattgctctgaggaccaggcaggaggaactctacaacctgagtttgcctttgtgaggcattagtatagaccaaataaaaagctgcagaaattggaaagtttatgttttaaataaatgactgtgataaatatcagattatttgcacacttatggtactacgagtttataaagtccaagatggtgtgaaattggttctttttacttttatatttttgcttgaatcttaactctggaaatcacctgatgtagaagaagactgtgatgagctcgtctgtggaacatcacaagtatcgaaaatacagtaatggatgtttcctttctaatccacatttattgtttcttttgaaatcacgtctaaaaaatatgactcacactatagccgttgtttcccaaacttcagtctctttagtactacttgtattattttcttaatatttatcttttaaattttaaagttttttt

SEQ ID NO: 11611 - DNA, 1719 bp, Homo sapiens
ccatctcccagcccctatggtttcacatagacgtgcagtgtgaaccaaagcaagactgaatgtgactgtaaataattctgttcatcatttcactccgtgcagttctctgaattgagagatgtacctcttaaacctcgtcagtggttattcagggtctgagcagcagtaaaagtcaccctaaatcaaggggcttttcagaaggtcattctgaagaaataaagaggcaaagggtcacagaagtgttcagaagaagggcaaagataagaacaatattagctgttacgaaattttaactgtatcttccaaaatgagtggttaactgggcaaaccttaagctcacaagagtataaaagatctctggctttgctgaaattttaagcaagaagttctatttaatggagatgtcatgtatatcaactattctggtttagataacttagatatagtttcttaataggatagatacccacatacagtataatatatcccattcaggtttcagagttttctaatatagagatatatatattaaatcaatcacaagtaattttgagtgctccagttaagacagtaatttatttaccgaatcattacattgttttgactaagcacaattagatgacaagtttttttagagcattttatagatcttgtatagaaatcttttaccagaacctgtgcattaagagaaagcaatgttgcccttttgaatgagaaaattttttctgtcaatcgcaggttatttgattaagataggttctttctgtatatgaaacgctccccgcaaattcactggcagctcagaattattctggaaagaaagcctgccaggaaataaattcaaatacagtatgagctgcggggatatttttgtgtctacaccaggtttgaaataagtaaacaaatacaagaggttcatataaaagggcaaatgaaaacctttcctacagttcctatgaacaacgtaccaacactttctgatttcttctacagctgtagaataccatctttcagaaagttggctggctttatttctaactccttattgaagctaaggggtgcttactaaaaggaggcagccatataggccttttaaaggcctggttctaagtcctttttaaagccatggaacaaaacctgatacatcaccctaacagagcattaagttgtaactgagattgcaatacctgtcaccatgcagccgctgatagttctctgaactaaaaggactaattgtactttgaggccaatgctgctttctggtgtatattctccatacaagattattattaactgctctttttccctctggtggaaaaaaaattaaacctgggcatttcatgggttttctttctttatttttgttcatttgttttggagggagggagcttgttttttgtgtttgtacatgatccacccttagttttctagaatgtgtgttgaaaattgcgattatacaagtaagattttaaaaatgtaactcaagtgtttgttcaaatcaggtttaatggtgttgcttctctcctataatgggatagagaaaattaaaatcacgtagtacagaagtgcaagaagagaatttatgaaggatgaatagaactacaaacctatctaaatgaaaaagaaatggtggaaactaagcctgaactttaacatataaaaaacacttattcccacagagaaaatgtaaaattaaaaatcatcatctttttttttcca

SEQ ID NO: 11612 - DNA, 1389 bp, Homo sapiens
cgcgcatcctgggacttgtccctgcagctcaccgggttagccgtggcaccgttgggacctcccaccaggactccaatcacccacctctcttgagacttctctggcagggctggtgtggggtgcagcctttgctcagagggcaacatgttccaagcaaaatctccccgcctgggccatgggctcaccctcggggctcccttcttctctactgggtgcaattcgaggttgctgagcttctctccaaagtctaaaatggtggggcagtagggacctgtgagaggcccaatggcccaatgtacttcccccagatcccactcagaacagcaggtacgcccaggctcctgctgccctagaggtctgcaacatgagtgaagaggttaattagagggacacacttatctctgaagtttttctccaggctgaacatttctattatcagtggcccctaatctggaaaaacccatcattctaatctagcttgtatccccacatcatgagaaagagggaagaagaagaagggatgatgtgtggtagagaagatgagggttaactttagcctttcccaaacactggcaacaaccacttcctcaacaatttttctatttgcttcagcctactcagattttttcaggtttttctagctcctccataacctcactccctcccgaggtctctggttcaaagaccaccctaccagcccctatttgcttcaggttatcctgttgagggtgggtgggaagagtgagaagatataaatgaaaaactggccacatgttgataattgttgaaactagatgatggtacgtggacattcattataccattctccccacttctgtatttgtttgcaatttttcataataaaaaagttttaaaagtcctccagtttccaacacactcaagagagagccccaaccccaaacacagagtttcatggaaaccccacaccaaggcaagaggcagagatgatgattccatttcatatatacactcattttctaactttttttaaaggcccactgctttattttcaatagattaaacctgatttctgagaggtcctgaagttgggcttatttccctggctgggttatgggggagggcagggtaaagggatccttaaaaaagtttacacttctatgtatctcacaatcttattgtgaggatgtgacttgttcagtgttctgaacttttcgaaggaatcgtgctctcaatgcaaagtgtcattctctggaattgcacctggctcaggaaaggactgtctttgtacttgaatttaaatccaatggagaactttaacacgggcatttgcatgactgagaattgctgctgtcttttttccgtatgtcactttcttgaatgtgttctaataaaatgattctaaagcag

SEQ ID NO: 11613 - DNA, 697 bp, Homo sapiens
gtgcttcagatacatttttcagatacaatgtgaagacattgaagatatgtggtcctcctgaaagtcactggctggaaataatccaattattcctgcttggattcttccacagggcctgtgtaagaatgggttctggagttctcatggtctttaggaaatattgagtaatttgtaatcaccgcattgatactataataagttcattcttaagcttgctttttttgagactggtgtttgttagacagccacagtcctgtctgggttagggtcttccacatttgaggatccttcctatctctccatgggactagactgctttgttattctatttattttttaatttttttcgagacaggatctcactctgttgcccaggatggagtgcagtggtgagatcacggctcattgcagcctcgacctcccaggtgatcctcccacctcagcttccagattagctggtgctataggcatgcaccaccacgtccatctaaatttctttattatttgtagagatgaggtcttgccatgttacccaggctggtctcaactcctgggctcaagcgatcctcctgcctcagtctctcaaagtgctgggattacaggtgtgagccactgtgcccagcctaattgcagtaagacaaaaattctagggcaccaagaggctaaagtcagcacagcttttcttgtgtcctgtatt

SEQ ID NO: 11614 - DNA, 131 bp, Homo sapiens
cagcacaattttggcaattttaaaggaagatacagaggtgattgtacttcagaatgataaacccatataccacctaaaatcaattttcttgtacaactggtacacactaataaacaaacatgtgagatcag

SEQ ID NO: 11615 - DNA, 151 bp, Homo sapiens
tcttcgcagaccatagctgttctggctgaaggcttagcaaagatgttggcagaggaagcagagactgggctgggtctcgagtggcccaactgagtcctctctgtctcctgtgtgctcccttcctcacctgaataaattcatgtctctctgg

SEQ ID NO: 11616 - DNA, 712 bp, Homo sapiens
cggtcctggaggtcctgtggccacgcggggcaagtgcctttccgacaagacccccggggaatgcaggtgctgccggccccaggacccctcttcaagagccactgcgtgcactcacctggccgccgggccagcgggcgcagggcacacctggccaggcttgggggcagcccatctcaggtggccctgcacgcgtgtgcctgcctcggcctgtcgcctgaggcctgcttcctccacttgctccagctgacaggcacctctccaggccccgtagatgggcaaggacttgataaccagggttttaggcttttaaaggccattttgggggtcagccctgcccctgaacctgttcatggtgcatcagaacataatgctgacaccggtgtcagtgtggcccgagcctgtgtcctccccacctcgcccaccctggcaaggacagctgcggccaaggacgaaagccctcccttggctggcctcacgatggggccgtcccgggagccaggtgggagctgccttccactgccatcgggtctcctctcctctcccacgcggctggccctacccaggcgccaccttcggtctcagtctggcaagacgctgggtcttcaggctccatgccaacagagcccctggtgcaatgcggtcacaggttttatgggactttggtgagctgggcggtcatggttttgaaataaatgtattttgttactttctg

SEQ ID NO: 11617 - DNA, 200 bp, Homo sapiens
ggagcagacatcattccctgccctggcagtgacttggagccctgaagaagggaccaatcatgggaccacagccactgtgccctgccgtttcctgctgggcccctgcatatgcccctgagcctggggctgccacgtgtttaggaaacaaagtatgcgctactgtctgaaaacaaataaagcagatgcctttgttttcagtc

SEQ ID NO: 11618 - DNA, 3368 bp, Homo sapiens
gccccagctgtgatcatccagcatgatgcagcgtgaggacagctgagcagggaccgggacagccctcaccgcatgcgtgtggagtgtccggtggtgctcgggccgccgcagtgcagcgactgcccggccctccctcccctgcctcacccggtcgggtcccggctcttcctgtgtggaggtgatggtacctgccacaccacagctgcgcacacagctgcttgctcaggggccgggacagcactgggtgctcaggctggccaaggaccttcattgcctggcaagagctgcccagtggccttcatgggagaagggctgacctctgaggggctgaggggtgaggccagggccctccagggggaggggtagccagcttgggctgtccccttgagaccaggacaagaggctgggggtgtcagcattcccagctttccaagctgcccccaggcggcagagtctgagggtcccggggcccggttggcagctggagaaagaggcaaaaagcccgtagccgggcaagaggagctcaagtcggtctgggcccgttgccaccgactcccacctccagcacccatgcccgctgcaccgctgccatcctcagattcaccgcgtgctctgcgcggccgaggccggagcaccacatccacctcgccccagagaggctctgctccctcctatggaggggctgtgggccaggctgctcagactcctgggtggcttccagacggaccgggcagcccctctccgtcctcagggctgtgcctctgggagccactgggccaggggccccgggtcgcagagagcacgttcccgttatttattcccctccgcgtcctacacaggctgccctggcagctgtcttcaagggtaggctgagctccccaccctggagcccctgagggcggcccctgagcactcctctctctccactctctctgtccctgccccagcggcttccagtgtggcatctcagcagtgtcctggcccctccagagcagtgggacatctggggactgtttttgtgtttaggggaaaaaattctgctgcactctgcttgggccttgaggtctgtggcagggctcctctggcccgcagtggcctggatctatctgggccatgagtgacgggcagtgaccagagggactggaggccagcggtgtccacccttgccctcagcaagagagaatgcattcttaaaagaaagctgtacatgtatatatatgcatatatatatatgtggctctagcctcaggctccagccccagtggggtactgtacagttaactgaagaagaattttaaagacgatttgaacaagaaaatgaaggcagtgggaaagcaatgccaaatggttgtggagaaagtggccggagcctccctggagtggagcagccctgaagcctgtgccccccgacctgcgggccgctgttttggtttgacatgacaaggaaaggacttcctgctgaccctgagagcctctggggtgccgcggcaccacggggcatgcatgattgtgctagcgtttagtctgagttgatctttttaaaactgcaagtgttgaatactagaggttgttagacccttttttatgttttttaattaatcagtcacttgtaaaagcaaacaagcggtccatccccttttcaaggtcacttttttgatggtaccgaagatcccatggacattaagggacagctaactgtggccagactcagccccatgtccttggccaggcccaaggagaggactcggccccatggggtgtgccagtcttgcagtccgccccagctgagtagcgtgagccagatgacgccacagagacccgcctcttccctgaacgcgggtcggtgtggagtcagtgactgctgactcagggagctccttggccccgtgggcactgtgccagggctggggccttctgctgctgccacacccagctcaggcctgggccagcccctgcccccagcccactgagggggtgggcttactccctgggcagtcttgggggccagagctgaggccagtccatattacagtggctgggctgtttttttcagtagcccctagcattggctgggattcctgttcctgggtgcgcctccacctcccttctgatgtttcctggctatggtggggtgggaacctcagtttcccccaaagtcttccctggatgctggcttcaggttgaagtccctggttcttccagttcctcacgggttaggtaggggctcctgcatcaccttcagaatccagttccaacccccactctccttaggccttgtgctctgctctgccctgccaggctgcccttgtccatgtgagtagcatgggcgggtggtggggacggcagtggtgatgaagggggtgcaccacaggcctcatgaagcagttcccacatgggcgtgtggctggggcgtggccaccacagagcacatggctgtgtctaggcgcaagcactttagcagtatctgtttacatgcgcaaggatcaagccgactacctgtgctgtctactgggacagcagtctccgagctactccgtacctccctctgccaggtcgtggagttaggccccagtccctacttgtcactggttcccactgtgctcctaactgtgcagcacctgggagctctggcctggggctggaggccctggtaggagctgcagttggaggccgttctgtgcccagcagcggtgagcggctcccatgggccctgtgtctgcagggagccagggctgcggcacatgtgctgtgaaactggcacccacctggcgtgctgctgccgccacttgcttcctgcagcacctcctaccctgctccgtgtcctccctctccccgcgcctggctcaggagtgctggaaaagctcacgcctcggcctgggagcctggcctcttgatatacctcgagcttcccctgtgctccccagccccaggaccactggccccttggcctgaggggctgggggccccacgacctgcagcgtcgagtccgggagagagcccggagcggcgtgccatctcggctcggccttgctgagagcctccgccctggctttctccctgtctggattcagtggctcacgttggtgctacacagctagaatagatatatttagagagagagatatttttaagacaaagcccacaattagctgtcctttaacaccgcagaaccccctcccagaagaagagcgatccctcggacggtccgggcgggcaccctcagccgggctctttgcagaagcagcaccgctgactgtgggcccggccctcagatgtgtacatatacggctatttcctattttactgttcttcagatttagtacttgtaaataaacacacacattaaggagagattaaacatttttgct

SEQ ID NO: 11619 - DNA, 768 bp, Homo sapiens
tcagccctctagacccagacccacccaacaatcagagacatgtctggtggagcccagccagctgtggactttaagtttttggaagagtctcagatgtaggttgtttactattcttcagtacagagtacacctcctggactcatgcaaggcccctctatttgctatttctctttactttgtttttctgtttgcccttcaaccctgatactggcaccttttctcctccccagactgtcctgggcccgccctctagtagatttgctgtgagtcctcaaacatgcatgcatgcaaccttgtaaaatgagcttatttaagctcaatccaacctgtagaagcgctcagttagaataggcctccaggtttggtatttgggcacctgtgccaccctccagcccaggactctctctgcccctcctcagcaaagaccctcagcaggatccccgcatccctggccaccctgtggggcctgctgctgtctcttccagcattggtgtgtcctccagggaaccacacactcaagcactttggaacccatggaatccagtgagcacgtgctgtgggctctgcctagaagcttccaaaacctgtttgttccagtggacacagagtaggaaatgctgactcgttcagagcgctagtgcccttgggtccttgcgggtgtgctcttctcactcctcaccccatcagcaccttctggggtaatgcacacaccagtaaaatgtacagtgcatgcttttaaaaatttttaaataaatgatactatgctat

SEQ ID NO: 11620 - DNA, 658 bp, Homo sapiens
ggccctatgccatccataaggattccttgggattctggtttggggtggtcagtgccctctgtgctttatggacacaaaaccagagcacttgatgaactcggggtactagggtcagggcttatagcaggatgtctggctgcacctggcatgactgtttgtttctccaagcctgctttgtgcttctcacctttgggtgggatgccttgccagtgtgtcttacttggttgctgaacatcttgccacctccgagtgctttgtctccactcagtaccttggatcagagctgctgagttcaggatgcctgcgtgtggtttaggtgttagccttcttacatggatgtcaggagagctgctgccctcttggcgtgagttgcgtattcaggctgcttttgctgcctttggccagagagctggttgaagatgtttgtaatcgttttcagtctcctgcaggtttctgtgcccctgtggtggaagagggcacgacagtgccagcgcagcgttctgggctcctcagtcgcaggggtgggatgtgagtcatgcggattatccactcgccacagttatcagctgccattgctccctgtctgtttccccactctcttatttgtgcattcggtttggtttctgtagttttaatttttaataaagttgaataaaat

SEQ ID NO: 11621 - DNA, 322 bp, Homo sapiens
gcgcagccgaggcgcaggccgagtgggccgccaggaccaagcgaggtggaccccgaaacggacggcccggagcccgcaccagccccgcgcctacccgggccgcccccgcggcctggccctcggcgcgggctccttcccgcttcccccgacttcacacggcggcttcggaccaactccctcactcccgcccgaggggcaggcctcaaagcccgccttggccccgctttcccgcccctgaaccccggccccgcgggcggcgggcggcgcttcctgcgccccgggactcaattaaacccgcccggagaccacgccgggcccagcg

SEQ ID NO: 11622 - DNA, 444 bp, Homo sapiens
gcccctggctgggcagccccaggggccaggagctctcttggagacaagcatgtgtatgcgtttgtgtgcagctcttcttcctgctccctgcacattgagggcttcatggggggtgcgaggggctcagtggggcttctcttccctccatgagcctggagaccccaggggaggatccatttgggatgagccccctccccccaatgcacaagccagcccccaagaccctgggggtggacaccactcagggaaacctggggtgggggtgggctttggtcttagcactttccttctccagatcccccctacccaccccagtcccaaatccagtcctctggcccttgcctagccctgaattgcttctctaagctggtgttcccatgcacagggccattcaggaagggctgggggagtgtgtgtggcaataaagcttgaaggcaccgtggg

SEQ ID NO: 11623 - DNA, 3393 bp, Homo sapiens
ggtgaccttgctggaggacctcctgctgttctgcaaacaaggccttcagaacggagagggcccacagcatctctgtcatgccagtcatgtgcactgcatgcgtagtggcctgtgtgtgaagaagcagtgtgtgctgggcactgggtggggagcatggggagtctcccttcagggacttcccagcctgatagggtaaataagacactacaaagaagaggtgatgacggccacaggaggggcacagggccacaggagagcagcagagggagggtctcactctgctggggacccatgaacagcactgccaaggagcagaccttttattgggtccccaaaaggatgaggaggaagtggtcccatgggtgcagtcaatgatgagttcatggaaacagccaagcaagggcccagagacagaaagctcgtgcctgtctgcagtatcctggctgggccagattgcctggggcacagggtttgtggtcaaggctggaaaagtaggttgtagctagatgaccaacgcctgaaagaatgaggagttggacctggtctgtaagccagggaattgtctcaaaatcgtgcattaagggagacttctctctgtgctctgttccagcttcagtcttataaacactgaccattctccttcagaatccccttctactgaagcaacgccacccagcagcagggctagctgtactaccagcccctaacaaccaaggcactcaagccagaccacagtggccaagaatcctgccctgggctgactctgtccgggacagggatgtggggttctgcagcctggtccactccggggctggcagggagtgtcctggagtgggctgacccaggctgcctttgcccacctctcagacacatacaaccatctgcagggtagtcctggctgaacaggactcgcccaagccacccaagccagggacagagaaggctctggctgaggacaggggaagaagcatctcctccagctgctgccaaccccatggcccggcctttgcaataaagatggagccacccacttcagcccacaattgagcataatcagaagacagtcactcccaaaatatatgttagaaataacatttaaatgacacatgggaagtccgtctatcttacttcccgtctctaattctggaagcacagtggattcaatgagggcatcttcatagctcttcttcagcaacttctccaaagagtttcacattgcacaaggctcttttggaagcaggagtggtcagtaaattcagagggagacaaaccctaagtagagacagctttctttggtgctgagctgtgtgattgtgatgaccgctagcctgtgcccctaggttccagctgcccaccaggcaggacaggcaggtcttgccaaaactggagcctgttggaaacctatttctgccaccaaggagagggaccaggagacccagcgtaggttggccccaagtaggctcaactcgggagggtgggggtcccgcctttctcttcgcacttgtgccccaagtgcactcacagtacctggcatgtgggtgacctcttgggtggccggcatggggcagtgtttctcaatcagagggcctgggccccgagcacgtccaggaatctgagttaaagtgagcttactctttccccagtggatgatcatgatctgtgcattctttttcttgctacaaagatgttcctcctagctgctgtgttggctgtcggcggccagggttgaggacggcctccacagggcctccacttccctccattcctcttcacatagtcactccacctgctccacctgcttgaaaagtccagaaagctgccgcgtctccctggctcaaggaggccttgttggcatgtcatggcacatctcctagatgttttgggttcaagatctgggttccagcccccgctctgctacttagctaaccatgtgaacttgggcaagatgacctttctaaagcctcatttccctcatatgcagagtgggaaggaaaatattaatacatactttatagggttggtatgaggattaagtgctgagcaaagtgcctgtgaaatcctgaaataataagcatgttttagctgccattattatcatcactgtcattatcattgcagtcagcacttcccaaagcaaggtgcccaaaacagactcagtgctttagggaagtggggcagatgtgcatatggcttgtgacggttctttctttttttttttttttttgagacggagtctctctctctcgccaggctggagtgcagtgcagtggcacgatctcagcccactgcaacctccgcctcccaggttcaagtgattctcctgcctcagcctcccaagtagctgggattacaggcgcccaccaccacacccagctaatttttgtatttttagtagagacggggtttcaccatgttggccaggatggtctcaatctcttgacctcgtgatctgcccgcctcggcctcccaaagtgctgggattacaggcatgagcccctgcacctggctgagatggttcttaatttcccataccctgttgcttggctcctccagttggcggctgagagttaagcaagggtttactcggatctgaggcccccgatgccctcaatggacacattcaggaccctgtggcagctcagcagaggcacctgagggtcacgctaggtgagaccatcgcccgcctgtgggaggcaagataagtgggtaaacatcattcctgtctaatgcgaggtctgggcagtgtcccagtggaactttccagagagtgccaagggaggaccgagaaggggcatgacctctgctggagccaggagggcagtgaccaggagctggcttagcactgaagggaagcaggcatcaagggcaggatttctcaaacttcttctgaggaatccccgaggtcgaaaccggtgcttcacagatttcagatgtctgatcttgatttttctttgattccatacaacagattgcttgcctgggttagtgcttattttaagttcttggtgcttcttgtctgacttctgtatttgcaattaaaaacaacatgaccctccccacctgcagccagatatcgttagaaattcaacttcgaaatatattcctatcactcctgttttcactttaatagaaggctgttgcagtactgcatgatgggctcttataaaacttctactatctgctaattcttatctttgtgacaggattgtttgacactgagcaaggaaacacaataaggaagtaatttggatgctaggctggcagaagcctgcagctgtcaaccacagcctgccccagtgtgttcaacacggtggcattgttctccctgacttcataatgagcaaatgtttcacatttgaacttaaggaataaatttttactaataaaagatca

SEQ ID NO: 11624 - DNA, 2020 bp, Homo sapiens
gcccgtctcccggacaggttgaggaagctgctccagaagcgcctcggaaggggagctctcatcatggcgcgtgctgctgcggcatatggacttttaataatgtttttgaatttcgtattctttcattccactgtgtaaagtgctagacattttccaatttaaaattttgctttttatcctggcactggcaaaaagaactgtgaaagtgaaattttattcagccgactgccagagaagtgggaatggtataggattgtccccaagtgtccatgtaacttttgttttaacctttgcaccttctcagtgctgtatgcggctgcagccgtctcacctgtttccccacaaagggaatttctcactctggttggaagcacaaacactgaaatgtctacgtttcattttggcagtagggtgtgaagctgggagcagatcatgtatttcccggagacgtgggaccttgctggcatgtctccttcacaatcaggcgtgggaatatctggcttaggactgtttctctctaagacaccattgttttcccttattttaaaagtgatttttttaaggacagaacttcttccaaaagagagggatggctttcccagaagacactcctggccatctgtggatttgtctgtgcacctattggctcttctagctgactcttctggttgggcttagagtctgcctgtttctgctagctccgtgtttagtccacttgggtcatcagctctgccaagctgagcctggccaagctaggtggacagacccttgcagtgatgtccgtttgtccagattctgccagtcatcactggacacgtctcctcgcagctgccctagcaaggggagacattgtggtagctatcagacatggacagaaactgacttagtgctcacaagcccctacaccttctgggctgaagatcacccagctgtgttcagaattttcttactgtgcttaggactgcacgcaagtgagcagacaccaccgacttcctttctgcgtcaccagtgtcgtcagcagagagaggacagcacaggctcaaggttggtagtgaagtcaggttcggggtgcatgggctgtggtggtgttgatcagttgctccagtgtttgaaataagaagactcatgtttatgtctggaataagttctgtttgtgctgacaggtggcctaggtcctggagatgagcaccctctctctggcctttagggagtcccctcttaggacaggcactgcccagcagcaagggcagcagagttgggtgctaagatcctgaggagctcgaggtttcgagctggctttagacattggtgggaccaaggatgttttgcaggatgccctgatcctaagaagggggcctgggggtgcgtgcagcctgtcggggagaccccactctgacagtgggcacacggcagcctgcaaagcacagggccaccgccacagcccggcagaggggcacactctggagaccttgctggcagtgctagccaggaaacagagtgaccaagggacaagaagggacttgcctaaagccacccagcaactcagcagcagaaccaagatgggccccaggctcctccatatggcccagggcttaccaccctatcacacgtggccttgtctagacccagtcctgagcaggggagaggctcttgagacctgatgccctcctacccacatggttctcccactgccctgtctgctctgctgctacagaggggcagggcctcccccagcccacgcttaggaatgcttggcctctggcaggcaggcagctgtacccaagctggtgggcagggggctggaaggcaccaggcctcaggaggagccccatagtcccgcctgcagcctgtaaccatcggctgggccctgcaaggcccacactcacgccctgtgggtgatggtcacggtgggtgggtgggggctgaccccagcttccaggggactgtcactgtggacgccaaaatggcataactgagataaggtgaataagtgacaaataaagccagttttttacaaggt

SEQ ID NO: 11625 - DNA, 386 bp, Homo sapiens
gtgtccggtgacctcccccagggcctccttgcccagcccagtccaggctgctgtgccaaatcccaaccagccacgcctcagcctctcccagtctctccctgcagtcctgcagcagcagcccccacccccaagcttggtgctgagccctggtgaggagctgagggggatgggttgctggggccaggagggtctctcctccagcccctgcacactcccacccaggacagcccccagcccaactaggaaagggccatgggcagagggctggtagccagtatcttccactgccccatctgttggccacctgcaggccagtctcaaccctcccccaggtgggcaggcacttgatggctacaaataaatgtcccgtggccccagcccactct

SEQ ID NO: 11626 - DNA, 1376 bp, Homo sapiens
gggggcagtgagagttgagcacagagtccttcacaaaccaagaacacacgtaggccttcaacacaattcccctctcctcttccaaacaaaacatacattgatctctcacatccagctgccaaaagaaaaccccatcaaacacagttacaccccacatatctctcacacacacacacacacgcacacacacacacacagatctgacgtaatcaaactccagcccttgcccgtgatggctccttggggtctgcctgcccacccacatgagcccgcgagtatggcagcaggacaagccagcggtggaagtcattctgatatggagttggcattggaagcttattctttttgttcactggagagagagagaactgtttacagttaatctgtgtctaattatctgattttttttattggtcttgtggtctttttaccccccctttcccctccctccttgaaggctaccccttgggaaggctggtgccccatgccccattacaggctcacacccagtctgatcaggctgagttttgtatgtatctatctgttaatgcttgttacttttaactaatcagatctttttacagtatccatttattatgtaatgcttcttagaaaagaatcttatagtacatgttaatatatgcaaccaattaaaatgtataaattagtgtaagaaattcttggattatgtgtttaagtcctgtaatgcaggcctgtaaggtggagggttgaaccctgtttggattgcagagtgttactcagaattgggaaatccagctagcggcagtattctgtacagtagacacaagaattatgtacgccttttatcaaagacttaagagccaaaaagcttttcatctctccagggggaaaactgtctagttcccttctgtgtctaaattttccaaaacgttgatttgcataatacagtggtatgtgcaatggataaattgccgttatttcaaaaattaaaattctcattttctttcttttttttcccccctgctccacacttcaaaactcccgttagatcagcattctactacaagagtgaaaggaaaaccctaacagatctgtcctagtgattttacctttgttctagaaggcgctcctttcagggttgtggtattcttaggttagcggagctttttcctcttttccccacccatctccccaatattgcccattattaattaacctctttctttggttggaaccctggcagttctgctcccttcctaggatctgcccctgcattgtagcttgcttaacggagcacttctcctttttccaaaggtctacattctagggtgtgggctgagttcttctgtaaagagatgaacgcaatgccaataaaattgaacaagaacaatgat

SEQ ID NO: 11627 - DNA, 506 bp, Homo sapiens
ggcaggggacagtgtcccctgctaccgcccgcccctacccatggcccgttgctggatgactgttactcttttttcagaaggtgttgggattatcacaggttaagccttttgttccccgtctgcacctgaagggttgtcgcctggcctgggagagcctcttccaggttttgacctgcaggcagtgctctctaacaggaccatcacagcttctgaactgagccggagagagagaatggaattgctgacccctggaactggcgggtattctggtcattgaggagacaccatagtggaaactggggcttatgctgctgcctccagggtgtgaggtgggtggggacctgtgtcaggtgtggatagccatttctgctcaaccacacattctctaagaaacagcttgaaagctctgtctgggtcattcatttaaactagaagcagaggcacttaaaacatgtaccaggaaccatttaacaaagaatataaaatgtcacaatctgtgtactgtt

SEQ ID NO: 11628 - DNA, 892 bp, Homo sapiens
ggttactggcccaccctgtgggcaccctgctcagcctgactgcctttggaccagcctccatgatcagcccaaccactgacagctggtctgaccaccgtcacatcatcagaacttgagtctctgctggctccttccaaggttaagcccgagcccagagcctcccattgcagcacctggcagccaccccttcctcgggctcctccacattacctcgcagcccctgcattcctgccaccagagtccacattaaagccctgcagttgctggatcagcctgcacctgatgctgtatctttcccctgccctcagggcagagatgcccactttctgactgagtctgaccccaaatctcttccccagagtttcaggatctcctcccctcccagcactgtctccttcctcccactggcatgcctgctgcaacggagactgggcccaacctttgggatacctggtctgtaggaaagcactccacaccccaggaaatgttgatgactaggaaaggctgagggaattccaaggaaggaacaatcactgtaggctccctggtagaagctggccttgaaccagctctagaggacaggtaggatttagacaggtaaagaaaggagggaagggcatagaatctaaggtaatggcaagagcaaaggtgtggaaccagaggggggccccaggaatgcagtgcttggagcccctgctcctgaacacgcattaactcctgaactgcgagcccctcctcctgaactgcgtcatggggttgcaggaaggagtaggccaagatacccagtctcacctaacttagactgtcattagagagaaagatccattgccaaacagtgccatgggggtgaaaccagtgctaaatggaggtaaaataaagtttgtaagagccc

SEQ ID NO: 11629 - DNA, 131 bp, Homo sapiens
gccaggcccccagaacccctggctccaggccagggggccagtccctgaggcaggtccccagactccaccaagcctggtcagcccaaaccaccagaagcccagaataaactggcagctcagctgttttatat

SEQ ID NO: 11630 - DNA, 347 bp, Homo sapiens
gaggccagcctgcataggacctcatacccttccccaacactacctggaagttgtgccttcctcatgaaactggcagaaaccccttcccaagcttctgtattgaaaaacaattaggaatcattgcagatttttttttattctgctcccacctcccacccgggactacttgctggtgactttttttttttttttttttaaataggggatgattttagcttgtcctaaatcttgctgtccacccttccaggaaagggacattgtaaatgaataaaacattctcaactcctcttgaatctatcccccaagaaaccatcttatccctgtaataaatcagcatgtatttattg

SEQ ID NO: 11631 - DNA, 465 bp, Homo sapiens
cacaggactttcagagaccaaggccagggtctgctgcactgctgttctgataataggttcttaacattgtatgtatatgtgtttgctttgggaggaggtggcactgtgttagttgacagttgtgggctcatgtagtcttttttgccatgagtaggagcccctagtggggctggtggacagctttggaagaggtgtcctgctgctgttaccagccatgtgggccccataggggcactgcgcctgctgccctttcctggcagggctggtggagtcttccctcaaagcatgccttacccagctgggaagtctctgccctgatctggtactccttgtagtaagctgttttctgctcagccactgggctctttcacttttttagttcttaaaaatttatttttaagttctaaaataaaataaaaataagttcttaaaatttatttttttcctgaataaattgtatttggt

SEQ ID NO: 11632 - DNA, 82 bp, Homo sapiens
ccagcatcctggggacggcctgcaccctctgcccgccttggggtctgctgggctgtgaaggagaataaagagttaaactgtc

SEQ ID NO: 11633 - DNA, 1625 bp, Homo sapiens
gacctgcctaggactctgtggccgactataggcgtctcccatcccctacaccttcccccagccacagccatcccaccaggagcagcgcctgtgcagaatgaacgaagtcacataggctccttaattttttttttttttttaagaaataattaatgaggctcctcactcacctgggacagcctgagaagggacatccaccaagacctactgatctggagtcccacgttccccaaggccagcgggatgtgtgcccctcctcctcccaactcatctttcaggaacacgaggattcttgctttctggaaaagtgtcccagcttagggataagtgtctagcacagaatggggcacacagtaggtgcttaataaatgctggatggatgcaggaaggaatggaggaatgaatgggaagggagaacatatctatcctctcagaccctcgcagcagcagcaactcatacttggctaatgatatggagcagttgtttttccctccctgggcctcactttcttctcctataaaatggaaatcccagatccctggtcctgccgacacgcagctactgagaagaccaaaagaggtgtgtgtgtgtctatgtgtgtgtttcagcactttgtaaatagcaagaagctgtacagattctagttaatgttgtgaataacatcaattaatgtaactagttaattactatgattatcacctcctgatagtgaacattttgagattgggcattcagatgatggggtttcacccaaccttggggcaggtttttaaaaattagctaggcatcaaggccagaccagggctgggggttgggctgtaggcagggacagtcacaggaatgcagaatgcagtcatcagacctgaaaaaacaacactgggggagggggacggtgaaggccaagttcccaatgagggtgagattgggcctggggtctcacccctagtgtggggccccaggtcccgtgcctccccttcccaatgtggcctatggagagacaggcctttctctcagcctctggaagccacctgctcttttgctctagcacctgggtcccagcatctagagcatggagcctctagaagccatgctcacccgcccacatttaattaacagctgagtccctgatgtcatccttatctcgaagagcttagaaacaaagagtgggaaattccactgggcctaccttccttggggatgttcatgggccccagtttccagtttcccttgccagacaagcccatcttcagcagttgctagtccattctccattctggagaatctgctccaaaaagctggccacatctctgaggtgtcagaattaagctgcctcagtaactgctcccccttctccatataagcaaagccagaagctctagctttacccagctctgcctggagactaaggcaaattgggccattaaaagctcagctcctatgttggtattaacggtggtgggttttgttgctttcacactctatccacaggatagattgaaactgccagcttccacctgatccctgaccctgggatggctggattgagcaatgagcagagccaagcagcacagagtcccctggggctagaggtggaggaggcagtcctgggaatgggaaaaacccc

SEQ ID NO: 11634 - DNA, 20 bp, Homo sapiens
ggccagaggcaggggcggag

SEQ ID NO: 11635 - DNA, 721 bp, Homo sapiens
acccagttttccctgaagtcgagtttgtggtctaaggatgtcttgagccctgtgtgccccaccattcatgacctctgtattctctagttagatccctgaccataagcctgagcccctccctcccagccccatattcacacacatcccagcccctggccttgccctcttcctttaggcatgtgagaaaatcagcctagcagtttaaaccccactttcctccacttagcaccataggcaagggggcagatcccagagcccctctcaccccccccaccacaggcctgctccttccttagccttggctaagatggtccttctgtgtcttgcaaagactccccaagtgggacagggagcccctgggagggcagccagtgagggtggggtgggactgaagcgttgtgtgcaaatccagcttccatcccctccccaacctggcaggattctccatgtgtaaacttcacccccaggacccaggatcttctcctttctgggcatccctttgtgggtgggcagagccctgacccacagctgtgttactgcttggagaagcatatgtaggggcataccctgtggtgttgtgctgtgtctggctgtgggataaatgtgtgtgggaatattgaaacatcgcctaggaattgtggtttgtatataaccctctaagcccctatcccttgtcgatgacagtcatcctaatgataataaaacctgcatccagataatc

SEQ ID NO: 11636 - DNA, 803 bp, Homo sapiens
agatacaaggtcatcataggagaaaagaagatagctccactgacatgtataatcccatgtggttctaaccagaatgtataatcatctgttagaggtactgtggtaaatgacagggacttttcacaaaaacaattggctaatagcatgctaaatttgttctccatctcaaatcttgaggagaagaattttcggagtgaagacatcagtaagaagacctgacaaaccaggaatgatttcatttctcctgagaactggggaaaccgacctataagagttaacttttctttgaaagctctgcacagttcaggcatcaattttgatgatgtatctgcctgtaaaagattgtcattattttcaacacatctgtatctcagattggactcctctaaaagcatttggaattggaatttcctaggaatatcttctactaattcttaaaactggaaagccatgcccatgtcatcggttctggggtgaccctaacatttcatctagcagtgattgtcttctaaaacccacctgtcaggctgctatgacccatagttaatgctttctcttcaccaggacattgacaaaagaatggaattggtgaaaaagaaaaaagtgataagaggctaattttatgaaccatattttttgctgtaatcttttgtttaaattttagcagctttgctttgtgtatactgaatttttgcagcaaaagaattacggaaaagcacagatactctatatgaccagagatgttcttgggaattacaatgtagcaagagataatttctaaaataaaaacaagtctgacttgg

SEQ ID NO: 11637 - DNA, 1798 bp, Homo sapiens
tgcatattgcattattttatttgcaaactaggaattgcagtctgaggatcatttagaagggcaagttcaagaggatatgaagatttgagaactttttaactattcattgactaaaaatgaacattaatgttaaagacttaagactttaacctgctggcagtcccaaatgaaattatgcaactttgatatcatattccttgatttaaattggcttttgtgattgagtgaaactttataaagcatatggtcagttatttaattaaaaaggcaaaacctgaaccaccttctgcacttaaagaagtctaacagtacaaatacactatctatcttagatagatatatttttttttatttttaaatattgtactatttatggtggtggggctttcttactaatacacaaataaatttaatcatttcaaaggcattctatttggtttagaagttgattcccaggagtgccatatttcagctactgtatttcctttttcttgtaatgtaagcagctcagataccatgtgctatcatttttgtatcaagttttttgcacaggatgtgaccactgtcagatcactgttcttttctttctttttgtgattgaaaagcctatactacaatttgaagtaaatttttgtttttcttagtaagtgtaaatggttgctttatttttattttaaaaaggtatgtctttggtttggcagaattcatgcagggctatcaagtggtgttctagggtaacagtgtccataattaacgcttagtcatagagtcaaaaacatttaagactgattgggttgaagtttataataaattatattaacatgtcttcctttttgaggtaaagatatatactttgtcaaatatcattttgtcatcctctaaatataaatccaaatacctcagctaagtaattctattttattatttttactgttatgtatgtttttaatcatatttcttaggaagtataggctactggacttagaataaaaagtccccaaacccaaacaaatggtttatgaaccagagtatatgtggaagattctttgctggtcttgctctgtgtgcatctgaagcttctttggcctagattttagcacaaacctgagtatatctcttctactttcatcatgtgttctgtaccttctttttgtttcattgggcatgctagggaaataggtggattttgtgtgtaatgccatcagtttttatgaaagcttgatgaggtataggtcatttgttttgagtatgtgggccagaaatttaaaattagaaatttgtttttctgttgagtatataaacaaaaattggtcccaattctaacaggtttaatccttcttgaagccaataagttttatcttttataatctgtcaggatgaaccactccttagcttttatccaatattaaactgcaagtgttagcactgaaatattgtcattgatagggaaaatatctattctttgagtcattgttactgaggcagttgagtgtaaggagctggctgcagtttattctacttaaccctttaaggctgaattgtcaaatgtacattgttccatgtcgttagatggaacatggaagccattgtctaatcaactctatcattagtgacttgatgtctcataccttaattttgtaatgatttttattctctgttacaaagacttgaaatacgtattaaatgcacgttaatgttttgctttgcattttaggttcagattatgacttgattgaaataaatgtgcctatacattcatttgctttgtactataaaaataaaaatgatttcttaagtt

SEQ ID NO: 11638 - DNA, 520 bp, Homo sapiens
gatacatccccatctggagacaggactgccactgacagaagatgtgagctgtgtctaagtccagtcttgtgcccagccgtgtctgcgccttcactctttggaactctgcatacaacatcttagcaccatcttcctgcagctcttccttacctaaataaagaaacagcccaagggcagtatttctaaaagcactgtaacagcttttcattttctccacatatactacaaattctataaagaaagaaattaatttaaaaaaactaagatgtttttctcttctggcttcataaatgccttgctgtataaattgaaatattgatactgaactgtctttttaatgatgacctaactttattcaacccatcggaatttactttttccctgaaataagatcttttccactggtctactacctgaccataaacatgtctgcatttgaattctctaaaccctaaatctgtgtctatgaaaaatacaaatgactattaaatattattctctttactgttctctttcaccg

SEQ ID NO: 11639 - DNA, 683 bp, Homo sapiens
gcaactatcaaaaagaagcagaagttcaagtggacaaatttatgtgaaaattcatttaacatataagctgaactctattatggggaatggatacaaaagcagagctcccatcttgactttcaattcctcatcagaagtactggcttctttagagagtagtaagcatggctgcctatgcttggagtcataagtgttatttggactataccctgagataagcttatagatcaagtttggctcccttgaaaagcatttctctcatgtgcgccctcagggcttccagcaggattgagtcaccctgacgatgaccggggagaagccgtgtgctcttcattattttcagctggaggacagagctcagtgcctgactgcctagggtctcatggactgtaggcagcctgccagtgaaggtcactggactctagcctacaacatgctgagctacagcccagaagccagacatgcctgtcttagctgacctgtttttggtccacttttgcccttccatgactaataaggaagatatgtgtgtatttcatacacacacaaggacctggattaaaaatccaaaaagtgattctcttctatgatttatttcaaactcatccatagataattcaagatttgtattcaaaataaacatagttttcacagttacaaaataaatcacctattttatcttt

SEQ ID NO: 11640 - DNA, 350 bp, Homo sapiens
ctttcagagcagtgttttttccaaagctggaatagcctgagactctagggcctgggtctacaaggagcatgactccctaccccaccattcagatgtggagaatgcagtgaagtaggccttggctgcttacccacatcctgaccagctgtcacctcttcatttcctgttcagccactctttaagcaatcactgagcccaatgctcagagatagctcagacctgtaggtggttgtgctttgcttgcctgtaggagccccacatgccctttacagttctgggctgtctatgacttacgatatcacctcttctttttaaatgtccaagtggaaataaagtgatttgaactttgc

SEQ ID NO: 11641 - DNA, 2744 bp, Homo sapiens
aggcagccctccatggacccatgaaaactgagatgaggaccttggtactagggagggagggaaggacgtgggaatgttttcttattggatctgagagatgatacatgataccagatgaaaagaaggagaagtgtgtaccatatgttttgagcagaggaccctccaacttatggcatcaggggcaaaaagtcacagcttatcccaggcaccctggcaggttctcagagcctgcctcctccctgtttatatgcgtacagcctggtaacccccaggcatgcaaatatacaatctgtaacaacacacagcctgacaccttcccctggtcatgtccagtttaaccttgaagtggcatttgtcacactaccctggtccctgattgcaaggagcttctgaagcaagggtgaatccttcccacactcctccatggttgccctccagggtctagcccagcctatttgttagggaggatagagaaacagagcaccccctgtgctttctgaaaatagacttgctcttgtcttgagtggtgaccaaagcagttggctcttaaaaggtgggagagcagcccaaccaatccccaatccttttcttctgaaactgagcaggaagggtaaggaagtggctaggtctccttggactgagcatggacatgagtcctgtgaggactggtgtctctcctctagagctttcatctttgggatgcctgagactccgagactatcagaagggaattgacccaccccagtctagcaccaccctgccttcacttcatctacataaaggtggtataaaaacatagactggaggaggtaatccatggagagagaaaaagaagagggctcaggacaaggccctgaggaggcccaatcctaaaagtttgggcagagggaaccaggcacgttaaagaagacagaaagcggactatgcagagtgcttgtgagggtttcactaaaacagaggcaaaactgtccattgaattcagtaacatgaagtgtttgatgactatgatggcagcagtttcaggaagggcggtatggaaggcaggctgtactggttgagtgaatggaaagttggggagtagaacgtgtgagaagttggccttcaaggggctcaggttaataatagagagctatggagtcaaggcatgtttaagatgggaggtagagcatgccaatattgatggcaacagtcaagatggtgtgatgagagagatgggaggggcacaaagaggaggacccctgaaggagcagagtccatgagaaagaaggagggatgggacctttgtaggaagagacacagtcctgcagcctcatatggctcaataaaacagaaaggggcaagtatagaagattaggatgactaaattaatggggaaatgatgaaggagtttgaatctcttctttgtgaaatgaagtgagactatcagctagttgtgggtggagtgtgttctcagaaggtatgaagtagatgttttcctaggtgttggaaaacaggttgattaaggcaacagcagaagggcagggcaaggctgagctctgagatggtcagtttagagtaggatgctgggcactcaggtgtgtgtgtgttgagtggggctctgcacacacctgtcttcccctcatcaggattcaggagctgggatgggtacacttactgcagtgttggggttttgccagggaagtaaaaggagttgagagaaagatgggtcagttcagaagacatacacaggagaaattgtagtgatgaaatgtgcagtctaaggtttaatctgaccaagaaattggaattgaaaacaggaggtgactagggagggattaggaaattagaggtcttgacaagatagaaactccagcatggtgaggggttgggcagggaggtatatttgagccagacaggagtgctttggaaattgagaggtggagcaatctcaggtaaaggcaaaatagagggtatgacctggggttgctggccagagccagggaggagccttaagaagtgaaatctagggttggcgaggctggagggcagggtgagcctccacatgggtgctgaagcaagaaaccgacagatgttgaggagaatggtgtgacctaggagtcagcatccttggtgaacaagaggagtggccacaaggccagtggcacctgccagaggggaaagcaggcatgacaggatagcatctcccaggtgagagccttttgaggaagggagggtgggcagtggtctggaagcttgatgcagagcagtgtgggtcccactggcagcccttggtcttagaagaatgggagtacccagtgggggagcagctgtacaatgaggtagactcctagaggttaattatcatctcctaatcttaccctgacccttttgtcaaacgttatctagattaaacctcagtataggcaggctgcaggaaatggacattccagtggcccctggggttccagcctgtagcagcttcatctgtgctttgtgcacttggttctcagtcatctctgcaagggaccctgacgcctgggagatcagagccactgaccctttatggcactgctaacagaccccttccctcaggtaattctggatccagaactcattatgggatgtaatccaggtcaacactaataccacttggaaggttccgctctgtctcactctgcttgagtatcccactgatcagtctctcagtgcctgcctactgggcagctcatctgtccacttattcgtattaaatttgctttttattt

SEQ ID NO: 11642 - DNA, 1878 bp, Homo sapiens
tgtgcacagagatctctgtagaaggagtagctgccctttctcagggcagatgatgctttgagaacatactttggccattacccccagctttgaggaaaatgggctttggatgattattttatgttttagggacccccaacctcaggcaattcctacctcttcacctgaccctgcccccacttgccataaaacttagctaagttttgttttgtttttcagcgttaatgtaaaggggcagcagtgccaaaatataatcagagataaagcttaggtcaaagttcatagagttcccatgaactatatgactggccacacaggatcttttgtatttaaggattctgagattttgcttgagcaggattagataaggctgttctttaaatgtctgaaatggaacagatttcaaaaaaaaaccccacaatctaggatgggaacaaggaaggaaagatgtgaataggctgatgggcaaaaaaccaatttacccatcagttccagccttctctcaaggagaggcaaagaaaggagatacagtggagacatctggaaagttttctccactggaaaactgctactatctgtttttatatttctgttaaaatatatgaggctacagaactaaaaattaaaacctctttgtgtcccttggtcctggaacatttatgttccttttaaagaaacaaaaatcaaactttacagaaagatttgatgtatgtaatacatatagcagctcttgaagtatatatatcatagcaaataagtcatctgatgagaacaagctatttgggcacaacacatcaggaaagagagcaccacgtgatggagtttctctagaagctccagtgataagagatgttgactctaaagttgatttaaggccaggcatggtggtttacgcctataatcccagcattttgggagtccgaggtgggcagatcacttgagctcaggaggtcaagatcagcctgggcaacatggtgaaacctggtctctacataaaatacaaaaacttagatgggcatggtggtgtgtgcctatagtcccactacttgtggggctaaggcaggaggatcacttgagccccggaggtcgaggctacagtgagccaagagtgcactactgtactccagccagggcaagagagcgagaccctgtctcaataaataaataaataaataaataaataaataaataaataaataaaaacaaagttgattaagaaaggaagtataggccaggcacagtggctcacacctgtaatccttgcattttggaaggctgaggcaggaggatcactttaggcctggtgtgttcaagaccagcctggtcaacatagtgagacactgtctctaccaaaaaaaggaaggaagggacacatatcaaactgaaacaaaattagaaatgtaattatgttctaagtgcctccaagttcaaaacttattggaatgttgagagtgtggttacgaaatacgttaggaggacaaaaggaatgtgtaagtctttaatgccgatatcttcagaaaacctaagcaaacttacaggtcctgctgaaactgcccactctgcaagaagaaatcatgatatagctttgccatgtggcagatctacatgtctagagaacactgtgctctattaccattatggataaagatgagatggtttctagagatggtttctactggctgccagaatctagagcaaagccatccccgctcctggttggtcacagaatgactgacaaagacatcgattgatatgcttctttgtgttatttccctcccaagtaaatgtttgtccttgggtccattttctatgcttgtaactgtcttctagcagtgagccaaatgtaaaatagtgaataaagtcattattaggaagttc

SEQ ID NO: 11643 - DNA, 749 bp, Homo sapiens
aatattcacgagagacaataaacgctgaaaggccagtgccaagtccacattcctccagctgatacgttgaagcaaactcttactgcctttctcctggtttcatgacagtgttattcctttttctataaatatatttttaggaaaaaaagtcagtgatcctaattgtatcacattataagaaagcactctgtggatcaacataagtgggtacacaagaattttttttttcttggtgtatgtaagcacatttgttcctttatatctgtttacaaaactgtgaatcaaaaagacaaaactttcttcctagtttttgtaattttttttttgaactagcatgactgtagggttgagctacagtcaacaaaaattgggctaagtcacttttccccaggaaagaatatttccctctcctgcatcaagtctgcgtggccatcctccccccaccatccaagactattaggttttgtccctgcacccttcactggcatcctcaatcattaaccttctgaaagctcacagtacacattagtatgtataactggctttaccaaattgaatgaaaaggagcttgtgcaaaaaaatttaaaaatggatgtcaagatgttatgtaaaagatgagtgtaattgtgaaatgttctatacactatcaaatatataaagctttctatattgaatgtacattatacagatcattcatatgtgtacataaaattttaaaaataaagggaattgactgctttgttaatgag

SEQ ID NO: 11644 - DNA, 1086 bp, Homo sapiens
aggtaaaactgctctgccttttgcttggatacatatgaatgatgctttcccctcaaataaaacatctgcattattctgaaactcaaatctcagacgccgtggttgcaacttataataaagaatgggttgggggaagggggagaaataaaagccaagaagaggaaacaagataataaatgtacaaaacatgaaaattaaaatgaacaatataggaaaataattgtaacaggcataagtgaataacactctgctgtaacgaagaagagctttgtggtgataattttgtatcttggttgcagtggtgcttatacaaatctacacaagtgataaaatgacacagaactatatacacacattgtaccaatttcaatttcctggttttgacattatagtataattatgtaagatggaaccattggggaaaactgggtgaagggtacccaggaccactctgtaccatctttgtaacttcctgtgaatttataataatttcaaaataaaacaagttaaaaaaaaacccactatgctataagttaggccatctaaaacagattattaaagaggttcatgttaaaaggcatttataattatttttaattatctaagttttaatacaagaacgatttccctgcataattttagtacttgaataagtatgcagcagaactccaactatcttttttcctgttttttttaaatttgtaagtaattttataaaatccacctcctccaaaaaagcaataaaaaaaaaacaaactataataagcttttctgattcttttcaaaacattcctggtaagttcctaaagacataatttgcttctatgatgtcaactttcttactaataactggttatcatgacaaatgttaggtttatcatatatagtctaggtgtaatcctcagactatcattttcatctgggttccaatttcttaacttcctaaagaattcatctgtttatacaagtctaccactgccgattgactaaaaaatacattatcccatgcataaaatgtcctattttcatttaaacactttatttttgagtaataaaaatatgtaccacaataaattattgttaatt

SEQ ID NO: 11645 - DNA, 1251 bp, Homo sapiens
ataatggactgggatatattgtatttctcatgttaaagcctcttcccttgaaattaaaaaaaaattttaactgataaaacttagggcaacattaattaatgtatattcttacctgaattgttatactttttgaaaatcctgtgacttgcctgtttctccccgctccaacgaaatcattaactctcctaaaatgtgtttcattctagtaagaaaacctcaaaggatattgtaggatataaatcttacttgaaaacatagctgttgaaatgttttggccttttggagtgggggaaggacaaatctgatcctgtaatctttttctttccagtaatcccttgtgtctgttgcatgaggacatggacaataaagtagtatatgatcctcagatacagggagaaggacaaggcatacagcttattgattagagctggcaagcatctgctcattatgtttggaattgctttctataagaaaattgcccactactactaacttgatcaacaatgaattcaaaatagttaacctatgaaataacatcctctcaaatgtttgctgatgaagtacaagttgaaatgtagttattggaaaagtctgtaacctgtggatcatatatattcaaagtgagacaaaggcaaataaaaagcagctattttcatgaatagacaaagttgatttcaggaagtataaattatattctgcaccgaacaaggaacagaaattattgcatctgtggaacatatatctggagttactatactttactgaagagcaaggcataaatttagactaaaatccatccagattacactcattctttaggctactcctggatacttcatttaaatttgattttcgaggtagtgagatgtcggcaaggtttgtcctgtatattaggaataaaggaaaagttctaaactgcctctgcaatgacttgtagtcagtggaagagtatcactttcccctgatcatgaccactaaactgtaaattgatataaattagttttctctcgagttacacccaagtaatgaagacttaagagaaccttggttgaaataaatttccaatagtttggagactcataaataccatgcaggtgtaaccactgccaataggctgtttctatgcttatttcctattttgatttttactttgaagataggaatatctaaattatatctctagggagaaaatgttgtaaaaaattaaaagtacatccctgattgtaaaataaagttcaaaaaactgatttc

SEQ ID NO: 11646 - DNA, 225 bp, Homo sapiens
ctacagcaggcatcactttgccattccgtatttttcgtctctaaattataaatatacaaatacatatattataaatataacctttgtgtaaccctgacttaatgagaaacattttcagctttttttcctatgaattgtcaacatcttttttacaagtgtggtttaaaaaaaaaaaaaactttacagaatgatctgtggctttataaaataaaggtatttctaagc

SEQ ID NO: 11647 - DNA, 240 bp, Homo sapiens
tggagaaacttcctctttttcatgaagaaaacacccttcctcaacagctgacccaagaagttgcttgaggagctttctcctgagctccagtccctgctggattccctggttaattcagcttgagctgaaaagcttcctggaagtggagaggatccttctgctttaatctgagtagtctgtagcttgagcaatctcccttgtcctccttcaaataaatgctttgtgcgcagcgtccagttt

SEQ ID NO: 11648 - DNA, 2214 bp, Homo sapiens
ggaatgggctttgctaacccttctgaggtaactagactgcagctaaccaccaccaacagccattcatcatctgatctctgctggatctacagacaccgatgcagaccactcgatttcatgaccggccctattgcactatggaagttaaagtgtcacgactgctctatgcatattggatttaggggaattttcattgttacataaatgtgtgaactagtttcaacagtgttctttcatatttactctgcaaatacaaaaaaccaaaacctgcagccagtggtcatttcaaaatctttttatgttcagatactgagccttcataagggttgactacctcagatttgctgcactcattgtggacttcatgtggatcacaacttctggataagaagattacaactattaagtgtcgatgtgaaccttgcaaccagctctactggattcttatcagaaatcctgcataaaaagtcagccatctgggttctgatctgctgtaaaagatgaagatttaagtgaccttaattaacctgtcctgtgccctacccttaaggaatactctctgtagtaggctgttgttatattagacttcctggaacacactgctgaaaagaactgatgtgttcagatcatctgtgtagggctgtgatttgtaatttaaactaattgtattctgaggtaaccacaaaataaattcaaccaaactggggtccaccaagtgggggaaggggaagggagagaataatcttgggggttttttttttttggtaatttttttatttggatagtgcttttttgttttgtttttgttctgcattaaggccttttttgctttgacttgaaataagttctttgacagagcatattgcttggttaattaagtaacctaaagtatgcattaggattgtgaaatgtctcgtgagtatgccaatcctgagggtggaaccaaatagcctttgatgaaaagggcagtggattctggaggctctacttcaggtgctgctataatgcctcatctaatcaggactaaattgtgtaggaaactgcagtgggaagaatatgctttctgctcaggctaagagggtcactgatctgtccttagaaattcagagtaacatgagcaaaacctcagctaaaacccatttaagtggcatggattgtgcatgatctttgataagaattcctcatgtacttgtgcctagtttttcaaggtattggctgttctatagatgcagtgattgtcccagctagctctgttaccagccttttggtgtgtctttatgttcatttggagagtcagggcgaaagacaggtgatgtagcacttctgtttttaataattattgcttaaaatacctattaatagttttgggtcatttaaagggacttgaggaagctacccaggattacagaagagtgtccacctaacaagatggtctggcagtttcctagttttgtatctggttcaatagaaatatgtgaaagtggtaatgtcatcatttgatgcagagtccgggtttctctataataaatccctttgccaaatgcatgagttgcagacttgctactggcaagagtgaagcaagtgggtgagtaaaactattttgacgtgggagcgttttcagataggagtttagtcttgacgaaagtgtccgtgcaggaattggactccgaggagggttacagtatctcctgacgggacctgccactcgcatctgggcaatgttgacatttgaggtggcaggcaggatgcctgccttctaatatatttgggtgagtaactgagccagccaagggaaggttgaatgattaaatcagaaatgggattcttggtaaactgaagacttttatttgggaatgaaaaaccttaaaaaaatctcttcatcgttgaactgtgcattttccctgcattttttcccaacaaaattttgttgggggttatgttactgaagaatgaacagatgagtaagtggaggtgttatgtaaaggcatattgtactcgaaatctgaagacctgcagcagatttaaattacaactcttgttataactttttaaaagattgtgaaaatatcaaaatataaatgaatcaagttttaatatactgtatgatgggtggatgaggctgtccattgtaccatttgtttgaattctcaggcatggtttggcagtgcaagaattctgtaacattaacaaattcaataaaaagtaaatatatgg

SEQ ID NO: 11649 - DNA, 171 bp, Homo sapiens
aatctcagaggtagggctgccaccaaggtgaagatgggaacgcagatgatccatgagtttgccctggtttcactggcccaagtggtttgtgctaaccacgtctgtcttcacagctctgtgttgccatgtgtgctgaacaaaaaataaaaattattattgattttatatttc

SEQ ID NO: 11650 - DNA, 913 bp, Homo sapiens
gaggcagctctaaagcacaagacctggatgtgtgacacacagttttggaaaaaggtctgtggtagtctggagttgatgaggaaggggtacaagatgtggttagaaacatttctttgttctggaaacaaagtactgttgaaaccagcttggaattttttttttttttttttttaagttcagttctcccttatggctgcctttcaaacaagtaccttttatctgatgcctgtatcttccctttgttaaggtgtaacttgatgtagggtcaaggtttttgtgacaacaggcagactccacacagagaggatatgatgagaatatggccatcacctgaaaagttttcttatcttctgtgcttttggtccctggaaacaaatccgcctatgtatgaagctagttgatttccagttgcactatttccagttgcctctgaagttcacaggcaatacattgtctagtcctttgcgaatttctctgatttgtgggcacagttatgaagtttccccacatgtgaagacaggtacaaaatagcagagccaagcagacagtgggtctattcttcattagctcagtgacttgtccacactcgtcttagcacttacgtttcaaaagcttgtcacaaacccttggagtcattcccagataatagaactggaaatgataaatcccctaatgccaagggtctagtgtgttcttagtggttatactgggaagtgtgtggagatttaggtgctgctctgctgctctggatggctgaaggctcctgggccatcttcatgtgctgcttgaagagctcctattttgtactcctggctagaatgctgtggaacaaatacaaagtgaaaaaagttctctgtagatttctgaagtgcatattcattgatgccaagaaaaaaaaaaagttgcctttttg

SEQ ID NO: 11651 - DNA, 3493 bp, Homo sapiens
cctcttaaaaaaatcactatcttggaaataaaaataaacaccaaagagttactgtcatctgaagtagcagctctttaaaaacatgaagagataaaattataaaaatgatacatctaaagcagtggtgaagaaagctgaaaaactgatacttttgataggcattttctctgcactggtttgtttaaaggacttcttccagcaataagttgaaagaataaaccactttgctagacttttttctcatacgaatatttattatcataaagtgatacttaccttgctgacttaaatgtgaatagctatgtactaattgaaataaggattttatgatacatgttgaaaataaagtaactgcaggaactttctttaggggaaatgtgtagaagcatggatttaggggtcaaacatacctggatcgatagactggttttgccacttaccagccaacggggcttgttatttactgggctggtagcccctcctagccaaggggctggtagtgtgtaaagtcaggctggtagtgaataaggggggggtgtgctaaagaaccttatcaagcagtcctctcttgctcaacactcatgcagaggagagaggcagggagggcaagggactggctgtcatgcacggtgcccatggaatatccattggaaataaatgttcatcgtctgcactgctgaggacaagtttagatgggagacaaagatctggatgttgatgtgccgcaggcatttgaaacgatgggagttgataagatccaccagggaggctgtggagagagagaggagcaggaggctgggtttggggccctgaaagatgccagcatctgaggatcacaggaaatagatctagcaaaggaactagaatgtgcagttacagatgagaaaggtcagtgtagtgtacttgccagctcaagggtgtggcctctgtgaaccctctttctgtagtggatctttcccatcagcgtaaaacatcctgttatttcccctttttaaataaaacctcagttttttttaatgcctctcttttactgctctgtatgtttgcttcccttcacccaaacacttctggaaagagttgtctgcagtgactctttccagttcctcaccccgccccaccgtagttctcttcctaaccctctccaacaccacttccatccccagactgctttcttgctcttgagttcaccagtgacctaatcagtgtctgagcatcattcagcacagttggactctctcttggcttctgtgacctggaacttctggtttcctctctacctcatcctccactccatctcatggcttttcctcttctaacctctaagtcagagggccccctagagctctgtcatgggttttctccctcagcattctcttccctagaagtttccattccattctcaagctcttaataccacctataggccagtgacccttacatttattactaatcttgacctctccccagagctgctgtcttagatacctagctgcttatgcgatgtcttcacttggatatctgacaaacatcttgtttccaagagagaactctttattctccctcttgctaagattccatatcaggacatagcattatgtttgccagttcctaggagttacttataattccttccttacccacatccgcatatccagtcatttgggaggtcctgtcatttcttcccccagaatcttatctcagacccaaccgtttccctcctgcacttctaccacctgatccagactacttctctctcaccctgattctggcagtagcctcctaactgatagtactcacaccagtaattcagggagcttctggagttatcctttagaaatgtaaatgaaacagtgtcaccactgcttcccttcagactcttccaaggcttctctttttttttttattgagacagagtctcactctgtcgcccaagctgcagtacagtggcaggatctcggctctctgcaacctccacctcccgggctcaagtgattctcctgccttagcttcccgagtagctgggattacaggcgcatgccaccaggcccagctaatttttgtatttttagtaggaacagggtttcaccatgttggtcaggctgatctcgaactcctgacctcaagtgatccacccgcctgagcttcccaaagtgctgggttataagcgtgagccactgcacccagccccaaggcttcttactgcactcagaataaaatccaaatgaattagtatagcctacagagtgtcaataatctgggcctaatcacccattgcatcatcctttactgtgctccacccatgctggcgtcctttctgtttattgagtgcagcaagctttaacctgttcgggtctttcatttgcagtttaccctgaatattccctttctcttacctcacctttgattggcgttttcccccttgcagacctgcactctggcatcctctcctgagcaagccttctttgattgctgcctcccaaacctgtttctccccatttctctagctcattggcctgtgttacttgcttcatagtgctcactactatctgaaatcatttcattacttgatttatgtttgtactgtctatttctgtctttagaattaaaactccttgagggcaaggactttgcttctctggttcatggtgggatcctcatcacccagcacaagcccaacacttaggagaggctcagctagtttgaaccaatggaaaatgccattcctgaggtgcaccacatcgtttcttttgtgttggtgtgcatgctgtccttcagtttgtctcctcttcccacaccctgtcatgtgctcctaaaactccccctttacttggctactttatctggcttggcaaagctttcccatatcccctgacccatgtcagggaacgtttctcctcattgctgtcatggcaccctgtgtgtggctctgaccagactttgctatccgctttgatttctgtctttcaggggctaagtcctgcctacatcctcagtcagcatgctgcctaacacataacagatcctaagcaaatattgggtggatgaaaatcactaccattcaaggcttcattgtatttatcagtaaaactgaaataatatctaatggggtcgagaagatttactgaaaatatatatttgaaagggctttgcagttttaagtactgtacctatgtgcattgctgttacattcaggagatttctgagttttagacagtcccaagcttcagcttaaaatctgtagactgcagcccgtttctgaaacgtttgtactacgtgttgactaggaggaacaatgacagactctgtagtcaccggaaatacttaaggaatcatgaggtactatgtatttccttaaattatactgttttttaaagctgaagtatctaatagttaatgggttgtccaaatttgtcagaacatttgactgtaatttaatgtctcaccatttttcaaaaagatatattaataccaaatattaaaatgtgtcaagact

SEQ ID NO: 11652 - DNA, 1343 bp, Homo sapiens
gaactcttgtttcttggggaaggagaggagggaaaaggaccagggtcaagggggaccagaggttgaccactgtggaatgtactggagagactggcttctcagctgaggaatgcatttccatcagtgaagaatcaaccggacctgttgctagcaggcaatctccatttctcagtgacagaagcatgtttgagatgccgtgggaaaccaaatatataataataaaaatataaaaaggtgatgttcaacagaagtgaagacaaaacaatatgcatcaggagaacaagagtaaacccagctcccattctcagtgggctgcagttgcccaaccacaggaagaaagggaaggaggtagagggaagaaacagaagcagtgttccattttcttcctcaccaatgacattcttttcttttctcctttcgtactcctccctgagagtcccctcccttctcccacactcgtttccctttgctcatgactcctgtagggaagtttcttcaaacaaaacccagctcctgagtctccagatgttgttctgtcagttgccaaaggactttgctgaccactgcatggggatccaaccaattcaattaatgtcttcatattgaagaagagatgtaccttcaattgaaaacctcgtttttcttttgtttgcattttctgcaaaaaggaaaaagaaaccacaaattggggaaaaaaaaagaagaaaaacctgtttccgtgtgcaaaagcacacatatgtatgtctgtgttataaaatgactgtgcttgttcgtaacagatgcaaacaagaaagaagaactgggaagtctttgtccctaggaaatccaaaggggctggaatatggtgttggtttggctttctggttggcccaatcggcctattggctcaatgggaagagaggagagggagaaaaataaaatgaaaggaaaaaaaaaagtttgcaaattcagacaggaaacaggtgagtggtttgaattggatgcagtgtgggccatcctggaatgatactgactgattaattattcctgataacatctcaagaaaaggagaaggaaagtgtttctggagaatgttctttcacatcactggaatctgcaattcaagaagtgacaagggagaattcttgctttacctatggactggcttaagccgtgtggcatccgaggaatgtttcaaatgtgtctgtgtttctctttacattccttgttgtacctcattgttcaattcacttttgtaaattccacctaacatttaattattttaaatttctccttttaccttaatctccttgctaattttatctgtctaattaaaaagagcagaagcatgtctgggtttacgt

SEQ ID NO: 11653 - DNA, 2725 bp, Homo sapiens
ctgccggtgtctacaatgaaacgaagatgtgtattttaaatgtttctttcttgtgaagagatgttctcgtttgcatactgctttttaaagactttgatttctccaagtgtgtatcatctgcactaggaactttgtttttaagcaataggtctggatacacatttaacttaggaggctcctccaatttgcctcaaacctcttacggagcttctcctcagaagtggtaccatcgccttccaaagtcagcactctacactcttgaatgtaccaaggatctcttggcgacagtaccaagcacggttctctacacaggtgactgaagttgcctctgtgttggctggcatccctgagtcccctccgggctcctatggagcctagaagaaaccttcacttgcagaaaacttgagtcagaaaattctggaacttgaaaaagtagtaagggcctccagaattgacttagccctagtaataaaagcactgccaaaacatctcagagacttcttttatgtatactggagttcaaagatctttaacttacctggcttaatgtaatttcacagttacctgccaaactactagtcactttacatcctcaggtattgtaaccactgggccttccaactttgctggcaagctctggtaacctccctgactgtggatcttatataaaatctcaagataaaaaaacacttcttaaatgaagtatagaatttgactcatacttggaaaaagcccttttaacttttatcttttattcattgaactattgaatgatgtatttaatatccaaattagttgataactgttttcacttcctatcagaaggcctgcttgaagacataaaggaataatgatacattaaaattcttactagatagatatattccttcctcccaggagtattagactagctaatagtaaaggcctcaacgttattctttacttcatgttgaaaacaattactacagatatttcatccacctcagtatttatcaaggaaatggaaaatgatacagctataaaagaaagctgttatttactgtagttgtagatgtattcactacagaatcctacatttttcagcaggccacagtccagccaaatcctataatatccttgaaaagaaactattaaaaaggatagacatttctgatgtaagtaaaacccccaagcaacttaatatccatctgtcagtcatcaacttttcccctagattttttttttaactagttctgaaagtgtcaagaatagcttccctttccaccctacctaggttccctccttgctggcataaaggccaagcagtgaaatgaaccttgggttagagttatggtaggcaaaaagaaaaggagaatttaggaaataaatatgctataaacaaggtacagtacagtgagagttaacaatcctaggaatcctgcctgtcacaagctcccagttccctgtcattttatcttcatgattagaactgatcttccatttaactattacagaaagcagtaactattgcaactatctaatagttcacacaaaagaattaaaagcttaaaaataatttttaggaaacacaatattcaaaatctaaacacactgataaattattaagattaagattatttatgtgataaatgaaatctcctaccaatccatccagcctttaccagggaagaaaagcaattatttcatttcagatagaaatacaaaaaaaaaaaaaatacttttcttagaagccagatatggtttaaatgttttattatccataatgatctaaactaataagattcaccaaaaagtaaaaattcaattttacaatatacatttttttttttaactatttggctttacctttttaccttggttctccttactgaagtcctcttgctttcactttgatctggtttttgaagtctcttaattattggctgggcatggtgactcatgcctgtaatcccggcactttgggaggccaagggaggtgatcacttgagcccaggagtaaagaccagcctgggcaacatagtgagactccgtctctacaaaaaataaatttagctgggcatggtggtgcacatctgtagtcctaccaacttgggaggctgaggcaggagaatcgcttgagccccaggcttcgaggctgcagtgagctatgattacgacactgcactccagcctaggcgacagagcaagaccccattctcttacaaagtctctattataaaagtacatccatcaataccattccatttaaaatgggctattgtaatttacccacattatcacattttcaggaattataagaatgtgttttattgtactccttccttggagctgaatgcaaggaatgtgaattctgaggaattaaggtagaatatatttgactttctggtaaagatcatggttaagtataatcattactgccaaactggaattttcaagttattataatatcccaggccccttgataaaagctgagggttatcatgaccttaatgctaattcaatgagaaatgagtttaatagcataacattaccaaggtaatcaaactaataaaattccatatatcttccctgcatcttgtcactgtgtaccattcaaagtgtttataaaactctagattcatcaaatgagatttgctcagctttttgaaatgttaagatgtgtttggagaaggctgcatgactttgtttttcccttttagcaaaactaaataaagttgtcaaatat

SEQ ID NO: 11654 - DNA, 143 bp, Homo sapiens
acaaatcaaaggaaaagaaaccaagaactgaattactgtctgcccattcacatcccattcctgccttttgcaatcatgaaacctgggaatccaaatagttggataacttagaataactaagtttattaaattctagaaagatc

SEQ ID NO: 11655 - DNA, 193 bp, Homo sapiens
atacctgattattattgtctcattaatgttcagttattatgtatactgccattttaatgtttacctatgaatgtcttttgtgttatataactgacagagtgctataaaatatataatatatacaaatgcagaaaatttattctagtctaatatattcaaatacaaatattaaatatatgaaatacgttatgaa

SEQ ID NO: 11656 - DNA, 672 bp, Homo sapiens
tactgctgaccagaagtgactgctgtgtagctgtaatttgtcatgtaattgaagactgagaaaatgttgggtccagtcgtgcttgattggaaattgttgtttctaaatctatatgagaattgacaataagtatttttattataactcagcccatacatatatactatgtatgcagtgcatctgcatagaacagttccttatccttggccttctgttttattgtttttttctttgctgttttccctttgcttctaatattacagttttgtattttgtaaacaaaaatcaaataatgcatatcagaatctttatatggaagaaatcctttattgcctttcctttgtttccttgtaaaggcaccctgttctgttatggtttttcattatataaaattattatatctatatatgacatatgctaaaatttcttggagagtgttaatcttttctgtgactaaatagcaataataagtggaaaattagaaattatttccaggtattatatttgtcacaggccattgtaaataccaagtatattgtgtctgccataatttttaaaaatacattcattgtcttcagtcatacagcaagacacatgagacatagattagaaaacatgttgtacaattttaatttacaactgttggaaataaaaatcacttaatttttttcc

SEQ ID NO: 11657 - DNA, 855 bp, Homo sapiens
gtttgcggaagggcccaggtgaagccgagaacctggtctgcatgacatggaaaccatgaggggacaagttgtgtttctgttttccgccacggacaagggatgagagaagtaggaagagcctgttgtctacaagtctagaagcaaccatcagaggcagggtggtttgtctaacagaacactgactgaggcttaggggatgtgacctctagactgggggctgccacttgctggctgagcaaccctgggaaaagtgacttcatcccttcggtcctaagttttctcatctgtaatgggggaattacctacacacctgctaaacacacacacacagagtctctctctatatatacacacgtacacataaatacacccagcacttgcaaggctagagggaaactggtgacactctacagtctgactgattcagtgtttctggagagcaggacataaatgtatgatgagaatgatcaaggactctacacactgggtggcttggagagcccactttcccagaataatccttgagagaaaaggaatcatgggagcaatggtgttgagttcacttcaagcccaatgccggtgcagaggggaatggcttagcgagctctacagtaggtgacctggaggaaggtcacagccacactgaaaatgggatgtgcatgaacacggaggatccatgaactactgtaaagtgttgacagtgtgtgcacactgcagacagcaggtgaaatgtatgtgtgcaatgcgacgagaatgcagaagtcagtaacatgtgcatgtttgttgtgctccttttttctgttggtaaagtacagaattcagcaaataaaaagggccaccctggccaaaagcggt

SEQ ID NO: 11658 - DNA, 47 bp, Homo sapiens
cccccagcccggcccggacctgaggcgtggtctgaaagccgggtctg

SEQ ID NO: 11659 - DNA, 2511 bp, Homo sapiens
tgctctaagacctctcagcacgggcggaagaaactcccggagagctcacccaaaaaacaaggagatcccatctagatttcttcttgcttttgactcacagctggaagttagaaaagcctcgatttcatctttggagaggccaaatggtcttagcctcagtctctgtctctaaatattccaccataaaacagctgagttatttatgaattagaggctatagctcacattttcaatcctctatttctttttttaaatataactttctactctgatgagagaatgtggttttaatctctctctcacattttgatgatttagacagactccccctcttcctcctagtcaataaacccattgatgatctatttcccagcttatccccaagaaaacttttgaaaggaaagagtagacccaaagatgttattttctgctgtttgaattttgtctccccacccccaacttggctagtaataaacacttactgaagaagaagcaataagagaaagatatttgtaatctctccagcccatgatctcggttttcttacactgtgatcttaaaagttaccaaaccaaagtcattttcagtttgaggcaaccaaacctttctactgctgttgacatcttcttattacagcaacaccattctaggagtttcctgagctctccactggagtcctctttctgtcgcgggtcagaaattgtccctagatgaatgagaaaattattttttttaatttaagtcctaaatatagttaaaataaataatgttttagtaaaatgatacactatctctgtgaaatagcctcacccctacatgtggatagaaggaaatgaaaaaataattgctttgacattgtctatatggtactttgtaaagtcatgcttaagtacaaattccatgaaaagctcactgatcctaattctttccctttgaggtctctatggctctgattgtacatgatagtaagtgtaagccatgtaaaaagtaaataatgtctgggcacagtggctcacgcctgtaatcctagcactttgggaggctgaggaggaaggatcacttgagcccagaagttcgagactagcctgggcaacatggagaagccctgtctctacaaaatacagagagaaaaaatcagccagtcatggtggcctacacctgtagtcccagcattccgggaggctgaggtgggaggatcacttgagcccagggaggttggggctgcagtgagccatgatcacaccactgcactccagccaggtgacatagcgagatcctgtctaaaaaaataaaaaataaataatggaacacagcaagtcctaggaagtaggttaaaactaattctttaaaaaaaaaaaaaagttgagcctgaattaaatgtaatgtttccaagtgacaggtatccacatttgcatggttacaagccactgccagttagcagtagcactttcctggcactgtggtcggttttgttttgttttgctttgtttagagacggggtctcactttccaggctggcctcaaactcctgcactcaagcaattcttctaccctggcctcccaagtagctggaattacaggtgtgcgccatcacaactagctggtggtcagttttgttactctgagagctgttcacttctctgaattcacctagagtggttggaccatcagatgtttgggcaaaactgaaagctctttgcaaccacacaccttccctgagcttacatcactgcccttttgagcagaaagtctaaattccttccaagacagtagaattccatcccagtaccaaagccagataggccccctaggaaactgaggtaagagcagtctctaaaaactacccacagcagcattggtgcaggggaacttggccattaggttattatttgagaggaaagtcctcacatcaatagtacatatgaaagtgacctccaaggggattggtgaatactcataaggatcttcaggctgaacagactatgtctggggaaagaacggattatgccccattaaataacaagttgtgttcaagagtcagagcagtgagctcagaggcccttctcactgagacagcaacatttaaaccaaaccagaggaagtatttgtggaactcactgcctcagtttgggtaaaggatgagcagacaagtcaactaaagaaaaaagaaaagcaaggaggagggttgagcaatctagagcatggagtttgttaagtgctctctggatttgagttgaagagcatccatttgagttgaaggccacagggcacaatgagctctcccttctaccaccagaaagtccctggtcaggtctcaggtagtgcggtgtggctcagctgggtttttaattagcgcattctctatccaacatttaattgtttgaaagcctccatatagttagattgtgctttgtaattttgttgttgttgctctatcttattgtatatgcattgagtattaacctgaatgttttgttacttaaatattaaaaacactgttatcctacagtt

SEQ ID NO: 11660 - DNA, 1637 bp, Homo sapiens
aagtcgtggtgaagagcactaacagtgactgtttgaatataataaagcagagtgactaaaggcataattgaagaatgaatgggacccggatttggggggttgtttgtttgtttttagaacatagagtggcatggccgtgctggaatgacaaataactggcgtgctttttttttgtgtcattaatatgaattattatgttgcacatttttgcatgtgttctgataaaaatcaattctagcactgtgaagcttcagacaccttgaaagtcctaacattagaattgtaaatgttatttatggaaataccttccaatgctattgagaaattcaaatctctattgtatattgttctttgatatgtggcttagttttatgttttgattttttttgctactgtgcaagtttaatgtgaataaaatctttgtggaatgatgattttatgtttagtgagtggtcatctgaattttccagctccccagaaaatgtatgcactggtatagcacccttatgttactaaagcctagtctaacactgaactcatgttcttgatgagaatacttctagatgaggagtatagtggtaagtaagctctgacttggctccttccacaaaccaaaaagctggaacttaccactcaaaaacatgtataacctaataaattctacacaaggctttcaagaccatcagagagcaaaaccacatgttctgtcttgaggagccatagcagaaagagcaaattagtcattatttactgaacatgatgatttactaaatctctccatctgcattagtattttaaggagcactgtgagagaaatcacaaagtattagagtttaccatgattcagagaagttcttcaggcctgtagaaagaggagtatggaacaaccttacatttgttgaaataacttgaaaaggaaccatttcttgaagaaactgaagtaatagcaataagatttgatgtgtgagtagctttgatttaaaatcaatgcaaaaagcacaactaataaattgaatgtttccatgtacctcactttatttcagttaacaagatactttgacttgaagtgtttttagtgtatccctatgaaaatcatttttggtacatctaagttttcacttataaactgttatttcaaagcaaacatactagtgatatatatatgatttatggatgttgacgccaatgttcagtttgggtacgttggtgtattgcaaggggagaggcttttataacaatagatttgaacatttttaaaaaattggactgtgtaacttaaatacacaattatttggtttaggatggttattagggcccattagaaacaggagaagtattttacccattcttaaagctctaaaaaaccatctcatggactgaaaggtagatagacagatggaccacaatgggaaataggatgtccatttgtacttctttgtacttttttgttaataaactgttttggaattaatggcttaatttgtgatatcatgttctagaaatacctgcaacatgacagtctaatcagtagtctattaaaacttgtattcataatgtgtataatttcctggtaaggctaactcctgatcgtttctgtagaaagatgacaaataaagaaaaagttataattattaatt

SEQ ID NO: 11661 - DNA, 1485 bp, Homo sapiens
tgggagtgcccctgggcacctgcgagcatcccacctccttgtttaaggaagtacaggaaccagcctcatttgattccttctatttgcacaagtcaccttggactgcagggagctgttttgcaaaagcagtttagtaggcttagatctcaaattcatcttgagaacatttttttgaggtagtaatttcctcagaagactcttgtgttttgttttggtttttttttctgagctactcggactctttattagaacaatcaatcattttcctttggacctacaatttttgcctatgctgcagccactttgtgagtgagaatgaatatgtctgtgtgaacacacaggcatgcgtgtgtatgtgcacgtacatgggccagaatgaatggatgtgtgtgtgtgagggatacctcagatttttcttttcttattttgtgtgaaaatctcttttctacagattttccagggtttaagcattgcttgctgtataaaaaactttactgaattatatacagtttgaatgaaatgttattttaaaaacaaaacaattgttaagtgttccataaaggttatgttgaattttggtcagatgaatatttgtaagtaaaaaatatatgcatttctgaacctcaacttacatagattttctttatataaaaaaaaagaaaaaaaaagaaaaagttggctatagttggcctgattaacaggcactatacatggtgctgtgcaaaatagtaagctagcatcttactgccgtcaatattagcaggtacagagccttttttcatcctaattcagtaagttctcaggcttccaagtcaaatggagaagtaaagtgaggcaacagattcaccataggctttttgaagcatcaaagggaaatataactactgatagtgaaagcccagccatgacccagatgggcttacccttgacaggaactggggaccaagagcctcccaattgccctaactcctgtcattggtattagcaatatctggccagatttagaaccagtcatggaaacttgtgctcaaactaaaagtaggtcatcacttcccagaaacagaataccttgtgcttcctgaaacagcatatatcactgtgaaactaaagaatattctacagacacccctgtagaaagaaacaaagaacaggatagtttagaaagctttctgttagctgtattcagcaaatttcatactagttgctcaggactgctagttggtatgcttttgtaaaacgagattgaaatttaataaaagatgcaactaaaatctttcctgcatgaagctaaaagcactcaagttgagagaggggcaagggaatctccccaggatgactgaagatgacttctttttacagcaagtactgttagcctttctgcaccccttagcttggcccctgctccaacttctgggtcagcagcaaggtgaactcaacagaagttgctcttgactgtttgaaggtagaagcagcctaccttttctc

SEQ ID NO: 11662 - DNA, 3266 bp, Homo sapiens
caggcctgaggccctgggcacagtgacggtggcctggccagccctcgggacccctccccacctaactgcactgaaaccatttctaaccacaacccttggcccaaggacttggtacaggaagggagaagggcaggtgggcagggagcagacagggtctggctttgcccagagggcacgggctttcccacctctcaaagagacaaggaagccacctgtaagcagaagcagcatccaagtgcccctggcccccccatgtgttgattcaacccggttcctccccctctctcggtgggtgtgttgtttattgtaactacatagtgttggtttgatgtggaagtgtttatccacatacaaagtacaaaacaagccatgaacaagcttctttcccttaccccccatccacaatgtctgagcttggatgtcttttatagatttttaaattattttagtgattattattttattaaaggggtctgggctcactgcctggtgaagtttcaagtgttcagcagacctctctggtaacatatctggaatattgttgttgttttttaaccgagttttcccatcagtgccaaaactcaactcaatctgaaagtagagtgtctgagaggacagaaggtaatgggaactgtagctggaggcctcaggccatgggtcaaacctgggagggaaagagaccctacacatggcctagaaatgagagaagagagaggtatttacccagaggattttcctatggttggggatgcaaatattagaaaacagattgtattttgctgaggggagtggctgtcatgagcatgtcagttctaaaaggggttttcattatcctggaaatgtataaactaaagtaagctgattggctttgcaaacatgttcatttgtttttcagacagtatgggttaagttctctgccctccccaggggtctgaggaggctctgggtttctcagatctgtctcttgctgcgttttcacatcagctgtgctgcttggtgcctctctgatacgaatacactgacacgtcaaagtaacctaatgtggacaccatccagaaaactccagttcatgctggatcttaaccaaaaatgattcaatactgttatcactaaaacagcaccaagacctgaagccatcttcccttggagtcaactgactaccacctctataagcctagtcaatgagcagaccccttccagtatttgtaaaagtagtactaggttgcctttttggcaatttttattgacctgttgaatcttgactataaaatgatctgagaagtaaggaaggctgggctgatgtgtggctctcatataccttctgcaagggggcagtctccccagctccctgatgatgctcacccccgcccccccacctcaggtgctgctggtgtgagccaaagactggagtttttccagctggggtgggagtggagagacaacaggaacaacgctgcaccaaagaaaaggtcagaataaaaggcagcacagctggtgaccttattttctagatgttacaaatcaggtcactatgcaaactagaatatcctcagcaggtggcctggccactctggagaaagaaacccaaggaaagtgagcacccaactggatgccaagacacccgggttctgaaaatgtgctgtgttcctacctcggcaagatcaccagcactgaggggcccagctggagaatgattctgctacaaaaggagacagttgagacttttgcttgttggaaatcaaacttcttatttgtctaaattgcccctttttctgttcctaaaaggaaggataagagagaacattccaggtgaggcacttcaaagtttccttagaccctatagtgttaagaggtattttaaacactaaaaggacaaagctcttcccaatccttatgcttccctaagtggtatctgcagcagtttgttgtgtgcagtttgatggcagctgcaaactggaggtgaggcggaggaaaggcaggtaggaaggagtaaggatggagatgctcagaatcaagagcatggcggagtaggagaagaagccctgcacacagggcagtgtccacagccagaaaactcctgctgggcaccaaccactacgagcataccccatgcccaccgtggagctgcaactcctcgacagcactgagtttgatagtctcactggaagcagatcagctgatgtagaacagagacctcggccataaaggtgagaagacatagggatttcaaccacacagttgggacagaagggacagtgcatctgttcatccatcctgcacttggcccacgttgaactccatggtgcctgagagagactagttaagggttggtcttctgtatcctctgctgttgagcctctggtaagctttcatctcccatgaactcatttccccataaatgaaatgggtaaataatgccccatttgtagaagtgggccctcatgactgaggtagcttccagataggccagagtagagtgtagagtgtgccccgtgacatccctccatcttctcctccattatcatctagcagggtcagactgggaaacctggttggccacgccacaccatgaccgaggagccaactgggacttctggctgtttgacatcctcatgttcccgttggtcttccggagaatagtgctaccctcacatcccctggagcacagccttcctgaaatgccctcaccccatgcctttgccattgtgtgctctcagatttcttccactgtttgacaccctccttagagggctgctcttttttttccagagataatcctagccatcctctccactcccacggctggggacaatggccacttactacctgtgcactttgccactcgggacacctggatggtttctcttaggactttgcccacctccttctcatggcacttgctgtggaaaatgcctggctggcctcgtggggcctgtctcacttttccaggagacatgacccactaacgtggcaactttaacccaaaggcccctcagacatgttacagcaaatctggagccacagacaggttccctccattggcagcccattgtgtttgaaattccatgtcgggtttacttggaatgaaagatacttgaattattgtgcgcctgtgagcgcccagcttctgtttcatagtcttaacaggtggccattgtcgtgaaacgagtgatgcctgaagatctcagtgatgtttgaaccttctgtgtaactttttattaagtctttgtatctctcgactgattaataaagaagagaaacacgta

SEQ ID NO: 11663 - DNA, 13 bp, Homo sapiens
tgatgagaattct

SEQ ID NO: 11664 - DNA, 290 bp, Homo sapiens
tgaattttcatcttaagaagtaaagatcaggactttttaattactgtggtaattaaatgtgttcagtatgtacttatcagtacatttagtctgcaatgttttaattttttaaaaagttacatgaaactaacattccaagggtcaggaaaaaaaccaattatgtatagtcataaaaattacaatttatgatgcaaataatgtaaaatgttttaaagacaaatggcaaataagatatggaccaaagtcactaatgttttacaacagtaacctttactataataaatactttt

SEQ ID NO: 11665 - DNA, 29 bp, Homo sapiens
aaatattttaaaaatacatttattttact

SEQ ID NO: 11666 - DNA, 1535 bp, Homo sapiens
tgcccaggggtctgctgcctggcccacatgtcccttttgtaaaccctgacccagtgtatgcccatgtctatcatacctcacctctgatgtctgtgacatgtctgggaaggccttctccagcttcctggagcccaccctttaagccttgggcactccctgtgtttcatccatggggaagttccaagaagcccagcatggccatcagtgaggacttcagggtagactttgtcctgtagcctccacttctgccctaagttccccagcatcctgactacctgtctgcagagtttgcctttgttttttcctgcagggaagaaggcccacctttgtgtcactcacctccccaggctcagagtccccaaggccctggggttccaactcactgtgcgtctcctccacacagaccagtaggttctcctatgctgactccaggttgcttcatacaaggagggtggttgaacttcacacacgtaaggtcttagtgcttaacagtttaaaggaaagtccttgttgaggcagaactaagtttacagggaaaggtacacacattctctctctctctctctctctgtctatctagttccccagcttggagagcctttccccttgcttctttctgaggccatataagcttataagaaaagtcccaaaccaagaataggtccttggccacaagcagggtctgatcccccatcagagctatctgagcctgcctgtctgggcacctgctgcaaccatgcagctaccctgccaggggcactcagcaaacagaaccacagggcccaggaggcattccacacaggcactgccccaggacaacacaacaaggacagtcacaacaaggacaacaaggacacaacacaacacacaacaaggacagtcacaacaagcctagagccagaaagcagatggaaatgctaatgaggtcaaacgtaggcttcatggtgggtggagtgggggtggctgggctcccccaggacagaggggaccctgaggttggcaaggctctcaccactcagccttatggtcccttatctcctatcttccctcttgagaaaatacacgctttctgcatgtattagaaacgcacgagctccaccaagtctacaatgaaagtttgaaatttaactgcaaggaattagaagcatatttgcaatcattgcagcttcttctttcttctgctcataaaaggaggaacactttagatagagggcaaatatatctgaaaacctaatttctttctttttttgataaggaaatcttttccatctccatcctaacatgcacaacctgtgaagagaattgtttctatagtaactggtctgtgatcttttgtggccaagagaatagcaggcaagaattagggccttgacagaatttccacgaagctctgagaacatgtttgtttcgaatgtctgattcctctttgtcatcaatgtgtatgctctgtccccatccttcactcctcctcaagctcacaccaattggtttggcacaggcacagagctggtccctagttaagtggcatttatgtt

SEQ ID NO: 11667 - DNA, 175 bp, Homo sapiens
gccccttcagagcaggaaacaacctcagactcatcacaaagtagacatatacacacacatatatgtatgtatatttttctcaccacattcttcaaggaggttgtagacaaatgtttccatgacctctcagctttccaacaggaatcttgtaagagctaataaaaggaaatacctg

SEQ ID NO: 11668 - DNA, 858 bp, Homo sapiens
cagcacgaggactgctgtactgcaaaaaaagaagaccaaaagattacagtggaccatgggatacagaagccagcatggcagacagaagaaaaatagtttgggaacatgtaactattctaagtggaagttttgttgtaggaattatagtaatcacaccacattacttggcctttcggtaatgtgaaaaaaaaaaaaaacctcagagcctccaaggaaatgcctttagaagcactcctctctcaaaattgccattttctctaccatgtcccccagacacagttgggttttgttgatttatggcagtcttctaaacaaagccatccttaattttacatactgtattgtaactatccaaagatagtattggcagtcataaatttataacttctggcctttgtttaattccagtaaaataacagcaatgacaatgagatcgtcagtattattttcacatttccctgagaggacctggcacaatattttaaatttaattatttggcagtagtcactgtttttgacaaccaatgaaatagcgtctaaatatcttgtatattttttagcatcaaaatgttttggtttccactgctgacaggtgcttgttgtttagcctaatgtggatatttaaattgttaacataccaaacacacatggtaatagtttgggacaaaataactagtaaaatgttgatttctcggctttttcactgactgcggcatgtcctcgtgtcttctctgattttgtggtacatgaatgaatgcatttatctttttagtgacttactagttacgaacttgaattatcacctctttgtcatacttaagtatcatttacataaagtgtaaaagattttttcacttt

SEQ ID NO: 11669 - DNA, 1341 bp, Homo sapiens
gccaagcctgatgggcagcacagacacagacacacaccgcagggcccgaccctcctgtcattcacagtcccatggcacataggggaaaggatctacccttctcctggctccccaggacactcagttctttcaaagaccaggatgtggtaccaactttggaaacgaaaggtctcttgccaacagtatctactgccctcgaggcagccctcccaagtcagacacctccttcggagccacagagagcctggagtctgcacctcctggaaatcctgccaccaaccaggacacagcagccaccgtattgatcagagagcctgtttccttattcaagagaatgaataaaacatttaggcaggagactttctattgtgtgccccgttgcagacagggccagggagaaattagccagtgcagggggaaaattgcctctgaataatgaatgatgaaagcctgacgccgtgcccctcctggcccatacgccttgccagggcggcaggattgtcacaccgttttaggactctgtgccactttgagagactgttcccaggaggcccaaccgcagacctggcaagtggacagtgcagtgtggagacaccttccggcttacctctttgaacgttgtttacctacccctttccacgtgctccccttcccagccactgactcacagttctctggatgcccagacacctctcttcagggaagatgagtctgactggtttgccccagggaagagcatatccttaccattattttaagtagcatttgcattttaaaagaggaatgcggagaggacagtacttagtccaaaggtgctaacgggggaactgggggcattgtgacacccaagtctgatgtgtcctgggttggggggccttcctggagtgtcagggtctctgggcaacgtccattcagggtgcggcatggctgtcacaaagctttatttgagcaaattattttttcactttaggagacttctacaagtttgtttcctgtttcaaatgtgtgtgtgatgtgctgtttatttatcagcttgaggtccatgggggcagccttgtgactggaagggtggatatgggagacacattctctacctgctccgagcctggtcctctcgcaggaatgctgctgctgcctccgccgccactgctgctgccacctcttatatgtttcagacactctctgcccagactcatttttaactggaaatcatcacagcagtgggatatcagagccccagacagcactgcctcttcctccccaccccactgcccccaccttaatgtgaatttgactgatgaatgaagagcgtttctaataaagtttgtcattcagtccttc

SEQ ID NO: 11670 - DNA, 1438 bp, Homo sapiens
aaggtatgcagtacagcagtatagaatccatgccaatacagagcatagggaaaggtccacttctagttttgtctgttactaagggtagaagattattgctttttaaaggctaaatattgtttgtgggaaccacagatggttggggttgaacagtaagcacattgctgcaatgtggtacgtgaattgcttggtacaaaatggccagttcacagaggaatagaaggtactttatcatagccagacttcgcttagaatgccagaataatatagttcaagacctgaagttgccaatccaagtttgcactcttctggcctgccccatgttactatgtgatggaaccagcacacctcaaccaaaatttttttaatcttagacatttttaccttgtccttgttaagaatttcttgaagtgatttatctaaaataaaggttggcaaactttttctgtaaagggccagattgtaaatatttcagactgtgtggaccaaaaggccacatacagtctctgtcataactactcaactctgtttctgaagcaggaaagccaccacagacagtacataaaggaatatgtgtagctgggttcccaggccggacaaaacagatggtgaccagatttggcccctgggctgtagtttgctgacccctcatctaaaaaataggctatactacaattgcacttccagcactttgagaacgagttgaataccaagaattattcaatggttcctccagtaacttctgctagaaacacagaatttggtctgtatctgacactagaacaaaacttgagggtaaataaacattgaattagaatgaatcatagaaaactgattagaagaatacttgatgtttatgatgattgtggtacaagatagttttaagtatgttctaaatatttgtctgctgtagtctatttgctgtatatgctgaaatttttgtatgccatttagtatttttatagtttaggaaaatattttctaagaccagttttagatgactcttattcctgtagtaatattcaatttgctgtacctgcttggtggttagaaggaggctagaagatgaattcaggcactttcttccaataaaactaattatggctcattccctttgacaagctgtagaactggattcatttttaaaccattttcatcagtttcaaatggtaaattctgattgatttttaaatgcgtttttggaagaactttgctattagatagtttacagatctttataaggtgttttatatattagaagcaattataattacatctgtgatttctgaactaatggtgctaattcagagaaatggaaagtgaaagtgagattctctgttgtcatcggcattccaactttttctctttgtttttgtccagtgttgcatttgaatatgtctgtttctataaataaattttttaagaatacctatactat

SEQ ID NO: 11671 - DNA, 42 bp, Homo sapiens
agtttaacagattggttcagaagaactggaaaatattatttt

SEQ ID NO: 11672 - DNA, 1186 bp, Homo sapiens
aacagaacaatcgctgccctctctgccagcaggactgggtggtccaaagaatcggcaaatgagagtggttagaaggcttcttagcgcagttgttcagagccctggtggatcttgtaatccagtgccctacaaaggctagaacactacaggggatgaattcttcaaataggagccgatggatctgtggtcctttgggactcatcaaagccttggtttagcattttgtcagttttatcttcagaaattctctgcgattaagaagataatttattaaaggtggtccttcctacctctgtggtgtgtgtcgcgcacacagcttagaagtgctataaaaaaggaaagagctccaaattgaatcacctttataatttacccatttctatacaacaggcagtggaagcagtttcagagaactttttgcatgcttatggttgatcagttaaaaaagaatgttacagtaacaaataaagtgcagtttaaaacccaactcttactcttaatttgttcctaatacgtatttttggcagggagagggaacggtccatgaaatctttatgtgatataaggattttaagtttgggccagtgaacagggtaaataaaatttaacttttgagcatatggaattttgattgcctttaaagttactattctgtatcattgattcatcaagaaaacctagatctgcactcacctcactgttcaatcattgagtggtaaaggacagaagtattttctagttctggtcagatgatataattttttttttttttttttgtgggggtgaagtcttgctctgccacccaggctggagtgcagtggcatgatgtcaactcactgcaacctccgcctcccgggttcaagtgattctcctgcctcagcctcccgagtagctgggattacaggtgtgtgccaccacacccggctaatttttgtatttttagtagagacgggatttccccatgttggccaggctggtctcaaactcctgacctcaggtgattcgcccacctcagcctcccaaagtgctgggattacaggtgtgggccactgcacctggcccagatgatataatttaactgtgttttaggtaacatgttaatgagggaaaatgtttaccagtgtagcattggatcaaaaagtttatcacacagtgttttaataaatggtttattctgcttacctta

SEQ ID NO: 11673 - DNA, 839 bp, Homo sapiens
tatgagtaggatatctccacagagtaaatgttgtgttgtctgtcttcattttgtaacagctggaccttccattctagaattatgagaccaccttggagaaaggtgtgtggtacatgacattgggttacatcataacgtgcttccagatcatagtgttcagtgtcctctgaagtaactgcctgttgcctctgctgccctttgaaccagtgtacagtcgccagatagggaccggtgaacacctgattccaaacatgtaggatgggggtcttgtcctctttttatgtggtttaattgccaagtgtctaaagcttaatatgccgtgctatgtaaatattttatggatataacaactgtcatattttgatgtcaacagagttttagggataaaatggtacccggccaacatcaagtgactttatagctgcaagaaatgtggtatgtggagaagttctgtatgtgaggaaggaaaaaaagaaaataaaagtgtgtttgaaaaatattatcttgggttctttgtaaaatttattttttacatgctgaattagcctcgatctttttgattaagagcacaaacttttttttgtaaaacatgtaaaaaaaaaaactgggattaatttttagtgttggaactgcctcttattttaggctgtagataaaatagcatttttaggttagccagtgtgactatgcacctaattttttatgagattaaattcataagacttaatttgtacaatagtttgtgaaatatcttgttactgcttttatttagcagactgtggactgtaataaagtatataaattgtgaaatataaaaacttggaacttattcaaagctt

SEQ ID NO: 11674 - DNA, 1652 bp, Homo sapiens
tcatttcatatgattttctgccacattaaacatattgtatgcctcacagtttacaggattctgaaatgtagtgggtgtaaaaccagagattatttgtatgctcaaaatagttatatattcattaatgaattcaatatcctgttcatactagttagagctggtcagcctttttgggtaacacagttaatttaccaactgatacagataatagaatatattcataatcaagctgatacttcatgattaaattatttttgttgcttaaaagtcgtattagacaagactaaatcattcttttttatggttcaaaaaagatgaatacaaacgtttttgcaggttctgctgtgaaatgtggtttgatttttttggtgtgttaattttgatcataaatgcattcatactcataatccagtttaatccttttatttgcttcctccaactatttaaagtggtccaaaaacacttttctgtaagtttctatactgtctaaaaccttatggtgaccagaattgtttattaatatcaaacttttttatatatgagaactaattcttgaataaaccccaaagttcactctcttgtttaagtagcagcagctttttacttaaaatttaattttaactacattgatactttacacatcctagtttggtaacacagctttaactatgtcatgcaacatatatatgttggtaggatgttattagagagatatgtgtgcatatatatttttttgcacctgaatcacccagcttttcataagtggtatgtttaattggtcattcagccaaccatcagtattttccccccacaacatgtgtaacacttttcagtctgtggatatctgatacattaagatttctttttataagtattcattttgaatgtgcatatagttatttgaccccttccaaatacttgtagccaaacattggctagaacatcccaagatatgctgacactgtcctgttagcttcatattatacttgctagtttaggtctctatagaagccctatataatttagaatatgcccactgaatatctttaatagaaagtaacataaagctagtattcaatgtagagtattttcatatgtttttcacagcccgttacaaattggcaatgtttggttaatgtttgtattacttggaaatcgctacagcttggactatttttttctaaatttttagcattagtccatttctgctgctaacaattgaatccagaaatctactttctccatcttccactgttagtgccagtgagcaatactgttgtgcaacaaaaatgtcactttatctcagtgtgaatgagtagtctaaattccctttctaccattgatttaaatatatatattggtaagagagactgcccatgtgtttagaatagaattttttaaatgaaatgatcaacaggtggaatttgaaatatattcttctacaaaagagatttctttcccttttatattttgatgattgttttcttaagattaagatatgttcttgctcttttataagattatttaaattatgtttccctctgattttttttcaccattgtatttactaagttattggatttacatgaaatctggcactttagggtgttctttttctcacagagtatatttaataaaaatgctgtgtatat

SEQ ID NO: 11675 - DNA, 1650 bp, Homo sapiens
ccattttctaaatcatggagcgaataattttcaataacagatccaaaagactatattgcataacttgcaatgaaattaatgagatatatattgaaataaagaattatgtaaaagccattctttaaaatatttatagcataaatatatgttatgtaaagtgtgtatatagaattagttttttaaaccttctgttagtggctttttgcagaagcaaaacagattaagtagatagattttgttagcatgctgcttggttttcttacttagtgctttaaaatgtttttttttatgtttaagaggggcagttataaatggacacattgcccagaatgttttgtaaaatgaagaccagcaaatgtaggctgatctccttcacaggatacacttgaaatatagaagttatgttttaaatatctctgttttaggagttcacatatagttcagcatttattgtttaggagtataattttattttatctaaaataatagtctattttttcttttgtattttgttataatcttaagcaacaaagaaaaaaccctaatatttgaatctatttatgtctttcaatttaaattcacttcagtttttgttattgtaatatatttacttttacatggttataatcactttatatttttaatgtttttttcacttaatattttatatatacatttccatgtattgatgtagttagtccacatttaaatttttatagaattatatagtttttgaaaaatacagtcagtagatgttttattttttagctattcagttatgtttataagtttgcatagctacttctcgacatttggtttgttttaatttttttgtatcataatagtcctatttttttttcaagttggagtgaatgtttttagttttaagatagataggagacacttttttatcacatgtagtcacaacctgttttgtttttgtaaaacataggaagtctctttaatgcaatgatttgttttatatttggactaaggttcttgagcttatctcccaaggtactttccataatttaacacagcttctataaaagtgacttcatgcttacttgtggatcattcttgctgcttaagatgaaaagcattggttttttaaaattagagaataaaatatgtatttaaatttttggtgtgttcacataaagggatgtagctaaaatgttttcataggctattatatattctcgcagcatttccagttaagaggatattaggtatataattctcttcttaaccgaatgtcagatggtcttacgccacagggtgcaggtaacccttggtctgtaagcaccaccgatccagggatcattgtctaaataggttactattgtttgtttcatcttgcttttgcatttttattttttaatttccaaattttaagtgttccctctttggggcaaattcttataaaaatgtttattgtaaagttatatattttgtctacgatgggattatgcacttcccaattgggattttacatctggatttttagtcattctaaaaaacacctaattattaaaacatttatagagtgcctactgtatgcatgagttgagttgcttctgaggtacattttgaatgacagcatattgtaagaaaaaaaaaggtgaataaaatttgacattagattat

SEQ ID NO: 11676 - DNA, 559 bp, Homo sapiens
aaggggttcccaggagacctgattccctgtggtgatacctataaagaggatcgtagtgtgtttaaataaacacagtccagactcaaacggaggaagcccacatattctattatagatatataaataatcacacacacacttgctgtcaatgttttgagtcagtgcatttcaaggaacagccacaaaatacacacccctaagaaaaggcaagacttgaacgttctgaccaggtgcccctcttcttctttgccttctcttgtcctctttctcctatttcttaccctgtcctccacctgccttccattttgaagtgggatgttaatgaaatcaagttccagtaacccaaatcttgtttacaaaatattcgtggtatctgtgaacatgttaagagtaatttggatgtgggggtgggggtggagaaaggggaagtggtccagaaacaaaaagccccattgggcatgataagccgaggaggcattcttctaaagcagacttttgtgtaaaaagcaaaggttacatgtgagtattaataaagaagataataaataatattcttttt

SEQ ID NO: 11677 - DNA, 2518 bp, Homo sapiens
tctatggtgaacttttctttttttctccatttaaacagcactggctaaaactaaaccaccaaaaaacgatctgaaaaaatgaaatttggaagtgttacattcagaggatgataaacttgcactgatagatcttaatgttaacatccatcaaaataagacattacttcaaaaatcacatgatgcttctgcaaataagtatgttcttatactttggaggcttgagctgtcatcagctgctccccactaccccggaatgcttgagtggattaatgaatattgttaagctattggaaatgagtctgatagtacattggcttgtgtatcaaagggtacttggtacttagtttgcatttactatcatgattttgtgaatctcttgcatttactttgaatgtcaagtcagattggtctgttttataggccgctttttccttctgatgtgtagggttttttccccctttttttttttaattaaattttgaaaattcaggttactgtaggtgttcatttaaatttttaatagttgtcattcagtgctatttggtacatatttactgttagggcaggattcccaggtttactgtgttttttttttttttttttaaagaaagctaaatattacattatgtaaatacttcttttcaccaacttctgtagtttcaccattgcatggtgtcatttcaggttatttaacagttatatccctctatgccaataattagaagtgtacactaaacatgaagtttggcatatgttgcaaaatgtcattttatcttttctaaaggctttaagaagaatatactagaatctatatattgatgttaattttgattcagaaaaaaaatacaacccagtatctaaaaagtgttaactagtccaagatagtaatgcatatgccaaagaaatattacacctaatctcatgtttagaatttaaaatagaattggtcagctacttattcttaccaccctacttccagtattttagctctgtcattattaaattcagatcttcctgattattttttctgttgaaagttaaactactgctttcaagtaatttaaagttatcctaccttttattcatgggtagttttgcaaaattaacatggtagccattgtttgaatttaatcgggcatcataacttttcatttattgaggaactaatcattattactataaagcatacaaattagccagtcagcacactttggtcttctttacctaagggttaaacatcagaacatcaaatttaattatttgcatagaaatgtgtgggctctttatataagttgactatcactaacaggtaatatttttctgtttgaagttgttacttttgtttacagcaaagtttgatgtagtgtgcagtagtgagctctagactgatctttttctaaatcagaaagtgattaaagtatgcacaaccaaaggcaggtttttctttttcatttattcagcaactatttattaagcatcaactctgtgccaggcacgttactagctgctacatactgtctgaacatgacatacggttaagtaactttacaattattatcaaatacttcaatgtagatatttcttaagttgaaatagcattaactaggataatgctttcatgttattttattgtcttgtgatagaaattcaacttgtaccatctaaaactaggttgctataaaaataggaggatgaagtcaataaagtttatgccagtttaaaaactggaaggaaaaggtaagagctctccattataaaatagttgcattcggttaatttttacacattagtgcattgcgtatatcaactggccctcaatgaagcatttaagtgcttggaattttactaaactgacttttttgcaactttgggagatttttgaggggagtgttgaaaattgccaaacactcacctcttactcaaaacttcaaataaaatacacattttcaagagggagcaccttttatatttgataagttttcattataaaccttataataccagtcacaaagaggttgtctgtctatggtttagcaaacatttgcttttctttttggaagtgtgattgcaattgcagaacagaaagtgagaaaacactgccagcggtgattgctacttgaggtagttttttacaactaccatttcccctccatgaaattatgtgaaatttattttatctttgggaaaagttgagaagatagtaaaagaattaggaatttaaaattacagggaaaaatatgtaagtgaaaagcaataaatattttgttcactttgctatcaagatgttcactatcagatatttattatatggcagcaatttatatttttaatcattgcccattaatagacgcagtaaaatatttttgaatcagacatttggggtttgtatgtgcattaaaattgtcttttgtactgtaagttactgttaatttgaatattttattgaactgtctccctgtgcctttataatataaagttgtttctacaacttttaatgatcttaataaagaatacttta

SEQ ID NO: 11678 - DNA, 3166 bp, Homo sapiens
aatcagaaacaaaacatcgaacaaaaccctatttaagagactgatcacacacgtatacacaacattactgaaagaaccctgcgaatcaaaacaacccccacacagaccccgcaatccttttttaaaaaatctgccaatagacccaggacgagtaagagaggaagcatcaaccttttaaaaatttcctttcgctttcattatttttctttttttggcaaaggcttggtacccaaggtgcggtagggggtcgagggggaggaggccacctgaccaaatgccgccaaccccgagggccagtttcttgtcgaattggtacgggctctctggggcttcggcttctttttttctttgttttcttgtaaatacagaattattagcttaaaactgtactgttgaattctgtaaatagttatatctcggttggagcgggtgggtgggattgtggcgttgtggtctttgcattgggggaggggggagggaccggatgggcggggggagggggagggggaggggtgggcggccgaaagccaactgtttgtactgaatggcaagaatgttctagtaaatgtgtaccaaaatgtgaattactttgtacgattacagtctccacgtcgacctaacccaatattattggtattaatgtgctttttttgtataaagtgcaaacatttcgtcccaaagtctaagtactttagtgcagtaaaatgttgtttcatgtcctgtcaagaattcgtatagtacgagcctggatctgcgtgtcaaactgttccatttgtttatgtaaagtgatattaaaaaagatataaactataactgtccgttacttttggcaaaagatacaaccacataatgtatataattcctagtttccatatttatccgcatgtaaagggccggtttatccatgttacagctcttcaatatttatggctagaagaactcgtatgtacactttagtttccagaactgtttggtaacctttcgtaccttattaaagattcttaaatctccgtgattgtggtaggaatttcttcttcacccaccagcaacctgctgcctcttctgccagtcttaaagggtctccagaaaagctctccagtctcccttgccttccctttctgtcactgcaggtcgtataaacgtgataaatgaatgctaccctgctggctctccgagagagtgtaattagtatttatatcaaaatttatgaaacaaattttcggccgcagtataatttaaatgacctttgcagatgtagaataacaaccataaaaataacaggaatagattgcacaggcgacatcaatattaatgtagacgaattgtcagaagctcaggggctcgctctgcaacattgcaaatgaacttgcagccgagggttccgctgccccctagattaaattccccgggctgaaactgagttgcagatttacaatatcatattttaaattgctgtcttcaattaaaccatttatgaccataactaattttcaggatgtcgatgcatgcttttccaggccttccttctttgtacaaaagtaaatgtccataaagcgtttcacttatattcttcaaacatgatgctaatttaaattaattacttcctatgatatgttattattcctatgattttgccactgttattagttctctcaaaaatacatctagggaagaggattattttaagtaatttgattatctttctatctcttttatttatttctcatttacttaagaaattcgttccattggttggcattgatacagtaaatttgtaaatgaggagacaatataaaaaatctaaattacttgtgcttaatgactgtagcagaatgccttttctctaaatcagattgtctttcttgcagtttagtttgatagatttgcaagctatgctgcttccatgaagttagctgcgctggtaggaacgcaggcttctttgtctctggttgtagcttgcatgatcgccccattaggcagacaacgtagccggagatcacaaatcaggcccttggctgtagttgctagtgtgtggaggtgcagagcaggtggcagaaactgacctcactgggcaagggtggccatggacctgattctttaatgcactctatgtgttcaggaagccacaggccatatttgactctgagaaagaaaacaagaggaaaaaccccacaaagtataacaaccccttaagatacatctattttaaagtgaaattaatttttcagtttataccattggccaattacaagataaaaatgttcaatttctttaagaatcctttgttgacttgtcttttcatctcttgctatttatatttgtcactgtttcaacaaagtcttatttgctgaggaaggactttgctgcacttactgtaccacatcaaacactggggagggtggtgtttaactttttaaaaaatgttattctgattataacaataatattggcttttttcatgaaaagagcgccaccttgcaaggtttagtgagatttatggaagttgaatacctaagcaggaattgctgctagctccaaaaatttgcgaagcaaaagctagccccaattggtttggaagtttgaaactgattaacagatttgcatttgaagtgactccagacattaggtccagacattagttaaaaatagaaagaggaataaagacatctcttctctctagaaaagataacaccacaattaataatccttcccactttcattgagatcagcttgtctgataacctgatatgagtgtgataatgataaacatgataatagtggtacttttgtaattttgctggtgcatttaagaagatagtaaatgatgagttcatcttttcttcgaacattcctattcctagatgtagtttacctcaaattgggaattataactgtctaatttttgttgtgtacctgatgccccttttgctttaataccacagtgtaacaattaaatatcacactatgacatatgatttaagtaggatattttaaagataaattttaggggtaaatgtttacttcaaaatgactccatatttcaaatatctgtttagactgtgaaggccaaataatttttaagaaaacatttgaagagtagtgtgtttgcatttgtgaataatcttactcacagcaagtaaacgtaataaaagccaacatttaagcc

SEQ ID NO: 11679 - DNA, 889 bp, Homo sapiens
catgttcgaaacctgtccataaagtaattttgtgaaagaaggagcaagagaacattcctctgcagcacttcactaccaaatgagcattagctacttttcagaattgaaggagaaaatgcattatgtggactgaaccgacttttctaaagctctgaacaaaagcttttctttccttttgcaacaagacaaagcaaagccacattttgcattagacagatgacggctgctcgaagaacaatgtcagaaactcgatgaatgtgttgatttgagaaattttactgacagaaatgcaatctccctagcctgcttttgtcctgttattttttatttccacataaaggtatttagaatatattaaatcgttagaggagcaacaggagatgagagttccagattgttctgtccagtttccaaagggcagtaaagttttcgtgccggttttcagctattagcaactgtgctacacttgcacctggtactgcacattttgtacaaagatatgctaagcagtagtcgtcaagttgcagatctttttgtgaaattcaacctgtgtcttataggtttccactgccaaaacaatgcccgtaagatggcttatttgtataatggtgttactaaagtcacatataaaagttaaactacttgtaaaggtgctgcactggtcccaagtagtagtgtcttcctagtatattagtttgatttaatatctgagaagtgtatatagtttgtggtaaaaagattatatatcataaagtatgccttcctgtttaaaaaaagtatatattctacacatatatgtatatgtatatctatatctctaaactgctgttaattgattaaaatctggcaaagttatatttactttaaaataaaataattttattgcaat

SEQ ID NO: 11680 - DNA, 181 bp, Homo sapiens
ttgagaaagctgatggccttgtttcaaaattctcatttttcatttcttttctttcttgaattcttattttggtttgcctggatgttttgcagatcccaatctttcttttaagcttctgggtctattaaactaggtagatcttttcgtattgatcataataaaagtgaatcattactattgg

SEQ ID NO: 11681 - DNA, 368 bp, Homo sapiens
agaactgccctctgtttggaataagccaattaatccttttttgtgcctttcatcagaaagtcaatcttcagttatccccaaatgcagcttctatttcacctgaatccttctcttgctcatttaagtcccatgttactgctgtttgcttttacttactttcagtagcaccataacgaagtagctttaagtgaaaccttttaactacctttctttgctccaagtgaagtttggacccagcagaaagcattattttgaaaggtgatatacagtggggcacagaaaacaaatgaaaaccttcagtttctcacagattttcaccatgtggcttcatcaatttatgtgctaatacaataaaataaaatgcactt

SEQ ID NO: 11682 - DNA, 698 bp, Homo sapiens
aaacactgcatttttctgtgaacacatccacttcacaagccttgtttctgatacttagtatctagagctgggttgagaaaagtctgttacagttgctagaggttttcattaaaacttatcagatgagaggcttttttaggataagaggtgagaactgggcaaaagttgtgaagcagcaattctgttatatggacagtgttctgctttttaatcctatttagcttgtttcagaaattctcacttttgttgactgccaacatacaaagtaagggaaactcaagatattaagatggctgtatcagttcttaaaatctgcagagcctggttcaaaatcagtcactcccttcagaagcagacatggcatctgttccttgcttgcttgttggttgtgtacctttcacgagacctgaattttagaattgcccagtgctgccagagtgagtgagtgtaattctcctttcaggtaaagataggctatctcaacactgctgagtgattcataaacatatcaaccaatagcattaacccattttatttcctgtccttagtgtctgaagatgctcaccagttttctgtgtacagtaaggcagcatgctaaaatgcttttgttcagttctgtatatttgaaaatagcagtgtgttctctgatggttacctgcagtggcaccctgtacaaaaaataaaagacttattgctgt

SEQ ID NO: 11683 - DNA, 1296 bp, Homo sapiens
aggtatcatttgaaaaataccataatggcatttgagactgaatttctaaaaattgaatgccaaagtacaagtagaggagttttttattttatatatcacacacacacacacacacacacacacacacacacacatatatgatacaaatgctttcaggctgcttaccttaccgtgtagtggtaactattcacttcttaatttatgacctcaatcaatttaattgtctagaatgtaaaaagtctttaagacataagaattcctcaaagaagccatacattttttaaggtggggattgacttttattccaaggaacaacatcagttcactgttgttggagacatgacaatcattttcatcccaagaacactttaaggaaacattttacaagtatgcttgaaagaatgtcactaactggtccagaattttatcttcttgatttttccagatttctctatgtttttgagaaagatgttaatgttttgccatggtaaaagatttcaaacctcattttttttgttccttttcttgttacttttaagaaaactcatgctctgtttctctgaatcaaatgaagtagaagtttacaaagctaactttcttcttgtctagctattaacatgatttgtcaaatgcatgtttttttcagccaaagccttgtttccatttttgttgatgtgtactcttgctcttttagctagagtgtatgtgaaaataaagaaatacatcattgtattcacaaccatgtgtcttcatttataactttttgtttaaaaaatttttagttcaagtttagttcattgatattatcctctgaatgcagttaaggctgggcagaaattctactcatgtgacatctgccacaggtctattttgaagcttttcttctaatggcaatgtttgtccttaccaggatttaatctatagaattgtctctcaactctgcttttctccagttccagataacgtccttaagaccatctgttcaggggttcacaaaactcaaatttgtgtcattctattttatttattttattttttatttccttccctcataccttgcccattccctctgaatattaggtgtgatgtcaacagcatgttagaaggatcaatgggaaggcaatgattgaaaacatttcaatgaaccttaatagtgttcctttgaggagcacccaggagaatatctggtcatagatctttttttaaatgcagttttataaaaccctaacagcggtgatatcattagactgtatgaatcagttttattacctagtgtacaagtgtcagtcatgtatc

SEQ ID NO: 11684 - DNA, 588 bp, Homo sapiens
acctccgagatgagctgctcagactctacagcatgacgactacaatttcttttcataaaacttcttctcttcttggaattattaattcctatctgcttcctagctgataaagcttagaaaaggcagttattccttctttccaaccagctttgctcgagttagaattttgttattttcaaataaaaaatagtttggccacttaacaaatttgatttataaatctttcaaattagttcctttttagaatttaccaacaggttcaaagcatacttttcatgatttttttattacaaatgtaaaatgtataaagtcacatgtactgccatactacttctttgtatataaagatgtttatatctttggaagttttacataaatcaaaggaagaaagcacatttaaaatgagaaactaagaccaatttctgtttttaagaggaaaaagaatgattgatgtatcctaagtattgttatttgttgtctttttttgctgccttgcttgagttgcttgtgactgatcttttgaggctgtcatcatggctagggttcttttatgtatgttaaattaaaacctgaattcagaggtaacgt

SEQ ID NO: 11685 - DNA, 1034 bp, Homo sapiens
ctttcagaagatgattggtttatttccctttaaaatgattaggtatatactgtaatttgattttttgctcccttcaaagatttctgtagaaataacttattttttagtattctacagtttaatcaaattactgaaacaggacttttgatctggtatttatctgccaagaatatacttcattcactaataatagactggtgctgtaactcaagcatcaattcagctcttcttttggaatgaaagtatagccaaaacataaaaaaaaaaaaatcctcagtatagcttgcaattaagacctagatcacagtatttaagtgttttgcgttttatacatgaggtcagtgctacagccacctagcatgaactaacccagcttccacctccataaagttacctagagttgttgagttggaatatgttctggcatttacctgacctgccaatcattagggagaggcaacaaggtaattcagcctttcctcctatcagcacaaagaaactcaaagctgttttttccctttctgttccaaagcagtcttatcctgacaggagcggtctatactagtgcagatttcaacacttttttttaacgttttaattactatagtgttatgtagagatttgattgagcagctaatgtttctgaactttacttactaattttcagtgtccttaagggttctgtagtgttatcaaagcaaaaagaaaatgctgcataaaaataccaaacttcagcaactgttaatactcagatcatatacctcttaataaatagcatcttatgctaattagccctgctaaactatgtacagaggaaactgttcaagtattggatttgaaagtaagtgacttatgtttaacagaactaatgatgtattgaaacactgtattatgaaaagctaaattatacatcattgtaactatgtagaaagtgtagactaatgtataatcaaaatgctaaggatttttatatggccttgtatgaggggagtttgaatgttaataaacatgttttccactttaagatccagtaa

SEQ ID NO: 11686 - DNA, 1190 bp, Homo sapiens
agctttcttaagcctcattaagaaaaaaactgaaagcaatctatccttgtgtgccactggtgttctttccactttatacgaaagcaagtagccatgctttggttgtgtgtttggccttttcagtattagacaatcattctacaagagcttttcctctctctgagatgtcatgcagcgctgttgatgtccagttctatgtcatcagtacacaaggagaataatagatggggtttattaaagcgagcaaagtctgcattttacctggtgcgcatgagtggggtctttaagagttttggtggctctcccatgtttcctattacccatggatttaccctgagccttcctatcacattataaataacagttcatctaaagagccacttttctttctgattcagtaacatttgcctacataagttttcatttatttgtgttttatttattacagggctgctattttcataatgtacatgaacaatgtcacagaacttttttaatttttttgaataattataagtatcagtaaaggaagtgaaagacaggattgcatttaatagataaaacgtttaggcaataattgaacaaaagaatcctggcatatttctaacactaatggcaatttacttatggtatttattttcagtagtaaagacccagcttgaatgtaaattttgtatagtgtaagtatgaagaacatagtgcaactgtacaggtagtcaccagttattgtgatatgataaataattgggctattttgatgaagaaaactttgttcatttgtttctactttctaagagaaattgccacgattcctctgcttttcaacatttcgtatgacttttttttcgggtgggaataaaaagctgtgaaattgttcaacctactttgtaaccaaagaagcaaagctgtgtaatggagtttggtttttttttgttgtttttttttttttgtctttttttttttttataatgcacattctttatgtatttttatttagtgttttctcagtcacaattttctttactgtctagcatgatctgcatgacctataatctttgaaccactttcgtacctcatgtttttatccagcactcttattgtaatatgtactagtctgtgaacaatgtcaaataaaagagaacgaacaggtagtttggtggagctgagctagtgtacaatacactagttgt

SEQ ID NO: 11687 - DNA, 2104 bp, Homo sapiens
agattcacggaaagcaagttgatgaccagaaatcagtgcaaacacatcttctgttaaacccattggtatacacagaatattcctgtgcccacacttaatgtcaatctataattttaaccatttatccaagattctactaagtgtaaaattatttaataatgtctattaaattgatatttatatcttgcatcctatatcatgtcaatatgtgatatagaaaagagatacgtgaattttttagctaagcttgacagattgaaagacaagtgtcatttttttttgtagagggtgatatataccatgtaaatgaacaaagacattttaaatttaatcactgtttttattataagttccttagttcagatatcctttattaatttataagatgtgtaaaactacttaattctcacaagactctatgaagtaattcttttaatctctattttataaatgaaaaaactaaggccataaatttaagaaatttgtcagtgtctcaaagctaggaaatggccatctaatcccagagcctatgctttaggtcactatgatatatactactcctgtatcctcaagtaatgtatcatttagtaacactaagcaccctgcttagttttcatggatactgccaaattgccctatctcaagctttatacttgcaccatttaaagttttccacactgttggcaatatcagaagtgataaggctttgaaatgttcgccactttgataaagaggaaatgattgtttgttactgttatatacatgtatttttatcagagatgggttatgtacttttccacgtttgatagttggttgtatttctttagtgaattgatttttcttttcctttgcccatttttctgtttggatgtttgactttcttcttaatttgtaagagtatcctatgtagtaacaaaatccttttttaaaaatttttaaagaaaaagtatacacacaggacttttttttttctaattcaaaaaatacaaaggcatgcaatgaaaattaagtctgttccactaccacattttccagttttttgtgtatctttctaatgatagataccatatgagtattcaaatatacatacacatacacttaaaaaaaaaagatggcatatactaactgttctgtttggggctttttggtggtggtgtttgtttgacagggtctcactctgcctcccaggttggagtgcaccttgaactcctggactcaagtgatccttcacctcctccttccaagtatctgacactacaggcttgcatcactatgcccagcttatactcaccatagtggttctgtactcccttaaaatattctggaggccaggcatgctggctcacacctgtaatcccagcaccttgggaggccaaggtgggtggatcacctgaggtcaggagttcaagaccagcctgatcaacatggtgaaaccccatctctactaaaaatacaaaagtatccaggcgtggtagcacatacctgtaatcccagctacttgggaggctgaggtaggaaaattgtttgaacccggcagacagaggttgcagtgagccgacatcgtgccattgcactccaagcctgggcaacaagagtgaaaccgtctcacacacacacaaaaaaaaatattttggagctccttctatatgagtctctctctcttatctctctcaggatgtgtgtatgtgtttgtttctctggaaaaccctgactaatacagattagctatgtattaggtaatacataatgcctaatacataactaatatatggacaggaagttaatagactgactgtgccaccttaaaactcgtatgttgaagccctaacctccaacgtggtggtattgggagatgggccttttggaaggtaagtgtgtttgaatgaggtgaagaggttggggacttcgtgatgggattattgtccttacaagaaaagacaccagagagcttgttctgtctctttgggccatgtgaagacatggtgagaaagcagccagctgtaagccagagagtcctcaccagaacctaaccatgctggtgatatcctcatctcagacttctaacctccagaactgtgagaaaataaacttctttgtttaaacc

SEQ ID NO: 11688 - DNA, 2787 bp, Homo sapiens
gcattaagggatcattgcaagagcagcgtgactgacattatgaaggcctgtactgaagacagcaagctgttagtacagaccagatgctttcttggcaggctcgttgtacctcttggaaaacctcaatgcaagatagtgtttcagtgctggcatattttggaattctgcacattcatggagtgcaataatactgtatagctttccccacctcccacaaaatcacccagttaatgtgtgtgtgtgttttttttttaaggtaaacattactacttgtaactttttttcttagtcatatttgaaaaagtagaaaattgagttacaatttgattttttttccaaagatgtctgttaaatctgttgtgcttttatatgaatatttgttttttatagtttaaaattgatcctttgggaatccagttgaagttcccaaatactttataagagtttatcagacatctctaatttggccatgtccagtttatacagtttacaaaatatagcagatgcaagattatgggggaaatcctatattcagagtactctataaatttttgtgtatgtgtgtatgtgcgtgtgattaccagagaactactaaaaaaaccaactgctttttaaatcctattgtgtagttaaagtgtcatgccttgaccaatctaatgaattgattaattaactgggcctttatacttaactaaataaaaaactaagcagatatgagttaaatttaaaagtttcaatttattgctcagtgtacctgttaacattatatttaacaattgcttaaatttttgtttttgatttatggataatttcttaagagtacacactttagatacacaaataatcgttcatttaccatctttaggatcattgaaactcatctcactaaagaaagttcacttgaacctctttatagcattgatactaggtgaacagaaattacctgactaataatttgtctaacatcatatatcagaattttattgtatatgatgaacaaaacttaaaattttttaaatttaatttttaaatactgtttcagagttctaaaaaggcagttttttaaaaaacttaagttgataaaaactgtaagaataatttagcagaaatagaaccagaatgtagaagagtagtcatgtaacagcagtaataacatacttcagcttccatataggaatagaagtggtagagccaaaagtgatttaggaaaagttataaggtacaggttgagtatcccttttccaaaaatgcttgggacaagaagtatttcagatttcataatttttttcaaagtttggaatatttgcattatacttaccagttgggcatcccaaatctgaaatctgaaatgttccatgagcatttcctttgagtgtcatgttggcactcaaaaaggttcaacattgagtccacttaacacttaggtgttagaagacctaactttctgtaacaattaaccttatactttgtttgtcatcgaatatttgttgaatgcatgtcaggtaatggtcttgattgtgatagcttcaaggtggaacatactgtaatctccagatgctaggaagttagtctaataattcactgcagaaaattgattaagtggctgtccttttaattaagagtgtggagtcataaacttaagttcttcatatagtgacaagagtccttagagattgttattcaagttccttagaaattgttatttaggtataatatcatcttgtctttgactagagcttgaaaccttgttatctgattgtgtaccactccaaattccctgccttctgcaagttgaatgtcttgctgaatgtgtctaggggttcatcttcagtaatcgacattccactagtgccatagttaacttcatgacatgtagacattcaaaacttgagccttggatgttcctgtggacctgacagttaaaaatataaagaacctaggattcaattccaactttctctgtttgccttgggttgaataacttatcttttggagaatagctttaagtggcttagacactgataaaattcagctgtgttgttgacgctcatctcttttgtcttacgcttagccatatttaaatcttgaatttaatagagtctagtgaaaaaaatgagtgggaagaatgaatataaaagtaataatataaggaaaaagggaaagtaaactatttagaatgtagttttgttatattcccagcatttcaatatttattagttacttgtaaattactgtggctgtgtagtttataaatgtctgtgcactatattaattagaagaccatagaacatgccagcaggttggctaatgctatgggggtttttaccacagttgccattgtggaagaaattatttggtacattaataaaaaaagttggtaaaacatggttttatacctcagtgtataagatgtgcaagacaaatatgcttatttccttttctagaatataagtgatattatttgcttatgacactaacactattaatgacaggagtcaatcagcctttacagctatcaaaatataatgagatcccaatgatgattcttttttactttgaatgttaattagtttgggactttgattggctggcaaacattttatcattgtcagaatttaatttagatttcaaaaatagcttacaggattttaaacatggtgtggtattctaaagccttttttttaaaaaaagagatctttttgagagaaacaaatgaggattgtaaagtttggggacttacctctgtagcattgtgaaaataaactttgattaagctgatttgaaagg

SEQ ID NO: 11689 - DNA, 1217 bp, Homo sapiens
atctgcaagaggagaagacatgacgttttatgtttgcactgaaaaacagaaaatcaaatttaatgcattagtcatcttaaaaatgtccctttttttcatttctttgacattttactatattttatgctacatctcacaaaaaaaaaaaaaggtgtttaaacaaaaagccaaggagaagttgtggtttgattttgttgaattcacctttaaagtaggtttacaaatgtgaatcatgcaggcaggcctactcccggaagagtgtgctagcagaccttttgaaattggtgctttttttgaatctcacatttctagaaagaatggattatgatggatctaaggtatttatgtatttcattcattaatgatgacgttgtttttttttttttaattttattttccaaactgtgctggaccaaactactgatttgaaaggcatgtcagatcttgacagaaacatggcctgtttattctgcattcacctgtgatggtgaaacggacatttatttgcatcgctctaatttgaaatgtttgtaatctcataagcactttataaactttgttcttatttatgtaggactcttctttgcttttgttgtggtcaaaaggtgctgaaacagattgttgcttcgtacttaaacttcttaaaccaagaacctaaaccaaggtttctttgagagccgccctaagatgtgcggaaacctgttagaagtagctgtactcaaatttgttttgaggcaagatcattgatgagagtcattgtgaaggtacaacatgtaaatcctaaaggcctgaaagaactgcagtggaatcgtccaactatttattgccagttttggttctcctgaaccttatgccaccttaaggggaaaaaaaaatccagtagctggcttgagattccagtgctcacacttgacatggtttccagagaatctggccccaaagtccagaaggctctggttttcataaaaggtgtatttgctgtttattttgtatggtaagtatttgctcttttgaatttaattattactgtcagtgtcagtcttggttgtgtattgcatatactgtatttataaattggtgcaaaaagcacaagtaaattatacatcaaatttattataaagaaatagtaactattttaactttgttcaagtatgtggtaatttgctcctattagagtaaaaaagaaaccagtaaattatcagtttgtgtaacttaag

SEQ ID NO: 11690 - DNA, 170 bp, Homo sapiens
atatgtgatgtgtatgtatagcccttacatagtggattgtaatttgtgatattttgtggttttggagcaaagaacaatgtcatttgagttatctaaatctacatttgcaacatttgtagcagttaatgtgtgtccttgaagagttattaaattttctgacttgcagaccc

SEQ ID NO: 11691 - DNA, 316 bp, Homo sapiens
taaaacatgtagctataacatattttaaaaataaaatctgaaaacctcagaaaatttgcattagaaattggtctttcttagaatggtctagttaagttccacatgtagcataattcttaaataggcacttttctgttttttttttcttactgtgggatttcatttcaattttctacattgtctatctgctttttctgagattttccttcttacactgttaatcttattttaaaaaatattacattcttgtatactttatttttgtgagttggctactatttacgatgcaagagaataaatgtgagcaaatattgcc

SEQ ID NO: 11692 - DNA, 314 bp, Homo sapiens
ggggcttgtgaaacagattgttctacagatgaatctgtaagccagttacagtttgccttaactcatagacatcaatcagagagtgtcacagatttaaccttgatctaaagacaagttgtacccagagtatgtgaaaagaatgggacgacaagaatgtactggtttcttcctctaagaattgaaaggagttgaactgccttatgtttgggcatgtaactccaaaatactaggtagtataaggctttctcaatcagtgcaaaaatggaagatatataaagcaacaagttgtctgcatttgatcactggtcagattg

SEQ ID NO: 11693 - DNA, 3395 bp, Homo sapiens
atcatgctaaagaggaaaggacagtgtgcttggttagagtaaaggacgaggtcattagccatattgtatatatcgtcaagcaacacacacaaaagttcctcagccacaagacatccacatattgcatgttaaccagaagaaaagacaacattttccggaaatccactgcacactgttgcctatacactttgtacatttaattgatatttgtgctgaggtgatattcctgtctaaaagaacaacattgtctttcttttctagcacagagttatgcattcaaagatgcatacctagttagtttcctatatattcatgccatcttgaaaagacagactatggtgtaaccatgattctattatgtattggtacgtctgtagaccaagatataattttttaaaaataagtttatttctttcaaggtttacaaataacaaaggtgcaccttgtatttaaaattgccattatagatgagagcgtgcatgcacagtcatttttgtttaagagtaatatttttaatgtaatagattgtaagacgtggtgagggagggatctgacagagatgaatgtgccaagcaaaaccacaactgtgtatattttaaagcacatcatggctttaagtaccatgttgttaaggattctcatgaagtgccatagactgtacatcaaattagagtattatttcttcagtgttattgttttcagagccacattttgttgcatatttgctagtactaatcagtcaaagggcaccattctttttttttttttttgaaaccaaagctgtctcagaaatggccaatttaactttacagtaacaatagacagcacaacacaaactctctcaatacagataaactcacacatactggagatatatatataatagatatatataaaattattttaatgcattgtagtgtaatatttatgcatactatactgtataacatgttattcaaaagggattgccatttctgagacacagtaacaaaaaaatgaggaaattattttgcttctatttatagcctctgtcaaaagtcaaaagactataaatgctttgcaaaaatggtttcacgtttgcttaaatgcttcatcacagtcacattcaaaatagtgactctaaacaaagaagaaagcagcactgtcatcagatgcatgataaaccaaaatatgaaaatgggaaatgtttaattaacctagtaattgggtgggttaagtacatgggtgaattttatatgtgatttttgttttgttttgttttgttcagattaactgcttatagccttagaaagccttttacaaaattaaaaaaaaaatagatgtgcattcagtttttaagaatggaatcatccaaaggaattcctttttttgaggtttggatgttgcagctagtaaaggatatttttgctctgttcagcagttctaaaaattgctgaagtaggggccaggtcactggtagttatagtatggaatgggagaagtgaaagttcagttatagaactttccatacttccaagtttactgcaagtttttatgcttgagagagatgctttctaatataagactgatgtgttgattttactgattgtactgtacatctattaaagccttagattattacattacgggttggaacccataccaatgtaatttcaatcgtgttaagaaagtaatggtgacttcacatgttattgtagttagttacattatagaatattacttatttttcttgttaaaatgtagtttttcatttcctacatttattagattttcattttctattaacaattgaataccatttcagtttatagacttgttttattagattttaccaatgaatttttcaaaatacaaaaaaaagtagtttttccttcataacatactcagttttgaattacatgtagtgtcacatgaatattcgtattgttaactaaatgatttatattttactgatttaatattacagtgtaagaatgtcagtcattgttagttcttgtctagttttcattaaaagaacaaagatcttttatatggatatcttataaatatataatcattgctaagtaagaagttaagttgttgctatcgcaacaatcctggcagacaattgagtaatattttgatgatttattttgtttgtaattagttattataagaagatctagatcctagatattagaataaaatttattttctactgtatccatttcaaatgttaaaatattgtttaatatttttgaaatccctgagtatcaggccttgttataaataagctgcataatcaataaatagaacaagggactttttgttgataatccaaatactcaaagtttacgtaatgaaaattatagcgtgtgtgcaaactcttgagggttgattatgctgcaatttagcatgttggaacgtctagggagaaggttgactttttgcacttctgtatatagtcaaaagagagaaacctgtataatagtaagatcttattttgaataaaaacgtctataattacaaggagttttgttaaggctaatacaatgacagactgagcaaaattgcttgcaaaagtggcacagagttagcactccataccccttcaaacatgttgctttgctttcttgtggacagcttgtagtttgccaggattttttcagctggaaagatacgccatcctttcaaaccctcatgactgacaaaaactccatggggccaaatctgcctgaagatcattaccaaaaatagcaggtacttctaccattaaggtgaaatcatggatcagatattccttacatttttcaaaactactgcatgtttaaaacttcaacaaaaaaagagagaaagaactatactaagaacatatattattcagatcagtttctgccaatttcagtggtttattgttcacaaaaaaatcttcaaaacaagtattgactttcacaaaatttaaatcataaacaggcaaaccaaacagcacactgtagctatagttgttatgtgattgttttttaattgctgtaggatcctgttctttcagcaggtgaaaaataaaacgcagttcaaatttcatggttttaattttcaactcagaagcactcaaaaatgcaaaatgtgataatgggcacttgtttaaaagaattagtgtatccagccttcactccagctggttaaaaatgttgcacttatcagcaaccctaccactttcatctgctgaaaggacaaatgtgcttggttttactattatgtaatcacaacttactttctgcttgtagttgcttaaaattatgtattttgtcttgggctgcaatttgttttatgcttattttattattactgcagtagttgactttgctgtatggaaaaataaagtgaaattgccctaataaaacttctctttcttaagt

SEQ ID NO: 11694 - DNA, 1148 bp, Homo sapiens
aggcacaagaatctccaaacacctctctgttgtaatatggtaggatgcttaacagaatcaagtacttttcccctctttaactttctagtttagaaaaaaatcaaaccaagaaaatagtgagttaaaaaaataatagaagtagaaatgcccacatccacacttagcttgtttgggtttgctttcacagtctctcttccttctgactagaagtatgtataataaaacaatactacctagttaaacatttactttctcttttgcctttaaaatgtgcaggcttttctgtttaaagtgtgtgtgcacatgagtactggggctgtttttgatattagtaatttctctaagaaaactagccccctgcaacttgagtttgtggtttatctagcctttattgtttttttaaaatccacagtaggaataaaaaatctatattctcagaaatatctagcatggtatataacaaaacactaaactcatcagttcatccggcatcagatcaatggatctctgagcggggtgtttttttcagtgtcttataagcatagatgatagttgactgagtttctttagggcattgaatagacaagtaaagctaatgaatttaaaagcctgaaaagtgattgttttccagttatttctggaaaaggtctcattatatattgggtgctaaatgtttgatggggaaagcctgcatatattatcgtactggtaaaatgcattcaaaataattaaagtgcatgtattttccttgtaaacaccatgagctctcttagacatcttgtgataaagagcatttacttgccccactgctgtgcaatgccttaggactttgtttgtgttccaggacaagtgttcactcacatctgtaaaaacaattttaagaattgcaaataaattacagaccaaagattgagtaaagtcaaataactgttagtaagttgaaggatattggacaggaggacagtatttcagaaaaggagaggttgacagtcatccacaaggcatagcctccaagtatactctcaaatgtatgaagcaactggggtgggcagaagacattttagaatgagggctttagtttaaattaaagtcatggtggagaagactcttgcttcctccaagtgtttgaaaacacaaaatgcgatatg

SEQ ID NO: 11695 - DNA, 5227 bp, Homo sapiens
ggcggccaccgcgcgccggccgcgctctgcgcacaaaagccaaacgcatccgactctctaaatgtgatttatttcttgctttgagattggagaccactttgcattggccagggtgtcttgggagcccggctggcctccgcggccggcgtcccctgcctccaccctgtgcccgagggggtgtccggtcctgcccatccgatactctggtggaaatgtggctctttgcagcatgtacgtttctccctgattttggttgatgcatatttccccgtttaagtagccgttagggcgcagtatcggcagcttgacacccaccaagcaaaagtttcagcctggaaaaaaaatgggggggaagggtggatgaaaaggagggagagaaggtggaaatggtttttttttttttttttctattttctttctttttttttttttttttttttggtcaacagccgtttttctagttccaagttttaaatacatggaaggaagtccgggagaaccatatgaaggagcaggaggagaggaagaaactttttttccttcttttccaggagtagctggaaattaagatcgggttccttttctgccagcttggaagggcaaccccatgactgattgcgattctgaggatgtctatgcaaagttggattcttgttacagtgtatccaatctgaagtattgcacatctgaactgggactgttaacactgatgccaatacagtgtggggtgccagaaagtgtctgctgatatttgtggaaaaaaaatctattttgtttacctactgtatcaaaggggagtctgggggagaatggtagtattttttttttttatcagctgtgaaaaaaatgttacagatctgcacattttcgtgtgtactatggtgtgtgtgtgtatgtgtgtggtgtgtgtgtgttttaagtttagccttttgtttttgttttttggttggcagtaaccgattttaatgactagcttttaaaaatacagtacaaagactttgtaaatgtgattcagggcccccagcacccctgtgtctgcagagtgccttcaaaactcagctgttccagccggtgccaacctgtgaacttcccaccatatcccagaatctgctattccccaaaccacttcccagtttcctttcagtaatctttctgaaggagccaggacaatagggcctgttgtttagtgaatttctttattattttcagcctttaaaatgtaatttccatctcttgcaatgaatttgtttcccttttttttgcttcattttgtttaaattttcaggtatttagctcccctttcatattatttttaaattttttaattacctgttgtagggtgttcctccagaagcaaagagcaaaattttactgttgtgatgtaccaattctaactaattgtaatttttaatttcatgcgtttaatcattgtctcttcattttaagacttttaatacaaatgtcatttttaaagaaacaaacccaaaactattgtttgtgtttctgtgtttcatattcagtgatttaatacagtatcatggctgaggtggatggggcaggtgcatgatactcttcagagctatttgtgaaattttaaagacagaagtgtctcagtgacaagttggatgacactactcccaactttttaaatttggagaaaaccatcaaggtcgaggaagccctgggtatggccattaccatctgattagaagatgaacaggtattttgaatctgatctgacatggaacagtttacctcattgtaggtagggaacaagagaacccatctattaaaattgccttagatctgggaaagtaaccatccttctggcaaagtaggatggcacttttaagtttttcttccttttttccctctgtttatattgcacatcaagtcaaaaacatgtttgggaaagatggttttcaattctgaagttatacctagtgatgttttttgcagtacatttgaatggattgtagacactgcctcaacccttttgaggttttgatttggaaatagatttaaaagaaaacaggctaagataatatccttgttctcatttacaccctgcagtttggaccacatttgacctcataagtttttccttttaacagtaggaggcagtgtgagctttttattttttatttttcttaaggtggtcttagtaatataacatgttcatacatatcaagagagtacttggtataccttaggtctatgaagtgtagctgaaatctgaagagtcttgacaaagggatttacacccttgacaaaaccaaaagaaattaacaggccacaggtttctttaaagctgtgttaacatatcttgccttaaaatgtgtgtgtgtgtttttgctttgcttttttttttttgcccaagaggcatctcagtactccagcaatggaggaagaatagagaattttgcctggcaatggtcctactgccattttttttttcccactctgatctcacttaagtttgatatcaaacacaattgggaggcaatagtatcaatatcctaaatgtagaaattaaaagatactgtataattttatgcctttgcaaagattcgttcttgtatttgaataaattcagttgctaaagtagatccaaagtgttaaaaatgctgaagtcatgtcaagtactgtctggagggtttttttaagaaaaggcatttggcatttaactgtctcttgttttatttttaagtttttggaaaccttttgacataaaatgctgccaagtatctaagaaatgtatatactgacagaagatatttgaaagtggaaaattggaaatgaaatatgttgctgggtgcgttaatcacctccgcccaggatttagtcacttgcaggacctctttatagtctaggatggcagagcagaagattttaatatgcttttattaagtgatgtaaaataaatgctttttggattatcaatgaaagcaattttatgtgtgcctgaagcaagaaaatagcgtttttggttttatctcatattttcttggcaaaattgagagaaattaggaacactgctatttttttcttaaaaatgtttttaagaatatgttcgtttctttgactattaagaaccccttgtggtattagtgtgtgaagagataagggcatttgtttcaatgaaaaagttagtgttaaaggaagtgagtcagggagggcggagtttgttgtaaggcaatcacctgtcaaaacagaaattgggtgggaaaggagtctttatcttggggagcaaaagctgacttttaaacttgacccctgctgtttttaaacagcttttccttttggtctctgacagtcaatccaggttttatgttatttcaaaagggttatttttgtcctccttttttaatagcttcaggaaagttaaaggtatcatcttaggtctaacactctagtctttgagagttacggttctttcgtagaacaatttccatgttgttaactgttgtagacttaattgaatcacattttgggaccagatgtatttggggatagaattctttaaatgtatgggacttcatgcttcctgattatgtaatatttcctgtggttgggaatcctagaatgcctgatctattttatctgttcaggtagttttgttattgtaccctcttttgggtcatattctagtatttctcacagggggtatgagaaacagaaagctatatgtagcagctggtcttgagaagtagaagcatcttaactgtcataagagcatagattttttgtttttcacaacagctggaataagttcctgcattataagtataaagggaaccgagatttaatttggagatcatcactgttaaaacgataccagacatttgtcacagtgtcttatttggggaaagtttgctaatatacattttgtctgtgaaaatatagtaaattttaaaatactaatataatgtggtattcttgattacagtattttatgcagactattaggaatgattcagtgcatttaactgaacacagagctagttctaggtgagtgagatctttatctattaactggattttgaaggtttgagaaggctatggggatcatctggttgaaaggttctcaaacttgaccatatatcaaaatcacctggagcttaaaacatgtactgctgggaccctcctccagtttcttacccagtgggtctcgggtagggtctcaattttcatttctaacaagtttccaagtgattgtgttattgctgttccagggaccacactttgaaaaccagtgatctagactgaactccaaatgagtactatactgacagccacctagatattgagagacacagacttcagactcatgtcacacattttggagtgctgtctactacagttagagaataatctctattgaaatctaagctaaagaggacatataccatttatactaagactaactgttgtgtgtgaaatagaataaacattgcaggtagtttttgatcattttcacattattacaggaacattttgactatggttttcaatgttaattcagaagttgactttaaatgaaaatgtggttagaatagaggcaaagcctaagtgatcagaatcaacattccccttctccccaacctaggggaaaaaaaatttgaaaagtatgtcttcaataaaaggggacactttatttgtcttctcttcaacattaaaaaacaaagattttaagttttcatggcaagggttctaaaaatcattgtgccagagaatttaaatcttcatatcatggtaagcacatgcgtatgtctgtgactcagtttcttagccagacttccaggtgttagttaattccttctcatttagttctactgtaatccattctgggaaaatgcataccacaaaactgtgtatcttgcagcttctttcgttatgcatcttaattccctcagaaggtcccagaactttatgttaaagatctgggtttttaaagacaatttgggggccttctaaagaaacaatagtagatctaattacaagtagtggattgcttacttcaaatttctcttttacaatttagaaagtttagtaccagtttatagactgagggagtagtagctactatttagatgctgagaataatattatcatgcttgggtggggaagaaaggcccttactcaaatctccattttcatttttaatgcttcctggacttcagttattttcttgcttttgcctcaagaataataaatatttttggtt

SEQ ID NO: 11696 - DNA, 1075 bp, Homo sapiens
tctctcagatggtcttttgttactgcaagatttgcacgacacttaccgggctggttggttctgggctagttttattgttaattttgtcacagcctatttaattaaaagaacgaaaacacttgcctttaagcttgccaggttgttctgctctctcatgagaagagcttggatacagtgagtttgcacagctcagtttttacctaaccacacacttgcagacctcctgaggtacacagaatagctgagcagttcacttcagggatcaggtcatctctgctcctcctagtttcaccatgttctggcaataaaaaacacatattatatcctggttttctctatccttgcattactaaggtgactgtctctctttatacatccttgtatggttctcccagtattagcaagattgtatatctgtaaagaatgtccagttttgtaaatatttccctgcctttttttttctttttttacatctgattttaatgcttcgttaacttcaaaaggaactggtagagttcagaaggtgagctgttgtttttctaaacctcttcccaggaaggggacattgacacttgaatttttgtcacctttttcctcattagaaggaaagtagaaagccttactttaggatttttaaaaaaaaatccatctcaccccatattgttcttaaataagtatagactaattaacctaagctacctttaacaacgtagaatttagatgggttcatatatgtgagaaaaacctgaatataggacaggggtcctacttttttccccacctctgtcgcccaggctagagtatagtggtgtgatcttggcccactgcaacctctgcttcctaggttcaagtgattctcctgcctcagcctcccaagtagctgggattgtaagagtatgccaccacgcccagctactttttgtatttttagtagagacagggtttcatcatgttggccaggatggtctcttaactcctgccctcaagtgatccaccagagaggagatcctcggcctccccaagtgctgggattataggcatgagccaccgtgcccagcctactttctaattaatt

SEQ ID NO: 11697 - DNA, 3270 bp, Homo sapiens
tcttcaaaagaagcattgcagcccttggctagacttgccaacaccacagaaatggggaattctctaatcgaaagaaaatgggccctaggggtcactgtactgacttgagggtgattaacagagagggcaccatcacaatacagataacattaggttgtcctagaaagggtgtggagggaggaagggggtctaaggtctatcaagtcaatcatttctcactgtgtacataatgcttaatttctaaagataatattactgtttatttctgtttctcatatggtctaccagtttgctgatgtccctagaaaacaatgcaaaacctttgaggtagaccaggatttctaatcaaaagggaaaagaagatgttgaagaatacagttaggcaccagaagaacagtaggtgacactatagtttaaaacacattgcctaactactagtttttacttttatttgcaacatttacagtccttcaaaatccttccaaagaattcttatacacattggggccttggagcttacatagttttaaactcatttttgccatacatcagttattcattctgtgatcatttattttaagcactcttaaagcaaaaaatgaatgtctaaaattgttttttgttgtacctgctttgactgatgctgagattcttcaggcttcctgcaattttctaagcaatttcttgctctatctctcaaaacttggtatttttcagagatttatataaatgtaaaaataataatttttatatttaattattaactacatttatgagtaactattattataggtaatcaatgaatattgaagtttcagcttaaaataaacagttgtgaaccaagatctataaagcgatatacagatgaaaatttgagactatttaaacttataaatcatattgatgaaaagatttaagcacaaactttagggtaaaaattgccattggacagttgtctagagatatatatacttgtggttttcaaattggactttcaaaattaaatctgtccctgagagtgtctctgataaaagggcaaatctgcacctatgtagctctgcatctcctgtcttttcaggtttgtcatcagatggaaatattttgataataaattgaaattgtgaactcattgctccctaagactgtgacaactgtctaactttagaagtgcatttctgaatagaaatgggaggcctctgatggaccttctagaattataagtcacaaagagttctggaaaagaactgtttactgcttgataggaattcatcttttgaggcttctgttcctctcttttcctgttgtattgactattttcgttcattacttgattaagattttacaaaagaggagcacttccaaaattcttatttttcctaacaaaagatgaaagcagggaatttctatctaaatgatgagtattagttccctgtctcttgaaaaatgcccatttgcctttaaaaaaaaaagttacagaaatactataacatatgtacataaattgcataaagcataagtatacagttcaataaacttaactttaactgaacaatggccctgtagccagcacctgtaagaaacagagcagtaccagcgctctaaaagcacctccttgtcactttattactcccagaacaacaactatcctgacttctaatatcattcactagctttgcctggttttgtcttttatgcagatagaatcaatcagtatgtattcttttgtgcctggcttctttctctcagccttacatttgtgagattcctctgtattgtgctgattgtggatcttttcattctcattgcagaataatgttctattgtgggacttattacaatttgttcatcctattgttgatgggcacttgagaactttccattttggcgctattacaaatagtgcaactatgaatgtactgcatgttaccatcttacttgagcctttaatggacttatttcttcaaatccttccaaaaattattataagcattgaaattatagtttcaagccaactgtggatacccttaccctttcctcctttatcacaaccaccgttacaagtatacttatatttccctaaaatacatttaaaacttacctaagtgacatttgtagttggagtaataggagcttccagctctaataaaacagctgtctctaacttattttatttccatcatgtcagagcaggtgaagagccagaagtgaagagtgactagtacaaattataaaaagccactagactcttcactgttagctttttaaaacattaggctcccatccctatggaggaacaactctccagtgcctggatcccctctgtctacaaatataagattttctgggcctaaaggatagatcaaagtcaaaaatagcaatgcctccctatccctcacacatccagacatcatgaattttacatggtactcttgttgagttctgtagagccttctgatgtctctaaagcactaccgattctttggagttgtcacatcagataagacatatctctaattccatccataaatccagttctactatggctgagttctggtcaaagaaagaaagtttagaagctgagacacaaagggttgggagctgatgaaactcacaaatgatggtaggaagaagctctcgacaatacccgttggcaaggagtctgcctccatgctgcagtgttcgagtggattgtaggtgcaagatggaaaggattgtaggtgcaagctgtccagagaaaagagtccttgttccagccctattctgccactcctgacagggtgaccttgggtatttgcaatattcctttgggcctctgcttctctcacctaaaaaaagagaattagattatattggtggttctcagcaagagaaggagtatgtgtccaatgctgccttcccatgaatctgtctcccagttatgaatcagtgggcaggataaactgaaaactcccatttacgtgtctgaatcgagtgagacaaaattttagtccaaataacaagtaccaaagttttatcaagtttgggtctgtgctgctgttactgttaaccatttaagtggggcaaaaccttgctaattttctcaaaagcatttatcattcttgttgccacagctggagctctcaaactaaaagacatttgttattttggaaagaagaaagactctattctcaaagtttcctaatcagaaatttttatcagtttccagtctcaaaaatacaaaataaaaacaaacgtttttaatactattgcttttatgcctagtcaactctg

SEQ ID NO: 11698 - DNA, 37 bp, Homo sapiens
taaacttcttgttctattaaagtaccgtgtgcagttt

SEQ ID NO: 11699 - DNA, 2007 bp, Homo sapiens
ggcaatgcatgaaccacagaagctgcatggttaaaatagcggcctgtgcccagtacagaaaggtgttactaaccagtcttttgaatcacttagcagcttgctgctcaacctctagtgtccctccctggattctttgaggtgtctgctgtcgctaccactgtgcacatctgaaaactcacaaccaagaaaatccattctattttcttatcttggactggagtcacctattcttgcattgctgtatacacctcatgcttatgcaatgggaagaatatgggggccagggggtgtggtactaccttcaggcatttggtaactcaaagaaggctgtacagatatattttttcaaaagaacaaaatccacagatgcaatgtgagttgcgtaagaaacagagtagatagactaaattcagtgaaggaaaggaattgagagatttttcttagtaaatagattattgttaagtaaatagttattaaaaatatatctcactgcaaaaaaaaaaaagcagtatcttcactcaaaagtcttgcttggaagaataagcagaaataattttatatattttttttctattttcacattcatactaacaagttttgttccatttgttattcaataaaacaaaaatttctaggtatttgctttattacctttcaaatatttactgttgcttggccccaagaatggccttgtacaacttatccagaatgtctattaggattctaatgttatgtccacttacaagtagagacagtaaaaggatgaatacccaatctttagtgacaatgcagctgatttatgaaagagagggctacactgctatggaaacttagcttcaaagaaaatgcaatgtatctgcaattaggtgttcattttttactacattttattaaaacctgctttatactttcaactgcttgtaggcacaacttctgcaagtttaaatatttgagctttacaaataaacatacacatgctcagttttttaagtaaacctgtaaaatacccaggaaggcaaatgttcattgtttaattagcactgggattttataatataatgtttggtatttttgaggcattgttaacatgaaagtcaaccactggctttgtgaaaaatgctatgtcactattcagaatatgctgggtaaattgacttgcctagtgaaaagcaaaatgttaaagaaagaacttctggttctataatcatattatatgcactaaactatatgcatgaaagttctttgcatggattaatggggcttacccttgttgcactcgaaatctgaggtgtatctagccctgccactattggctacttaccctcattaatatcccacttgagaaaaattgtgagactatactgtgtcaatatctgtaaaaagagagaaaacatgttttgtttttttttgaagggggtggtgtgggagtggccctttaactctatttggctatctgaggatgtacaaaattctcatttaattttctggtcagcaagttccccacacagaaatcactctgaggtttacagaagaactgtaatattattttaaaatgcgatttttctgtcattagttctagatatgtacttcatggttaaattctaaatctgaaaatgctagtgggagatatcaagaaattttctttttgattactagtacctgtattctaacagagagtttgaattttttgcccgtgttatcagaatgatggaaattgatcattttcagttgttcattgtgtattcaatccagcgaactgctgtatgtatagaggagctgaggtgctgtctaatgggaaatgtgatttgattgatttatttgcttagagtaataaaagcattttgtgcattcaatcttacaatagattttatctgatctttcactgtaaggcttatgtgtattttccatatatgtaaaacatacacatgtaaaatatatgtggccataaattaggcaataatcatctaaataaaaattatattggcagctaagctgcactgaatactc

SEQ ID NO: 11700 - DNA, 1614 bp, Homo sapiens
aaaatcttggtactgctaaattatttgatatgaactcaatccagcatttgtagcaggttttgaatgggtgggactgggtggggaacagcattggacattaatagggcacttttcagacccattttttaaagtgctagaaaatgctttttttaaaaaaaaaatacaagttttaaaatgaccacttactctttaattatttactaattgctagtgtactcagtgtggaaaagactacagattacacactcttttcattcacacttgtacatatagacagcaatgttattaggagcattaaattaaaaaactgaacagcctaatttaaatgtggcttgggcctggtagaagtttgaccaaatggaatggaggctgtgagcaatgtgaggattctatttatttatttacgtttgataaaacttactggaactagtactaccatgcgtattccctgtccaaagcatcactgctttggtatagtataagttcatgaaattctggtgggtagaaagaaatttttatttctatcagcagtactaaaatgtatcagccaaccagagaacatcagtgactttaacttctgcagagtttgccccagaattcagagttctatttagaggaagttaaaacaacaacaaaaaacaaccatttgaaaaatttttgtcaccagcaaaacttttcactaattagtgatatgaaatgtgatttttgtgttgttaaacttcagctttggaaaactcagtctctttcattatcatccattccaatttgaaggagttgggcagctaatttggttaaaggcagtcttgagggttagaagtattacttccttttcgggttccagacctagcttgtgactgaaagttttagaaaaaggaagtacatctatagccaaattgataaggttattactgtgttttgcacaaagtatattagcaaaagtatttgctggaattattggtagatggcagtcccactcctacacctgctttgtcagatacagctgggttccctggctgactctgtaccttacttacactacttacttaatagaaacacaaacttggaaattgtgccagtggtccagctggagcacaacgtttggtgaatatgctgtttcctcagttcagagaggtagcaactaggtaaactccttataaaaagcaaatacctggatttacaaaagtgaaagtagttgttcacaaaagaattcgccatggaattctttcagttaccaagctctcctggtaatgtttgtggttatatcatttacacaaaacttttcaggaacttctgtgttgtttaagcaagatgtatctgtactgatgtctcagtgaatcagtctgtttattaagcacttatcagggcttccacacacttatttattttgccctagttaatcctgttgtttgctgccattggcatgaaatggccaactgtggctgttacagttctttcattcaattataacttgtaaaccagtgactcctaatctttttcaagttaagacaccttaccattgcttatttggttttatgagacttgttcctttttttctccctaaggaaaaagaaagctttatgacatatttatttttttaataaaactaagcaaaaa

SEQ ID NO: 11701 - DNA, 379 bp, Homo sapiens
tccaaaatgaggagcaggaagctccctacagcgtgcacgctctttcagagagtgccaggaattcactgtaactgagaatgacaatgataaaattattttcacagatcaggaaggcatacctatagatgtatttaacaaaagactgtaaaaagctggaaaattgtgaagccttatttttcaagagggttttgatagagtaacagatcattaagttgttggtattccagaggtccgatttctatgtttatgttggaatgtgctctatgaatatagccttttagagatcacaggtaaaatttttcacccataacatcttttcaatttcttgcgccactacaagcagatatatttccacaaaaaaatagattgtttgagattt

SEQ ID NO: 11702 - DNA, 607 bp, Homo sapiens
atgttgtgaaactccacttgaagccaaagaaagaaactcacacttaaaacacatgccagttgggaaggtctgaaaactcagtgcataataggaacacttgagactaatgaaagagagagttgagaccaatctttatttgtactggccaaatactgaataaacagttgaaggaaagacattggaaaaagcttttgaggataatgttactagactttatgccatggtgctttcagtttaatgctgtgtctctgtcagataaactctcaaataattaaaaaggactgtattgttgaacagagggacaattgttttacttttctttggttaattttgttttggccagagatgaattttacattggaagaataacaaaataagatttgttgtccattgttcattgttattggtatgtaccttattacaaaaaaaagatgaaaacatatttatactacaaggtgacttaacaactataaatgtagtttatgtgttataatcgaatgtcacgtttttgagaagatagtcatataagttatattgcaaaagggatttgtattaatttaagactatttttgtaaagctctactgtaaataaaatattttataaaac

SEQ ID NO: 11703 - DNA, 510 bp, Homo sapiens
gtaatatacatatagttggattggattgtcagcagtaacattggaaatttaggtttttaaatcccaatattaactttttactcttaaaaagaattttgctgattatatataaaggtagtctcatttcatttgtctctcatgtaggcttgaatatttgttaatttgaattaaatcaaacattgtaaaaattaaaacaaaatttaagattgcatgaaaatgttatactgttaataaagctaaacataaataagtctgttaaaatgaatggtagacactagtgtttcttagtgcaattcaaaaaatgtcaagatgtcatttaaagacacaattttgattaattatgcatacatgagaattgaattacatgctataaatatgagatttcatcttccgtatggtattcaaccatttttaaatattttatttcaccatattgcaaatttttaggcacaataaaaagcaccctaaacaatgtaagcagaatgtgcatgttaaagaacatatttatgg

SEQ ID NO: 11704 - DNA, 190 bp, Homo sapiens
atagccatgcatttgatttgtttagttttgattgttttaacagttagtaatggtgctgggtaataagcataagaccaatctcttgctgttaaatcagttctgtccttggcaactttcttctgatatctgaatgttcatgaaggtcctagctttatattgtccctcttttaggaataaaattttgattttc

SEQ ID NO: 11705 - DNA, 1102 bp, Homo sapiens
ctttgcttactgtgagttgactgactctaattgaatctgcgtggttttgatactttgatggattccagtggaataaattcaggctgctgaaacaagaaattctgagcccaggaagcgggctcttctttcttcaaaagaagcccttcttgttcatattcaggagcttctgttatattcaaaggtaattctatgtctatctcaactctattgattggttttatagttcattgaaaatcctcaaataaaatataattattactgaaatatgtttaatatttaaggggaaaagagactaatttcagttatacttttaagcttagaatgtatgttcatttccaaattttgtatcataagagttttcaacatagagaaaagctgaaaaaatgcaaagaataaccacatactttccatctaccttcctttgttaacgggttgtttatcatataataatttgttttgtcatatttgctttcactgtctattatctgtttaagtctcataactctatttttagtttgctgaagacttgaaagtgaatcgcatatatcatgacacttcttggagtgtcattaatgggcaggcttttctgttgaagagtggattccgtatgttcttcatagagagtgtttttcagattcttcattgggatattaaaatattagccaaatttctctctgttttatatatgtctgtttatttcagtttgtggtttctgcaaatttgtaactgcctctgttttaggagtataagtattacttccttgtggtctattgtgaagtaaaaagtagacccttgcatatactattcttgtttgtgttcatcttaatgtttttgtacagctaaatcaaatgtaatttatagagttagtttcatcaacctaatgaatgctagttaaatttgaattccttggaatttatcgtatattgtattcactgagattatgaagggacaaatgttaatcttttgtttccagaaaaagttgggctttcccaagcagttctattacccggttcagaattgcttcatccaaaaatcatctgatggtatagatggatcctagtccttttcattacctgatggtagaaataaaataattgatttt

SEQ ID NO: 11706 - DNA, 733 bp, Homo sapiens
gaagttaaaatgaatgtgtcatgagaatgggcttaacacatcgttggtttgaaaacttccatttttaaaaatttagagtttagtcattagaaaaaataatggactggaaagttatatttatatccaaatatacctatttcaaagtgtatttgtgaggcctgttttagcctgtgtcttttgtattgtgtgttgctaaagaattctacttttagtaggctaatcaacaatgaaagggttagaaaattgctgtggaacatccaggtgaacttcaggaaagacagtgaaaaatggaaaacgttggagcttctgttgagataatcttcattaggtatatatcttagggatacagccttttctttatcttatagcaggaaaaaaaaacttttgagggaaatagaagggctgcgttacacaaaataaacaatggcattgtcataggccttccttttactagtagggcataatgctagggaatatgtgaagatgtttttatgaagtctctttctgatcacgaacaatagcttgcgctctactctgtagttatgtggattgccgagcaatgacccttttcaatttcttatttctgtgttactgaggaccctaatcacttagggatgtaattttatagtataaactttctgtacagtttttcttatagtctaataagtaaaaagtgtccttcaaattatgataattgcctatgtacatggataaattaaaacactgcacacgg

SEQ ID NO: 11707 - DNA, 576 bp, Homo sapiens
aaagaagccattcaaccagagaacaagctagaatttattttgcttctgtggttgtaaaaatgctgttgctaaaggtggcgcagaaacaaatatcagtgttagtcattgataatgtctgaagcttaatgtccagtgattggcctttgcttcttaatttattttaattttttacttgtgccacttaatatcaggcattttaataaaatattgttacaaaaaatgtacagtactgacaccaccacaaatcatggttaataaaagagagtagttttaactttatttttatttgtttagagattttaagttggaacagtattttcccattgactacttttcattcttcactgtagttttaaagaagaactgtaaatgacggtgctatacaagtcaaaaaatacatgcctgcctcgtagtgaagttgtagctctccgtaatatgtatattttactcagttttcaacattttgtgaatgttgactacctgaagttcctttttagatgtgctattaacattctgttggattcagagggttccttgaaagttttatgtataaatatgtaaaataaaaattaaaac

SEQ ID NO: 11708 - DNA, 459 bp, Homo sapiens
aaagcgaggtccctccaaaccgttgtcatttttataaaactttgaaatgaggaaactttgataggatgtggattaagaactagggagggggaaagaaggatgggactattacatccacatgatacctctgatcaagtatttttgacatttactgtggataaattgtttttaagttttcatgaatgaattgctaagaagggaaaatatccatcctgaaggtgtttttcattcactttaatagaagggcaaatatttataagctatttctgtaccaaagtgtttgtggaaacaaacatgtaagcataacttattttaaaatatttatttatataacttggtaatcatgaaagcatctgagctaacttatatttatttatgttatatttattaaattatttatcaagtgtatttgaaaaatatttttaagtgttctaaaaataaaagtattgaattaaagtg

SEQ ID NO: 11709 - DNA, 1142 bp, Homo sapiens
actttatgctgaagattcttcaagttgattcagtgtattactgatttttttctatttgtaaaggattatgagttgtataaaatacatactccctaaactagatcatgaaactggtttctgttttatgcagttgtcatttgtaaagtctaataaaatattctctataattgcttctagattacaaaaatatgacaatcttgtaagtagcagactatggagaaaaatgagttacctggagggtcaggtaacttgccaaactaaaaagtatgttagttgaggcaaagtcctaagcaaggttgtgctatcaaggctcagcataccttcgtgggcctttgatttaccaacactggaaatgcctgccaactaatcttggatagattctttaaggcattccacttagcttgccagttgagacaatcaccacagttattacccaaatactatgaacatatttttgtaaaccagtcattctgaattatagtgatgagaatttaaatatatgcttttctagaatttgatgtttgaccatttatgacttaattaccagagagccagtaaattaggacagtgtttcaacaagcctaggctatctcgtaagttgaaaaatatcccactatagttgcttcatgagtatgaagtaagatggcctctgatttacactggttcaatttacaaattttcaactttatgataggtttatccgggtactaaatgcatttcaacttgatagtttcaacttatgataggtttaccaggatgtagtcccactgttgaggagcatctatttaggggttaattactttagtaataagtggaaagtaagataccttgagtaatgtttgcctataaaattgtcagcgtatttttacactattggctcaagaatgttataatgctaagggacataagttggcaaccacttggtttttggaaggactttcggtattgtattagaagtctgccctagctgttaaatttctgggtatttatcctaaggaattaattaaagagttaattgttcctttcttcagtgggccattgttttagatatttaaaaaatccaacagtttctatcataatgtaactgtaaaaatgtaaacacattattagcatggacttttaaataaagatttaaagaaagc

SEQ ID NO: 11710 - DNA, 520 bp, Homo sapiens
ggctgcgaaaaatccaagtctctacagagacactgatgaagttgaaagggtaattgtttttccatgccaaatgaggaaatcaaattaatgagttgacaaacttttcctgagatgttatttcatctacatttagttaaacaacttagaatgatatctagaaaatatttattttcagccaggaactttagcaaactgtggcaatgatcactgggaatgaaaacgtataatgttctacaatttttgttatcacattggatgactttgaatatagtagtgacacttgggaccaaataaattattttatatgactactagaacaaagttttagtaagctgtctgctaatagagtcagaattcttccagattgtttccagctgtaacaggtattgaatttccaccgtgctcctatgtaacagctgggtggtgtaaaaaatgaacttcaaattatggagtggaaaaagcgtaatgttaatatcttgtaaattcgtattccctattaaataaagctttcttattccct

SEQ ID NO: 11711 - DNA, 1868 bp, Homo sapiens
acccttcaggggtctcagctgccttagactaaaggactttcaacacactggtctcttttaatttagtgaaaagtgtgggagttgtaattaggatcatccaccccagacatggaatcccccctccctggtggtcttaggtctataatcagtgacgaacagagggtgcccttggccaatgtagttaagaaactggaaaatggtttcttcatgttttcccaactctttcatccagtgtccaaaatatataagtaaatagctgtagagtcacatatatgaagtgaatagcatatgtgtcatttagtctccctgaagattcttttcaagatcctgttcagggtcctccaggcatcagctgttgtgtcctctctttgtaacagtggacaggacagaccacccagtgctgcaggagacaggccactgcgtcacctgtgagtggtcaggggctgatgtggcaacaccctctgccaagagacagagctgtcctgagaatgctttgtccttctgagcccatgttttctgctcagtagcagcttggaagcagatttggaatggtttactattttggctgctcttggggactgcgagaagcagagagaatgagagaccagtggcaactgcctgcacagcagagataaccctcttcccttgcttcctttaatagttaaatagactttgtataccacctgaccagcctttgtgcatttatcctaatcatgcatgaccgttaaccttttgcttagtccttaccatatgtaataggcagctgttaaattcaccaacagataccctgatttttcatcttacgtgaccaagaaaccacgttaggggaaatgaaaaaagcaagccacaataccatgattccttccattttcaacagtagatgaaggaaatgatactgaatgagtcacagtgttccctggcaagtaagctgtttgcattgagaaaggagtgagctggtgaggttaccaccctgaattgagctccagctgccagtttttgtgtttttccttgcccctttccaagtggttttcaagtgtcaggcagtgttctgagaagcagcagcctataactgtatgtgtgttccttgaagccaggtgcagagttcccagctactgcagcttgggatttggtgggaaactactgggataagcttctccttgacaatggaaaggcagcagtcttcaacatttggttgcaaatctccatccacatcagggagctttccccaggcaaatacaaaccgccccgtggcctgcaggcctgcaggggaggcagcaaagggacctggcagttgcaacacagtaagtcaggaattcaagcgtgaacccatattgataagtgggccagaattatttaggggcctggcttgctgctctccatttcctgtatcgctaatttatcatttttccaaccttggtattttatattatttagagaaaatgctgggtcactctctttgcctaaggtgactcaaacagccaaacgaaacttccgttgcctcccagccctctgtatccacctggttttgttctttccctgtgagcatttgtggttatagcttcccatatgccacattcaccggccacctcctcgccgtggaaccctgccctctcccctcctgctgctgtagagttttcccaaagcagtgtccaggagagaatttgagagagtgaagaaattgccttgtagatgtggagggctgcaatctgtcttgatttctccaagcacttaactttctttgactgcactgagaattgctaatgatttcccatgagatttgcttacttttgtatactgtattttccagcattacagaaccttggttattgttttttagccatagaatcttctagtaaaaaatatctgcc

SEQ ID NO: 11712 - DNA, 1097 bp, Homo sapiens
tgagatgttgtagactgtttccatacatgggcttaagaagttggacagagttaccttaagtgtctctactatctttgcctccagatttcaagaggagaaatttagttttaaacctgaataaacatgtttgttttcagtgctcactcaaaccactaaaacagatggatagctttgaggttttagataaggaaagattatggagaatgtagttgttattgatttttggcaattttacatttggaattttatcactgtgcttttttatatgaggcactgtagtattttcacatagtatagtactctggatgtaaaagctcaaaaattgtgattccttgaacgttcactaaatcttcaagcaaaaacacatttttacattatttttacgttgattattttagtgaaagaccatatgaagaagcatttttaatattaacttgttacatactttgatccactttacatcatttttatgttgttgaggtagggaaattagggttcagtttatcactggacattcaggaggcaagtcaatcttttttatttccttataaaattaactcttcaaaagccgttaaacagagagttatcttaatttttattgcagtaggaggaaatatatttaaaatatttgtagatttatagcaaatagagactcgttatttaaaggttaaataacaatttgttcttttgttgtttttgccagtttagggcagtagctgcttttgtcataaatatcttcctaccacatcaaaaatgctgcttttaaaatttttgtttataaattgagaaggaattttctctctataagtttctgtcattgaacagatcaccattaaaaagaatattagaatccagcatgaagataatggctaataaaaatgaggtacatactttataaaaccattaatcagatttgaatgaggaatgcttcccacatccttgaaagaaaaactgtggcttacgttttgaagtattctgagaatgaagtattaagatccaatttctataagcaagatcagacttgttaagtatgccgcaagtaagagctaattcattcattccatgtgtgccactaaataaagagattgagcaagtgc

SEQ ID NO: 11713 - DNA, 243 bp, Homo sapiens
gttactttatttgaataacaaggaaaacagtaactaagcacattatgtttgcaactggtatatatttaggatttgtgttttacagtatatcttaagataatatttaaaatagttccagataaaaacaatatatgtaaattataagtaacttgtcaaggaatgttatcagtattaagctaatggtcctgttatgtcattgtgtttgtgtgctgttgtttaaaataaaagtacctattgaacatg

SEQ ID NO: 11714 - DNA, 869 bp, Homo sapiens
ctttgtaaggaatatggaattgctaagatatcattggtagcaaacatctctggtaaggtgcatatattcatattaaattcccattcatttgagttgtgaccattatttttcattcactgaagtaaaagcacctgatgctgcatcacaactgcaatgtttgtttttatttttggctttatgtctatactccacagagagctttttaagtaatgaattatgtagcactattttgggtggatgagttttattttcttttaaagctgccttaattccatttttattttgcattttagaattgcccttcatttactaaatcagccagttaatgtgattcagttgtgacctgtgggattttaaaattttcctgccctcataatttaagcaaaatccacgatagtatcagcccaagagtgtgttgctatttgtaagccccatggatcaatacataaactatgcataaaaataaaatttcatattttcgctcgtaaaaatttaggcgctgaataagaattgtgctatttctctattaatatattgttagaaataacttttctaatgaaacaaaaatgtttctcaaaatctagaaaagtgcatataaatttttgttcatttagaactgagtattctggagaaaaccaatggtcagcacttttggtttgagttatctgagattgtattttcaaaatgaattttaagtagatatttggtgtttttatcttgtcaaagacagtttcaaaatttgattcagtttatgttttattccgttctaaaatattggagatgaggaaaatgtacttgagttttgaaatattttggtaagcctctcttactcctgttatgcactttttaaaataaatactgaattccag

SEQ ID NO: 11715 - DNA, 654 bp, Homo sapiens
aagccctcaaggaggaagaatagtcttagccagttttccaaagagcctaggatattacaaaggatgtgtgaggatttcccagtactggatggagaatgagaagagaaagtcagcctttctggggctttcatggaggagacttgcccaaggggcttccctgccagggctgaatgaccccagcaccaaatgactggagacgcatccttaggagcaaatgctaatgaaggggagatttacaaacatcaagaaagctgcagatggatgtttccatgaagaaatctctgaagaaaccaaaagagctgaaactgaaaaaagagctccctcccttttttcactcattttccattcccaaaccctgaaagagataaaggcaacccaatgaaaccacagagaggcagaagagaacgggcagaagtacagaacagaaatggagaagctgaccacgactccatctcttctcattccagatttccagcgtgaagcaggcccaagctagggaaggtgagaagctttaaccttaaattttcgagttttggccaggcgcggtggctcacggctgtaatcccaacactttgggagtctgaggcgggcggatcatgaggtcaggagattaagaccagcttggccaacatggtgaaaccccgtctctactaa

SEQ ID NO: 11716 - DNA, 5308 bp, Homo sapiens
tctgactaattttgggactgaatgaataagtacaagaggttggattttctatgttggctgattaccatattgaacacatggcatttgtagcattctttaaatctatctactgaaatgtatttgacattcaagcagttatattcggtccttcattttatagaatattggcactattattggtacagtttaaagccattaatatgttttatccatttgataattttacagtaagtaggtctcattcattttgacagttatcaaagatgtactttccacagttaaatttacattaatggcaatttttgatagttttatggctttttactgttagactaatcaaaaataactttaaaaggaacaaagaaactccaacatttcacattatgcatagttatgtagccatttcacagtttctttaagatgtgtaaactcattgtccttgatagtttttatttttcattataaaattataccaggagatttcttttaagattctgagttagcagagttcaaaactattttgtggaaacaagccaactagtaacaatgcagcaacacttctggtttagctaaattatttttccaatgtaggaaatccacactgatttgtacgtctgactgagagaaagatggtcgtctccagcagagaaagtgaacagcatttgttggaaggtgatggctctccctcctccctccccatttcattggcgtaacgtaaagtgtattctgtacataatttacaaataaaacattttattttaattgttacttattatttagatatttctcaacacttaaattcataaaattaagaccatgtaagggtatgtttttagagaaatggaagtttgagtaacccacagaacatctgtgatctttctacagcagcttcagttttgtgccaacattccatgtattttgaatatgagcaaaaactgatcttaagagcagacttaaagtagctttgtacgccttaatgttcattttgatttattttaaatctttacattcagaaatgagatactgtattatcagaccaggaggcattgctgtgaaagataatttcctattctaaaatatcaaatttaaaataaagataatgaaagaaaacataagagaactattggactctaattgctttgaactagttttgcagtttgactttacgtcttatacatcttagttacaagtctttggaaactcttgtttacttatgagcataatcattccttggagttatactaactaataatgaatattaaatgatttttcttcagtcacagtgagagcatcttgctttgtggttgaaataggtagtgtatgtcagtctttgctttaggctgtttctcatctaagtgtttgaattaaagatgttaaatttttctaattgtgaaaaatatgttttctgtatcgacacattttattaaacttggcttgattgcttctttatagtagtccctgtaagtggacataaatgtggctatttgatgttaatgcaactatgtcaaggctgcaatcactttaatagtttctttttagcaaataaatgttcattgatgaagtgcctgggtattttcccgtcccatttgcagagctctactacttcatttccacagtaagcatatatataatgatcacttctgagtttatcaccagtaacattgatacctattttggggtataaacatggtgtttttcagaaataaaaattatttcattaacctttactattactgtgataatacccaggcactcaatattcatcctgaaattttttataatatatgtaatttgtctagtcttaaagacatttggagcatggccaacaggaaggtcagcttcttactgatgtgtgtggattcttacagaatgttagtacaaatttttataaatatttggtgatccctggggggaaatatcattcttactatggttagaaagtgaattagaaatttcagctcagtttctattttactattcaagttgtgtactttaaacaaatataaaaatcaaaaggctgcctctattacaatcctcagtggaatagatggctatctttcttggctaacattaaatattcttgtaccagagcatggaaaatcgtttataattgttaatagaatggcgatttttttttaagaacttcagatttgctatgctgctgtaagtagaaagcatgaagctttttgatcatgtagggcttattgtagagggtatcaattggcctaactaagcaggattgaatttaccagaggctaagttcagatagtaagaataatgcatatgtgattgttcttaaagtcaatgtattaaataaggtatttttccttttccctcttactggatttttcaattttcaaaccatatggcctaggtaactttaattgaaataatatagatttagttgaatactattcaggaagtaataaattttaatatatcacattgaaattatgcagtggtgatgaattttggtgtttcccccctctttctggttttacatcatgaggatcagttagctgctgacaagaaaagtcatcttgtgtcttttgtaaattgaattttttttttaaatctattaggaactggaaaacagcaagtatggttgattctcattattcaaggtagttacgttctataaagtcactgcgaacactgaattagcaaatatagaacctaggggaaatacaaggctagatttctgcaagccactggtcacattttcatcaagcagtcaacatgtaaatttctgttgtaaagacaccttatttaatataatcgattcattaacattgaagtcatgaccaacaacactgtaactcatgcctgaatgaagcttatctgacacataagcttcataaggcacacaacagcctttttacccttaggaacagctttttgcccttagcactatgcttgggggccattttaaacagtgaaatcaaaaaaagaacagaaatgcaaaaaccatggcattagcgtaaaaaggacacgtttatagtatgaaagctggaacatggccttgttcaacctcagctcagaatatgtgtacagcaagttttttgctgtaccacaaaattttaggttaggcaaattcacaaatacggaatccatgaataacgaggatcaactgtacttaactatattttaaagctgtgacatttatctacctggtttatggaatagaatttattgctgaatcatgctccagtatttgagtgatgttttaaatatcctatgtctgaaaataattcctcctaattgtgtggtaatttgcttttactgtttccacagtatttcaggtctttgctcattcactcagtaatactgagcacttaccatgtaccagaattttactaggcacaaccatgaataaaaatacaattctcttgcaccattaaatagtgtgttaagtgctacggcagcaaattgctacatgtgctggatatctcttgttttcccctccagctccactctgctcttgcccacaaagctgacccgaatggaccacagcagtgggctcctatgcctcctggcttctgagtgggtttggccaaggagtgtcctggccagagatcagaggatggtagggtgcctattctcggctcttctcctggggttggggggctgccttagcagccaaaggtcacttctcccaaactccttccctgctttccaggttgccagtccctgcactcttcctttctggccaaggatgatgtcagttctgctgctactagcctggagttgcagaagctactgtgcttcctctttgggtagcctatacctatacttatctcctcataatatcttcatgtaaagaaccatctgtttcttattggaatcaagaccaataccaaggagaaattcctagggaacaaaaattccaatgaggaattgacctctttgtcagatccttatcaccaaacattagaaaagatctcataactttatacagcatgttgtaagcattttgataactaaaatcctgttctagtgaatgtcatgcagataactacacaaggagattaatttaaatttgccttctttggcaagcccttaaaccaatggctaaagcagttagttgtgagtttctgagtaggtcccaatgcgtttatttcatttgtccaacctagcacagagatcctttgatactttaattgcatggcttttccaatcagacgaaatttcagtctgagagaggacatattttctgaggtttatagttttaggattgtccaaaaggcctatgatctcttcttagcatgacagaaagagggaaagataagttaaatttcaagggggtcatatcatcacactttggtcttatttcattttcaatgatttcctagatcactttaacttttttgtgtcatggactcctcagaataatgggttttttttgtttgtttgtttgtttgagatggagtctcactctgtcacccaggctggagtgcagtggcgaaatctcagctcactgcaacctccgcctcctgaggttcaagtgatcctcctgcctcagcctcccaagtagctgggattacaggcacatgccaccacacccagctaatttttgtattttttagtagagacagggtttcaccgtgttggcgagactgatcttgaactcctgacatcaggtgatccacctgcctcggcctcccaaagtgctgggattacaggcatgagccaccatgcctggccagaataatgtttttaaatgcagaaaaggaaatgcatggggttacaagggaaacgaattacactgaagtgtaagctaccaaataatttatgatgtggtagttataggtgtgcatttaatagccagatctacgagtggatgtaataactgctatgatgttgaagtagcataaaacatatattagatatctgcaacaactgtgatgtaacatgaaaatacctgatttctgttgacaaagttactgctagtacaactgtggattgttgtctgcactcgtcattgaaggaaatactaaattttagttttaggctagtgaaattaaagttaatttttcccatccaagttcatgtatcttctgaattctatccgtgaatcccttagaggtctgtgaattgtaggttaagaacccctgccctagctaatcagatccaccaatgtttcaaataggactataacttattcaaaggccaatgatacttcgcataattcaattttaatattattcacatttcatgtcacaaatttagtaagttacatgtgttatgtgatgttttgttttgatagattatatcttactcctaaataaaaagtcaagatttttgtagc

SEQ ID NO: 11717 - DNA, 404 bp, Homo sapiens
tattattaattaaaagttacagctgtcataagatcataattttatgaacagaaagaactcaggacatattaaaaaataaactgaactaaaacaacttttgccccctgactgatagcatttcagaatgtgtcttttgaagggctatgataccagttattaaatagtgttttattttaaaaacaaaataattccaagaagtttttatagttattcagggacactatattacaaatattactttgttattaacacaaaaagtgataagagttaacatttggctatactgatgtttgtgttactcaaaaaaactactggatgcaaactgttatgtaaatctgagatttcactgacaactttaagatatcaacctaaacatttttattaaatgttcaaatgaaagcaag

SEQ ID NO: 11718 - DNA, 2855 bp, Homo sapiens
tcctcatttttcaaccatgtattctactcatgttgccatttaatgcatggataaacttgctgcaagcctggatacaattaaccattttatatttgccacctacaaaaaaacacccaatatcttctcttgtagactatatgaatcaattattacatctgttttactatgaaaaaaaaattaatactactagcttccagacaatcatgtcaaaatttagttgaactggtttttcagtttttaaaaggcctacagatgagtaatgaagttatcttttttgtttaaaaaaaaaaaaaacactgcattaaaaaagtatctgttgcattaaggcacatagtgggattacatcataaacctcccataatttttgtcattctgtgttaaatcatttcagggtttaattttgaaataaaagattaatataaaatgcaacaactttttatattacctattagttttggagttctttatgtttaaaaattcaggtgtaaattttattgccttggataaataaattattgatcttttttaaggcagcagttattaaattggtaatagaagatgctgcttgcttagaattgggaaattcggctgggtgcagtgactcaatgcctgtgatcccagtactttgggaggttgaggcgggcagatcacttgaggtcaggagtttgagattggcctggtcaacatggtgaaatcctgtctctactaaaaatacaaaaattagctgggcatggtggcacatacctgtaatcccagctactcgggaggctgaaacaggagaatcgcttgaacccaggagatggagttggcagtgagccaagattagcctgggcaacagtgagtgagactcggtctcaaacaaaaaccaaattgggaaattcttcttgagttaaaaaagacactttttattatgaatcagattccaaatcattaactatttttgcaaaactggcacaagtggtttttctttttaagtatattaacagggtagctcctgagcctttccctttattggaaactttaactgcagtgttaatatatacactgcaaaagaccaaggatgcagttgaatggaaaattactcagtgtatagaaaggaaaaaaaccagaaatttaaaatagatacagaaaagtacactggtaatatttttatttcctattggagagtgaatccccacagttgctttttgtgacttgattcaaatgaggcactcattattgttaccaaacttgtaaaagcattccatgtattcagtggaggcagaatgtataatattttttccttataatttagcatacaggaaaagtatttattttttaagtagggtatcttaattatgctcatttcttcccctaaaccacattatctatatgattggaccctttagtgaaatcagaaaaataaagtaggcatgaataaatgttcaggacacacacatacactcacacacatcacagtatcagctctttcagtgagtttttattaactagataacacatgtaatacatagtagaatacatttcagaggcagagttcctcggattattttttatggatattagtgttcagcagcttattatttaaaggggtgccaaatatagcatccttctgttgtttattttaaatatatttttaatgaaaagggacttaaaaagtaaacatgattatctaaattacttaaaattttttaatcttagtaaaaattttaggaaagttatctagtttaaatttcaaatgttttaaaatttgtaggcatttaataaattatctttttttggaggggtggatgctgcatttcattggaaatgtcatttttccaaagtttctagctatatactctctttccttcaaataacataagtctgaaagcaatgaaaacgtcaaaggaaaatgtttatatacatccacatgtttatttaatatgtttctcttaacacctgaaacttgttttaaaacaaaaagcagtattcacttcaaatcataaacttagaattctgtatctcatgtcagaaatatgtttatggccttgcttttaagtggtgctgtttcccatagggcattagttctcagattttggaatgtgaaataatcacctaggaagttggtttaaaatgcacactagtgagcccaccttagacttcttttggggccttcgacctcactttgagaaataccttcttcaggttattctttatgtttgtcctgtggttaaatattagagtattcatgataaaacattttgagaaggggtaagcagtgagttattacccacaatttaaagcaaattttgaatgaatctttaagttaggtatctaccttcccaccagccccccaaaaaacctctcagtagtttctttcagtgtacaaaatgatgagcatttttctatgatgaggttttaaccattattcagggtggtcttttgtttttaaatctttttttaactaataagatttacggtgtgtattttatacagaaatgcattataaatgtttttaattgtgttctgttttttgcagtctttaagtgccatgccaattgttcttatattctatagaagttcgctcaaaatactcaacaggggaataggcagcggacagtcagaatggttggaattttggctttctaagaaaaactttattttgcataagcatgtggtcagatcattttgtgcatatgcagcctggattggatgttaagtaaatgcttgttcagtgccggtacatttacttaaatctgtttttatttttgtcatgtagaatactactgtggtcatcataatgtaatctatttctgtaccttttttttttttttttactttgaagtctttaaataaaatgtataatacccattgag

SEQ ID NO: 11719 - DNA, 327 bp, Homo sapiens
aaactgttaaagagattcatctgtgtattactgacaaggttttttttgtttgttgcttgctttggtaattgaattctgaagaatttatctgcatgacgataactaggcattctatccatttgtagatcagagaaagtgaagagattatatattagtacttaaatttttacattttccaaatgaatgaaaatgtatgtttctttgtacttttttaaaaaaatcagcttagtaacaatactatatggtttcaactagtaggtaatctgcttatatttctaatgcaaacttaacaattgtgtactttttaaaagctgcaatatgtgttgg

SEQ ID NO: 11720 - DNA, 1339 bp, Homo sapiens
gagggctgcccggctgcccacagaggtgctgtagatgctgggcccagggccctaggtttgctcgtcacagtgtggggaagcccattcctctgccaggctctaaagccaaaggtctagaaaagcatcctgtctggcattttgtagtcttaacttctccccatttcccccatcttttggttgccttaaaagaaatctctagctcagataatgcccagacatttttttcccttggtgttgcccctattagctcttttcttgggcattcttttgctgtttattaaaaatatattatatatattttgtttctttaaatttcaaatgttttgcaaacatcactgagttaggtgggggtggggaagagaaatacaagatacttttttttttttttttttttttttttttttaaatagggcctcactctgttgctcaggctggagtgcggtggtgtgatctcggctcatgtagcctcaacctccccggctcaagtgatcctcctgcctcagcctcccaagtagctgggactacaggcgttcactactacacccagctaatttttaagttttttatagagatgagggctccctatgttgcccaggttggtctcgaactcctggactcaaagtatcctcccgcctcggcctcccaaagtgttgggattataggagtgagccaccacaccggccaagatgcttttcaaactgatacagatgacaatgggagcctcataaagatggcttttgtttcttcccttcaaggtcatttacttgtacgagacagaaaaagatagcattggggacatgggatgggggagggagggcaatagtggaacgaactttccatgggaaactttcccttttgtaagttgagggccaggggtagggatattttttagtttgtgattttacatttatctgtacatactttttcaagattgatcatttttataaccatggttttcctgaaatcctcaattcatcaatatgaaggaaatgaaccacatagactttatgcaataaataacagtgcaagtgagtataactctaactgatgttccacaaaacatttttgatttcaggtttgtatgatgtagtttttaatcgtacattttcatatgcttcaaactaacacatttttaaagctttcccccacttttctctctatttgtattgttagccatcttgaagtgatgttgtttaacataaattgtactgttgaatttggctttacgggtgtaaacactgatggtatatcagtatctgagaccccaaactctccaaatactgatggtgcattttattcttgaagtgaaatctgtgcaataaaataacagactgtctgc

SEQ ID NO: 11721 - DNA, 3221 bp, Homo sapiens
acccaacaaaactagaggtatgaattaatgctacacattttaatacacacatttattcagatactcccctttttaaagcccttttgttttttgatttatatactctgttttacagatttagctagaaaaaaaatgtcagtgttttggtgcacctttttgaaatgcaaaactaggaaaaggttaaactggatttttttttttaaaaaaaagaaaaaaaaagaagaaaagtataccagataccaaaagctagctttcttatgttttcctttaaattttcagatttaccttcattctgttttcactgatgtcttttgcaagcctttgatttttttttttttgttacagtttagtaatttatattcaccagtcacttcatatgtcttgaacatctgtatctgtaaacatgaatcaccgtgtgtgtacttacagggctaggatttcagtgttgtcagagtattaccacacagcaacagcaacatacagaagatatgttcactcagataagactgccctaaacaaccattttgtcactcagttatttaactgtgtttagctcatttaaatcaaaatgtgtactttaatctaaaatgttttaataatctgtatttcttataattttaacactatgagctgcctgtataagaaatcaagtaaccagaatgcacctataaattatggagcattgtagattttaccacatcaattcatagcagtaactttaagagggcattgtgcaatagttagttgttttcttgttcagctattttaaaggctgctttaacttgtttgtttgtctttgtatataactacttctaatctaatcactagagttattatattctgttatgtttgaccagaattatatgacaagaactggtgacagtttagtgcctctgcccattgtccatgatttacactaattgtgagcagtcttcttatgtgtcagctcattatttttgaaacatttgcctttaggctgttctttgaggtatcaatgaagtgattgaatttcaataccttaattcagtgcacataatactaatgtaacagcagatgaaaattgataaaacccaaaagagagtcatctaaatttgtagttcctatttctgtgggtttgcctggccatggttggagagggaatggtgtttgatggtaaacacagggtgtttggggatcaaggagcctagattctctccctggatctgtcactaacttgctgcgtgacctgaacacgtcactttacctctctgtgcctcagttttcccatgcatgaaaaataaaataaaataaaacggggattctaatgtttgtaagtgctttgagatctttgaccaacaggtgctattggagtgcaaagtgttactcttacgtgtttattttgagtcatgagataatcaattttaacccaaagtcattggattatttatatgaagtccataatgttcgagtacctcagggacatttaagagttggaggtgcaaatatattccaaaagggtgcaacagacacagtgtatccccctgcttctgtttttgtatatttttgctacttggtttttcttgatcatagctattttgtgcttgatctttattgtctaagatgcagtatcctgtactagcttataatattcccataccaaagtcatggggaaacaaacattattttgtttttggtttatttatactatattctgcatacagtactttaaatgccaattacagtgcaatctttatttattgtaaaattttttaagtgtacttatgtactaattttcccttgtagcatgttatatttttgtgttttatacttttgtaattttaggtcagtcttgttccttggcaacatctgtagtattattaatcttctgacattttcttatgtttttaaaaagataagagcatctagtgcattaaatgccaaaaaaaaaatacattatcagtgattgaaacgtttacatgtacccaaaaaccataatcatctcttggaagaaaatgctgagatcaatgaattattctgtgtgcctatattgacgtagtgagtactagagagttctgtattttattattgactataataattagtttaattagctttgcaaactgatggcatcaaggtaaatatatttttgccaaagttctggccttccaaaactcacccccttatttaaatgtgtgctatgacccactatgaccacagcatctgcattttctaaaaaattccatgcaggtgttttggggagaggtattttttaagcaatgaaaattcaactgagtacaaagccccctcttggggggttggggaagtctcttttttgaaacacttcagaactgctgctataaagaaattctctaattggttgaattttttttttaagtaaatagtactttaggccaaaatttatatgaatatttgatcttcttgagattttcatactatcatttaaccaccaggaagctgaagtgtgtgaagtacaaagctgacagcactttattttattgctctccattatttggtattcattatattccttcagtcagaaaattattactctctatggcactgttttttatcacaaatatgtatatgtgatattgatatataactatatatattgccatcacacacgaacaataaaataaagtgttctattaacctgatctctttgcccttttgctatgtgaggagtgaatgagtggccttctgatgctctgactcttctctgtatgtcaaactcatccctggcacaagaaattccagtcatgtgaagcaaactgccctttgtcctcaaagaaattgttgaaaaagaaaactttttaaagagattttttgcatattctctgccttgttcttatcaacttgaaatgttggcattttctaaccttgttttgttggctacaataattcagtattcatgtcaaaattgagaagtgccctaattgaatgtgtttgaatgttatccttgcacaattctttaaattgaaagataaaatgttttacctcactgttggacatacattccaagcttttcaactctaggagaaaaagaaaatcatgttttcctgtattgtaaattttagactatttcatatacattgtattaaaactgccatatcaattttaatgtatagattttgcaaatattatgctatatgtaatacctaactgtatctgtagtgtatatgtaatatatttatgcccaataaatgttttaattctttctg

SEQ ID NO: 11722 - DNA, 1236 bp, Homo sapiens
agcgttaccaaaatcttaaattatagaaatgtatagacacctcatactcaaataagaaactgacttaaatggtacttgtaattagcacttggtgaaagctggaaggaagataaataacactaaactatgctatttgatttttcttcttgaaagagtaaggtttacctgttacattttcaagttaattcatgtaaaaaatgatagtgattttgatgtaatttatctcttgtttgaatctgtcattcaaaggccaataatttaagttgctatcagctgatattagtagctttgcaaccctgatagagtaaataaattttatgggcgggtgccaaatactgctgtgaatctatttgtatagtatccatgaatgaatttatggaaatagatatttgtgcagctcaatttatgcagagattaaatgacatcataatactggatgaaaacttgcatagaattctgattaaatagtgggtctgtttcacatgtgcagtttgaagtatttaaataaccactcctttcacagtttattttcttctcaagcgttttcaagatctagcatgtggattttaaaagatttgccctcattaacaagaataacatttaaaggagattgtttcaaaatatttttgcaaattgagataaggacagaaagattgagaaacattgtatattttgcaaaaacaagatgtttgtagctgtttcagagagagtacggtatatttatggtaattttatccactagcaaatcttgatttagtttgatagtgtgtggaattttattttgaaggataagaccatgggaaaattgtggtaaagactgtttgtacccttcatgaaataattctgaagttgccatcagttttactaatcttctgtgaaatgcatagatatgcgcatgttcaactttttattgtggtcttataattaaatgtaaaattgaaaattcatttgctgtttcaaagtgtgatatctttcacaatagcctttttatagtcagtaattcagaataatcaagttcatatggataaatgcatttttatttcctatttctttagggagtgctacaaatgtttgtcacttaaatttcaagtttctgttttaatagttaactgactatagattgttttctatgccatgtatgtgccacttctgagagtagtaaatgactctttgctacattttaaaagcaattgtattagtaagaactttgtaaataaatacctaaaacccaagtgt

SEQ ID NO: 11723 - DNA, 2023 bp, Homo sapiens
ccagataagagaaacaaactattttttttgatggattgcagtaaacgatcactgaagattccttggctttcaacctacaagacttactatttaaataaggaggaatattatgtgaatatacatatcaagaactttgggggttttgaaaaaaatgaattgtatatatacaaatcaactttaaaaacaaatttcaattgcttgaagcaattgttctgaatgatactttttcattcacattcaagaattaattttttgaagatttaagttacataatggaattaggcatgtggaacaccaaacaggaaagaactatgtctgaaatataaaaaataaaaataaaaaaacaactatgaatatgcacaagggacacaccagtggaatgtcagataattttcaccagtttttatttggagccgttttattgtgtagaccatatttacatatttggataagtacacaaagcgtcaatgctgttaatggccttagcaaaggctcatgctgaaatttgccagtaaaacaaagaagtttaaagactggcaggtacaccattatcacataagtgctgtcagtataaagttgtggggataaaggaaactggatatttttagcacgatgtgcatgataatttatatgcttggtggctgtgctgctgattaagccgtaattaaaattcttctcatcccattggagtttttaatagaagcttcctccatcaattggcagaacctaaagaagattttaaggggcaaaagtaattacaataaaataattcacagtagtttcaatatagaaggaattagctattaaaggtatttgaagaaactataggtatagtggtgaatactcgctgatatgaatcccagaaaaaaatttcctgtttttaatgttcttttcaatcccatctagataatttatagaaatataaccctaattggacatgtggtacaggatctataagttgctgtgtttttttgttactctgtattttgttccttttggtaaggtgaagtgtgtccaaagagttacttgcaacagtctttcatgatatgaggatgcccccgtattaccactctgattatagttctgagttctttgatttactcatgctgcatgacaaaatgtttactaataacaattcattataaagttatatccctctttacatcacttatctttctcactgaggttcattcactggaatttactcacgcaatctcagtagagtacaacgtagatacagaacctaggagagtcaacatctggaggattttagtctttcttacacatatgtgtgattttaaacgaatattctcagaccacaggaaactcttcatccccctgttgtttaccagtaacagtatatcacagacctttccaaatgtttgtatatgtaatcagatgtacatttatattgaaaaacaaatgagatggacttaaagagcacatcctgataaatactttctctctcacctgtactatatttctattagactaaagttatgtgattttttttttacattttttcagatgactagcaattttgatagtttataagataatgcaaagaactttctctgacaaactaactgcagtaacagaaacctttcttttcagttactctttttcaagaatgaaagattattatacaaaaaattgtatactacttgatggaaccaactttgtacatcttggccatgtcactggtcattgtgtgaaataaagataatctggataatgactattagtccaatgctaagaaacatgatctttgctcattaaagagctaaaatgtttattgctgttttgtctttcttttttctaaaaaaagaaaaaaaagaaaaaaaggaaaagaagaacaaagaaacatgactgtctcaaagagtaatttttctagattagaccagtcaggtttttgaagacatataggtaacttccacagaaaacacaaacatgtatttaaaggcaagtctcatctaagatgaaactcataaaaattatttaatgtttgttatgaatttaaaag

SEQ ID NO: 11724 - DNA, 2437 bp, Homo sapiens
gaaaactctgagcatttttaaaagtttgtttacaattccacaagcaaaagctctaatttaaccagattttctgacattgaaggcttattttccccaatggctttttgacaagtataaagctattattacattgtattttttaaatgtaaatatagaaagaacattttgcacatttaatatttttcttatatctacatttctgaatatgtaaagcaagttattgaaataggacttaagaattacctattaaaaagaaatctgatatataaaaatatgtactattttaaggaaaaatttccaagaagttctggactatctttgttcctatggggagggcatataggaacacagtttattctctctgatagagctattaatgacttagtttctgtaaaagaaatggagagttgatatggttcagattaacttcactattaagtgttcaatatgaagaattcaagtattctgactgagtgattggttgacctaaaccactttgaatgtttctattttatgaaatgaagtttctcttcttaacacaactagatgtagtaatacactggttatgaaattgtatttttttaagtattaatgaaaaaagagccataagcattccaggagaaaatctcaagggagctacatagagcaatttaaatgcaaatttttttcctaacaacttacaaggtgactagctttgaaacccctaatttgcctcagttgattttctaagaatttcaggagtgatgtatgtcttaagagggagaaaaaaatatttcttattactttttctcttgtttctgttggaaacactgaagcagggactctaaaatgaaagcatctcacattggttttctttcttgtatcttttctgaaactccttgctgtaaggcagctttctcagagtactatatattttcaacagtaaagtagcagagtttctctttgaaacccaaaatgtcttctaaagaatcaaatttctatttctgcctctgacaaaaagaacttactatgaaagaaatagttgttttatcaataaaagccccttaatattatgaagaaacttttcatattttttcttctttatccttaattgtgactaagatggaaatctagaaaatattcatgcttctaagtttctgcagtgttactgtaagagagtgtctcgtctacacttcagttcttctctcatgtggaaaactaagctttttatattgacattgccattgaatagctctagcaactattattattcccccaaaccctaaaattctacctattaggtgtcaggttaaagttctaatttatctttagaaatttatgtgaaaaatggttttcctatactggataaagcaattccccttaggaaacatagcctcagagtatttcatataaattttctctatctaattcaaacatatctccccatgatacaccgccagagtgacattgcagacagtctgtgtatgtttaaattttcactttttatggatgagcataaacctagtcttagtttaaaggcaaactaaagttgaggggaaataattaatcaatactgattaattgatttataaggttcaacactgtctaccctaaataatttttatatgctcaaggcaaagcagggaatagaggcaattagctagataattcaagcagaaatccattttcatcgaaattgcctgtgtgcacatatttttagatgaaaaatgaaactaccttacaatattatttttttaaccaatgtatttgtttgcaaacatttgccatgttgaagagtgtgtataggaaaggtctagaaataaataggcttgtgcatacctaggcattcatgctctttcttcctcttcagagatcatcagaaaagaggtgggaatacacaagcaggtgcatgtaagcccaaaagctagaaagccttatatttaaccaaaggttgatgtgttcattccagttattcacttacagatgaaactaaaacaaataaaggcaagctattatcagtttggtagttcattattttagaacaaatttctaaattaatttattcccataacctacaatagcactgagaacagaaaacatgtttcttcttcattttgtttaaagattgcgtacctaggtaagtcacactgtatagataaaaaccttcttctgtattcctcacctctaaattatatgttatttgctatttgaaaactgtagttaactatggttttttattagtctattaaaagatacgtggagatattaaattatacctaaagcagacgtccaacaaattctgtacatgctgctttacatctttgcaacaaacctcttaactagcagcattatttctatagtgtgattacctgagggtgcctccaaatgtatatcatttcactcccctcccctccccacccccaatagattcaaataaataaaatcctgagcaaattaa

SEQ ID NO: 11725 - DNA, 1491 bp, Homo sapiens
atgcaaaaatggataaaataatttttgttaaagctcaaatactgttttctttcattcttcaccaaagaaccttaagtttgtaacgtgcagtctgttatgagttccctaatatattcttatatgtagagcaataatgcaaaagctgttctatatgcaaacatgatgtctttattattcaggagaataaataactgttttgtgttggttggtggttttcataatcttatttctgtactggaactagtactttcttctctcattccgccaaaacagggctcagttattcatttgccaagcttcgtggaggaatgtaggtgacatcaatgtgataaagtctgtgttctgagttgtcagatctcttgaagacaatatttttcatcacttattgtttactaaagctacagccaaaaatatttttttttcttattctaaactgagccctatagcaagtgaagggaccagatttcctaattaaaggaagttaggtacttttcttgtattttttaccatatcactgtaaagaagaggggaaacccagccagctactttttttcatcactttttattcataacttcagatttgtaaaactaatttccaaaatataagctgttttcattagccagttctataatatcttcctgtgatttatgtagaaaatgaacacaccccttttccatttaagaccctgctactgtgtgaagagatgatacttacaaggagtgtcattacctgtgagctgactgaatgttggtaggtgctccattacaatccaggaaagtctgtgttactgatatttgtgtggaaatctttatttcacttcaatttaaccattagatggtaaaattaagatgctacttgttggtaaaaattggtggactggtttcaatgggtaaatgtgttgtggcaaattaatgtgttggaatattgctctttgtgaatttgtgcttaagtcaatgaatgtgtagtatctccttctgacaagcattccctattgggattttaaagctatgtgcacagaatattagtctcttctacatgttttatttttctatttataattcccttttttgttgttatattttatacacagaatagatcttttttctaacacatatttgaactgaataacagacttaaagaaagcctttgttcacattgctatttacttttgtgtttgggggaaaatacgagggattgattttaaataaaaaacattccatctttcatttaatatcaatatcaaaagaagaagacaaacatctatctttctcatctatatttaagtacctttttgtaatgtagtatcaaagttttttaggtaatgcaaaattttacaaatcatttgtggaatgaatggtaaaactaatctgatgaaatggaaaattattctgcaatattgtaattcatagtttgacttttcataagcaaataaatccctaggatgtaatcaggacttcaaatgtgtaattaaatttttttaaaaaaaatct

SEQ ID NO: 11726 - DNA, 343 bp, Homo sapiens
aaagataactgagaaaatgaaagctcactctggattccacactgcactgttaataactctcagcaggcaaagaccgattgcataggaattgcacaatccatgaacagcattagaatttacagcaagaacagaaataaaatactatataatttaaataatgtaaacgcaaacagggtttgatagcacttaaactagttcatttcaaaattaagctttagaataatgcgcaatttcatgttatgccttaagtccaaaaaggtaaactttgaagattgtttgtatctttttttaaaaaacaaaacaaaacaaaaatccccaaaatatatagaaatgatggagaagg

SEQ ID NO: 11727 - DNA, 1110 bp, Homo sapiens
ttattctctttaacttacagaatgttagtttaaaataataaattcatcctttttttggagatgattaaatggatgattgtaaacacaacttatgaaatctgcctttaacaagtaacttttttaaattataaaattttattggcattgctccattttctgtatataaatatatctttaatgtggtattttcaattgcgtgatagtttgtagtttcaaccactcttggtgactgtcatcctgtttcttccatattctctgatttcatgaattgaaaagaaacaaatgtattgaagaagtgagctacagttttccttccttaaccatgggtgctagtaactttttaaaactcaagacaagattagttttttatgtgtgaagtcattaaattattacacgaccagaactaaaatgcaatatacagttaagtccacggatactcccattaatgagaaataacactaggaagccactattacaggaagaaaagatttggttttcatggcagtctgtttttttaaaaaaaaatttttgagccactatctattgttgaatattttaagatgggatgagggaggaactaataagggcttacacaataaaaaataactatatcataactcattcataacttgatgtttcattttctgttgaggaaccataaattcattcacagacttaatatttttttcttagagatggtctcgttctgttgtccaggatggagtgcagtggttgatcatagctcccgggctgtagtctcccaggctcgagcaatcctcccacttcaccctcctgcatagctaggactacaggcatgtggcaccatgcccgctaagtttttaaatttcttgtagagatgagatctcgctatgttgcccaggccagtctcaaactcctggactcaagcaatcctcccaccttggccttccaaatcactgggattataggcatgagccattatgcctgactcttgcccaaatttctgatgtcaaattgttcattgacagaaaacccactgaagtatttaaagttaggaagatctgggagataggggttgctggcatgaaaatgtataacttacaacatttattaataaaatgataaattagc

SEQ ID NO: 11728 - DNA, 1159 bp, Homo sapiens
caatagagattgctttggtgaccatgataggaggaaacgaaacttgtaagattggaacagttgttatttttatgaaattactttaaatatgaattgtactaactgtacctaaatagcaaagccctgtgtagattctggtaatgatctgtctcagggtatgtgtatttttgaagagtgttatgtccttagttttaattttgagtaaagaaaaggctaaaatcatgaattagttacaagcaacagtaccaacttatgtgacccctgaggggtggggctgtgagctcttaatttgtttttgattctgaaaaactctgcttcctggcatccaggagttagagattgagcctttcatcttctttctcaaaactagtttttgatgctttctttcatgggaatagtcacttttttatttagtaaatcgcattgctggaaccaccaaggagtgtggaatgtccttgagtgtattatttatgcaagtcacagtcacgttgccatcatggcagctatgtgaaacactaataaatgtgtttttactttttattcccgttaaaactgatgtaaaacaggataaaggcttgttatagtcacttataagtatctgggtctaagtaatttccttagatgtttctaaagaaacattttcagctttgctcccattatgattccaataaggaacgctttcctagtgcaattttaggagtaaagtttgaagagataaaaatagccaaagataggagacgtctgaattttgaatgataaacagtgatgttttaaaaaagctgttgttcttcaggaggcatttgcctaggatattgctggattataccccattggaggcttttaattttatttgtatgaattttccaggatttcattaaaaattattattgtattttttaccttaatgaaagattttgggttcaaatatctttctatattaaaagctgattgagtctgtacatatgtaaattatgcctagtggaggttctgttgactttcttccccactgtggaagaggccagttttgcctccatttgcacattcatttcagttatttctgatccataaatataacatttacaaaattcttccttgagctggtggaaatgcctcaccagtttcctctttaatgaatcaaataaaatctttaactgatgtt

SEQ ID NO: 11729 - DNA, 390 bp, Homo sapiens
gaaagagttcccaagcttctaccttccttttgtcaccttacgtttcatagctttagtatactcaggaaaagaatgaccatcttttgtagaatgtttatacatttttgcatatttcaatttccacttaaattttttaaagctttaactggctctataaattaagtttgtgctttccttgaaatgcacttattcttattacaagcattttataattttgtataaatgtctattttctctaaatattttgctttcagtaaaatgctttccaactctgtttagtgtattaattaccagtggattggtagaactgctttttattgactagtaaaagttactgcctatgctttttaccttaggcttacagaattaaataaaaattagccattccag

SEQ ID NO: 11730 - DNA, 459 bp, Homo sapiens
gcatttttttctccaaatacaaagtatattctctttattggaaaataaattaataaatatattctgtatttttgctctccgtgaaaaacaaaagagcctctgacattactgtctctcagtgttggttcagattgaggcttttgtttgaggagtttggcttccagtccccaaagaaggtttaaaatgtactaataaaaactggagaaataggaatttgtgaactcctaaaattgtagcaactttgaaaggttagtgttttatttacctgacaaatggaagttatagaagtctaataatgttaagcaccagtaattatagtattttgtacaaatgcctgtactgtagatgtctgtattattgaggggcaactcaggattttaagttccataaagtattgaaccaactctaaaatgttaactccttaataaacagattctcagtaaacaaattttaaagttt

SEQ ID NO: 11731 - DNA, 52 bp, Homo sapiens
acctcaaatataaaaattggcgaaaagaagccatacgcctttttaatttgcc

SEQ ID NO: 11732 - DNA, 571 bp, Homo sapiens
tacaccaaggatatcggcaccattacacaaaatgccattaagtgaagtttttggttgtattagtcataacagttgagtgcagaaatctctgcttctaaaattatttgtagagattacaggaaacaaatgcttttaagtaagtttttctcaaattttgtttcagttctaggtcccttgtcacagcttggtttttagactttttatgtatatgtttatgtacagtatattactcttgacagtttgaatttcttcacctaaagataattctctgaaagtactgtttcttcattctattgcggtatatgagaattcctgggtgcatcttattctgctgtttgagagaaaaatttgtgcattgaacacttggatcatttttataaaaattaatttcattttcttttctgttaaattaaaaatcgtcagcttttgaaagattatatgttcgaatgtttcttgaacacttttatatttatcagtttaaatattacattttttgcccaattttttttaaaatttttaaatggtagattatatgtcttaattttcctctaaagcccaatttgattaaaag

SEQ ID NO: 11733 - DNA, 1022 bp, Homo sapiens
agagcatggtccttcagaaaaggcaataaacggcccaactagtgcttctggcgatgacatttctaagctacagcgtactccaggagaagaaaagattaataccttaaaagaagaaaacactcaagaagcagcagtcctgaatggtgtttcataaactgaagaagttcctagtttacagttcttttacattacatttacaatagtgcttgtacaagcttgccaaagatagaatatggatcgccagtctttacatcgcactttcagttcctccatttggaattcaaaaaggggagggatcctgaagaaatcatatgttaaacatactttgacacctactgtgttataaaatatatcatcagatgtgccttgagaatagtatatgtaacattaaaaaaaagttgctggctataggaaatgttattttgttttcaaaatatggcagagatggggggtggtgggtggggtgggatccctaacgtaatattctttatgaaagcattagctgcttttgttacatttttaatatgcaaccacttcttcacctgaggaaaactagaatgaaatgcagtctaaaatattttgcactgaattgtaatttcttcattagtttagtctggaaactggtctgttttaatgtgttttttaaatgctgtatgtagaggaaaatctgcagaccactggaatacatttgttaaactctcatctgcagggacactgggcgatacttggcagtgactgttctaccttgaggctttgtttggtttatttattaaagtgtacagtatttaaaaatcaaacatagctttagttaaaacactaagctgaattagtcatgtccattcagacataacctgaactactgaaaagatcaatttccagaaggtttattctgtataaactacatgttagtcttcagtagagtatcttttttttttccttttttttttttttatttcggttgtttgatgtgcaatatgtttttgtatgcaggtagtaaataaactttgatcttccatttgctg

SEQ ID NO: 11734 - DNA, 1119 bp, Homo sapiens
gggccggacagcgaactggaggggggagaaattttcaaagaaaaacgagggaaatgggaggggtgcaaaagaggagagtaagaaacagcatggagaaaacccggtacgctcaaaaagaaaaaggaaaaaaaaaaatcccatcacccacagcaaatgacagctgcaaaagagaacaccaatcccatccacactcacgcaaaaaccgcgatgccgacaagaaaacttttatgagagagatcctggacttctttttgggggactatttttgtacagagaaaacctggggagggtggggagggcgggggaatggaccttgtatagatctggaggaaagaaagctacgaaaaactttttaaaagttctagtggtacggtaggagctttgcaggaagtttgcaaaagtctttaccaataatatttagagctagtctccaagcgacgaaaaaaatgttttaatatttgcaagcaacttttgtacagtatttatcgagataaacatggcaatcaaaatgtccattgtttataagctgagaatttgccaatatttttcaaggagaggcttcttgctgaattttgattctgcagctgaaatttaggacagttgcaaacgtgaaaagaagaaaattattcaaatttggacattttaattgtttaaaaattgtacaaaaggaaaaaattagaataagtactggcgaaccatctctgtggtcttgtttaaaaagggcaaaagttttagactgtactaaattttataacttactgttaaaagcaaaaatggccatgcaggttgacaccgttggtaatttataatagcttttgttcgatcccaactttccattttgttcagataaaaaaaaccatgaaattactgtgtttgaaatattttcttatggtttgtaatatttctgtaaatttattgtgatattttaaggttttcccccctttattttccgtagttgtattttaaaagattcggctctgtattatttgaatcagtctgccgagaatccatgtatatatttgaactaatatcatccttataacaggtacattttcaacttaagtttttactccattatgcacagtttgagataaataaatttttgaaatatggacactg

SEQ ID NO: 11735 - DNA, 3527 bp, Homo sapiens
aggggcagtagtactttgtgggagccagttcacctcctttcctaaaattcagtgtgatcaccctgttaatggccacactagctctgaaattaatttccaaaatctttgtagtagttcatacccactcagagttataatggcaaacaaacagaaagcattagtacaagcccctcccaacacccttaatttgaatctgaacatgttaaaatttgagaataaagagacatttttcatctctttgtctggtttgtcccttgtgcttatgggactcctaatggcatttcagtctgttgctgaggccattatattttaatataaatgtagaaaaaagagagaaatcttagtaaagagtattttttagtattagcttgattattgactcttctatttaaatctgcttctgtaaattatgctgaaagtttgccttgagaactctatttttttattagagttatatttaaagcttttcatgggaaaagttaatgtgaatactgaggaattttggtccctcagtgacctgtgttgttaattcattaatgcattctgagttcacagagcaaattaggagaatcatttccaaccattatttactgcagtatggggagtaaatttataccaattcctctaactgtactgtaacacagcctgtaaagttagccatataaatgcaagggtatatcatatatacaaatcaggaatcaggtccgttcaccgaacttcaaattgatgtttactaatatttttgtgacagagtataaagaccctatagtgggtaaattagatactattagcatattattaatttaatgtctttatcattggatcttttgcatgctttaatctggttaacatatttaaatttgctttttttctctttacctgaaggctctgtgtatagtatttcatgacatcgttgtacagtttaactatatcaataaaaagtttggacagtatttaaatattgcaaatatgtttaattatacaaatcagaatagtatgggtaattaaatgaatacaaaaagaagagcctctttctgcagccgacttagacatgctcttccctttctataagctagattttagaataaagggtttcagttaataatcttattttcaggttatgtcatctaacttatagcaaactaccacaatacagtgagttctgccagtgtcccagtacaaggcatatttcaggtgtggctgtggaatgtaaaaatgctcaacttgtatcaggtaatgttagcaataaattaaatgctaagaatgattaatcgggtacatgttactgtaattaactcattgcacttcaaaacctaacttccatcctgaatttatcaagtagttcagtattgtcatttgtttttgttttattgaaaagtaatgttgtcttaagatttagaagtgattattagcttgagaactattacccagctctaagcaaataatgattgtatacatattaagataatggttaaatgcggttttaccaagttttcccttgaaaatgtaattcctttatggagatttattgtgcagccctaagcttccttcccatttcatgaatataaggcttctagaattggactggcaggggaaagaatggtagagacagaaattaagactttatccttgtttgcttgtaaactattattttcttgctaatgtaacatttgtctgttccagtgatgtaaggatattaagttattaagctaaatattaattttcaaaaatagtccttctttaacttagatatttcatagctggatttaggaagatctgttattctggaagtactaaaaagaataatacaacgtacaatgtctgcattcactaattcatgttccagaagaggaaataatgaagatatactcagtagagtactaggtgggaggatatggaaatttgctcataaaatctcttataaaacgtgcatataacaaaatgacacccagtaggcctgcattacatttacatgaccgtgtttatttgccatcaaataaactgagtactgacaccagacaaagactccaaagtcataaaatagcctatgaccaactgcagcaagacaggaggtcagctcgcctataatggtgcttaaagtgtgattgatgtaattttctgtactcaccatttgaagttagttaaggagaactttatttttttaaaaaaagtaaatggcaaccactagtgtgctcatcctgaactgttactccaaatccactccgtttttaaagcaaaattatcttgtgattttaagaaaagagttttctatttatttaagaaagtaacaatgcagtctgcaagctttcagtagttttctagtgctatattcatcctgtaaaactcttactacgtaaccagtaatcacaaggaaagtgtcccctttgcatatttctttaaaattctttctttggaaagtatgatgttgataattaacttacccttatctgccaaaaccagagcaaaatgctaaatacgttattgctaatcagtggtctcaaatcgatttgcctccctttgcctcgtctgagggctgtaagcctgaagatagtggcaagcaccaagtcagtttccaaaattgcccctcagctgctttaagtgactcagcaccctgcctcagcttcagcaggcgtaggctcaccctgggcggagcaaagtatgggccagggagaactacagctacgaagacctgctgtcgagttgagaaaaggggagaatttatggtctgaattttctaactgtcctctttcttgggtctaaagctcataatacacaaaggcttccagacctgagccacacccaggccctatcctgaacaggagactaaacagaggcaaatcaaccctaggaaatacttgcattctgccctacggttagtaccaggactgaggtcatttctactggaaaagattgtgagattgaacttatctgatcgcttgagactcctaataggcaggagtcaaggccactagaaaattgacagttaagagccaaaagtttttaaaatatgctactctgaaaaatctcgtgaaggctgtaggaaaagggagaatcttccatgttggtgtttttcctgtaaagatcagtttggggtatgatataagcaggtattaataaaaataacacaccaaagagttacgtaaaacatgttttattaattttggtccccacgtacagacattttatttctattttgaaatgagttatctattttcataaaagtaaaacactattaaagtgctgttttatgtgaaataacttgaatgttgttcctataaaaaatagatcataactcatgatatgtttgtaatcatggtaatttagatttttatgaggaatgagtatctggaaatattgtagcaatacttggtttaaaattttggacctgagacactgtggctgtctaatgtaatcctttaaaaattctctgcattgtcagtaaatgtagtatattattgtacagctactcataattttttaaagtttatgaagttatatttatcaaataaaaactttcctatataatt

SEQ ID NO: 11736 - DNA, 2455 bp, Homo sapiens
tagtacttgaatgttgtatgttttcactgtcactgagtcaaacctggatgaaaaaaacctttaaatgttcgtctataccctaagtaaaatgaggacgaaagacaaatattttgaaagcctagtccatcagaatgtttctttgattctagaagctgtttaatatcacttatctacttcattgcctaagttcatttcaaagaatttgtatttagaaaaggtttatattattagtgaaaacaaaactaaagggaagttcaagttctcatgtaatgccacatatatacttgaggtgtagagatgttattaagaagttttgatgttagaataattgcttttggaaaataccaaatgaacgtacagtacaacatttcaaggaaatgaatatattgttagaccaggtaagcaagtttatttttgttaaagagcacttggtggaggtagtaggggcagggaaaggtcagcataggagagaaagttcatgaatctggtaaaacagtctcttgttcttaagaggagatgtagaaaaatgtgtacaatgttattataaacagacaaatcacgtcttaccacatccatgtagctactggtgttagagtcattaaaatacctttttttgcatcttttttcaaagtttaatgtgaacttttagaaaagtgattaatgttgccctaatactttatatgtttttaatggatttttttttaagtattagaaaatgacacataacacgggcagctggttgctcatagggtccttctctagggagaaaccattgttaattcaaataagctgattttaatgacgttttcaactggtttttaaatattcaatattggtctgtgtttaagtttgttatttgaatgtaatttacatagaggaatataataatggagagacttcaaatggaaagacagaacattacaagcctaatgtctccataattttataaaatgaaatcttagtgtctaaatccttgtactgattactaaaattaacccactcctccccaacaaggtcttataaaccacagcactttgttccaagttcagagttttaaattgagagcattaaacatcaaagttataatatctaaaacaatttatttttcatcaataactgtcagaggtgatctttattttctaaatatttcaaacttgaaaacagagtaaaaaagtgatagaaaagttgccagtttggggttaaagcatttttaaagctgcatgttccttgtaatcaaagagatgtgtctgagatctaatagagtaagttacatttattttacaaagcaggataaaaatgtggctataatacacactacctcccttcactacagaaagaactaggtggtgtctactgctagggagattatatgaaggccaaaataatgacttcagcaagagtgactgaactcactctaaggcctttgactgcagaggcacctgttagggaaaatcagatgtctcatataataaggtgatgtcggaaacacgcaaaacaaaacgaaaaaagatttctcagtatacacaactgaatgatgatacttacaatttttagcaggtagctttttaatgtttacagaaattttaatttttttctattttgaaatttgaggcttgtttacattgcttagataatttagaatttttaactaatgtcaaaactacagtgtcaaacattctaggttgtagttactttcagagtagatacagggttttagatcattacagtttaagttttctgaccaattaaaaaaacatagagaacaaaagcatatttgaccaagcaacaagcttataattaatttttattagttgattgattaatgatgtattgccttttgcccatatataccctgtgtatctatacttggaagtgtttaaggttgccattggttgaaaacataagtgtctctggccatcaaagtgatcttgtttacagcagtgcttttgtgaaacaattatttatttgctgaaagagctcttctgaactgtgtccttttaatttttgcttagaatagaatggaacaagtttaaatttcaaggaaatatgaaggcacttcctttttttctaagaaggaagttgctagatgattccttcatcacacttacttaaagtactgagaagagtatctgtaaataaaagggttccaaccttttaaaaaagaaggaaaaaactttttggtgctccagtgtagggctatctttttaaaaaatgtcaacaaagggaaaataaactatcagcttggatggtcacttgaatagaagatggttatacacagtgttattgttaaaatttttttaccttttggttggtttgcatcttttttccatattgttaattttataccaaaatgttaaatatttgtattacttgaattttgctcttgtatggcaaaataattagtgagtttaaaaaaaatctatagtttccaataaacaactgaaaaattatcatg

SEQ ID NO: 11737 - DNA, 5228 bp, Homo sapiens
agacaggatacctcaccgaagaagccacactgatccaagatgggaggttttaaaaactctacagtgggaacttcacatatctcctttgtgccatatgcaaaaaatagtaaaaataataatttggtgcctttctcctcaaaatatcaatctttcaaactataataaagcctttcctataattgaaaaaaaaaacttttttgttaaaggtaatggtggttgttacttggcctttgaagagtgtacctttgtaagtatttgtaagaagtctatgtgaattaggaaatgtctgtctgcataccttttaggagcgtgtgaatggtgtcttcacttattatgtatgtttatctgtatgtatattccttattttgtcatatatgtagagaaaattgcatgacttgaggcatcatttaggttgaagaagttaatgcttaggatgcattctaggagaaaaaatcagttttaaaaacctttgttgttaacaaagtatatccagattggttaattttattgaagggtttttttctgtaattgataaaaatgtaatgacaacaattcaggcatcataaaatactgaactattgtgactttattcttagaattgctgtcttacattaaacatgtttttagggggaagttaggtaggagatagaaaaataagtgcccctacaagggggattaaaattacaagttaattcctaagagaaaaatggaatggcctttgaaggaaaaatgacccactatggctctcaaagtttttatgcatcatctcttcaatcctctaagaaagcctcttttcttaacttgataaagcagtggaaacccattttgcaatattgttttgtgaaaaacagggacagacagccaggtacagagactcacacctgtactcccaactactcagcaggctggggcaggaggattgcttgagcccaggagtctgaggctacagtgagctatgaacgcacacggcaccctagcctgggcaacaggttgcgacactgtctcaagagaaaagaaaaagaaaaatagggataggttttccttcctagcccagtagagtttgacctcattagtatggtgctttgggtgaggacctcttccttgattatcccactttctagtgaacagctaaaattcctgagagtctctactgttaaggtacctttaataggataaagcagggaccacctatctcagtgggtccatttttcttttaaaattagttatctgaaaaaacttagcagtagttcccatctttaaggtaagtctttcatttggtccccattgtgtaaaatactaatcaacattttcaagcttctgtacaacagactgcttttgtctagatttctcaactccactttataaagcttatcagttttcagagaggaatgtgaattttttttctaatgcaaataaatggatatggcaggaactacagcataagtgattattgtgattctgggtggacggatataatttacaacatttagggatgttctaggtagcctgctgtagtttgacttccagtcactgttgtctttcacattataatttgtatatttcttgtgatagaagggatgatgcaaatatgtaattaaagtgtcaccagatttctgttaaaaccaaggttgaaataaaaagcctaacattggtaagctacattgttttctcattttagaatgattcagagatttcagatagacattttttaaactttaatgcttagctagaatctacattctgaggaaaactctaaaaaacttaaaaatttttagggaatttttatttttcaaatcataattttaaaatgatagataccattttgtgataacaacaattcagaaaacaattttctatcctcttagttgaaagaatgtaggtacagtttggatacttgtactttaattttagagtaaacatctgcattatactcttatagataatagaattatttagttaagaaattctttacagtaaatgagataatgtgtgaaaaagtattttgtaaatgctgaggattctacaaatgatagttgttattttcatgtgtatttgtaagatcatgtccatttcatgaatataggacttcacataaaaaaagactttctcaagacaactttatattctagtatttttctgttgtaaaaagtattaactatttacttttattttgttatacatttattttaatatccatgtgtttattatagtaaatttgaaatgaaatcctgaaaaacagaatttttttaaacacagacctcacaccaatattaattttttctctacataatttaaaactacataaattaagtacttaaaatttatattgaaggccaccaagaacttaggttgaatcttagaaaatttaaataactatttttaaagttacccaacttaatattttaattttttaatatttatcttcctttactaattcttgataaataatagcattagacttgataaaataaaaaagaattttagagtagaattaatatatcaaaaggggtatatcaaccaaattggtgtcagattgtattcattctctcatcacataaagatttttcttttgataggtgatgctcatatgaacctttggtttagaatctatatatgtacatgtgtatgtatgtagatagtatggttgtatacacacatatataccaaacaccatgaattttagcagtctgtgatgatcagcaaaaaagcacataaagtaaaaattagttgaccatgctaaattcaattctggaatttttttttatttgggcatttctagaactttttacatttgaaagtacatgatgagtattagtaacgatgacttatgtataatcagaatctttatgacaatttagttttacaaggtcagaagagatgagtttgctaaacccagctgtgatacctcagttggaaagggaattcaaaggtatgctttgtagaacagaaaagtatagtttttttttcatgaactttaatcattttctgtttttcctctatgtgagtcagctacaaaagtggtctaatttttacaacagtagaacttcctccttttctactgtaatcttcccactgactttactgcacaggtatgaaatactagtgtattggatcttcagtaacctttttatttcctagatgattgaaatataggtatttactccatttaaaccaggtgataagatgatgtaaatactcagggagggtattaacttgttacttttgctcgtttggggtgtaaagtgccatgactgaataatcttcaattcatgattctagagtaagtttaatttggaaaaaggggcttcacacatggtggtggttgaacattgattcttttatacttaaaaagatgaaaatgttttgtggactgatacattttatcttactgaatatgaattgtttatgtatctctactgtcaaatagcctttttgaaactcaggaaagacaaaggttcaattacaccacttttgtcaataagcaaaccaggtattttttttttctcctgttgtctggatatggcaatagattttttaaattgctgtgagaacccatatatgaaaagagaggagttgaattgtgtgtgccttttatgtcttgagatttatatgtggaaaagacgacatctacttcaaactgtatttttttcgtttttttttttttttggggaaggggggagaacggggtcttgctctgtcgcccaggctggagtgcagtggcgcgatctcagctgactgcaacctccacctcccgggttcaagggattctgcctcagcctcccgagtagctgagaccacaggtgcgtgccaccacacccggctaatttttttgtatttttagtagagacggggtttagtagagacggatcactcctgaccacgtgatccgcccacctcggcctcccaaagtgctgggattacaggcgtgagccaccacccccggcctgtattttcagagaggagagcttggtgtttttgtggtgccaagtggtaagataatgtctctttgaggcttcctatggactgcctttattttagtaaactcaagacaccagttaacctcaacagagttttggccttattagaatttgttgtgcatcttattgaaagccaggtttacatcacctcaccccattattctttttagttaaataaatttaccatgccaagtaaccagaatggagcaaattggttgatctttaaggcagtaggtttgactagctagctatcattattgtcacatctaatgctaggcaccagaaaccatttgagccaggagtgtgaatgaataattccagagacactttagacattttttaatgttttatatgaacattttacatttgtgtgattgccttagatattaaattttcctagtgctgataaaaacagcaacattcataacttattttatatattgttccaaagaaaagaatttgttttaatggtttcaaaataactgcacctgaatttgtttatgtgccttaagttctctagtgctatttcaacttttttttcaatctaaatgaagcttaccttagataaggttcatatttgtttcctatagagtaaataaacttccccttcttaaattgtgtaataagcaccaacgtgtggttgcttggcagaatgagaatgttaagggagattgttggatgtttggagtttcattatattttttgtttttattttttgatacctaggtgctttttaaaatattcagacaaatatctatcttacattgattaaacccgtgtaaattcatttgcagtatctacatcgaatgtcaaaaaagtatacttatttttgttccatacttatgtacaattttttccctcttcaggctttttcatttacctttttgaaaaagcacttactctccccttccctatcacccctcccccaaggtttctttatttaaatttttattgagagttgttggagctctaagacaatacaaatttagagttgaacaaaagtataatctgctttacaactagtatagacctaaggtcatttgctttcaattagaggctccagagtcttcatagtggaaagaatgctttgtatttaattgttcttagttaagttgtagcacgtgaatacttacttacatgttttgtttaaatatacttcttgcatagtttaattttttaaaagttgtatctaataaaatgtcttttaaccattattacttgactatatggttgtattaaattttgtttacg

SEQ ID NO: 11738 - DNA, 2037 bp, Homo sapiens
gcggagtgaggtgccctggagaagcaggctttgaaggcacagcgaagctgtaactgaggaccctgctgctcgggaaggaggtggtttccagtgtgactcggcatgtcatggctacccaacctttgccgctgcctgttcccacgtgtcaccagcacgctgcactccagatgaaatcctcctaggacaggagtttgtttcctgagtgtggagtgaggctgtcagtggatccgtgctttgtcggccagcgtttctgcagtctttgtaaaggccccacgagagcgggccaggccgtgtgcctcaggcccttctccctgggtgtgcttaagggggctccttgggcccgcctccccaggaggtagaaaatgagtggcaggctagagatttcacccattttgtgggctggagttaccagtagctccagcagttaccctgaagagagattgggcttcagccttcagcaggtggttctctcccatgcctggccttggtgtggaggggctgtactctgagcccaagtgagtcagctataggaagaggccatacctagagccaagaaccatgaaggcctgagagacggcagactgagcagaattccttttttgagcacgagagcattactagaaccattgtcaaagcagtggcaagggacggagaggtcccaacaggagtcaggaagaggtttgattataaccaagaaaactcactatgctaggaatagactgtgtgcaccagtcccagacacttggcagaagtgtagcagcgttacacatgtgtgcgaagcagatcgcaggttccacgccatctgcatggcctgcaggagcttctgctgctgaccccatgctgagtggccagtggggagcggcgcccggcaggctcttctggggtcgtctgtcctatccgtggattgtatatactcttctctgttaaggagtttttcccaagaagaaaagtatttaaaagaaataccagtgagtgccttaaagttggagaagtaactgcccatgcccagaaataaggatgccagtgcccagaagcagtgagattagtctgtgtccacaagcagaggccccctcgatgggagggagtggcaggcaggagaaggtggcgctgccaggtgcccgggtctattggaggcgccccatctcagacttcctaacacagcctgtgtggaaggcagaacaaagaatgcatgcccagtcagaaatctgttctattctgctccaggaaaatcggaaacctgtgagtcagagtcagagaaacttacccaagcaacgtaattcctgttttcatgggtcctgtagatgtttgagtcaggaaggtaaggcggggagtgactgaataaactctgccttttaaattgagcatctgggccgggcatggtggctcacgcctgtaatcccagcactctgggaggtcgaggtgggtgggtcacctgaggttgggagttcgagaccagcccgaccaacatggtgaaaccccgtctctactaaaaatacagaaaattagctgggcatggtggtgtgtgcctgtaattccagctactcgggaggctgaggcaggaagaatcacttgaacccaggaggcggaggttgcagtgtgccaagatcataccactgcactccagccctggtgacagaggagaccccgtctcaaaaattgattgatcaattcagcatctgagggctgcaagtacagaaggaatctattctcagcagggcatagggcacgcactggcttaacagtttagtatataaggctcaaatagtctatacctgaactgctataagcaaggtcgatagggaagtggatagattgcttcagcaaagtgaactgtgagatctccaggacagagggagaaagatctgatccaaatgagaacagattggttattgcaggtatcacagcctaaagaaattatctttttgcaaaagaaatattaaatgatttagcagtctccacgtgtgttaatgtttcaaacgtgtatcataatgtgtataattgtgtaacaaaattgtctacaataaatcttttggtatt

SEQ ID NO: 11739 - DNA, 393 bp, Homo sapiens
gcaggtgctcacctgcaaacttcagtctggacttctttttgccagagaactccagaaaccagtcaggctctcagtcagccttgtggccctgtcaaccgcctcatttttaacccagtcctctgtgtagtttcagaccagacctgaatagtctcctatgccctccaaaagtcgggtccttgctcctgcatgccatcagccccactcagccctcccatacctccctggctcctcaggattcaggttcctagggtacgtccttgattaaatcaccccaatatgcccctttgcagaaagtattggcttttccctgaattctgttatggtaaaaaaaatcttgggattgagagtcttcttgcagaaacttctcagccaaagtaaaaaggattttctctt

SEQ ID NO: 11740 - DNA, 319 bp, Homo sapiens
gcagacatcccccctctctggcaaacaacagcttggagtttctgctggtcttgggccagccggactcattttcctaatcttagccacttatccccagtgactaccatgtccccttctaaattccaaagactccaacgcagcactagcaagcaggttcgggacagccctggacgatttcccgaccgctgctcaggctgctcattcctgctcaccctcagtctccctgagctaccacctaactcctcactccctgatcaatggaagtccaggtcagtggagtctctccttgattgatcaccccaataaacaactttccagg

SEQ ID NO: 11741 - DNA, 301 bp, Homo sapiens
gcaggtgctcacctgccaacttcagtctggagcttctcttgcctccagggactggccaggtctcccccctttcctgagtaccaactatcatatccccaaagatgactgagtctctgctgtattccatgtatcccaatccggtcctgctgatcaattccaatcccagacatttctccctgttcctgcattttgttggcttccttcagtcctaccatatggttctaggtccctcttacgtcatctgcatagcagactatacctcttctgtccgctgacttgcccaataaataattctgcagag

SEQ ID NO: 11742 - DNA, 367 bp, Homo sapiens
agtcacactgcctgctcctttgggtgtgattgagtgccctcctggctcctgggctgggacaagtgaggaactagctgcagagggatgagtgaccaccatccaggctgagactgaaaggagcagaggctggaactacagtattctttcccctgctagcaaccatgtgcctcccatcctgactgtggagttgggatgtggaagtggggctggaacaaagcttctgcctagggaggagctaagcaggcccggcagttggaggaaggccagaggaacagctttgtgctccggctttccctcagggaacagcagagagcagttggctctttctgctgcttgtatatgttaatattaaaagagagagtggtgt

SEQ ID NO: 11743 - DNA, 2770 bp, Homo sapiens
gcagggcccctcccccagctccattccgctcccaccccagccggctgcgttcctctctccatccgtccgtcttttttactttgtctggtacctgaaagggaaataaaaggaactaaatccaggtgcgctaactgctcgcagggtgctgcgagggtggggtgcacctaccgattggctctgcagccccctaacctgcctctggccccagttcgtttcctctgcccactaatccctgcgcaggacttcccaggaccccttttgtctctgggaccagacttgttggtgctaccccttactcccctctgcaacccccattttgggagttgaccccagcaatgaccttggtggcacgctcactccctcattctctcgtttcccctttagctccctttcaccatttattcagctacatcatccctctattaaccccaccccatcaggcacgtgtgcaaacctcttgactttaccccacattactgaaaccaaaatatatttgcttcatctgcccctactaaccatccccctgcctgctgcctcagtcctgcaacctaaagctgtagtcgcctccaatagccatccatgccatccctgcctgtgcctagatcagaggcccagagggccccctcagttgcctgagcagctggtggcttccagggagcatctctgctctacccctgccccatgcctgccctgcgtgctggttccttcagacccctaaccctactaaccagcaggctcatctcacctccaggcctgaaacatttcttttctttcttttttcctcccccaatttaccctgggcctggagcagccaagaatttcgggctgtttgactttctgtgagcccccagcgaggggaggcccagcctccgaggagaccaggaaccctgcttcagcagcccctcagggcttcccaaggatgtccagcccccacacccacacgttaacataatgagtcactaggcttctggggagggcccaacttcacccatgcatgagagactctcctcctttccagagagaatcggatcgcaccacgtgtggcagcctgcggcggggggaggggggcctctttagctctctttatctttctctctcactcatgtatgcatacatgcacagagatgcatacacaggtgcctatgcaagttcatttaagcctcagggctggtccctgcccaaagggctggaccctcctaatcctctcctaggttgtggggctggtcccctgacacccttctccccttcctggtagaccttaaacctcgcacacatgtccccagcattttctcacctggataaagcccataagctgggtctcaggctgggctcagcaaaggactcgccttgcaaccgacaggccattcccacccccacacacaacctcccctgttttcacattcaccatggcatcccagagcaaggacacaggagcccacaggccagttgaggttgggcaaggagacttccaggacttccagacagagtaccaggttttatttttcaccttattctctactttaaacaaatcataactttctctttaagcctctgctataaattctcctggctctcctgggcttccatattttgggggctggggtgtcaaaagtgagatgaagttcttagctccaggttttggggtaaaccaaggtaggaacattttggcatttatttcaattaacaatacttccttggacgggtgcggtggctcacgtctgtaatcccagcactttgggaggctgagacaggtggatcacttgaggtcgggagttcgagaccagcctggccaacatagcaaaaccctgtctctactaaaaatacaaaaattagatgggtgttttggcacctgcctgtaatctcagctactcaggaggctgaggcacaagaatcgcttgaatccaggaagcaagcggaggttgcagtgagttgagatcgcactccagcctgggtgacagagtgagattctgtctcaaaagcaaactaacaaagaaaaacaatacttcctggggttttggtgtgcagagggctttgttggaagtgtgactcaatcttgcctgccttctgggagctctagaattgttcccaacccagtccatggcttctagccaccactacagggctgtttcatgtacttctctctctgactctgtcttgtccgactctcttgagaatttctcaacgattgctcatgcctgtcagtatcagtgcttccatcgttccatctttgattcacttctctttcctttctatttactcccaaaatggagtcattcatcctgatgtcctcaattgctgctgatatgctggtgattcccaaatacatagctccaacccccaacttcccccagactttagatctgtattggtattacctactggacatctctatggacagttccgtatagactcaactcatctgcccaaccaagtatgttcctcctgaattcctctcctggttacttcatcacaatctacataggctcaccagctagaaacatttatgagcttacattccttcttcccatatcttatcagcatatcatatccatttcactccaacactctgtcttgaatttggccctccctctcccctctctactttaattcattggagcatgggatttggagttaggtggttttgggtttgaattccagctctactatttttggttgtgtgatagagttatttaacctctctgagcctcagttccctcgtatgtaaaatgatgataataatacctacctcacagggttgttgtgaggattt

SEQ ID NO: 11744 - DNA, 474 bp, Homo sapiens
ctgccactaggcagctagcccacctccccagccaccctcctccacaggtccaggtgccgctccctcccccaccacacatcagtgtctcctccctcctgctttgctgccttccctttgcaccagcccgagtctaggtctgggccaagcacattacaagtgggaccggtggagcagcccctgggctccctgggcaggggagttctgaggctcctgctctcccatccacctgtctgtcctggcctaatgccaggctctgagttctgtgaccaaagccaggtgggttccctttccttcccacccctgtggccacagctctggagtgggagggttggttgcccctcacctcagagctcccccaaaggccagtaatggatccccggcctcagtccctactctgctttgggatagtgtgagcttcattttgtacacgtgtgacttcgtccagttacaaacccaataaactctgtagagtgg

SEQ ID NO: 11745 - DNA, 309 bp, Homo sapiens
ggccaccaggctgaggactcgcccaggacatggactggtctctcagacccctgggccaccatgtaggccaccactccaggccgtggacttcccccaacttggggacagccttattcccaaatgtctctatccttttgactggagcatcttctgcacaaccttgggagcccatccaagggttggtgaggactggtctcccgggggtgggggtctggggggtaccctctggggttatagattcccccactgccccagctctgactggaccccaagtggctgctatgtaaattaaatctctccccgcgtctc

SEQ ID NO: 11746 - DNA, 793 bp, Homo sapiens
acctggatcaggggagaaatggccagctgtcaccagacctggggcagctctcctgacaaagctgtttgctcttgggttgggaggaagcaaatgcaagctgggctgggtctagtccctcccccccacaggtgacatgagtacagaccctcctcaatcaccacattgtgcctctgctttgggggtgcccctgcctccagcagagcccccaccattcactgtgacatctttccgtgtcaccctgcctggaagaggtctgggtggggaggccagttcccataggaaggagtctgcctcttctgtccccaggctcactcagcctggcggccatggggcctgccgtgcctgccccactgtgacccacaggcctgggtggtgtacctcctggacttctccccaggctcactcagtgcgcacttaggggtggactcagctctgtctggctcaccctcacgggctacccccacctcaccctgtgctccttgtgccactgctcccagtgctgctgctgaccttcactgacagctcctagtggaagcccaagggcctctgaaagcctcctgctgcccactgtttccctgggctgagaggggaagtgcatatgtgtagcgggtactggttcctgtgtcttagggcacaagccttagcaaatgattgattctccctggacaaagcaggaaagcagatagagcagggaaaaggaagaacagagtttatttttacagaaaagagggtgggagggtgtggtcttggcccttataggaccctgtgccaataaacagacatgcatccgtca

SEQ ID NO: 11747 - DNA, 184 bp, Homo sapiens
ggccagagcatggtcctccacccttcctgccattctgccctgggctcctcaggtagttggaattcctgacttaggacttggggttgggtccaaggtgcttacatcccaggggcctcatgcctaagatagagggtgggagcgaacccacatgaaccaatacagcccagctccaactagatccaga

SEQ ID NO: 11748 - DNA, 162 bp, Homo sapiens
gtgaccaccaggggctctgaactgcagctgatgttatcagcaggccatgcatcctgctgccaagggtggacacggctgcagacttctgggggaattgtcgcctcctgctcttttgttactgagtgagataaggttgttcaataaagacttttatccccaagg

SEQ ID NO: 11749 - DNA, 450 bp, Homo sapiens
gggctggtggggccggggacctggagccccatggacacacagatggcccggctagccgcctggactgcaggggggcggcagcagcggcggtggcagtgggtgcctgtagtgtgatgtgtctgaactaataaagtggctgaagaggcaggatggcttggggctgcctgggcccccctccaggatgccgccaggtgtccctctcctccccctggggcacagagatatattatatataaagtcttgaaatttggtgtgtcttggggtggggaggggcaccaacgcctgcccctggggtccttttttttattttctgaaaatcactctcgggactgccgtcctcgctgctgggggcatatgccccagcccctgtaccacccctgctgttgcctgggcagggggaagggggggcacggtgcctgtaattattaaacatgaattcaattaagctca

SEQ ID NO: 11750 - DNA, 1304 bp, Homo sapiens
cccacatcatgcctggcagtggcatgcatcccccggctgctgccaggggcagagcctctgtgcccaagtgtgggctcaaggctcccagcagagctccacagcctagagggctcctgggagcgctcgcttctccgttgtgtgttttgcatgaaagtgtttggagaggaggcaggggctgggctgggggcgcatgtcctgcccccactcccggggcttgccgggggttgcccggggcctctggggcatggctacagctgtggcagacagtgatgttcatgttcttaaaatgccacacacacatttcctcctcggataatgtgaaccactaagggggttgtgactgggctgtgtgagggtggggtgggagggggcccagcaaccccccaccctccccatgcctctctcttctctgcttttcttctcacttccgagtccatgtgcagtgcttgatagaatcacccccacctggaggggctggctcctgccctcccggagcctatgggttgagccgtccctcaagggcccctgcccagctgggctcgtgctgtgcttcattcacctctccatcgtctctaaatcttcctcttttttcctaaagacagaaggtttttggtctgttttttcagtcggatcttctcttctctgggaggctttggaatgatgaaagcatgtaccctccacccttttcctggccccctaatggggcctgggccctttcccaacccctcctaggatgtgcgggcagtgtgctggcgcctcacagccagccgggctgcccattcacgcagagctctctgagcgggaggtggaagaaaggatggctctggttgccacagagctgggacttcatgttcttctagagagggccacaagagggccacaggggtggccgggagttgtcagctgatgcctgctgagaggcaggaattgtgccagtgagtgacagtcatgagggagtgtctcttcttggggaggaaagaaggtagagcctttctgtctgaatgaaaggccaaggctacagtacagggccccaccccagccagggtgttaatgcccacgtagtggaggcctctggcagatcctgcattccaaggtcactggactgtacgtttttatggttgtgggaagggtgggtggctttagaattaagggccttgtaggctttggcaggtaagagggcccaaggtaagaacgagagccaacgggcacaagcattctatatataagtggctcattaggtgtttattttgttctatttaagaatttgttttattaaattaatataaaaatctttgtaaatctct

SEQ ID NO: 11751 - DNA, 281 bp, Homo sapiens
acctcgcctgaagccagcctctctgccaagtcactcaggtcatgggcattgttcaagcctgagtggcagccgctcttgctcacctgttgaggaagggctggctcactgtccaccgtggcggcatctttaactggcctccactcaatgggaaactgactcgcctgtgaaagacacagtgggagagctgaaaatgaatcagaagctttatgtatatgatttttaaattaaactttactttttcagactgcccctcccctttttgtaaaaagtccatttactgt

SEQ ID NO: 11752 - DNA, 408 bp, Homo sapiens
ggagcagccagagggccaagtgaccaagaggatggggcctgagctggggaaggggtggcatcgaggaccttcttgcattctcctgtgggaagcccagtgcctttgctcctctgtcctgcctctactcccacccccactacctctgggaaccacagctccacaagggggagaggcagctgggccagaccgaggtcacagccactccaagtcctgccctgccaccctcggcctctgtcctggaagccccacccctttcctcctgtacataatgtcactggcttgttgggatttttaatttatcttcactcagcaccaagggcccccgacactccactcctgctgcccctgagctgagcagagtcattattggagagttttgtatttattaaaacatttctttttcagtct

SEQ ID NO: 11753 - DNA, 785 bp, Homo sapiens
caccggctcccacggggaccctgaggaccgtgcagggatgccaagcagccggctggactttcggactcttggacttttggatgcctggccttaggctgtggcccagaagctggaagtttgggaaaggcccaagctgggacttctccaggcctgtgttccctccccaggaagtgcgccccaaacctcttcatattgaagatggattaggagagggggtgatgacccctccccaagcccctcagggcccagaccttcctgctctccagcaggggatccccacaacctcacacttgtctgttcttcagtgctggaggtcctggcagggtcaggctggggtaagccggggttccacagggcccagccctggcaggggtctggccccccaggtaggcggagagcagtccctccctcaggaactggaggaggggactccaggaatggggaaatgtgacaccaccatcctgaagccagcttgcacctccagtttgcacagggatttgttctgggggctgagggccctgtccccacccccgcccttggtgctgtcataaaagggcaggcaggggcaggctgaggagttgccctttgccccccagagactgactctcagagccagagatgggatgtgtgagtgtgtgtgtgtgtgtgtgtgtgtgcgcgcgcgcgcgcgtgtgtgtgtgcacgcactggcctgcacagagagcatgggtgagcgtgtaaaagcttggccctgtgccctacaatggggccagctgggccgacagcagaataaaggcaataagatg

SEQ ID NO: 11754 - DNA, 589 bp, Homo sapiens
tgactccatggagcctggcccaggagaaccagagatgatcccgaggcagctggggagaggccccgcctctggtgggcttggcctccaccacctcccacgcttctgagaagaggttccaaattgggcttctgtgcccagagcgtccacagcaccattcccagtgtagactcccagtcttctccacattgctgtcatggcgtcagttcaccagactcattgattttgttttgcttgttaagcaaaggaatgtcacatacctctgtccagctttttaggaaatacatttcgcctattgcgactttttccatttaccctgaagcctagaaagtaggtggaactcacacaaatggcattccagagtctgccatactccgtctcctccagctgctggataatacagaggaacttcaacttctacagggaacagtggttggccaggctgcagtataactgaagcatgccttggagagagcagacactgtgggggccagggccatctccctttaatgtgttcatgttaaaacctatttgagtgtaagacttgccctttctaacaataaatgctccgtgtttaagttctgcaggtctc

SEQ ID NO: 11755 - DNA, 380 bp, Homo sapiens
tgaaggaatacacatcctgaagatctcgtgactatactggcatttcagatccaccccacccccagactcatcccactctctcccagcattttgtctgggaagagagactaccccatctttaccaccccctagaaatgagctgcaataacaggaacatgagacttcgcaaatctctggaaaataatatccaaatgaaattaagtctcactgaacatttcaatcaagaatggcagggatctattttattgaatattctagctactgtaacattgatatttatttttgtttgacattttaacactttgtactgcaaagagtgaactatatatgagatagagagacaataatttcttgcaaaaaaaaaaagagataaaagaaag

SEQ ID NO: 11756 - DNA, 1251 bp, Homo sapiens
gaaaactttgcctggtccctctagctgctggtggttctttcacagacatttccatatacctcatgcattgtgggttaaaaagtccctgcatcacttctgttctcacaggtactgagctgtcaaaagtgcatgaaggcctctcactgtactctagtcctgacttggggtgcagagggctgcttgcaatcctgtttgtaaggctgtgcctgctcagagctttggactgttcaacccacacaagaacaaacgctaactaatattttttttaagagattcttttccctatgaatgtgggaaatgcaggatttattctgtgaattgtttgtttctgtgtgtttgttcagcgtattcattcactcactcgtttgcaaacataatgggcagtggtcatttactgctgctcttttacagttagctctaaattacttgtttgaactatttatttctgaaaggaatgttactcaagctgccactccctgctgaagagcaggagggaactctcactgggggcggaaggaagtggagctggagcagtaactgccaacatgaagctggagggtttgggattttttttgtttttgtttttttgaggctcaaaaaatgctgggagaaatgaaaatgctgtgggatagggctcctgttgcctttcagaggaagtctgacactacagcgttggcacagtgccgtgaacagtggaactgtgcccaagggactctgattatccaagcatcttccgaagagtgttgtggtcaccttaaagagacttccccttctggaaatgtggtgacttggcttagtcttcaaactggattcatggatttgaagtaactgtaaaccctaaatcttcattttcatcccagatctggttgagtataaacctcagaattgtaggggctggcctgagctgtttatttcaaaagatactattcaatttaaagctatttttcctcagagtttttgttttctatatattaagtctaaattaagttttctactcattaagactaacatctccccactccatccccactgaaatttgtggaagaaaatttagtacttggctctgaggttgccagttatacaataatctattttgcatatgaaagtttgtatttaacttttttgttcattaaaaaccttactgatatggttataacttcagacagtttagagttggtcagaacatattttgcaagatctagtgcctagtgttgcttttctgatgtaataaaaggtggtctggcagaacct

SEQ ID NO: 11757 - DNA, 391 bp, Homo sapiens
gagtgaataaaattggactttgtttaaaataagtgaataagcgatatttattatctgcaaggtttttttgtgtgtgtttttgtttttattttcaatatgcaagttaggcttaatttttttatctaatgatcatcatgaaatgaataagagggcttaagaatttgtccatttgcattcggaaaagaatgaccagcaaaaggtttactaatacctctccctttggggatttaatgtctggtgctgccgcctgagtttcaagaattaaagctgcaagaggactccaggagcaaaagaaacacaatatagagggttggagttgttagcaatttcattcaaaatgccaactggagaagtctgtttttaaatacattttgttgttatttttttcatg

SEQ ID NO: 11758 - DNA, 386 bp, Homo sapiens
gctagacatggcagagatgaggaggtttggcacagaaaacatagccaccattttgtccaagcctgggcatgggtggggggccttgtctgctggccacgcaagtgtcacatgcgatctacattaatatcaagtcttgactccctacttcccgtcattcctcacaggacagaagcagagtgggtggtggttatgtttgacagaaggcattaggttgacaacttgtcatgattttgacggtaagccaccatgattgtgttctctgcctctggttgaccttacaaaaaccattggaactgtgactttgaaaggtgctcttgctaagcttatatgtgcctgttaatgaaagtgcctgaaagaccttccttaataaagaaggttctaagctg

SEQ ID NO: 11759 - DNA, 376 bp, Homo sapiens
gaatcacacagagtcttctgtaggggtatggtgcgccgcatgacatgggaggcgatggggacgatggacagagacagagcgtgcacacgtagagtggctagtgaaggacgcctttttgactcttcttggtctcagcatgttgactgggattggaaataatgagactgagccctcggcttgggctgcactctaccctgtacactgccttgtaccctgagctgcatcacctcctaaactgagcagtctcataccatggagagatgcctctcttatgtcttcagccactcacttataaagatacttatcttttcagcagtatatatgtgctgaaatctcagcatgaaagcattgcatgagtaaagatactttccctaac

SEQ ID NO: 11760 - DNA, 350 bp, Homo sapiens
aatgtgattcctttgaagaggaaaatgaataatacattgaattagaaacataaataaaatgaccagtaattgtgaaaattacagttcttttcaacctactttcatactgaagatgcagcaaaatgtgaatgggaaaagagatggcctgagaagagagatcaaatggaaaggagaggaaagaactcagtgctgcctattagtagttaattctgtcactcaccactacatcacttgagacaaatctatgccactcagaatctccttctttcctggacttaactctaattctagagtctctgttactgcttgggctatacctgggcatactaataaagtatggtattgaaact

SEQ ID NO: 11761 - DNA, 167 bp, Homo sapiens
ccaatgggcagaatcttcactccaggcacatagccccaaccacctctgccagcaaccttgagaggaaggacaagaagaaagatgggatagaatttaaatagagaagaatgccattttatcactctgcctctgggtgaaataaagatcagtcttgatgttctaactct

SEQ ID NO: 11762 - DNA, 625 bp, Homo sapiens
ttcctgggatgagagttttggatgcagtgctcgctgttgctgaataggcgatcacaacgtgcattgtgcttctttctttgggaatatttgaatcttgtctcaatgctcataacggatcagaaatacagattttgatagcaaagcgacgttagtcgtgagctcttgtgaggaaagtcattggctttatcctctttagagttagactgttggggtgggtataaaagatggggtctgtaaaatctttctttcttagaaatttatttcctagttctgtagaaatggttgtattagatgttctctatcatttaataatatacttgtggactaaaagatataagtgctgtataaaatcagccaattatgttaaactagcatatctgcctttattgtgtttgtcattagcctgagtagaaaggcctttaaaatttttttagaaagcatttgaatgcattttgtttggtattgtatttattcaataaagtatttaattagtgctaagtgtgaactggaccctgttgctaagccccagcaagcaatcctaggtagggtttaatccccagtaaaattgccatattgcacatgtcttaatgaagtttgaatgttaaataaattgtatattcacttt

SEQ ID NO: 11763 - DNA, 3757 bp, Homo sapiens
tcaccactaactcagagcctcctccaggccaaacagccccaaagtcaattaaaggctttcagtacggttaggaagttgattattatttagttggaggcctttagatattattcattcatttactcattcatttattcattcattcatcgagtaactttaaaaaaatcatatgctatgttcccagtcctggggagcttcacaaacatgaccagataactgactagaaagaagtagttgacagtgctattttgtgcccactgtctctcctgatgctcatatcaatcctataaggcacagggaacaagcattctcctgtttttacagattgtatcctgaggctgagagagttaagtgaatgtctaaggtcacacagtattaagtgacagtgctagaaatcaaacccagagctgtggactttgttcactagactgtgcccttttatagaggtacatgttctctttggagtgttggtaggtgtctgtttcccacctcacctgagagccattgaatttgccttcctcatgaattaaaacctcccccaagcagagcttcctcagagaaagtggttctatgatgacgtcctgtcttggaaggactactactcaatggcccctgcactactctacttcctcttacctatgtcccttctcatgcctttccctccaacggggaaagccaactccatctctaagtgccgaactcatccctgttcctcaaggccacctggccaggagcttctctgatgtgatatccactttttttttttttgagatggagtctcactctgtcacccaggctggagtacagtgacacgacctcggctcactgcagcctccttctcctgggtccaagcaattattgtgcctcagcctcccgagtagctgagacttcaggtgcattccaccacacatggctaatttttgtatttttagtagaaatggggtttcgtcatgttggccaggctggtctcgaactcctggcctaggtgatccacccgcctcgacctcccaaagtgctgggattacaggcatgagccaccatgcccagtcgatatctcactttttattttgccatggatgagagtcctgggtgtgaggaacacctcccaccaggctagaggcaactgcccaggaaggactgtgcttccgtcacctctaaatcccttgcagatccttgataaatgcctcatgaagaccaatctcttgaatcccatatctacccagaattaactccattccagtctctgcatgtaatcagttttatccacagaaacattttcattttaggaaatccctggttttaagtatcaatccttgttcagctggacaatatgaatcttttccactgaagttagggatgactgtgattttcagaacacgtccagaatttttcatcaagaaggtagcttgagcctgaaatgcaaaacccatggaggaattctgaagccattgtctccttgagtaccaacagggtcagggaagactgggcctcctgaatttattattgttctttaagaattacaggttgaggtagttgatggtggtaaacattctctcaggagacaataactccagtgatgttcttcaaagattttagcaaaaacagagtaaatagcattctctatcaatatataaatttaaaaaactatctttttgcttacagttttaaattctgaacaattctctcttatatgtgtattgctaatcattaaggtattattttttccacatataaagctttgtctttttgttgttgttgttgtttttaagatggagtttccctctgttgccaggctagagtgcagtggcatgatctcggcttactgcaacctttgcctcccaggttcaagcgattcttctgcctcagcctcccgagtagctgggaccacaggtgcctaccaccatgccaggctaatttttgtatttttagtaaagacagggtttcaccatattggccaggctggtctcgaactcctgaccttgtgatctgcccgcctccatttttgttgttattttttgagaaagatagatatgaggtttagagagggatgaagaggtgagagtaagccttgtgttagtcagaactctgtgttgtgaatgtcattcacaacagaaaacccaaaatattatgcaaactactgtaagcaagaaaaataaaggaaaaatggaaacatttattcctttgcataatagaaattaccagagttgttctgtctttagataaggtttgaaccaaagctcaaaacaatcaagacccttttctgtatgtccttctgttctgccttccgcagtgtaggctttaccctcaggtgctacacagtatagttctagggtttccctcccgatatcaaaaagactgtggcctgcccagctctcgtatccccaagccacaccatctggctaaatggacatcatgttttctggtgatgcccaaagaggagagaggaagctctctttcccagatgccccagcaagtgtaaccttgcatctcattgctctggctgagttgtgtgcctgtttctgaccaatcactgagtcaggaggatgaaatattcatattgacttaattgcagcttaagttaggggtatgtagaggtattttccctaaagcaaaattgggacactgttatcagaaataggagagtggatgatagatgcaaaataatacctgtccacaacaaactcttaatgctgtgtttgagctttcatgagtttcccagagagacatagctggaaaattcctattgattttctctaaaatttcaacaagtagctaaagtctggctatgctcacagtctcacatctggttggggtgggctccttacagaacacgctttcacagttaccctaaactctctggggcagggttattcctttgtggaaccagaggcacagagagagtcaactgaggccaaaagaggcctgagagaaactgaggtcaagatttcaggattaatggtcctgtgatgctttgaagtacaattgtggatttgtccaattctctttagttctgtcagcttttgcttcatatattttagcgctctattattagatatatacatgtttagtattatgtcttattggtgcatttactctcttatcattatgtaatgtccttctttatctgtgataattttctgtgttctgaagtctactttgtctaaaaataacatacgcactcaacttccttttctttcttccttcctttctttcttccttcctttctttctctctctctctctttccttccttccttcctccttttctttctctctctctctctctctctttttttgacagactctcgttctgtggccctggctggagttcagtggtgtgatcttggctcactgctacctctaccatgagcaattctcctgcctcagcctcccaagtagctggaactacaggctcatgccactgcgcccagctaatttttgtatttttcgtagagacggggtttcaccacattcgtcaggttggtttcaaactcctgactttgtgatccacccgcctcggcctcccaaagtgctgggattacaggcatgagccatcacacctggtcaactttcttttgattagtgtttttgtggtatatctttttccatcatgttactttaaatatatctatattattgtatttaaaatgtgtttcttacagactgcatgtagttgggtataatttttatccagtctaaaaatatctgtcttttaattggtgtttagacaatttatatttaataaaattgttgaattt

SEQ ID NO: 11764 - DNA, 2748 bp, Homo sapiens
gcacaggctcctcactcttctccatcaggcattaaatgaatggtctcttggccaccccagcctgggaagaacattttcctgaacaattccagcctgctccttttactctaggggcctctgtcagcaagaccatggggacttcaagagcctgtggtcaggaaatcaggtccagccttccctgtagccagacagtttatgagcccagagcctcctgccacacacatgcacacatatctagcattctttccagacagcatcctccccgccttccaccttggtagatgcaaggtctatctctcccatcagggctgccaaagctgggctttgtttttcccagcagaatgatgccattctcacaaaccaatgctctatattgcttgaagtctgcatctaaatattgatttcacgttttaaagaaattctcttaaattacaattgtgcccaatgcagggtggctctggggggcaagtaggtggtacaggggattggaaacatgctccgcgcctccagagaaaagttgctcccgaggtccatgcccctggaacgtgttcctatcactctggctggttgggctggtccttagactgggtgcttatgattaaagggtcttggttagcccactttccctctccatgtggagatggaaggtagagaaggatacagtgtctatcctcaagttgctacggttcagtgagagaggcagacatctgaacaggcaggtaggattcagtgtgctcagtgcactggggatttggagagagatgggcttgctctctctgtgcacccaggagggccacgcacttaaaactgtgtttgtggatcagagaaggctttatagcacagggggcattcagatgagtcttagaggaagagaagaaacatggcaagcagattacatctgagccgtttgaattgtgtttttctttcttcccatgtttattttctaagatctacctgaacttagagactcaagatatttttttaggaaacctcctacccatgtctgaggtagcaagtgcagcctcacgacagataccaggcaatccagagccacaaaacgtgattcctccaggctctgcctggcctgaccctgtcctgtcagctgggtttacataccagtcccattcttccttttcaatacctacccccaaatcttctcctaaccaccatctgttttttttttttaaagcattttttgctttaaaagcatcctgaccccaatttctttgagctcacgggccttttgctgaaggtctctcagggtgtagtggtgtggctctctggacttaacgtcactctcagaggtcagaaccttggagatcagaactgattctcaccaggtgtgagaggtgtggtagcagattgcaatgctctgcacctcttccttgcaagtgagcaacttcaggctctctgggcagaggctggcccactgtagtttgcagacatgctctccagatggttttactaagtcccctctccctgatagggaatcctgctggaccagcgcagccctggtgtggagaggttaaaagacttgcacaggatcaccaagtcatgctgtagagccaggattcctagacccagggctctgcactctcaaggctggccccatgtgctcaaggggatctaatgtttgggctccaaactaaccatctcggagctgggctcctcatttactgccaaaccctcagcttatgtagctagaaagggccctggagtgagaaagcctggattttcaaattgatgctcccctactgactagctgtgccactctgggcaaatgctcttccttgagcctgtttccacacctgtaaagtggggatgatgatcctatctcactgcttttgtgaggattacaggaaagcacctgtcctggctctgtacctggcacgtagtaggtgctcagttcatgctggtttccttcctgcctttagtagggacctgctctgtgctcacacctcggctgcatgcaccctgctgtgacggaggctagtgtggaagaggtcctgtcctcagggaattaactgtcttattgggagacaacaactgtcctccttggaacacccaagaaaccatgcaaagcagtggacaacacagaacacgccctcctcctcgctgcctgcagctccaatctgattctgcttgggaatgggcggagcacgtgggctgcttaactgctgtataggacaagccccttacccctctctgggcccatgaattcctggcttggtttatgttctgatttgacacactgattttaatcttcgaatcatgacactgagtgcagaggaggtggcattccgacagcaggacatacatgttggtgtgaagactgggacgacactgggtagaatctagtttttaattattattaatataaaggatcaaattaatttaaatatgattctgaagtctacagaacttttagttctgtgctgtctatgtggacactttggtaaaatgcaaattatgatatggacgttatcattggtctggtgagatgtttcatatttgtgacagttaatttaaaaattatgagttaatgctgcctgtgtctatggggttctgtcttctttgatagccatctattcatctggatcatgggaccctctctaatccttccaccaatcaaataagctattgctattggtttggagttgagatatcagtctcggaaacttctgaaaaatgctaataattacccaaggattatgtcaaattttaaaataaatgtgtgtgtgtttcttt

SEQ ID NO: 11765 - DNA, 1393 bp, Homo sapiens
gattccgtggttgggcccagagcctgtcgagggtgccagttagctgatgcgagggtagaggagagacgtgggttgagaatagtgtaaacttctagcgctggtgatgtcactgactcagtggggatcttggacaaattatacagtttttccatctataaaactcagggtttgggcaagatcattggtttatcatagtgaaacccaggaccccaaagttctgcgtaggtgcctcagggacttttggatttggaaagtaggctaagctagtgggtgtctccaactcctgatctaaacacccatcctccaactcctacctcctcctcttgcttcgatcagaacagctttactttagatagggttccatttaagatttttgtaccaaaaaaaaaaaaaaaaaaagtttaactacttttaaaaagtttgaaaattagaggactgggtgatctcaaaagggctttccacagtaatgagctcgaccttgctcttattagtccctcacccctgcccctcatgatctcccactttctctagctgcagccttaaattagcttctttgcccaccctgtgagcctcatccgtgattctgccttcacacacgcagcagaggtttcccttgaagtgcaagaggtgggagatcaggctgttcctttgctgccaggtacacagggtctcttttttttgtttctcagattccagcttctttccactcagggcagattctggggtctgcctgcctgaaagatggtggttggggtggggtctcatagagttaggcttctcacccactgcgtattaactggcagagaatttaggggaggttcagaagacagagttttagaagcaaagcacaaaatctctgggaggcattataatggagggtcttcagagttcggggaccaagtctagcagattctcagcagtgctgatggccagaattcaggagcaggggcctggcctcctgggttctttgctgaaattatagttgaatggctttctcacattggccaagcatgaggcctcttgccaaagatcagctgtccccctaaagccacagggatggggtatcttcagcaagagagagggcgttaaagatgtaaaatgctttgtccatggggaagtgcacagatatgtgggagaaccttacaaggctctaaaatgagatgtgatatggcttgaaatgggaggagacactttctgacagtggggggtctggaatggaattggtggggacaggcagcaagctgcacttttgaggggcctcatttaccccacctctgttaaaaacttgactactctcctctttaatagaaagtcaccatcatctgtagtgatggaggaagggggtcacttatataaagatgggacactttaataaagacaggatatcttccat

SEQ ID NO: 11766 - DNA, 206 bp, Homo sapiens
tgaaaataggcttgccactttctcttattttaattccatggtagtcaatgaactggctgccactttaatataactgaaaattcattttgagaccaagcaggatcaagtttgtagaataaacactggtttcctagccatcctctgaaaacagtatgaaacatgaccaagtacataatggatttagtaataaatattgtcgaattgct

SEQ ID NO: 11767 - DNA, 5174 bp, Homo sapiens
attcagtcacctgttcagccggcactgagaagaacgaacacaagaaaaagataagaaatactagagtaaaggccatcaaactacgcgatagtctctgttcttcatctgctattaaccttgccttagaaacacataaattatgagattttttttaaaagttgttaccaaatacacatttcacattgaatcatgtaggatcttgatgggcctttgttcccaaggacttccacatttttgcacagattatgctccatcccattcacttctgcattcctgtaacttttaatccctatgtttgtctcacttttcatctggttgaatggcttttcttagtgtggtatttgctgtcacatagtttttcctgggtgagtctgccaactcacaggtgcttttaggcttgaaatctccatcctatcatttccgttttgcctgtgactgtaaagagtagccattcttttcccatgtattgaagaggatattcttctcttgctttatactactcacgtccttggggagggaaatgcacaatttttttttgttaggctgtaaagaatttaagctgtaaattacataagttagaacaagcccaaatttaatttgcaaccatcagaattcagaatctatagtgaccagtgatcaaggctaattggaaaagagttatcggcccatagctaataagtagtgacagacaaccaagcttcaatatttttctaaagaaattacaggtgggatatgctagaaaaggcattttggggttatgtttaaaaaaacattattgtcccacaatattaccttaagatttttcttttccgcactacctgaacattgtaatacagacaaacttgatttcttctagaagataacattttcaatactgtcccacttctcatcttaaaaatattgtcatgtttattctaatatccaacacaactatcaaaattgcctttttctctagaggatgaaggctgtgaaaaaaccgttcaaattctcttctttttcttttttattaccaggtccattttgcctgacaattgcaaatcagagcatacaaaataaaactgtgcagttttgtttggtttactttcaaaagagtagaaagcttgaaaagattctgaaaccacagtttcattattctcataatccttctgcaactgaaattacatattgcaggagacattttcatatcatcaatgtgacatttacaccacactttcaaagacaatcactgaaacaaaaattgtctttatgagctaaaaatatgcagaatctctgcctagaatctttattcaaacttttattagccagtgaaacacttgcttgccaactgccaagccatacttattaagttcgaacatgtttcacttaaggagagacacctagcttagtcatggcaagttgccattttgtaaactaaggattttggactgagatttcttaaatctttcttcaaatctcccacaagtatatacttttaaattatggagtattttaagtctacaaaaaggtataaataataatataatgaattcctatatacctaatacccagtttaagacaccaaatataacaagtataattacatcctccaatgtaccgtttccttattccacagatatctttttcattattgtgaagtgatgttcagatttctagttttttttctagtttttaattttaacatcagaactgaaataaaaaattatggatacgtgttttgaattgcaaactattcctcaggaattccaattaaatttattttacttgaataggaatgatcataaaagtgattctttttttgtgactagaaattcttaagccgatggtcactatagctcatccttaatgtatggctcatttgcttttgtcactaaacggttttgtgttagaaccaccaaaattatagcttttaagagcttcctttgaccactgtctttttcttaccctagttctcttatctttgatcgtatatttctcataatgtgaaatatgatgagattcacttaggggcagcatgttagttttgggaggcaatgtcaactgtgtctctgaattcctgtcttccaaattgaagccagaccatgctgatgacctcaagtagcactgactatttgacaatagggctgataatgtaatcggcttgaattttgacttagtaactttttatgtaatactttcggagaaattctctttaggacaaagcagagagtccaatttattgagggatagattgtatctcttaaagtggtcatattattattaattttgccaaaagaagaagaatttattgaatatttatactataaaatgcagtaacattctacttgcttattacatttaaatccttgtgtaactgaatgtttacatgtcaagaggaaaagctgtaagaaaatgctgtcacagacccatccctgtggcatcgtcagcagaatactgcttgcttacaatctttattatgcattcttataacataacctcagagtatctttaccaaaggtttttaaagtaaatctctttttaagatagacttattcttttataataatgaatgtgcactcatacatatgtagaaacatttagatttagagttttttttttctttcacaaggtataataaggaaaggatcctacaatattttattctagggtttcttaaatatatgatttatattactgtcttttctattaatcatttgatttaaacaatgccaagtcactcttttttagttgcatgaaattttgcctgcaacagagagaaaaagattgtattactttaatgattataatcatactgtctgctgatataatatcataattgttgtggtttaaatacataaatagtagaaaaatcagagtctataacagaaagtttgtaaaaatatactgattttgaaaagtatcaggaatataaatatttggtaattctgtgtaacaagagagacatggaaaaggaaaaaaatccactatatcatgggctctgcagaacatatcaaaataggatttcttaaatttttcaacccccagaccatactgactcaacatggagtctcactggccaagaaaattgcctttaaaactcgaaaataaggccaggtgtggtgactcacacttgtaatcccagcaatttgggaggctgagacaggaggattgcctgaggccaggagtttgacaccagcctgggcaacatagtgagaccttgtctctacaaaaaataaaataaaataaaaaccaaattagccagacatggtggcatgcgcttgtttaaaaaaacaaataaataaataatcgactcaaaaataagtcatgtgtcccagcataaggcatcaggttgttagatgctggcatctctgcagctcaaagatgtgggttctttttcttgtcattaacacattgttatttctgtaggagcaacttctctgatcaaaattacttttctgggtatgtgctgattaagggggtggacttatcaacactataattgttccctatgaaagattccacagagatgtttatggtgaggtttaaaggatatgaaactctacatttaaacaagtattttatatttgggtacagaggaagaaagagagggctttttccatggggctatagtagagagttagtggaatatagacaggactctgaaaacacaacttccagccatttttttagttagtaaaaatcctattaatgtgaaccagccaggaataacagtgttatttctattggatatggtttgggcttctcttgtcaaatctgtgtcggctgccccctgatccttccattatcaagttttgaagggtgttggggaaattatggcagctgctagggagatcagggaaacactgatgtaacctcaaagcctctcaccattcctcttggcttggaaaggctttattttttcatatacatttctagaaatattgctattctaccttagtatttcacatttgtagttcaaacaagcgattgtccatctgttgcctagagctatagtacatgtgtgttatgaatgaaatatgacagcatgttccatacccctgctttagccatctgtgggaaaccagcaaactgaaaaagacacctctgcaaaatgtgcctcaagtccatttcttgggatcgctcgtttggtgcactctcgtgggagacaatcagagaacaacatatacttgtgccttattttcaaagaatctatttacactactatgaatattccactgaagagtcaatgatgtaaatgataaccaccaaatctcaaaaatatactcaccaaaaagtaaaaaagtaaaaaaaaaaaaaaaagaaagaaagaaaagaaagagagagaagtcaacttttcatcttaatatattctagtagtatttattttttccttgtcttggaagtatctcataggtctttaaatgagtaaaacatttttatgccagaaggtgatataatggatgttagtgttttttatttgattttacagtagttttagtcagataatgaggacagagacttcaacttgattctttaccaccattcagcatattttttaattgtcttcattgtatttgcttaatagtggtccagacaagttcaaaacttgttctcagtgaggcattaatatggtgcaaccatgaatatttcaggccaagttattcacttgacagataactagaatgaaacttttctcatgaggctgttgtttggttagcatagccttatttcaaaccttaaaaagttacctgactgaagctactatgacttggtaaggattcttcctctcttgctttcttcctcccttcctttcttcctcttccttcctcctcttcttattttctttcctactttccatcctacctattagtgttgctgtacttggattttttgtaaattaaatcaatgcattatgattttagggaattatgattatattcataaggggaaggctaccagaaaatatatgtggcatccataaaatcttcttttataggggcatattttttaggttgtatttattcgtaaagtgaaatgagataatagagtctttctgtttcatgttaatgaattttcatcagggactgaggtcatagattcttggaaaattcatttgtgactgatctagttttctcagctgtatgcaaagtaatctttcaaagactaggttaagattttttttttaagtctgaagcaat

SEQ ID NO: 11768 - DNA, 2661 bp, Homo sapiens
gagtctttttggtaccataagcatatcatccacagatatgtcactttgaaaattccagtttgacccacgctatttttggactgaaacaattaattatttttaaatgacgctttatgatttagaaatttagtatttccgaaaatttaaaagcttgattggactgatagatacacactttagacctcatacaagaataatcaaattttcttaaaactagaaaataaatgctgctgagcctatcaaatactgttatcaaatgagtgcctgatcatcaactcaggaaagaagactctaagtcctgttgcttcagctctctaaatgtaggcttttttttttttttttttttaggtcttggtcttcagccctcttatcctgatttattctctcattggggtctcactgtctctagtattttagctaccacttgataaggatgacttccaaatttatattcccattcccaatatttattccaagactcagttttgcatttctgactgctaatcatctatatatcagtgtcccagtggcctcttaattgagcattatcaaaatcctgtggtatttatatggtcccagttatccatccctgaagtctgtcaattttgatttctctaaattccttgccatgacatcctatatatgatcacatctctatacggcttagcattgtattccgatgcccagatgtcaaacttgaagctcattctcttatcaaaattgttcatgtattcctcctttccattcttatagctgtattattagatcaggtttttaattctgctcaaccaattattaccacagcctgttaaatggaatccctactccaaggctgactgtttcaatctatcctacacttggtttctagctcatttacttataccatcttttgttcaaatatatattttttaataacagacctttttcttctaaagaaatcttttgtagaagcagcatatacgaagcagataaaagtaggttcaatgcggttggagtgaagatgagaatgccacaggcatctttctttctaggcctcagaggtgctgcatatggaatgtccatggatcgcagagggttttgaagaccatgttttcaaaaacactgtcttaacactctattgtcattgctcttttccctcttatttcctctttgtctcttcccgacttagatctaattttcaacaacccaggaaattatctcatatgtttgcatctctcaagtttcttttcttttttctttcagagtcttattttatctaaatttatgtagaaaaaaaagctttgaatgttgactacatagacattactacaataagctttttgcctttcccaagactcaaaattgacacatctttgttgatgtttaagttgaaattccagccaacttttttttgacttttatgtgaagtttaaagtcttttctttgaaaagcttgcttcctcaatttcaaagatttgtcctctgatatatttataaacatcaatttaatgcagacattcaaaccctaaaccttgaataactcttattttattttgtctttgtttacttccattaatttttttttctttccctctcttccgcctttacagcacccactttttcttccccccatgatggcaaatattgttatagtccccaaggcagggaacttctattcagactgtaaaaggaaatgttgaaatccatagctgtcctgtcaacagtagtggaatgaaaagtcgttggattgttttggcactggttctgaagcaggcataattggcaaattattataatactgctgcccgaaaatccccatttgcctcaagatagtggcatttattggcagaagcctctgaaatgtccagcacattcttttgagttaccatttaaggatcagcctgacaatcgacttctctctgcacatttgccccctttgtaacctaagccagactgttcccaaatgaccttctaaaggacacagtgcaccatcatcaatggaaacagttcagaaaggatgacaggagggagatgtttcttagttctgagagccagtctgtaacaatgggataagcatttaatggaatcaaagctgttttgcataaagagtgaactcagagacgacaagagggtctttatgaattcccttcacattttgtaaaaactgtcatatataggctatccccttaattgataaatgggatctagaaagcggtattatgaccagagggtgagaagatttaggaatttggatagcagttcaagataagaaagaacttcttatagttataaattttcaatgatggaatgggttgcttctttaaacagtgagcccaccatcacttggtatgttcaaggaaagactagataaagtcgatattgtgagaggaattgctgtatgataccgtttggagaaatgattgacataatcttttaaggccggtgaccctatcattttccaaataattgttgctagtacttagttaattagacccatttttttcttaggaaagagttggatcaatcatgggagaccctgaaaaatttccttacctttcctaaggtttaatttcctcttctgcgaaatggagacaattatattacttttgcttatttcataaagatcttgtgaggattcaatgaaatgaggttaaattcttttattaaacagaaagttttgagt

SEQ ID NO: 11769 - DNA, 2771 bp, Homo sapiens
gcctcaccatgtgagctcttcctatccctctcctaactgccagccccctaaaagcactcctgcttaatcttcaaagccttctccctagctcctccccttcctcttgtctgatttcttaggggaaggagaagtaagaggctacctcttacctaacatctgacctggcatctaattctgattctggctttaagccttcaaaactatagcttgcagaactgtagctgccatggctaggtagaagtgagcaaaaaagagttgggtgtctccttaagctgcagagatttctcattgacttttataaagcatgttcacccttatagtctaagactatatatataaatgtataaatatacagtatagatttttgggtggggggcattgagtattgtttaaaatgtaatttaaatgaaagaaaattgagttgcacttattgaccattttttaatttacttgttttggatggcttgtctatactccttcccttaaggggtatcatgtatggtgataggtatctagagcttaatgctacatgtgagtgacgatgatgtacagattctttcagttctttggattctaaatacatgccacatcaaacctttgagtagatccatttccattgcttattatgtaggtaagactgtagatatgtattcttttctcagtgttggtatattttatattactgacatttcttctagtgatgatggttcacgttggggtgatttaatccagttataagaagaagttcatgtccaaacgtcctctttagtttttggttgggaatgaggaaaattcttaaaaggcccatagcagccagttcaaaaacacccgacgtcatgtatttgagcatatcagtaacccccttaaatttaataccagataccttatcttacaatattgattgggaaaacatttgctgccattacagaggtattaaaactaaatttcactactagattgactaactcaaatacacatttgctactgttgtaagaattctgattgatttgattgggatgaatgccatctatctagttctaacagtgaagttttactgtctattaatattcagggtaaataggaatcattcagaaatgttgagtctgtactaaacagtaagatatctcaatgaaccataaattcaactttgtaaaaatcttttgaagcatagataatattgtttggtaaatgtttcttttgtttggtaaatgtttcttttaaagaccctcctattctataaaactctgcatgtagaggcttgtttacctttctctctctaaggtttacaataggagtggtgatttgaaaaatataaaattatgagattggttttcctgtggcataaattgcatcactgtatcattttcttttttaaccggtaagagtttcagtttgttggaaagtaactgtgagaacccagtttcccgtccatctcccttagggactacccatagacatgaaaggtccccacagagcaagagataagtctttcatggctgctgttgcttaaaccacttaaacgaagagttcccttgaaactttgggaaaacatgttaatgacaatattccagatctttcagaaatataacacatttttttgcatgcatgcaaatgagctctgaaatcttcccatgcattctggtcaagggctgtcattgcacataagcttccattttaattttaaagtgcaaaagggccagcgtggctctaaaaggtaatgtgtggattgcctctgaaaagtgtgtatatattttgtgtgaaattgcatactttgtattttgattattttttttttcttcttgggatagtgggatttccagaaccacacttgaaacctttttttatcgtttttgtattttcatgaaaataccatttagtaagaataccacatcaaataagaaataatgctacaattttaagaggggagggaagggaaagtttttttttattatttttttaaaattttgtatgttaaagagaatgagtccttgatttcaaagttttgttgtacttaaatggtaataagcactgtaaacttctgcaacaagcatgcagctttgcaaacccattaaggggaagaatgaaagctgttccttggtcctagtaagaagacaaactgcttcccttactttgctgagggtttgaataaacctaggacttccgagctatgtcagtactattcaggtaacactagggccttggaaattcctgtactgtgtctcatggatttggcactagccaaagcgaggcacccttactggcttacctcctcatggcagcctactctccttgagtgtatgagtagccagggtaaggggtaaaaggatagtaagcatagaaaccactagaaagtgggcttaatggagttcttgtggcctcagctcaatgcagttagctgaagaattgaaaagtttttgtttggagacgtttataaacagaaatggaaagcagagttttcattaaatccttttaccttttttttttcttggtaatcccctaaaataacagtatgtgggatattgaatgttaaagggatatttttttctattatttttataattgtacaaaattaagcaaatgttaaaagttttatatgctttattaatgttttcaaaaggtattatacatgtgatacattttttaagcttcagttgcttgtcttctggtactttctgttatgggcttttggggagccagaagccaatctacaatctctttttgtttgccaggacatgcaataaaatttaaaaaataaataaaaactaattaag

SEQ ID NO: 11770 - DNA, 507 bp, Homo sapiens
aatgcacgtttcagggtgtgtttgcatatgatttaatcaatcagtatggttacattgataaaatagtaagtcaatccaggaacagttatttagaattcatattgaattaaattaattgctagcttaatcaaaatgtttgattctcctatactttttctttctattactcttatattttcccgtcattctctctgctaaccttccaccttatgcacacactttccctatattttaagataagtctgctaggatgtagaaatatttgtttgtgatttctatatagctattagagattatgacatagtaatattaaaatgaaatgatacttaaacagaaagcaatttccaaagaggccagggaccctaatctttgaagagatgaagaaacttacttttctccctggcttttggttcactttttgtacttttaacaagtgggtgaattatttgataattttgaggaagattattcttttaaattcaaactagtatgtcaatgcctaccatt

SEQ ID NO: 11771 - DNA, 2807 bp, Homo sapiens
aaggaataatgaaaagggtaaaaagaacaaggggtgctccaggaagaaagagtccccccagtcttcattcgcagtttatggtttcataggcaaaaataatggtctaagcctcccaatagggataaatttagggtgactgtgtggctgactattctgcttcctcaggcaacactaaagtttagaaagatatcatcaacgttctgtcaccagtctctgatgccactatgttctttgcaggcaaagacttgttcaatgcgaatttccccttctacattgtctatccctgtttttatatgtctccattctttttaaaatcttaacatatggagcagcctttcctatgaatttaaatatgcctttaaaataagtcactgttgacagggtcatgagtttccgagtatagttttctttttatcttatttttactcgtccgttgaaaagataatcaaggcctacattttagctgaggataatgaacttttttcctcattcggctgtataatacataaccacagcaagactgacatccacttaggatgatacaaagcagtgtaactgaaaatgtttcttttaattgatttaaaggacttgtcttctataccacccttgtcctcatctcaggtaatttatgaaatctatgtaaacttgaaaaatatttcttaatttttgtttttgctccagtcaattcctgattatccacaggtcaacccacattttttcattccttctccctatctgcttatatcgcattgctcatttagagtttgcaggaggctccatactaggttcagtctgaaagaaatctcctaatggtgctatagagagggaggtaacagaaagactcttttagggcatttttctgactcatgaaaagagcacagaaaaggatgtttggcaatttgtcttttaagtcttaaccttgctaatgtgaatactgggaaagtgattttttctcactcgtttttgttgctccattgtaaagggcggaggtcagtcttagtggccttgagagttgcttttggcattaatattctaagagaattaactgtatttcctgtcacctattcactagtgcaggaaatatacttgctccaaataagtcagtatgagaagtcactgtcaatgaaagttgttttgtttgttttcagtaatattttgctgtttttaagacttggaaaactaagtgcagagtttacagagtggtaaatatctatgttacatgtagattatacatatatatacacacgtgtatatgagatatatatcttatatctccacaaacacaaattatatatatacatatccacacacatacattacatatatctgtgtatataaatccacatgcacatgaaatatatatatatatataatttgtgtgtgtgtatgtgtatgtatatgactttaaatagctatgggtacaatattaaaaaccactggaactcttgtccagtttttaaattatgtttttactggaatgtttttgtgtcagtgttttctgtacatattatttgttaattcacagctcacagagtgatagttgtcatagttcttgccttccctaagtttatataaataacttaagtattgctacagtttatctaggttgcagtggcatctgctgtgcacagagcttccatggtcactgctaagcagtagccagccatcgggcattaattgatttcctactatattcccagcagacacatttagaaactaagctatgttaacctcagtgctcaactatttgaactgttgagtgataaaggaaacaaatataactgtaaatgaatcttggtatcctgtgaaacagaataattcgtaatttaagaaagcccttatcccggtaacatgaatgttgatgaacaaatgtaaaattatatcctatatttaagtacccataataaatcatttccctctataagtgttattgattattttaaattgaaaaaagtttcacttggatgaaaaaagtagaaaagtaggtcattcttggatctacttttttttagccttattaatatttttccctattagaaaccacaattactccctctattaacccttcacttactagaccagaaaagaacttattccagataagctttgaatatcaattcttacataaactttaggcaaacagggaatagtctagtcaccaaaggaccattctcttgccaatgctgcattccttttgcacttttggattccatatttatcccaaatgctgttgggcacccctagaaataccttgatgttttttctatttatatgcctgcctttggtacttaattttacaaatgctgtaatataaagcatatcaagtttatgtgatacgtatcattgcaagagaatttgtttcaagatttttttttaatgttccagaagatggccaatagagaacattcaagggaaatggggaaacataatttagagaacaagaacaaaccatgtctcaaatttttttaaaaaaaattaatggttttaaatatatgctatagggacgttccatgcccaggttaacaaagaactgtgatatatagagtgtctaattacaaaatcatatacgatttatttaattctcttctgtattgtaacttagatgattcccaaggactctaataaaaaatcacttcattgtatttggaaacaaaaacatcattcattaattacttattttctttccataggttttaatattttgagagtgtcttttttatttcattcatgaacttttgtatttttcatttttcatttgatttgtaaatttacttatgttaaaaataaaccatttattttcagctttg

SEQ ID NO: 11772 - DNA, 764 bp, Homo sapiens
tgaatctctcagctccaaattaacattgtggtgaataaggacaaaaggagagattgagaacaagagagctccagcacctagcccgacggcatctaacccatagtaatgaatcaaacttaaatgaaaaatatgaaagttttcatctatgtaagatactcaaaatattgtttctgatattgttagtaccgtaatgcccaaatgtagctaaaaaaatcgacgtgagtacagtgagacacaattttgtgtctgtacaattatgaaaaattaaaaacaaagaaaatattcaaagctaccaaagatagaaaaaactggtagagccacatattgttggtgaattattaagacccttttaaaaatcattcatggtagacttcaagagtcataaaaaagattgcatcatctgacctaagactttcggaatttttcctgaacaaataacagaaagggaattatataccttttaatattattagaagcattatctgtagttgtaaaacattattaatagcagccatccaattgtatgcaactaattaaggtattgaatgtttattttccaaaaatgcataattataatattattttaaacactatgtatcaatatttaagcaggtttataatataccagcagccacaattgctaaaatgaaaatcatttaaattatgattttaaatggtataaacatgatttctatgttgatagtactatattattctacaataaatggaaattataaagccttcttgtcagaagtgctgctcct

SEQ ID NO: 11773 - DNA, 415 bp, Homo sapiens
aaacctaggaatctgccttgaaaatggactcactatagcaaatattactgggtgatacagaatgaattctacacttactttttttctcctgtgtttgcattcctgggatttatcctcaagtgcatttctgaccataagtaattttaattcatttcaaatgttttggttattcatgatcacttgggcagtataagaaaatgtagcttctgaatattggccacctctatgctgcatatacttcttgggatatagtatctaagacctttgtaaactgccattttgttaggtatggagtttggtatctagggagtaggccttatttagcaattcaaattttatggagatgaatgatcaaagtgaaacaatgtttggatgcaacgcagaataaaagaatataagaaatagctttttgttg

SEQ ID NO: 11774 - DNA, 149 bp, Homo sapiens
caatttaccaaagagatattgatattgaaggaatttgggaggaggaaaagaaacctggggtgaatacttattttcagtgcatcattactgttccagattcctatgatggatggcagactctttaataaattgcttactgatattatctt

SEQ ID NO: 11775 - DNA, 2921 bp, Homo sapiens
aatcgtactcataatcagctctgcatacatctgaagaacaaaaacatcaacgtcttttgtccagcctctttttcttctgctgttccacctttctaaacatacaataaagtcatgggataaaaataatcgatgtatgttacgggcgctttaaccatcagctgcctctcgaatggaagaacagtggtaatggattaacatcctattttgttgtactaaagtgacaaatcggaataatataattggtatggccattaggttcagtccttgaagataagaaacttgttctctgtttgttgtcttatttgtggtggcactcgtttaatggattaactgaggttgctcaatgttcagtttcttttccagaaatacaatgctaggtgttttgaaataaaacttatatagcaattgtttaaagttatcaattgtatataaaatcacagtagcctgctaaatcattgtatgtgtctgtagtattctattcccagaaactatttgaccatgataattcagtttatattcaccacatgaaagaaaaatgggtaacagaagaacccttaaaacaggttaatttggattgtaacgttcagtgaaagaaatttcaacccttcatagccagcgaagaaatttgccttggaagccaagtcagtaccagcttacctatttgattcagttgctgttttctcactctctatatccatttgaaattgatttattttagatgttgtatacttacgttaggctttctgttaatagtggtttttctcctgttgacagagccaccggattatgacacaggatgaggaagattaaggataatcaattgactaatttcatttagaatattatcaaacatttcaactaggtatcagaaaaaggctttctttcataagactattttaaatagaaattatttcaacaattaaagtaatgttgaccatccccctctcagctgaataaagaaaaatttagttcaatttattgcaatttaattacaatactaccttcacaacattttcatgtgttttaaataaatattttttaattggctaaaggacattcaagcaaagaaatgctttctttacttaaaatgtctatctcatttgctgccttttcactaagcctttactttgttaataaaagtgtccattgtgtgatgtttttgattttacagtttgctaaatcttattttcttggagttgctttttggtaacagccccattgctactccccattttattgttttacatcaatgcatgcttcgttgtgatccctcaagatgtaacacttggtatgctcggttgaggatatgaaaaaatacttccgaaaccaggaattcaatgtatgtttgttttatactgtttgataagaaaagtaggtccagccttaagcagcacagatgcgctggtagatgcatagtcaggaactttttttatttcttttaggtctagggacaggagtgaatagaaagggaggagagctctattatgttctatacacagattaggagatgaccttactgggtacacccctctaaccagtgcttacaggttaatgcatgttaatgaatatttttgcagttgtaaagcataacaattacaactacacatctatttctaaagaataaaacaggaccatatttatttacttctgtcaactatagaaagaaagaccttcagctgtatttccacagatttctcccaaggaaaaggctaatattagtcactactgttatcacatccctttgtataagttttaaaaagagatggagggagatcttcatttctttgaggagatcagtattgtaacgtatgtgaatagatgataacaattaatattactaaaagtcccacatgagagtcctgacgccctctccatgccccacagtaatgtggcttctttcatgggtttttttttcttctttttagctgatctcatcctaagcatgctttatttttccttgaaagctaggtatttatcaactgcagatgttattgaaagaaaataaaattcagtctcaagagtaaaccctgtgtcttgtgtctgtagttcaaaagtcagaaatgattctaatttaaacaaaaagatactaaatatacagaagttaaattcgaactagccacagaatcatttgtttttatgtcagaatttgcaaagagtggagtggacaaagctctgtatggaagactgaacaactgtaaatagatgatatccaaacttaatttggctaggacttcaattttaaaaatcagtgtacctaggcagtgcacagcacgaaataagtggcccttgcagcttccccgtttaacccactgtgctatagttgcgggtggaacagtcaacctttctagtagtttatgatattgccctctttgtattcccattttctacagttttttccgcagacttctttctgcaaattattcagcctccaaatgcaaatgaatgatataaaaataagtagggaacatggcagagagtggtgcttcccagcctcacaatgtgggaatttgacataggatgagagtcagagtataggtttaaaagataaaatctttagttaataattttgtatttatttattctagatgtatgtatctgaggaaagaaatctggtatttttgctttccaataaaggggatcaaagtaatggtttttctctcagttctctaagctggtctatgttatagctctagcagtatggaaatgtgctttaaaatatgcttaccttttgaatgatcatggctatatgttgttgagatatttgaaacttaccttgttttcacttgtgcactgtgaatgaactttgtattatttttttaaaaccttcacattacgtgtagatattattgcaacttatattttgcctgagcttgatcaaaggtcatttgtgtagatgagtaattaaaaaatatttaaatcac

SEQ ID NO: 11776 - DNA, 374 bp, Homo sapiens
gggggctcaggccacccctcctcctaaactccccaacccacctctcttccctccggactctaaacaggaacttgaatactgggagagaagaggacttttttgattaagtggttactttgtgtttttttaatttctaagaagttactttttgtagagagagctgtattaagtgactgaccatgcactatatttgtatatattttatatgttcatattggattgcgcctttgtattataaaagctcagatgacatttcgttttttacacgagatttcttttttatgtgatgccaaagatgtttgaaaatgctcttaaaatatcttcctttggggaagtttatttgagaaaatataataaaagaaaaaagtaaaggc

SEQ ID NO: 11777 - DNA, 937 bp, Homo sapiens
gctcctccgcgcgtcgccggcgctccaccgtggctacccatccgtggtcccgacaacctccctgtcccttgcccgcccccaggaagggggaaatggggcatttggggcccagacctacacttggagcccaggtccagcgttcccccgaccgctttcccctacctcccggcccccgctcccgccccagcacttttggctctgttgcgcgtggggatgcggggagatttgagaggggaaaaccccgccaggagggagagagaggcacccctctgggatgcgggtgagggaaggttggctgaagttcctagtctcaggccgtaggtgcctggccagtttcctgtttgtggggcagctggggcctgaggaggaggggttcacttcctcctcccaccccctgggagcggccctgcgctgtcactgacatctcattaaaaaaaaaaaaaaatttgctctcaaggtgtttgaggctttaatgcaaccctttagcccttggttctttttggtgcaagaattctggctgtttacctcagactcagacccctgaaatgttgccaaattcttcaaataactgtttggggggtggggggagatgaaagagagtcgcgttttgtttacagttaaagacatccaatatcttaaaaaggagttttcctttagaaacacacacacccttcctcttgctcaaaagatctcactccatgatactgtgtaaaatatttttgcactgttgtgaagtatttttgacttttttctgtacataactgtgttctcagagctgaatgtttatatcttttgctgtgcaaaagaaacatgtaaaatgttgttcagttgtatatacagaaatgtgtataaaacattttgttattttttaaaagtagcactgttctggttctgtttgcacgccagtggggagagaataaagaggaaaatttaacag

SEQ ID NO: 11778 - DNA, 4451 bp, Homo sapiens
cggacatcagctgcagccaggcatgtcccgtatgccaaaagagggtgctgcccctagcctgggcccccaccgacagactgcagctgcgttactgtgctgagaggtacccagaaggttcccatgaagggcagcatgtccaagcccctgaccccagatgtggcaacaggaccctcgctcacatccaccggagtgtatgtgtggggaggggcttcacctgttcccagaggtgtccttggactcaccttggcacatgttctgtgtttcagtaaagagagacctgatcacccatctgtgtgcttccatcctgcattaaaattcactcagtgtggcccagaggctgtctattgatctgcatgctttcgccatttttatagtacagggattgtgtatagtctcactgctacctcctccttctactcccccaggtcttggtttggactttgatgatagcatttactgagacgggcctggagcctgtcgaacagcccgctgcagcagggcagggaccacctttgttcatctcagtatcccctgaactagcagagtgtctggcctgcagtgggatcgcagagaatgtggaattgacctaaatttaaatttcaagttctggacacaagcctcaattattcctcttatatgttataacttacatgctattatttttttaaaaaattaatatggtttactttttattataaaagtaaaacttggccaggctcagtggctcacgcctgtaatcccagcactttgggaggccgaggccggtggatcacgaggtcaggagtttgagactagcctggccaacatggtgaaaccccgtctctactaaaaacacgaaaattagctgggtgtggtggcaggtgcctgtaatcccagctacccaggaggctgagacgggagaatcacttgaacccgggaggcagaggttgcagtgacccaagatcctaccactgcaccccagcctgggcaaaagggcaagactctgtctcataaataaataaatttaaaataaaagtaaaacttgtttatgatttcaaaattttgaaatattccaaagaccaagcaaagtaagaagtgggaagaggagaaagaaaaacttttctataatcccacctcttagatacaacgatttattttttaaaattgagacagggtctcactctcacccaaactgcagtgcagtggtgcgaccatggctcactgcagcctccacctcccagctccagtgatcctcccacctcagcctcctgaggagctgggaccacagctggctaatttttgtactttgttttgtaaaaaaggggctttaccatgttgagcaggttggtctcgatcttctgagctcaagcagtcctcctgcctcagactcgcaaagtgctgggattacagacatgagccactgtgcccagccttatatacagctattattattaatgtatactgtgtattcatttcaattcttaatctctccacttggatgttgatgaaatacatacctcacattcaacatttctttctttttttttttctttttgagatggaaaggagcctggctctgtcacccaggctggagtgcagtggcgtgatctcagctcactgcaagctccacctcttgggttcacgtgattctcctgcctcagcctcctgagtatctgggactacaggtgccaccaccatgctcggctaattttttgaatttttagtagagacggagtttcaccgtgtcagccagcctggtctcaaactcctgacctcaagtgatccacccacctcggcctcccaaagtgctgggattccagttaatgagcactgctcctggcctccacatttctaaaatcgaagttctgatcttttcctctggacctgccccacctgcatcttccccatctcagttaacgtcagttgcatccttcaggtgctcaggccgaaatcctcggcaccgtctttattcccctctcacattttgcaccaggaaattctgctggctctaaggccatcaaactgtgcccagaatgtggcccctcctcagcatctccagtgctaccaccgagatggtccacgatgccatcatctctcacctgcactactacaggtctccctgtttccagctcagcccccaccccagtctagtcccagtgtgtcagccagggctgtctttttacaacataaggcagaccacaccacttctttgctccaatcctcccatttcactcagaagaaaagctccgacaacagctgcaaagccgtgcacgacctgcgcccctcccctgcctccttaatttgctgactgcaccgcagccacacggacgtctttcttgtcccttgaatgcgctgggcctgctcttgccttgggacctttctgtgcattgcttagtctgctcagaagccttctcctctacatatccacttgtctaaaccctctacctccaccttcatgccccttctcagcgaggtctaccatgaccatgctgcctacaaattcagtctccccttctgtactttgacgtactttatagtgctgatcacaattgaacgtcatacatattttgttttctttattatctgagtcctccaactagaatgaaagattttgcccattatggtttccctagtgccaagaacagtacctggcacataccaggggctcagtaaacatttgttagatgaatgaaggaaacaaggagacaatgttgatgctgctgtgagcaaggggagtctgaacgtttgacagatcccttccatttctggagtggggcagaatgagtttcataaagtagctcggacaaaaataattcgctcatcttggcatatatgttgggcagctgccgcagaagagagactgagctatgtgccgtggaggattcaaatctgtctcttctcccagggattgaagttagacacgtacagcaataataagttgaaagaacttatttacaccgcatatagcaacaacaggatgcccttaatatatagagaactcttacagcgcaagaaaataaaaaggcaaacataccagtagaaaaatgggtaaatggcaacaggtaattcacaaaagaagaaatacaaatgtcctctcctcccgccaccaccccccatgaaaaagaacgtgtgacttcagtagcaaaaacaggtccattaatacagtgagatattgcttattgtatgtctgtactgatctatactgggtgctgggcaaacgggcattcttaaacactcctagtagggaagaaattggtacaacctttccggaggacaatttaactgatttatttaaagcccgaaaaatgtacatacctttaactcagcagtttcgttactgatttatcttaaggaagtaatttagaatctgtgcctaactgtttacaataactcatagatgaaaaaggcaaaacaaaacacaagtaacctcaaatctccccatgtaacagtttgcttaaacactatagcgttattttacgcaagctacagaagcattgttgaaacatatatttattaggacagaaaaaaattcatgaaatgttattttatcttcttttttcttaaaatggaacttaaaaaaaatttttttaactccaacctaccttttacaccatctgcagagctttcctctcccaaatcaaagctactcctgttcctacctccaggatggaatccccaccttcgtatgcaagggtcttcatgatatggcctcagccaactatcttagctccaggtcacggccccatcttccatatcctatgctgcttgcacaggaagcagctcgctaaccccaggcacacctgctttcatctggagcgtctgcccatcatgattcctccccctggtcccttcacctggaaaactcctattcattcctcaaagcccagttcagatggcacctctccatgacttcatcagattccctacagaggtgctgattttctggtctcttgtgtttctgttgtaacacttaacatgctgtattataatgtgcttattttatttacaagtttgttacattgtacgtgctcgaggacaagcagccggtagtattcacctctgtcatcacagaagctggcgtggagccctccacatgagggcactgatgtgtttgctgagtgactgggacaatggtgggccacgtgagccccgaaactttcagtgggctctgaaagttaagaaaagggcattcagtactgaaatcacacaaaacgtaaatttaatgatataattgttccgaagctgctctataatttggcatgaatggagagcagtttacaaaaatgacaacaccactgttatataaacccaattcttaaataggttttcttctcttgctttgtatttcctcaagtgggtgatacttaatacagtggctcatgtaatcttaattactacatatgaggacacggacatgtacatatgatgctgattactgttatttttggaagtaaaaaaattgtaaaatttga

SEQ ID NO: 11779 - DNA, 231 bp, Homo sapiens
ggtggatggcttggacaatgaaaggatgctgtactcattagaatacaagattcctttactgtccctcaaccttgaccaaatgggaagcattcccccttgtcaacacaagctggcagatacatttgactctacagatgaaggtgaacaatgttagaataaaattgctttggatcttgcctggaaggtgttttaagttttgtaataaacaagatgatgtctgaaaatgtgtaa

SEQ ID NO: 11780 - DNA, 279 bp, Homo sapiens
cctggctgtgtgccaagactcgaaattcggtccgcacacaacaggacactttctctgccagctttcaagatgtgatgcagaggccaagtctgacgaattgaagtttcaattaaaatttaatatgtttccattcctcatcgcccaccccacccccgcccccaccaccgcccaagttctttttccatcattataattcatcctcattatcttggtaaaatatttattaagtgactttttcagaaataaaaggcaacgtgtctcataaatattttttaaatt

SEQ ID NO: 11781 - DNA, 994 bp, Homo sapiens
gttttatgtagttaaatgcttcctagaaacctaaataagatctattaatttctgacgagaggtgttcttctagaattaattacttttatcttttgtcttcatttgtggccaaaattatgtttactagaggaaatttgggatcattctcagctaattccaaaatgtagtgctctattgcatggatccttggtaatcctcaagcatcagatgccataaggggaaacttaattctgctaaattaatgtttattttgtgagaagtgactttatcttcatttggggtagaaaaattatttctttatgtagtagagacaaattattctcattttgcaagtactttcaatttaagctacaaattgagaaaaccgttataaataagaataaaataggccaggcacagtggctcacacctgtaatcccagcactttgggaggccgaggtgggcggatcaccagaggtcaagagtttgagaccagcttggtgaaaccctgtctctactaaaaatacaaaagttagctggggctggtggtgggcatctgtagtcccagctaattggaagggtgaggcgggaggatcgcttgaacctgggaggcggaggttccagagagccaagatcgcaccactgcactacagcctgggcgacagaacgagaccctgtctccaaaggaaaaacaaaaaagaagaataaaataatttggatgaaaatcatgtttatttaaatagtaatgtcatgagactattaaagatgtgccagagtttcaatgaaaatcattaaagtaggacagctaagaaattaatattaatatcaaaattattgataatcttaaattattgattattccttaacgcactccattctccttttacattttatcatgtttcttttgaatatatgaattggcaaaggacttgatgaaactgagtactaagatttggtacagagtatgtcaggaagacaactcagattgccattttaaataaagttgtacatgaac

SEQ ID NO: 11782 - DNA, 4076 bp, Homo sapiens
catcactgctgtggcctcatactcttttttccattttctacaagaagccttttagtatatgaaaattattactctttttggggtttaaagaaatggtctgcataacctgaatgaaagaagcaaatgactattctctgaagacaaccaagagaaaattgcaaaaagacaagtatgacttttatatgaaccccttctttagggtccagaaggaattgtggactgaatcactagccttaggtctttcagcaaacagcctatcagggccatttatcatgtgtgagatttgcattttactttgctgactttgttgtaatagatcccattcattgtcccctttggggtatttccaatacttgaatggcagattggagtttttcagagtatgtgtttcatctgctagtctttctctccttcatagcttttcttttcctggacttgctccttttgagttgcttttgcgtttctcatgcctaggcaagtgtaatagaaattatgtagctccttatgttggcaaaggagctctatatagtttcactttgtataaaagttaggaccagctgttgttacatgtaatattttagttcagaacttgacctgaaggaagggaagaaaagtatgtgatttttaccttttttaacaaatgtgaaaaagtcagttttagaaatttcgtggtagtaagttcggcatttgttacatgtatagagagaagactaataatctctatttataactaaatcattgagatagaaaaagattcccattgactgtagacttcttcccattttgtcttcccttctgcctgtttccccttcaggcttggctctaggaaccaaagtgatttgttgttgttccaacctgggctttgtgactttggttagtgccactaccttcttccctcctttcccccttcaatttggaaataaatttctgtatatgttgcaattttaggtttaggtttgttctttttctttttcattaatcctctctcacctcacagataccccctcccatggcaaataatataataaccagtgaattttcaggaatttaaaaattagcttttttccacttaaaggagaaaaatatttgggactagcagcagaggcagtaagagatgtgaaccttggtgagctctgatacagtgagaagagattatactcatgaaagagaatgttagtgttacagagaagcagccgatagcaaatcgactgtagagacttggcggcggtggcattgccccaggtcgtcagcagtgtggtattatctatgagaacttgagcgacagagtatttcttgatgaatttatagatcatttgagatgttgagttactttagtttagttttgttttgttttttcaaataagtagagactattgtaaaaaacgagaaaggaaaatgaaatgtgcgtgttgatagcaataatttgtttcttttaaagattctaaaaggtctgagacctgtagcattaattatttgagtgccctcccttctcccctcccctcccttttctcttctcttttttcctctcctcttcttctcctttattcattgttttgcttttggagtgggtgttgttcaagtatctgtggtttggttctggcattttgttcccaccatccccttcccccattaacttcccccctgcttgccatcctgcagtagtataaatcatgaataaaaaataattttgctgttgtagtatacattggagaaactggcaggttttatttccattattttatttccactatatctatgataagatgcaattataaggagagaagtgactgttttttattgataaggcaagattttcagaaaaatgagtaaaataattaatgaaacatatttagagcacttaatggtctctgttttcaatataattcttgatttcatttttctctggaatatattggccttctacagctattactgaattatagaaactggtttatttctggcagaaagctgcagtgccacctgagttccaaattttaccattctttgtaaacagttggatggattatgataaagaagatgctaccaatgaaatagaaaaccaacgagatgagaagactgtgatcctcatgtactcagaggcacttccctcctaagtcaaagaccatcctcactgactatgtgccaacgcctcgtttcaggcttgtgactcaacaaagggcttttccattgatagaagcagtttgggatttgtagttgcgacttcttcgatagttacctgcacgtccattgctggcaactgacttgtcattaaaacctggctctttggttaagggagctacgctgtggtttattcttaagttacgtggataaactaacctctaacagaaatatactttggttaattttgaaatgtgtcatttttaaacaatcttaaaagtaatacagaattgtgatttattaattttaaaacattcagaacttgttgaaagaaaaattatatctgaatcaagattcatgttttttatttttattttttttgatacagagtctcactctgtcactcaggctggagtgcagtgacatgatctcagctcactgcaacctccgcttcctgggttcaagcaattctcatgcctcagcctcctgagtagctgagaccacaggcacccgccaccacacccagctatttttttgtatttttagtagagacagagtctcaccacattgcccaggctggtctccaactcctgagctcaggcagtctgcccaccttggcctcccaaagtgctgcagttacaggcgtgagccactgcacctggcctcatgttttttaaataattgccttttatatttaccctttttgtcatcactttagaatgaaaattcccatttaaatctgaaagttaccttaatagtcctcttgtgttattaggacagtattattatagtacttatttattttattttagatttaaagttatcttctctttttcttttttcttctgctgcttttagggacaattaaaactgggaaactatgaaacatggaacattttatcctacctgaaagtaaacgagtaattgtgaagcataagacactgaggctaatacaactctgtcttcatgtgttgactgcctggcacatagtattcattctcttccctttaacatagaagtgtccagctgcgtacagtctagtaaccagcaactgtaaacgaacctgtgcctctaacaagcgattctaaaccacctatgagtatttcttttagggctcacttaaatacatgtttgtatatactgtattctagccagaataattttagatctgatcaggtagtagctaaaattagaaaaaaacaaaatagatgcttaaagaatttgcatccatttttgagtctaaatcttttaaaatatactgagatccacatctagtgaaatgtcagtgtcaaaatattatagattatagctaaaatccagattaatactcatttggggttttttatagtggaacttcatagtaatacaaaaagcagattgtcttcctgtctccgctgctcccacagtaggtattgaaactggtaaaatcagttttttgatagtgtgtgtatataagaaaaaatagatacacacattcttttttctcagtcaacacattgattgaacactctggcaaagatgctgtggtggatgaggttggagttcgaaagaagaagcaagcgctggcctggccttgaaagaaccgaagtctttcccattcacttctctagaaagctgccaagacagaggcagaaagaaatggatgatagttctgtcaagcacacttctgttctcttagaacttagaagtgtttctaagagaacagaagtaataagagaaacagttacgtgtggaattcaacatctttggttggaacgcattggctttttttttcttgttttgatagaaatggaattaagcaaaagtagtttttgtcttttctgttgtcttcaaattttatgccttttatttttaatttaatcccgttcaattatttaattgttatacattgacattaactgctgtattttgactttgttcaataattttgttctttcagggctagaaataaacttttt

SEQ ID NO: 11783 - DNA, 305 bp, Homo sapiens
aactcagcagggactctgggaagtctgaccaagttggagcagatggtttgttacttgaatctccaaacacttagttgaatttttacagatatttcagatcagtggtgttgggccactattgttacctcaaatttattttttgcccttattcatttctccagctaccatgtactattgtttaatgttcagtttggtttcatttttaattttatggttctgtgcgtcccccatatttaatatttattattcaaacgcatgcatatagacagagcatgcagtgaagagtattaaaaaaaaaagcttag

SEQ ID NO: 11784 - DNA, 2404 bp, Homo sapiens
gtcccatgtcaaaggaacttttgagtgatgactctgagaagttgaattgcttgaagagttcatcacggaaattcaagaaactttacttcaaaatattcacaaggctaaataactcttatttttatttttgaaggtttttttttttaaaaaaaaaaacgtataaaataatgccctgaaagaataatagggattatacctgtctgttcttaaagatttcatggttggctcagacagaacaatcatctgtttgacttctttggttcctcatgcagcagaaggaagacagaaagatagaaattgattatttttatgatagcagtattcaggatctcatcacctttgcccgtgttttagactttgtcatggtaaatcctggtcttcataaacatgagtaggtcccttggttgctgtcacttgccctttaatagtgttgatgtagtcagtgccgttgccttttcttcattagagacacagaacaatgtattagaatttccagctgtgggtttgaagacttagggggacatccagaacgtgcttcctctttcagacggtgtaaagtcccctggaattacacagctttagtgctgagcttttaacaggaaatgtggccctaggtattagtcttagtttaaaatgttggtgtttagagactgtaaatgcatattcacaaagttatctgatagggccttggaggagaaggtccagttttaaaaaatgacagtttgtgtttaataaatgaaggcatgagaggaagtaagtagcaagttgaaggacaggtagttgagatgaaacacttcaaaaccctggttatagatgtactgtttggatgtagcatagtcttgagtctagcgtccacaaagaattattcaaatgatatttagaagaattataactattacattgaatggagtcccttggatattttgatagtaaaattaatagccataaagtcctagacttcttatttgaagttaaaatttcttatttgaaaagttgaaatttatgagctttgaagattgctaaattaaataatttatagctccaaaaacaaaaatatacttgtatatgtcacagagaaaaaaaatgcaaaatttataatagagttacattaaccttgttgtttacctttcactgatttcttatatggtataaattaaagttcaggcatttatggggagaaaaggccctccccaccgacccgccacctgccacctctgacggagtgggagaagttagtctgtgctaagatagtactgagtccccagatgttgtatactgtaaattacagtataatgccaaatgcagcaaaatcttccagctgtacgttacaagtttggtcattttgaagcttgacattttagtttgccattatgttaaaaacatctaaataggtgttagtttctcaggagtagattgttagtgttgacttttcctgtaaagcagacatcgttcttggcctgccctgcattgtatactagatttcattgttgtctctcatgcttcttgagttgcttcatggtttatgctcgccatggaaagctatcagtaacagtttcatgcttataccaaagaattaaatctgatctttaatatctgatattttcctggtactcgtactgataagggattattggaagtcagtcacagaatttggaaataaattctagtctctccttagctatttgatgcttttcatataggccaagaactcattgcaaaacatttttgcaaggatgaatgcctgtatttggtctaggaacagtacattttagtctgatttagaattactggtagcttattttaaagcaaggaaaagcagctgagctcaagtttgctgtctttagaatggtttgtgaaaatatggtataaaggtgttttcattttcctgttcttacctattattgtatagagctattcatgccattttttgggaaaactttaaaaattgccccaaatactgacattgagtgcattaaataacaaattatctttgatacattaaacttttattcttcatgcatctgtaatttaattttaagtataatgttttgcctttggtacaactaaattaaaactcttggtggtcacatattgtatataaacaaaacaatatgctttgttgaaggaaaattttctttattggaatgtggttgtaatccttgttcagttcttaagtttcggttttttttaaaaacaggatgcaacttaaacttttctttgcatcaaggtatatgcaaaacattggtgccgtgcatcaccaaatgaaagtttgtatttaacgaggaggtgctttacactgtactttttggtgttttttggaaaagttacatttagatctattctgaagctgttcatttttaacaaataaaatgttacaggtttcacatgatttattctcagctct

SEQ ID NO: 11785 - DNA, 114 bp, Homo sapiens
taatcctaaaaagccttggctattcatcagacatttgttaagcacagtggacagacatttcttaagcattgtgctagatattaaggatacagatataaagagtccagtctctac

SEQ ID NO: 11786 - DNA, 75 bp, Homo sapiens
actaacgaaaaatcaataaataaatgtggatttgtgctcttgtatttttaagtggattaaaaaacttactacctt

SEQ ID NO: 11787 - DNA, 486 bp, Homo sapiens
ctgtcactttggcatcctctgatgaactcacacatgcctcagtgcctcagtgaaaagaacagggatgctggctcttggctaagaggtgttcagaatttaggcaacactcaatttacctgcgaagcaatacacccagacacaccagtcttgtatctcttaaaagtatggatgcttcatccaaatcgcctcacctacagcagggaagttgactcatccaagcattttgccatgttttttctccccatgccgtacagggtagcacctcctcacctgccaatctttgcaatttgcttgactcacctcagacttttcattcacaacagacagcttttaaggctaacgtccagctgtatttacttctggctgtgcccgtttggctgtttaagctgccaattgtagcactcagctaccatctgaggaagaaagcattttgcatcagcctggagtgaaccatgaacttggattcaagactgtcttttctatagc

SEQ ID NO: 11788 - DNA, 406 bp, Homo sapiens
cttatgtttattttacattggcagccttccttgtgatcaaaaaaggtaatcccagaaacgtacccgttcactcgtgggtcttaaaatggtttcatatctctattgtgactaattttctctcggtctactgccttttcaatcaggaatagatttgccatgaagccagtgaagtttttaagtgtctaggcttctcattagcgccaactctcctagacctggtgcctgttttttttccaagttttgtttctacttctatccattttttaaattaaactttttattttgaaataattatcacactcacaagctgtgggaagaaataatagagatcctgtgtctctttcatccagttttcctcaagggtaacatcttacaaaactatagtacaatagtggaatagaatatt

SEQ ID NO: 11789 - DNA, 70 bp, Homo sapiens
aggagataacatccagctttcctgccccacaccgtatctgaaataaaaacaacagcagggatagcagatt

SEQ ID NO: 11790 - DNA, 851 bp, Homo sapiens
acagatgtgatagagataaagttatctaacaaattggttatattctaagatctgctttggaaattattgcctctgatacatacctaagtaaacataacattaatacctaagtaaacataacattacttggagggttgcagtttctaagtgaaactgtatttgaaacttttaagtatactttaggaaacaagcatgaacggcagtctagaataccagaaacatctacttgggtagcttggtgccattatcctgtggaatctgatatgtctggtagcatgtcattgatgggacatgaagacatctttggaaatgatgagattatttcctgtgttaaaaaaaaaaaaaatcttaaattcctacaatgtgaaactgaaactaataatttgatcctgatgtatgggacagcgtatctgtaccagtgctctaaataacaaaagctagggtgacaagtacatgttccttttggaaagaagcaaggcaatgtatattaattattctaaaagggctttgttcctttccattttctttaacttctctgagatactgatttgtaaattttgaaaattagttaaaatatgcagttttttgagcccacgaatagttgtcatttcctttatgtgcctgttagtaaaaagtagtattgtgtatttgctcagtatctgaactataagcccatttatactgttccatacaaaagctatttttcaaaaattaatttgaaccaaaactactactatagggaaaagatgccaaaacatgtcccctcacccagactaaacttgatactgtattattttgttcaatgtaaattgaagaaaatctgtaagtaagtaaaccttaagtgtgaaact

SEQ ID NO: 11791 - DNA, 998 bp, Homo sapiens
caaccaaggaaagtcttccccagtccaaggagcagtcgtgtctgacctacattgggcttttctcagaactttgaacgatcccatgcaaagaattcccaccctgaggtgggttacatacctgcccaatggccaaaggaaccgccttgtgagaccaaattgctgacctgggtcagtgcatgtgctttatggtgtggtgcatctttggagatcatcaccatattttacttttgagagtctttaaagaggaaggggagtggagggaaccctgagctaggcttcaggaggcccgcgtcctacgcaggctctgccacaggggttagaccccaggtccgacgcttgaccttcctgggcctcaagtgccctcccctatcaaatgaagggatggacagcatgacctctgggtgtctctccaactcaccagttctaaaaagggtatcagattctattgtgacttcatagtgagaatttattatagattattttttagctattttttccatgtgtgaaccttgagtgatactaatcatgtaaagtaagagttctcttatgtattattttcggaagaggggtgtggtgactcctttatattcgtactgcactttgtttttccaaggaaatcagtgtcttttacgttgttatgatgaatcccacatggggccggtgatggtatgctgaagttcagccgttgaacacataggaatgtctgtggggtgactctactgtgctttatcttttaacattaagtgcctttggttcagaggggcagtcataagctctgtttccccctctccccaaagccttcagcgaacgtgaaatgtgcgctaaacggggaaacctgtttaattctagatatagggaaaaaggaacgaggaccttgaatgagctatattcagggtatccggtattttgtaatagggaataggaaaccttgttggctgtggaatatccgatgctttgaatcatgcactgtgttgaataaacgtatctgctaaatcagg

SEQ ID NO: 11792 - DNA, 233 bp, Homo sapiens
catagcatggctgtccccagagcctgccattcacgtttgccaaggaagatggccgacactctctgagtgtgttcactgttggctgcattggacaatcacatacaaaccctggcatgtccttccagaaaaaccagcttatcatctatcaagctccaaccccttatacagctcctctggtggaatccatgactcatatgtttaacctacaataattcagctatacacattcctgt

SEQ ID NO: 11793 - DNA, 2566 bp, Homo sapiens
cccaccagccagggccagggctgcagcctgaggctcaggctgtgctggcataagtgctctgctcctaggtgatggcgtatgtttgtgtataaggtacctatcagtttgtatccctcccctccttggggtggcttcagtggggtggagagtggcctccatgatggaagatgataggggactcagccatcagacaacaccctggcctcctacacgtacttctaccaccctgaacccactgctgccctgggcagtgagtggcttgttttttctcctggacttgtaatttcactccagtatatttttacttcttcattctgggatattgtgaaaagcggtaaatataggattggtgaccaattgggtcaggaagtccagtgttctggacttggggtaagcagtggggttgggacctcagatgggaagggtggtgctaagatcctcctgacctcaaagtgtatttgcctttaagcgaacaaatgctggggtccttggggaccagcttgtcagagggtagccctaagagaaggggattaccttgtaagaccatctggcgcagtggacctattagaacttgggttaaaaatgtttaagaagctaatgtttaagaagcatttgggaaagaaaaagaaataaatgtatccagataggaaaagaagaagtaaaactatttgcagatgacacagttttgtatatagaaaatcctaaggaactcacacacacacacacacacacacacgcacacagctattagaactaataagcaagttccgcaaggtttcaagatacaagatcaatatacaaaaatgaattgtatttctttatactagcaacaaacaatatgaaaacgaagttaaataattccatttataataccatcagaaagaataaaataggaatcaacttaacaaaacaagtgcaagactgaaaactacaaaattggaaagaaattaaagaaggcttaaataaatggaaagacatcctgtgttcatggatcagacttagtattgttaagatggcaatactatcctaactgacatgcagattcagtgcaatccttatgaaaatcatagctggcttctttacagaaattgataagctagtcccaaaattcataaagaaatgcaagggacccagaatatccaaataagccttgaaaaagaacaaagttggtggattcacacttcctgatttcataatttacgataaaggtaatcagctcagtgtgttactggtttaaggatagacatacggagcagaataaagagtacagatatgaacacttatacttacggtcaattgatttttgacaaggttcccaagacaattcaatagagaaaggagagtcttttcaacaaatggcaccgagacaatgatatgcaagtgcaaaagaatgaggttggacctttactcacactatgtgcaaaaatcaactcaaaacgcatccaagatctaaatataagagctgaaactataaaatcttagaaagaaacataggcatagatctttgtaaccttgaattaggcagtggtttcttagatatgataccaaagacacaagcaaccaatggaaaaataggtaaattggacttaatcaagatttgaagcttttgtgattgaaaagaccctatcaagaaggtgaaaagataacctgcagaatgggagaaaatatttgcgagtcatatatatgataaggggcttgtatctggaatatataaataactcttataacacaacaataaggagaaaaataaatcaatttaaaaaatgggctaacggtttgaatagacatttctccaaagaagatatgcaaatggctactaagcacatgaaaaaatactcaacattattattcattagggaaatgcaagtcaaaatcacaatgagattccagtttacaatcactaggatggctacaataaaaagatggacaagaacgagtgtcggtgaggatgtagagaaactggtagaaatttaaattgttggtgggaatgtaaatggtgcacctgctttgaaaaacagtttggcagtacctcaaaaagttaaacgtagagtgaccatatgacccaggaatgccactcctaggtatttacccaagagaaatgaaaacgtacatacacacaaaaacttgtacaccaatgttcatagcaacattatttgtaatagccaaaaagtggaaacaacccaaatgtctaccaactgatgaatgggaaataaaatgtggtctgtccacgcaatggaacattattagactctaaaaagaaatgaagtactcacacatgccacaacatggatgagccttgaaaacttgctaagtgaaagaagccaggtgcaaaagcccacatattgtctgactgcattgaaatgcaatgtctaaaatggacgaatctatatagagtgaatatagattagcgtttgccagggcctggaggctgtgagagatgaggcatgactactaagggtttggggtttctttttcgggtgatgaaaatgttctgaaattagtggtgattgtgcacgattttgagaatgtactaaaaaccaatgaactttaaaaaataaaaataaac

SEQ ID NO: 11794 - DNA, 1480 bp, Homo sapiens
tgtgggcttttgctgacttttcaaatgcattgattagaataccgtacttttggttgccacagatagattttctatttataaatgcccaaggaaagatgctaaattctaaatattacggttagctgatattcattcttttctgcttttccagaggggaaaaatgttacaaaatatccttacttggtcagttgcctcctgcctctaaaacatctctctctaaaaatactgacatttcacacaggtaccagctttgcagaggaggtagactctttggcactttggcacagggatttggtttggtttggtttggtttgataattaaatttcagaatgtccttaggccattctccttctcttccatggagaatccagcctcacaaaaggattctttcaacttctttattgcaagaaacagttgagttaaatgtttgtttttggaaaggcgggatgtcagttcacatccttggtgtgtgtaagtaccgatgcacgccaccaccatgcctgtgttacagcagctccatgatggttgttgcccgaggttaatgtagttgtttgttagacctgtgtcttacacatttctcagagtaggatattagtattataatttaaagctacgacagtcacaaagtcacaataacttagaaacattgcgcatattcttctgaaatagcacttaaaaatgattagtgtcagtattttttcacttgggtcaatcaaatctgtaacactgaatccaagctattaaacaaaaagtatgcaatgaatgaattttgtaaatgaatagagagtatcagtttacaataatgttcttaaaacagtatcctctggatagttgagtatgggttagaaatcattgaaatggattggtcagaaattgctatctgtgtaaaatgtctaccagtagccagatgcttccagagttcttaatgcctctctggcatttcagagccagcatcccccaactcccacccctctgccatcacccaacccaaacacatcagctttcaaatgagatgatagtaaatgcggcaatgttaagacaagaaatttatgatttgccagattcaacatttatgacctccccttccaaagactgtctccgttgaccttgtctttttggtatgccttggggtttctgataatgtgtggagtctcattatggctgagagtttagtgttttcacagtgaagtgcagacatttgatttctttatgagttccctgtgttagaaatggctatagaaaaatttgtcataataatttcatttgcatgaaatcctgaggggtgcattaaggaaactaaaagcaccacttaccaaatctatcggcagaactgatgtgaggtaagtgagcatgtcaaacaaaataggagctcacatggatatatttatgtcactgagttgtcagaaattatgtcaaaatgaaaactgtttgtttcatgacaaattatatagtctataaattaaactggaagtaattatt

SEQ ID NO: 11795 - DNA, 4925 bp, Homo sapiens
cctgcaggatgggccgcgccgccgtggcccgctgtggctcaccacggcccagggtggccttggtggcttccacgtgcttcccagtgaccctggccttggagggcagaggtccgtctgggagggtgtgtctgtgcagagctgaggcccgggcgctggctgcagctcacgtccagccatgggaatcccacggacctctcgcgtgtcaacagacgaccagaggagtgctggagctccagcagccccaaccacagcattccctaacatggaggcaaaataccacatggcttctcccgcatatcgtcactggaaacttcctctctcgacattctctctacatacgtatatgtgtgtgtatatcgatgtgtgcatatatacacatgtatacgtatgtacgtgtctgtaggtgtgtgtatatatatatatatttatgcatctatatacatatactagatctggacacacgcatactaagtgtatatagtatctcctttttctttttatgaaacttagatttacctcagatccatgccaccaaacatctcccaccgagttatttggtgggatttgcagggacttttctgggagaacttaaaggcccatagtaactgcgaatgaagcaatataccactaacctgcagaaaaacacaaacaaaaacagactcccactgtctccagaagtcgtggccttccagaacagtctgcccctcaaggaagggtggggcaggcagtacccccaagcaggctgctcccagaggtggggaacccttcataggaaatccccacccccgtccaccccagagaccctgcccttccacccggaggccaaaggccaactgtactcccaaaggcatgggagaaggttggcgagaagacccctgactaccacatccttgtgtttgtgtgtagagacgggggatagtgagaacctaagccccatcgtagcacagtattacatgtggttgggaaaaataaaaatacagtggtgtggaatactccaaaacctagaaatgctgtaggaataaatctgtggtaactatagaggtttaacttatatcattttcaaactatttaattttttcttttcctggttctactaattatactgtgtcagatttggaactaaacaggcaaggaggctttgagtcacatcgttttcattttaaatcaggctgtgatgcactgtggctggtgccgtcttgcatgaaacgcatgagccgtgagcgcccagttcagactggggccagggaggggcagtccttggcactttctgtcctagaggacactgtcagttgagttaatacaagtgacatagcttcccttccctcccccttcacccactccctccagaacatttagtgtagatgaaaatgtggtgatagaaatgggtgcatgatcttcacgtgtgacagccaggcctttgcctcttggccaagtaaagcccttccgggtcgctctccttcgattccattttacctcctcttctgatcacttccagagatgagctgtttctggataatggcacacgggcaaatctgtgtgccctgtgggccgctgttacttaccctctcctgcgagacccaggggcttttccctactgttcccacgcttcctctctctcgaggccactgaagtttggagtcaaaaggcccagagtctgagtcccagccctgagcacttaggagccttctgacttagggtttgtcactccacctcattgagcctgactgttctgctccataaaatagggtaataaaggtcaaacatcagtgagcaagctgtgtacactggaaaacactgaatcaatacaatgcgtttgtgattatcattagtaaggtaagtcttagatcagagccctccagcccttctttttgaaacctcccaatggcatttcagaagtgagcagtggaattttcctgccatcctaataagagccctggattccatcattaacatttcagcccattggatgaagtggtgccctctcctctggtcccccgcgaaaaggtaaatacacccaaagggagggacctagttaagtcactggcacctagataagttaggagggtaaagccactacctcgtctgaaggactggacttgacaccccacagtggaagggagcatcaggagaggaacaaaaaaagggatctcagggagaggccagtgtcaaacttgacctcccttgtttggcctagaatgaacccttctctttagctcctggatatgaaaggccatctgcttggagcacagaaagatattgccattttacagcttaagagagtaaggccttgggctgtgctgtgacctgcccaagatttgacactggctaggagcagaggctgcgtcaggctcttaaagtcatgtgtttgcatgctggatgctatactgtccagccaggacacaagacttctgatttctaccctcaagatactcccagatcctaaatccagtagcctcccaggcaaaatatagcaatctgccacaactgccagatgaaaagcaacaatcagagtagaaaaatctgttgcctgatatacataacaccaatcagaccgtgtggatttttctctgaattgactgattttgtttttttcttactgaaaatggacctgcctttcactgaattttctgagggcagagtcttagctgttttctttaagcaccttttttttttttttccattgggaaatggctgatgagttcacatttagggatgtacacacacagatggcagacgtctccccactcatccagccccagatctgagccttgacgcaggccaagtggaaaaatactttcccgcccccctcccctgttcccacttcctcatctggcactatgcatgtctcactcaccctccacagcactcagtcccatcgacgttcactgaacattggctttctctttctgactcctgcctgttttagtccactatatattgctgtatttgcttaaatgctggaaagtaactgttaaaatgtgaaattgtaatttttaaaaaggctacaattaaattttagccaatgccactcaccaaatctttgcacctagtagatagatcaatgtaaaaacaaatacctaactgtacagtgagtgtgggggaaatgtagtaacctagttagtagtcttcaatataaccaattgtacaaggggaagtggtgtttacctacttgttcatcaccattattgaaagccgtactgatcagttagttgacaacgggcatttttttttctttgcttcatggaatgatttcttttcttaaccttcgacttatcctgaggtcaagccttttgtctttatgtgtaaccgacgttcagtctattctaggaatgaaccagcaagttgttcatttaaaactgaccaaagacaattaattcctggtctagtttcctgggccttgtggctcagctgccactaaagagctttttggataaaattgagaacaagctgtgcttcctaccccactctccccgtccccttttattcccttttcctcttaaagagctgctctgagctgtgggattctatgaaaaattcttgcctttccttgtttcagtgctaacgatttctcacctcgaagcgccttttgaaccccggacagagtgcacaatcggagggaattgcgagcttgggaattagactttggagtcttttctctgaagtcaccaggccaggggtcaggagagagatggattcccaagggatgaaaggtttctattcaatgaagaaatcggagtgggaagagacacagggaaattgagccatattttggctatcggctggaaccagcagttcagagatctgccttataaacatttaaaaccggtttgtggtacacaaagaggaaccagtgtgggaaggggcctttatgtggggctttcttctctgttggagtcccttggagtgccttgttgggtatatttctctgtcattcaggaggcacgaatgtggaggacttctcgtgacctggtcgtgatgtggcattcagtgcatgtccacagctaatggaaaaacacgaggactcgggtaatggttcttcctctcagtctttctattcctaacttttcacacatccagatggttccacactagtgcaaatgcctcactctcctgagaaacccagaaagaagagtggctggctcacaaccatggggttagcccctgctgggctgggagtcggggtggcggccaggaggaaaggcagaaaggggtgagccgaggtgttgcctagctgattttctgctgtgcagagctaatgctgacatttcatgtcaacttccccggttctctggggtctcctctcctctgagcagccacatagaacattccccacatatccaaagctgcccaggggagccgagagaagggactttgctgtcaggtccaagccctcctgacctccctgagattgatctgccagtgtcctgctgtccctctgggactggccacatggccatcgctgccccttgttgacacctcctttctgtgtgagttgtccccggccaataacaaagctgttccttgaaccagaacaaccagagtgcacttttccttccttagacggaagtagatcctggctagggtttctgcccaggcccttgttcccggcagtgtgactgtttacatggtttggcaataggtttgattctgattgcttcagagtggctggtctattttgtttcctttggtttccttcctccccaaattgtgacaggaaaaacagaccaaaaccaccctaggaaattgctggttgcctgtccccacgtgatgataaatgttgccctcttctggatatcgtttctctaccttacgaccaaacgcccgtcctatagagtgtctgattggatcctctgtcgcgtattctgatggtgcctgctggtttgacgtggagctatcctgtgaaataaaacagcttaacttttctc

SEQ ID NO: 11796 - DNA, 3849 bp, Homo sapiens
aaggccaggatcacagcccagtaattggcctgacctcagcttgtcctgccttctgccctctcgtcactccattcaagctctgagggaagaccctgatctcagacttacttctcaccgactaccctgcaagctccaggctttgaggagaggaaagcctggatgtggcctgggggagaggagaggccctccaaaccttgggagggtctaattcttgctcctccctcaatttgacctaagggagcctgcatctgcgtaggcccttgggcttctcctctcctctctagactggcctggaggtccctgcagatccccagggagagcggagctgtagttccagctccccaggccccctcagtctggagggctgccgcctggctgtatccgcacctcttctggtccctgcctcttcaagaaatttattctagatactgctccagggtgggctggactctttcctactttttttttttttcttttttggctgatgttggttccaccacatctgccacaaagctccaggtgccaccagtctcccctgggacctcctctgctccattccggcctgctcccagctcaccctgagggagagctgcaccgagggatgcacagggccctgctgtcagctgcagaccggggccctgatcagcccagagtcagaaaagactttcaggctctggaggtagcgggagggggtacgtggcctcggcagttggagcttagaagctgctcagcccgggctggcctggcctcctcttcctctctgctggaacatctcactgatgactgagcccttgaccttggcctcttttgcccaggcctcctctctgctgggatgtctcaccaatgactggacccttgaccctggcctgttttgtacagcacagacttcttggccctgttgtcagggttgggggtgtggaggggaccccagaggtggggagttgggggatgcattaccccttctgccccttttcatgccctccataccccaggcgtctaccaagggcagagactgtcttgtctctttgatacttttctgcataacttgaacttgcaggtcatctctgaacagggtacccctgtcccccttcctaagccttgttaccctgtcccagcctcttcctcctcctggcccacctctcgccttgcgatatgcccagggtctgcacctatgggcagtgcttggagccgaggcatgagtgtatgtgtatgtgggtgaaatgtgtgtgcgtgtgtgtgcgcgtgtgagcgtgtgtgtgtgtgtgtgtgttgggggacaggtgagaagtttctcccccctccacccactgtgggggcgtctcccttccccttggcagggagcaggtgagggagactcctggtattttttgaacacccgtcattcccctgtgggtctggcggcagagccatctctcccggggagcctccctgccctggggcctggacagctccctcagcactagttgctggtgcagaccggcttcgtccagcgccccctcctggcggcctggacctgcagggaaggggcggtgccctgcaggatgccaggggaagccgcctcgggcctcggcggaggggagagggtcgcttgagcgccatgtgtttgccaaccttgtgttcatttccacaggacttggacctgagagttagggtttccaagaaagaccctagaagtcccctgcctgtctccccactctggaccctagccggaatcagatgttgggacctagtgggttcctgccacctggaacttaccaagtcccgacttcactcctccacttactcctcccgggcaaagcctccccgcagtgctctggtcccagcgctgggctccccttccccgccggcgccttcccggacagtccagtcggcctggggtaggggcgctgcgggacagagggtccgagttaaatgcgggaggatgcgggagccccgtgggagggagttggggtaggagggagttcctcaaagatgcaaaccaagcccagcgttggagggggagagcagagttaggagagagtgaggggaggggcgcagcaagcgactgggaatgggagaagacactggggtgaggagaagaggggtgcagagacagggagatgagagatgattggagaaggagcgagggggacgcacaggcacagagaaacagcgcgaggaggagagatcgagagagacggggcagaggtggagagagatgagagaccagctgagaggctgcccgagagcttggggtgggggaggggaaatggatgaaaaggcggaaaaaggactcgggagcggggaagaggtaaatggagatgtgggttgggggcaagaatgggatgcagaggaaggagaggaggatgaaggagccaggatgcggggcagtggggagggggttgctatctgggcactgggtgaggggagagcttgttcccccaaggacgcctgccaccaggtgtccttgccacaccttgttccccaaggacacccaccaaacctgtgccctggtgcgggggatagaactgacctttcagaggctggaggcccggggcacaggcagccaaggccgcatccttttgggaagaactggagtgaaggaagccacttcagaggacgtagtgggtccagctgacttaggagtgggtcagcgccgggtggagaggagggaggctagttccctggtggggtagcctggcaacattcccattccaccgcacctggccagctgccatcttggcagagccagggggagatgcaccagggagtttggagtcaggaaggcagagttgtgtgggctgaagtctgcgggaaccccagggtgacacaggcaaggggtagaagtcagagtggggaccaaaccatagactggggccctgggttctgcagaggtgtggatggggcaggtggcaggtgctccagtgggggccccaggtgaggccctgatggccctcctggggcaataaagacatcatgggaagggggctttgtggtttgcctctgctctcgtcgggcgatctggctttagccttcaggaggaggtaagcagaggagatcagtgcctgtttctgaccccaggagggccttgttgggctccaacctagagccttccggcttcaggtcccaagagaagtccccccctaactgtgacccccctaactgtgatcaggggtctgccattgcccgcttttctctgcctgatctggggactcaggagaggccacggcagccacagcctaggggtggttcagtccctggcccacagtctggtcagttgagtccttctgggaaccggggctatgaaaactttcgtctttggggaccggtacccatgaaggaaaactttcctgagggggtgaggaccaaagaatcaagatccttttcaggcctgatagccaagatgatgagaacttttagataaggctgtggggagagtccctggccttttgagcatcctgcttgggcacacggggaataacctttctccagcttccagtgtgaactgagaaagagaaagggaaaccctgtctttggagaagctgggatgttcccagcaccagaaacttctgcaggcccctgcctggcccacggctaacctttgggtgggactggagtttcctgaacagggaacaagggagccttccgcagagctctgatgggcaggcctccgagggcctgtgctgtgtgctgttaggatagcttggtgttgtctataccccattagtaagttttgtctgagtgtgtcctcgctgttcattgtctaatttggtaacatttattttggtcctgaccccttctgctgctgctgggtttaagcttcagtgcaggtggaatgacattcaaataaagaaacactttctatcaccc

SEQ ID NO: 11797 - DNA, 190 bp, Homo sapiens
ggccctggacctcgggtcatgatcctctgcgtgggagggcttgggggcagcctgctccccttccctccctgaaccgggagtttctctgccctgtcccctcctcacctgcttccctaccactcctcactgcattttccatacaaatgtttctattttattgttccttcttgtaataaagggaagataaaac

SEQ ID NO: 11798 - DNA, 895 bp, Homo sapiens
gcgttagcaggatgcacagtcccgggggtggccttggaggctgtggccacggctagtcacctttcaggggttttacaacaggctttccaatcctggctggcctctaaatcacctggagagcctcgaaaaaaacagcagtggccagtccaccgggtatgtcccaaacaaattctgattccacagagtggggctcaggcatctgtgactgaccgattgatttgatttgtttttgttttgtttttttttgagagggagtctcgcactgtcacccaggctggagtgcagtggcatgatctcggctcactgcaagctccgcctcccaggttcatgccattctcctgcctcagcctcctgagtagctgatactacaggcacccaccaccacgcccagctaatttttttgtatttttagtagagacggggtttcaccgtgttagccaggatggtctcgatctcctgacctcgtgatccacccgcctcggcctcccaaagtgccgggattacaggcgtgagccactgcgcctggcctagtttggttttttaattatggtaaaggcataatataaaatgtatctccatgggaggctgaggcaggagaatcagttgaacctgggaggcggaggttgcagtgagctgagactgcaccattgcattccagcctgggcaacaagagtgaaactgcatctcaaaaaaaaaaagaaaaaaaatttacgcttcttaaccatttttaagtgtacagtttagtagtgttacccatattcacattgttgtgtgatttattttttgtcttttcatgcttcttttctttttatccccaaagttttgttattaaaaatttgatacacacagaaaatctgaaagaatcatacaataaacatcagtatattctccacct

SEQ ID NO: 11799 - DNA, 387 bp, Homo sapiens
ccctcacccctgcctcaggctgattatctggcctaggggaggggaagggaggcccacttccttctttgggcacaggaaacattggcctgtggctgtccctcaaatggcggcagtctctagagggccgtggcccttcccctgaggtcttttggcctagctctgtacaaccaggacacaggaagccctgctgggctagcctgaggcctagtctctgcttggtccccgagatggggttggaggggacttcgtttctgggtcttcctcttcccctctttaccatcccccactccctaatcccctacccctgtctccccttcaaggacttctcccttgtggttttgtaaagtgcaaacttaagaataaagtgactgctgtggtttttcaaaa

SEQ ID NO: 11800 - DNA, 166 bp, Homo sapiens
tcctccctctgttcctgaccccctcacacacactggaaagtgagggtgggggctctgcagtcagacaaacctaagatcacatcctggacaggccacttgcttgctgtgtggcattgggcaagtaactttacctctctggacttgtgataataaaagttcctacctc

SEQ ID NO: 11801 - DNA, 419 bp, Homo sapiens
aagcccaagtccttggaagctttccccagtgaaggactgactgggggcctcacgcttaactggtagtgcccacaagcctggcagctgtagagccgcgaacctccccacacctccctcaccgcgcaggaccctgagtgaggaggaggagctggaaacctggggtgggttggccaaaggagaacctcaagctcctggcctgatccagctccttcctgcccaaggcagcttagcccatccagactggtcctgaagtctgtccctccattggcatgaagtctgccccttagcaatctggcctcgcaggctgtactttcatggtgctctctaccttctggcccccatcccggaacattcctgagtgaattcgcaagcgcactagcatgtgatattagggagtttgcaataaattattgaggctg

SEQ ID NO: 11802 - DNA, 685 bp, Homo sapiens
agagcggtcctgacgcagggccaggaccctgcccgatgcccacatggcatggcctactgggacagttgagcctttaaaaaatgggcatcctggccaggcgcggtggctcacgccaggaatcccagcactttgggaggccgaggtgggtggaacacgaggtcaggagttcgagatcagcctcctggtctcgaacatagcgaaaccctcgtctctactaaaaatacaaaaaaattagccaggtggcacacgcctgtagtcccagctactcgggaggctgaggcgggagaattgcttgaacagggaggcagaggttgcagtgagccgagaccacgccattgcactccagcctgggtgacaagagtgagactccgtctcaaaaaaaaaaaaaaaaaaaaaaaaaaaaaaggcatccccaggcctctctacctgacggcaacccccgggggacagccaggtttgaactcaccccacccccatgccgttttttgcttttaatatttctatttttttttcagccggcattttgcacagaggccgtgtcttatgcggaatacagggtgggtgtgcatggattcgggcatgaagaacagggagcaggtgccccagactccccaacgtggagtgatgagcctcgcttgtctagattgtcctctttgtgccaaagaaataaacccttaggacttgg

SEQ ID NO: 11803 - DNA, 116 bp, Homo sapiens
agaccgagcagggattagctgtgtcaggaacttggagttgcacttaaccttgtaactttgtttggagctggcacctcttgaaataaaaaggaggatgcacgagctggcaggcatgc

SEQ ID NO: 11804 - DNA, 926 bp, Homo sapiens
ttgacacaggcagacgggacctgaaggggctgctggtccttctgaaaatgttcaccaggtagtgtgagtgtggggaagccatgaacaatgtgtgggactctaccctgcacctgctcagagcctcagcccttcagagccactactaatgatttgctgtgggtggggtcaccctgatacttctctgaggtggctttttcttgcagtttttctgagtaactgacaggaatccttgactgcatgccgcctaaactagggtgtgcacagccctcgttctgtgcaaagagggtgcaaagcagcagagtgtctgtgacccatttgccacctaatgttactacaagatttgcaagaaccggtcacttatcagtaaccatttttatttaaaaagataaaatagagctttgcaggaaagtgctgcaggctcccacgttgccgggcagacgacaacctgggcgcctcgcccagctcctccccacagccattggcatccactgtcaggtttcaatgttcttggacctcagggccttcgtcctctccaatctaaatgcagagagacatttgacatggactctctcaggtgttttgcaaaatgcaacacattctcattgactctggtcactctgctgtgcactacatgtcaaaacctcttcctcctccctgagactttggtcctttaactgacaacccccctcccattccctccctctgccactctctgacccctggtcaccatcgatctacttgctacttctatggggtcaacttgtttagatcaacacttctgggacctcacgtggaattggtctctctgaggtagtggagatgctaagtagtgggatttcctcattccacattgtaccccatgaatgaatacaagcatgatttgccaattgaagcaatacaataaagacagaagaaatgtaaaatgc

SEQ ID NO: 11805 - DNA, 211 bp, Homo sapiens
tgccttggtgactgtcaaataaaagcaagtatatactcagttctctccacacttcccacatacttaccaagcaaaaagcccatgaaaaatctgcagcagcctctgatagcaggaagacattatgtggtactcctgaactttcactcctggtccatcaactacaccgtgattctcagcagctaaacactaaaaataaaaatgattttaggac

SEQ ID NO: 11806 - DNA, 125 bp, Homo sapiens
tcgcccacaagccttactcacctctctctaagtttagaagcgctcatctggcttttcgcttgcttctgcagcaactcccacgactgttgtacaagctcaggaggcgaataaatgttcaaactgta

SEQ ID NO: 11807 - DNA, 328 bp, Homo sapiens
caagacaggtggggcctggctccccacccgccagctccaggactgccccttcctgggccaactaaccagacaactgggaagagcccccaactccaacaggattattttcccaggaggagttacagatgcagccacagattgatcatctgccttaacgtgatcggagatgctttgtaatctactgtccagctgaaagcactcatgttacgaggaagaaactacaagtgatgttcaaatctattttgggtcatttttatgtacctttgggttcaggcattatttggggggttttgtttccaaaggaactaaataaagtcatattgcttat

SEQ ID NO: 11808 - DNA, 2753 bp, Homo sapiens
ctgaggaccctctcgcctgcccgcccgccctcatggaccccgctgccacccgctttccgggcacccatccatccaggcacccaactcacccaagcagcaacgagcaacaatcggaaaccaaatactggagagaaaaccaacgtttccacccacagaccctttctctggctgcgatgctgtttgaactctttttcacttcaaggcaaggggcgggatctccactgggggcttacgggagtgagcggttttcccaaaacaagcccttcctggctcccacccagacatggaccagccatgcacccgcccagccaccacgtcccccgcatgaatgtactgtacactttcaatcctccccttgtttggtttttgggggttggggaggggtttttgtttgtttgtttgttttcttaggcgggaactgcaaacagactcttttctgagactatttatccaatccactggtctgtgagtttttgaaatgcttgcacagcatggtctcagttgtatagattaatttaataactttttgaaattgcagagcttaactcgcctagtagatttgcaccaatggaaccgaagaacttcatagacactcacaaggttatatccatttctttgtatctatatcaacgtatacttttccgagactgtatacgtccatatagataggtagatatatatatatatatataaatatatatacatggatatataaagtttctttgccggcatgttgccttgtttccgcttaaattgctctattttaacttatttatgtcctaaaagaagaatgtaatttgtttacaaacctgtagataacgtctttggctatttgtatggtttaagaacactggtggctgagatgctataaaaacagctcggcccaacagacacttcccctgggttgcatcctggatgttttatgatagccatgctctgatttttgcctgctatttccgttcaataatgtcactaccgtgagaggctcaggcagaagccaaatgctaccgagttgccatcctgaggggtttaacaacatgctccgtagacgaagggagaggaggagagaaggcttcctgggtttgcaacactaacggccatccggcccaaggatgccaggatctgcaaagcactgctcgaagacttttctctcaatgaaactcgcttgagtttactaagagcatttcaaaaataggttctctttggcactgtctgtacagagattgaggtagtgttgaaatattataaatggtattgtgttgatttttttttttatttagtaacttacaggtttgtttccttattaatggcagcatctgagctgttggcatattggatgaggatcagtatggcttgctgcttttatttttatttttgaagaagaatagcctttttctctgcactatttagatccgaatgaaccttatgatgtgtatattgagatgtactcagtgtgattttaaaccaaattgtcttcctgtagtcacaatatatactgtagccttttaacagcaagtcttgctttcccaaacagaaagccattctgaaaccctacagtatcacaggtgagaaaaggtggttattttttccccaagacaacagcactagtaatcccacttaataagagcttatttaattggatgtcagcctcttaactgctaagcactttgtgggtctcagcgtttttcataaaagaacttttgtatttaatacaaagtttgctttgagacttttcagcatatgatcttttttccataaacttgtacagtgcaaaagacattttgaataccatgatcgatgatgtcccatgcttcgaggaaaaccaaacactttccgcctctcttgcaaaatccattcctcatgctgaccctcctcacgatggctgtgtcagcccagccccttcccttctccaggcccagagaactcttccacaaacaagatgagagccactcgggaaaagagccatagtcaactgggagggcctacatctggatggcggtggaaaaacttgagggtttggggttcaaagtcagcccatcccacctggcaaaatcctcctggaaggaggaccttcaagagcgcatcacctgaatgtcgtgaagaagtatctctgaatgtatccaggagaggaactgcataaccaaaggggtgaccagccctcagatgtgcttattggattccagtacaaacgccaccaaagccagcccactgctctcctacaaggaaggaaagatctgcacgtgtaaaacatggggcagccttggaacatggtgttttttggagtttcctttctcacagttttccatctccccacttctttgatcagtcatgtgtccgtgacctcgttccatgacatcaggatagctgtgtttgcacaccatgctccatgttcattcggagccaggaggggttctcagtggagcctggcttagggaacagggagcgatggaagaatgccaacattagcgttggtcttctcttgtcaggaatgaaggatgcttgcacacatgcaccccctcactctcacacttgcacacatacacacacacacacacgaaatggttggtttgtcaaaactcactgtagtacataaagcttgcactctgcgtcctatatctagcagcatggggtacgtttggcagttcactccattagggggtaaataatttatgaccattcatctgtttttatgaatttttttatctagacaataatgtaaataaagaactcaccatctctgttcatttaatact

SEQ ID NO: 11809 - DNA, 2486 bp, Homo sapiens
agggagcgcctcctccaacaacacgtggatctgcatggtttgcctgagctttgaacagtcagtacttaaaaaaaaaaaaatcatgggggtggggtggggggaagggaagggatggtttatttgcaaaaaccatgttgttgggatttgtgttctgtttttgtacttgcttggtatccgtacaagggggccctcaaacatgatagcaggaactacgcgtggaacatctgtctaatgtagcatccttacttcctgcctcagttaccaaagaaacctctgatgcaggtctgctgccccgacggggccaggactccacagcgctttctcagtcacaagccatgatgaattggtgactcagacgctttgtgctttttcctttgcttcttgagaccggggtgtgtgtggctcagcttccacggcgtgtttggttcggtccatgtgtgtgcgtgtgtatacttgaagagaactgtcgtgtctgatttgcactattggaggaggactaaagttgcctgacaactttatgtgttatgccagaactctgagggcaaactgctgaaaaacaaagggtttaaggatgacatttctgaccatttgtgtgtttgttgttgttactgtttttgttttttttaatgtagacaatacagctttggaaggggaagtctcatacaggttataggtctttctctctctagatttcaggtgcttgcaactggactgcagactctaccaatcacgggcattttatcttctctgaacactgcagtttgttagactagagctgaggttggaggattccatagtgctttaaacgtgatgcatgttttaatggagaaaaaatagctggtttctattaattatatagacagtaaacaaaaaccttaatacttactatcttcttttcagaattagtttatttttgtcagttacagtcctagatatacttactgctggtacagttgtactctaagattggtatttgatattcactttactcacaagtagtgcgggaggccagctcctggcaggccctcgcgatgagcagtgggtcagctgcggtgtgggatgctggagtttggctgcaggctgacatcatttatttttgcatccctgtctgctttgttacaagctcccaggggaggtggggtttgtgtcttccaacttccctacatgcagaaactgctccctttgaactctcttggctgaacagcagattactgacagacaatctgtgatatggtgttttatacgcttcctcgtacgctggggccaaggcagtatacattcctctgactttatactgttattactgcatttattatttgctatattaatagctactaactagaaattagatgaagcaagcatgacagacacagctgtggaggtcacagctgctcctttttggtcaatgagcgtttctatcccctccccctggggtgtgctgtgtcccacctggcccaccagaggctcacgacgatggcacctgaccaggtgacgtgggcgtggtcacctcacctgcaaggctttgtggactctgcacaccgtatgacccccggttttacagtttttagctgttgaattttggaaattggcactgggtgaaaaggtcggaggactggctcttgtagtcacagagtggctgcaggcctttgaaaagtggaggaaagaaaagcccttctccttgccccgcacacatttcactcccactgtactgggcttccaagctttggcattcaggcccctatattttctgtaggaaaaatcgttgagaacacttttctatatgggtgattttgagaccatcgttacgctgtgcgtaaagaatgtacagagaaatttgtaggtattttttgaagaacattaatttgttaatgatatgtagctatttaatttttccctttcctattgtaatcattcattttttttgttgttcggaaaaaaaaagttgatctttttttttgtcgtagatttgtctgtaaaagtgcaggaacagttattctatgagaacactgcatctgcattcatagccacgagtttgttattgctacaggctactgagcgtcgtaacaggaaaaccacccacagctgaccggctcggtggaggacactcctgggacaggtctctttgtcagtgaacaagggcgtcactctgggaggggtcggcggtgctggcggccgggtccctggtgcactgacctatctgggataggcagtaccctggaggggggcctggggcagaggaggcagcagaaaaccaaacatttcactgagaaagccccctccctgctctaagaaggggctccgtgaagttcttcccagagccgcgctgcctgcagtgcgctctgaccttctcttcatgtgtgtaaatctgtaatataccattctctgtggcctgtttttcctggaagaagaaaaaaaaaggtttggcaggccatctttttttgtacttaaaagtagccttaagaacaataataaagtgctcttaaacc

SEQ ID NO: 11810 - DNA, 59 bp, Homo sapiens
ttttgcttgcttttatatatgttatgtgtagatgaataaagtgtttgatcctttttgac

SEQ ID NO: 11811 - DNA, 442 bp, Homo sapiens
tagggaccagtgaccatcacatcccttcaagagtcctgaagatcaagccagttctccttccctgcagagctttggccattaccacctgacctcttgctgccagctaataagaagtgccaagtggacagtctggccactgtcaaggcagggaaggggccatgacttttctgccctgccctcagcctgttgcccctgcctcccaaaccccattagtctagccttgtagctgttactgcaagtgtttcttctggcttagtctgttttctaaagccaggactattccctttcctccccaggaatatgtgttttcctttgtcttaatcgatctggtaggggagaaatggcgaatgtcatacacatgagatggtatatccttgcgatgtacagtatcagaaggtggtttgacagcatcataaacaggctgactggcaggaatgaaaac

SEQ ID NO: 11812 - DNA, 1148 bp, Homo sapiens
gcagctcatgtgcacgttttctgtttaaataaatgtaaaaactgccatctggcatcttccttccttgattttaagtcttcagcttcttggccaacttagtttgccacagagattgttcttttgcttaagcccctttggaatctcccatttggaggggatttgtaaaggacactcagtccttgaacaggggaatgtggcctcaagtgcacagactagccttagtcatctccagttgaggctgggtatgaggggtacagacttggccctcacaccaggtaggttctgagacacttgaagaagcttgtggctcccaagccacaagtagtcattcttagccttgcttttgtaaagttaggtgacaagttattccatgtgatgcttgtgagaattgagaaaatatgcatggaaatatccagatgaatttcttacacagattcttacgggatgcctaaattgcatcctgtaacttctgtccaaaaagaacaggatgatgtacaaattgctcttccaggtaatccaccacggttaactggaaaagcactttcagtctcctataaccctcccaccagctgctgcttcaggtataatgttacagcagtttgccaaggcggggacctaactggtgacaattgagcctcttgactggtactcagaatttagtgacacgtggtcctgattttttttggagacggggtcttgctctcacccaggctgggagtgcagtggcacactgactacagccttgacctccccaggctcaggtgatcttcccacctcagccttccaagtagctgggactacagatgcacacctccaaacctgggtagtttttgaagtttttttgtagaggtggtctagccatgttgcctaggctcccgaactcctgagctcaagcaatcctgcttcagcctcccaaagtactgggattacaggcatcttctgtagtatataggtcatgagggatatgggatgtggtacttatgagacagaaatgcttacaggatgtttttctgtaaccatcctggtcaacttagcagaaatgctgcgctgggtataataaagcttttctacttctagtctagacaggaatcttacagattgtctcctgttcaaaacctagtcataaatatttataatgcaaactggtc

SEQ ID NO: 11813 - DNA, 905 bp, Homo sapiens
ttgactttgcacctgtcttcaggctgccaggggaggaggagaagccagcaggcaccacttttctgctccctttctccagaggcagaacacatgttttcagagaagctgctgctaaggaccttctagactgctcacagggccttaacttcatgttgccttcttttctatccctttgggccctgggagaaggaagccatttgcagtgctggtgtgtcctgctccctccccacattccccatgctcaaggcccagccttctgtagatgcgcaagtggatgttgatggtagtacaaaaagcaggggcccagccccagctgttggctacatgagtatttagaggaagtaaggtagcaggcagtccagccctgatgtggagacacatgggattttggaaatcagcttctggaggaatgcatgtcacaggcgggactttcttcagagagtggtgcagcgccagacattttgcacataaggcaccaaacagcccaggactgccgagactctggccgcccgaaggagcctgctttggtactatggaacttttcttaggggacacgtcctcctttcacagcttctaaggtgtccagtgcattgggatggttttccaggcaaggcactcggccaatccgcatctcagccctctcagggagcagtcttccatcatgctgaattttgtcttccaggagctgcccctatggggcggggccgcagggccagccttgtttctctaacaaacaaacaaacaaacagccttgtttctctagtcacatcatgtgtatacaaggaagccaggaatacaggttttcttgatgatttgggttttaattttgtttttattgcacctgacaaaatacagttatctgatggtccctcaattatgttattttaataaaataaattaaattt

SEQ ID NO: 11814 - DNA, 881 bp, Homo sapiens
ggccacttccaggtgggcagcagaggcaggccccagtgtgaccaccactgcgacccctgagcccacaagggcagagcagcattctgagagacgcacaggagaccaagccagaccaataaacagaacacttttccttccatgtggtctgaatgttggcaccagcccgggcaggggcatctcatttgggcagtactgctgtgcaacccagctgcaaggatggaaggcagagggtgggtgtggggcctgaggcttcacagtacctggaccagcaggaagattctgggaggtcactgctctcagaggacagcaagggaccctgagctctgcaagctgtgatctgtctgggttcatggtttttctcaaatcccaggctatctgcatgcgctctcaggtgctaccgagccatcctgggagagatggatggtccactgctttgaggcagggagccatcgggctggggccccttggtgaacctgatgcaggtaagatgctgaggactaaaaccattttttttgcacccaaaaaaaaaggcaggaaaatgatcatcagaaactaaatggcagccaggcatgggggctcacaactgtaatcctcgcactttgggaggctcaggctaagggtcgcttgaagctgagagttcaagaccaacctgggcaacatagtgagacccccatctctacaatttttttttaatgaccaaatgtggcggtacatacctgtacatacctgcggttccagctactcaagaggctgaggcaggaggactgcttgagcccaggagttcagggctgcagtgaggtacgatcaagccactgcactccagcctgggcgacagagcaagatcgtttctctaaaattaaaaaaaaaaaaaaaagacaaat

SEQ ID NO: 11815 - DNA, 1515 bp, Homo sapiens
gccatgggacccgaggactgccccccggcgcctgcccaggcggaggccctttcagaaagggcgaagctcacgcctgactctgcgggccgcggggccgcgttcccagtggacagcgtggtgagccgtggccggacggcaggaggagaggggagccccctctggctgtgtgtcaccttggctggctggctggccagggttttgccgatttccctcctcacatccctcccaccctcggtcatatcattgagatcaccgtaccagcaaatctgcaaaccaagcactttgttaatctccagagagagcaaatacagcaatctagagtttagcctttttaaaaatgtgactttaacccgcccacctgtgtcctcccattggcgtggcatttctttggtgtctgctcagaaagaaacagcatgggaccgtgtgattgggtccaggctgggctgtcagggaagcgccctggtgtctccgactcatcaattctcgggtcttttttaaaagccaggctccccaaagcactctgtctcgcaattttgaggaggctgttccgacctggaagcgttaaactgctgcatgtcatctggcgtcagctgtgaggctgcgctctgcgtgttgtgcgtttgcaaaatgtattggcgtgactgtaaacacatcgttgaagtaaagcgattacatattgagtatgtcagcttttctcaccctcttctgtgctgggaggagagtctaactgtaacctttaggttgttccagaaaagattcaggccgtttggcacagaattgctctttctgaagggtagcagtaatgaataggaacagacagaaaaccccaggaggggctttcaggaaactctccctctccatcgccatcctgcaagctccacagcctcgggctgccagcctgtggcactgtcctcggtgtgtcctggagctgtgctgggcagcagggcctcgcgtaaggaactgctggaacccactgagcccttcccggggtttcccgccgcactcagtgtgttccttcaggctagtgaggtttcattctgttttatttgcaagcttatcaaaagtttgtggaagatacattgttgggttccagaggctggagtcatgctgcccacatcttgtttgggaaagcaaaagctcccagtgagctggtgtccccgtgtgtctttcatgggactgtcccctttagagatcccacctgtcagagccacagcttcggggtcctgtcatcacatcccctgggaggggaggcaggaggaggccgagggccccaggatgtctgcctggtcccttctcactgtgaggacgcccttggcacacctttctcaagtcacacaaattactgcagttacatacagaattgctgacaggagcaggagacgctgagggaaacagctggcaatgtgacaaaagtcttttctgggacaacaatcaaatcatgtatttgtatttttttaagtttaccaatgaattgtacaacaatgtaaaaataaagttcatcctaatatgctgtgc

SEQ ID NO: 11816 - DNA, 1444 bp, Homo sapiens
gccgcgtgaaggttcccggaggatgggtctcagccgagcctcgtgcacccccaagatggaacatccctgctgcattcacactggaacaagcccctccagatgagtgccccggccccaggccagcttcactgccgtctcttcacacagagctgtagtttcggctctgcccattagctcattttatgtaggagttttaaatgtgtgtttttttcctttcaagtcttacaaagctaagactttttggctcattcctttttgcatggttgtctagggtttctggacaatgtgctgttgcatttttattttcctagccttgctaaaatctttcccttctcaagactttgagcagttagaagtgctctttagaagttgtctgtgggtgatgttactgtagtggtctcagggaaaggattgtccagttactttagggggtttttggtggggtttttccccctgtgaaaacttactttgcccctagtctggctgctgctaggacttctgaggagcaatgggacatgagtgtccctgtatctgcgccactgccgcaagggaagcctcaggaaccagcacctggaggccaggatagccaagccctgggtgagcgagaggctggagaacacaggagctcacccagggctgctgcccaaccatgggccactgtgaacagacttcagtcctctgtttttgtttcataagccgttgagacatctgatggacttggcttaggccctgctgggacatcccacgtgtgatccctttcactccatcaggacaccaggactgtccttaggaaaatgtccttgagatggcagcaggagtcatattttctgtgtgtgtgtttcggaaagccgctgtgtcctgcctcagcacaaagacccagtgtcatttgctcctcctgttcctgtgccactccagaacctcagcagatctgagccaccgcctgccagtgtgagaggcggccactttcatggcagctcatcaggcgcagggccccagacagcttcccagcaggccctagagcccggcctgggccaatgatggagggcggccgccagcccagggcctgcccatccagaagggactccccagggcctgggggaggagacccttggaaaagtcctctcttcccagctcctgattctggatctgagattctcagatcacaggcccctgtgctccaggccgaggctgggctaccctcagggagatccagagactcatgcccatggccatccatgcgtggacgctgtgtggagagtccaggatgacgggatcccgcacaagctcccttcagtccttcagggctgggccatgtggttgatttttctaaagctggagaaaggaagaattgtgccttgcatattacttgagcttaaactgacaacctggatgtaaataggagcctttctactggtttatttaataaagttctatgtgatttttt

SEQ ID NO: 11817 - DNA, 359 bp, Homo sapiens
gccccgtgtgcacaccaccctcccgctgcaagtcagattgctgggaggactggaccgtttccaagctgcgggctccctggcaggatgctgagcttgtcttttctgctgaggagggtacttttcctgggtttcctgcaggcatccgtgggggaaaaaaaatctctcagagccctcaactattctgttccacacccaatgctgctccaccctcccccagacacagcccaggtccctccgcggctggagcgaagccttctgcagcaggaactctggacccctgggcctcatcacagcaatatttaacaatttattctgataaaaataatattaatttatttaattaaaaagaattcttccac

SEQ ID NO: 11818 - DNA, 810 bp, Homo sapiens
tgaaggccacaaggcactgggcaccagtccttttggagtggaccttttgcaaaaggccttgtcatcaccttccaagaaagtttccttctgttgtcctgtgcattataatatacaaaataacttattttgatgatcagaggtcttgaggtcttgacatcttgacatatacactgaaaaaaatgggggttgtatgtatgtgtgtcctacccaaacctgtggccgccacttttgaattctcagattgccctgaattttgccacttttaaataatgtgctgaataagctcagcaactaaaaaccattacccaagaacgtttcttgtgagtgagctgatttattctgattcattatattccttttggtagattttataccccttggggaaataatacaacaaaaacatctcttaaaaatgctgggatggggccatatctactagcagaggccagatggtcagatatgatttctgcaaacccatcttgaccttgagtatgtgaaggggtactgtactttattcctgatacattttggtttccatgtaggtgttgagctcctggttttctgtgtttggatgatgaagatttggacccttccattcataatccctttctaagtgaagggagaggctggcttggctgttccttgttattccgaaagccctggtttggggcccatgttcacactggctctcagtctagtcaggtgcaatgttcttgagaggtggggacctaattattaccagagtagcagcaagagaggaaacgttgtgaattaagtattcaattaaaaggaaacatgatttctacctga

SEQ ID NO: 11819 - DNA, 791 bp, Homo sapiens
gctgagcgcccactagaggggcacccaccagttgctgctgccccactacaggccccacacctgccctgggcatgcccagcccctggtggtgggggcttctctgctgagaaggcaaactgaggcagcatgcacggaggcggggtcaggggagacgaggccaagctgaggaggtgctgcaggtcccgtctggctccagcccttgtcagattcacccagggtgaagccttcaaagctttttgctaccaaagcccactcaccctttgagctacagaacactttgctaggagatactcttctgcctcctagacctgttctttccatctttagaaacatcagtttttgtatggaagccaccgggagatttctggatggtggtgcatccgtgaatgcgctgatcgtttcttccagttagagtcttcatctgtccgacaagttcactcgcctcggttgcggacctaggaccatttctctgcaggccacttaccttcccctgagtcaggcttactaatgctgccctcactgcctctttgcagtaggggagagagcagagaagtacaggtcatctgctgggatctagttttccaagtaacattttgtggtgacagaagcctaaaaaaagctaaaatcaggaaagaaaaggaaaaatacgaattgaaaattaaggaaatgttagtaaaatagatgagtgttaaactagattgtattcattactagataaaatgtataaagctctctgtactaaggagaaatgacttttataacattttgagaaaataataaagcatttatct

SEQ ID NO: 11820 - DNA, 3928 bp, Homo sapiens
ggcccacggtcactgtgggctggggtgatggtgtctgaccagtggggagattggaatgggattactttggcccagggaagcccctggttctgtccctggagactctggaaatccttttgcattaaaaggactttacacacctgtgtaaaaggatgtgggagaggagggtctgaagctgagctgctaaatgaatatccctgctctgctggtcaataaaacgcttcctaatagcagcttggcgtgtatctggtcctagtgaagaggaaggcctgtgtagcagaaaggctttgggcctgagaggttaaggccacagcctgttgacacctgttttggtcctgcgaccctttactggtctccgctggctttgaatcttcctctgggctctactctggagaacataagggctgctgtggttgagtctggctagcactgtctgtggttggcagtgtgtacacccctccgttcagttccttgggggtatttttcagaaatccaaaggcaacccttcgtgcagtgctcacttttttaagtacagttgattacccttgcctgctggggggcctagccatgggccagagatggaggagccccagtggctgacaggccagcctcactcaggcacgtacctgctgaccagtcagccactgccaacccatggcccagccactgtgtgcattagcagggaggtttgtaggccatggaggaaatgaggagacaccacctagtggagacattggggccctgctggggggatggtgtctatagctggctctgctggctccctcaggccctgcttaccaagctctggaggagggagtgctgcattactgagcaccttccttgttctttcctcataggacactgatgttactgtcactttagttatgctaaagtggaggtttcagcctccagaagacagcagagccttctagggtcaccttaagaataggtttagctaggctgggtgtggtggctcatgcctgtaatcccagcactttgggaggctgatgtgggcggatagttgagcccaggagttcgagaccagcctgggcaacatggcaagaccttgtctctacaaaaagtacaaaaattagatgggtgtggtgtttcgcgtctgtagtcccagctatttgggaagctgaggtgggaggatctcgagcctgcgagatcaaggctgcagtgaatcatgatcgtgcgctactgcactccagcctgggccacagagcaagactgtctcaagaaaaaaaattttttaaataagtttaattataaagtgaaggaccagttggaccacggacccctagaaactcagccaaggagacctgactttatctgagacaggaaggcagtggttaaaagaattaaaaaaggacagtggtgcttgacagagcaggactgaagttttcattcctctacctgctggggccttggtcaagtcctaaaagctttccaggtctgtaactggttttgtctgtaaaatggggaaaaggttaccttttctgccacatgaagtagctggctggtgaaatgatgtcatactacgatgtgtttcattaactgttggagattatcacattaaattgagcagatttggatcttttacatttgatgctcaagtttgattctgtaccagatctgggtttggggtgatggcttgtcgggggtgggaggggaaggtgggcagagactgatgtataatggacaggtgttccttgagtgacagacttacaaagggagtgtttaattgaaatctagcatcttgtctctctgctatcagcattttggctgggtggaaaaagctctcctccacagagagccctcccatgtctgctggtttcagttccccacccaactgactgaagtcttgaccttgataccacctgcctgggcgttctacttggctgcaagggctcttcagaaagcacctagttccttttggctttcatctgcagtgtaggtctccatagctagtgacacacaaagccttatgagagtattccttccctctagggcccaaagaggctgctaaccagcaggaatgtcctgaaccaaaaggagtggtgaccattctctagacagaataaatgtctggtccctaatgggacagataactagggtttgagttcaggcttgacacaggagcaatgggcagtgaggtggacagcccagaccctgaaaggacgtgtggagacagcagcagtcctgtggtgcagttactgcctgtgtggccagcttcacaggcagcagataatttgtggaaataaacattattttctttttttgttccctgtaggctacttgatcctggatagtttctctttaaacctttgtctttccctattttgtttagtagtgatgaaagatgggtttaaaatatacagaaatgggagaaaattaattagagaaaatgtgaggattttataattgataacatgttcttaattttacttgcacaagcagtgttcacagccttattctgaagtgaccacttttcttctctttgaggcactacctggcagcaccatctaaacctgtatcatctgctgtggtcccagttactcaggaggctgaggcaggaggatcacttgagcccaggaggttgaggctggagtgagccatgactgtaccactgcattccagcctgggtgacggagtgaggccctatctgcctgccagtgagttctgtcatgcatcagactttggacctcagaattttcacctggaacatgagaggtcagatgacataatgaatatgttctaacttctgaaacttttggagcttgtttttgcccttgatagcacgtatccttagagaataagcttgccaatttaaggcctgtctgtaatggcatctgaatgttccagcagcctaactgtgctctgctccagaaacatgtgtgtggcttccctacctccacaccaaggagctgccttgctgggtggatgtaaagactgtcctgccagggtttcccactaaaggtattaataagtccagtggaccacagagggcccaatccctcttggccgctaaggctaaggtaggagccagagagctgtagagacaggaccaccaggatgcttcatgtccataacacaagagagcgctgcattgtttgggggccaggcattactactatcatgaagaaaaatgaagagcaggatgcatgttagtctttaattcacttttaatagtataaacctcatttaggtagtagtattaagccacaacaataatgccacattgaaacagcatttaataaaatgcataaagctaattcatgcactgcaatactctatatacaaacacaacaatgcaaattcttcttcaagactgaagacattgattagatataaaattcagtttaaaaagaacatgctattttttaaatgccatcacataaacaaagtgatttcacagggagaagaaagctgtataaagctgcagctttcaacaggttttaaacctggcattaaaatgtaatggcaaaaccaatattttctatattgtgaagggcaaaggttacagaaacggtcccaagaaaatctaacacccaaattttcctttgatagatagatgcctttaaaagggctggtaatgcagttacattctaacagagaagtccaaactacaggtaaaaactacggcttgtactgtgaaaaatgtgcagcttttcagttataaaactagttgaacactggtttacaagataatccgtagaacagagagactgtagaaaaatattccagcacttgagttgtgtgtggcagcagcatttgagtccatgaatgctatggtcattaaaataattgattatactttcctaaagaaaagccattttttaatgcaaagtctactacttccaaatgttattccaaacattaaattttaacagtctatcaatcaataaatgttgaacattttttttct

SEQ ID NO: 11821 - DNA, 3709 bp, Homo sapiens
ccagcagtggagagggcacctttgggcccaggggtctggcaggagccagtggagcaggacagagggcaggcaggatggatggggaaggtggcagggtgagaactcagatgcacacaggtgaggggcaggaatctgctgttttgtgttgcgcactttgaggtatttccactacagttgaataataaaatagaaactagaacagggagaatcagcattcagttgctgcttttcctgtttattattactatcttttgtaatcggaggtttaccccttttgaagggactttacatttttactaccgagatataactaaatgcagctctgttgggcccagggcagaaatggctgctgtgtacctcttgggtccatttgctactgcctagtcttggttccttatgcagtattatagggcagcctttttagagcccttcctttagccaagacagagaagatagattccactgagctctattctgctctgacagaagtccatccctagtaggctgtgagttccatttcacctggggccgcctctcccctgctctgcacttcctgtctgtacaatagaagggggaggtgctgctatgaaggggagagtttagacccaggagagcccagcacctctttttaaggtggggtgatgggaatatttcaccagggtctattttctcagtttaagttcttttttgtctctttcaggaagttaagctcccagtgcagggtatcaatgtgaatctggtcctgagctttttagaaaataagagtggtggccgggcgcgctggctcacgcctgtaatcgcaacactttgggaggccgaggcaggcagatcacaaggtcaggagatcgagaccaccctggctaacacagtgaaatcccgtctctactaaaaatacaaaaaattagccaggcgtggtggtgggtgcctgtagtcccagctactttggaggctgaggcaggagaatgctgtgaacccgggaggcagagcttgcagtgagccgagatcgcaccactgcactccagcctgggcagtgagagtgagactccgtctcaaaaaaaaataagagtggttaactttttggttgatattagtattatttgtgagaagagtttccccacccttcttctgatagaacaattgtctgtcactggagaaatctccctccagagctttggcaaagttactctgatctgggtctgtttaaaaggccgggtctctaatttaggaatcggtgatttggaagcttttgcagaacatcaccagaagaagggaagcttcccagagtcagaagctaaattaaaataatttccaaggctatttgatcagccttcttcctttttggttcattgtgtcctgacttggggcactgatgagattttttattttttttgagacagagtttcactttgttgcccaggctggagtgtagtggcatgatctcagctcactgcaacctccacctccctggttcaagtgatatttgtgcctcagccccctgaatagctaggattacaggcgtgggccaccacgcctggttaatctctgtatttttagtagaggtagagtttcaccattttggccaggctggtttcgaactcctggcctcaagtgatctgccaccttggcctcccaaagtgctgggaatacaggcgtgagccactgtgcccgccctgatgagatattttattaccaatgttagtattgagaaactgaaatgtttgaagaagcacaacccaggatcgtgctggtagcaccacagtacttaaactgttggtcaattaaggccagaaagggaaattgttaatttagctctggtgctttggtttacaggaacataactcttaactgacatctgacatcatgatagccatatgtgctcagctctgggtagagtttctgcagttactcatctgaactaatgaacaataactgaccactagtcactttatgccgtgtaactagctctaggccatactttcactggttactggtgtgaaagctgaaattcattttgttacattctggtgaagacccctcttgataatgggaatgttttaactctcttgatgaaaaaataatctgtatttgtgttgatgttcacatttctgtagcacatttcttatccttttggttgaatgaaaagatcttgtataggggtgtggagatggggagtgggtagaagtgtgtgaaggacgctttgcatttgggatctgttcacaaacagccatatgagtgtgttaatgaatgtcagccagttaccaaccctgctggttgttatgggttgttttgagaagttggcaaccaggcatctaagatgttgcctggtacaggcctcttttcttccctgaggcccatgacatttctctgttactctagagggtttctcagatggccagtaggctcctccctgcttagggtctcatttctctgaaaagaggatgaactgaaaagcaggtagttccagaagctaattgctgctttccatcataattatttttcttgtgagaacatttctcttttaattagctagtgattttgattaagactaattcactaaacatacccttccctcaaatcacctcaggtagcaatctgtaagtaactaaaagcattgaaaaacacacaagaaacatttttaaaaactatttttaaaggcctggccgggtgcagtggctcactcctgtaatcccagcactttgggaggccgagacgggtggatcacctgaggtcaggaatttgagactagcatggccaacatggtgaaaccccgtgtctactaaaaatacaaaaattagctgggcgtggtggcagacgcctgtaatcccagctactcagggaggctgaggcacgagaatcgcttgaacctgggaggcggaggttgcagtgagccaagattgcgccactgcactccaacctgggtgacaagagcaagactccgtctcacaaaaaacaaacaaaactgactgattgaatatactaaaccaaactaaaatcatattcttttgattaagtttatccatggctgtattcttctatgaattcttccatttaattcttccacgattatcttctcctgtaaatacatcacaggagttagaattctctacccatcagctgtaccatgtcgcagaattcatgcaggcacaaagttggagttacagagatgggttgacagcaggcaaacttggcctatgtattataaccacaacttcaagttcttacctcatgtgaatattcaccctttctttagtcttccaaggcaaacagccccgtctcatcaccagatgagcaaggtcttgatatggcatagcagatctccctagacacagatcatgagaaaagatggaagagacttagggattcaggcatcagatgaagttggcttttcccttttatgccttgtttgtatttaccctgtctaatacactaaggatacttactcattgtacttgcagctcaatatgtctttgctgttcagatactaaaatgtacctctgagtcattgtgagctgtgtggtaggttggacattggcatagttggtgatgggactcaaaatgaaaaggtggtctctttaccaggtcacagactgtagcagattgtgcttgttatctgacaatgactgtcactttgagggtcgttgatttgcatgcactactctggggccttgtattggagccttttttaaaaaaaataaaatctgagatagag

SEQ ID NO: 11822 - DNA, 1236 bp, Homo sapiens
ttcatcctgggccctggccgatgtgcatatcaacatttatacatggaactggagaacattgtgccaataatcatttaatatatgccaaatcttacacgtctactctaaactgctctaatgaagtttcagtgaccttgagggctaaagattgttcttctgggtaagagctcttgggctggtttttcagagcagagttcttgttgtgggtagactgtgactaggttcacagcctttgtggaacattccgtataacggcattgtggaagcaataactagttcctatgaaagaaccagagctgggaagatggctgggaagccaggccaaagtgggggcaacagcttgcttctctttctcttctcaccctcagtttgtatgggaaaatggagatgtcctctccactttatcccacgatatctaaatgaaaaagaaagaaaacccacacacaaagcaaaaactcaagtattaagagcacatatttttgacccagtggaggcttaaaaaaaaaaaaatccaagaacacaattcattttcaccacctctggtgttcagagggggcttttaaaaaagcgtgtatgctgggatacccattaaaaccattttctagaaggctaccatgagctgcactttttggggtgggaaaggtgaatgccagtggggatgcggggggatgagggtaggagggacttatagaaggggatttgtggctgtgggggagaaggttctacagcataagccttatcctgccagccaaggggatttattctaagagaagtgcatgtgaagaatggttgccactgttattagattgacaagatgttaatttctctgtaggttgtaactttaaaaataaatgaaattatttaagggttatgctgcactagtattccttagaggaaacagttctttaaagttaggaaagggagtaggcaggcatgtgttggcaaaggctgttaatagtagttaagtgttaagactgcttttctttaacgttttcatggtaatgcatatttagagcactgtatttttgtcttgttaagaaaatttagcatttctaaaagaaaaaagcaaccctctttcaaactgttaattctgtcacagcctgtatattttagtcatttgtaaatctcttcatacaatagtgacttcttttttgactgatacagtatcttaattacaaggttattttgtacttgtcttaatacactaagtgtaataaaaacggcttgagaaaagtt

SEQ ID NO: 11823 - DNA, 1386 bp, Homo sapiens
cctttcatgaggttggcatttataccttcccttgaagaggaaaatttaaaatcactctttcgtctgggtgcggtggctcatgcctgtaatcccagcacttcgggaggccgaggttgggggatcatctgaggtcaggagtttgagaccagcctggccaacatggtgagaccccatctctactaaaaatacaaaaaaattagctgggcatagtggcgagtgcctgtaatcccagctactcaggaggctgaggcaagagaatcgcttgaacccaagaggcggagactgcagtgagccaagatcatgccattgcactccagcctgggcgacagagtgagaccctgtttcataaataaataaaatcactctttttactttatatattttttgagacaggatcttgtggtacgcaggctggagtgcagtggtgtgtgatcacagctcattgtagcctcgacctcccctgggctcaagcagtcttcctgcctcagcctcctgagtagctaggactacaggtgtaagccaccatgcctggcccttaattttttttaatgagcatgtacagtagtcccgctttatccatggtttcacttaccacaatttcaattacctgttttcaactgcagtcagttacttttcttaagatattttgagggttataggctcatgcctataaccccagcactttgagaggccaaggccagcagatcccttgagcccaggagttcaagaccagtgtgggcaacatggtgaaactctgtctctacagaaaatacaaaaattagccaaatgtggtggcatgtgcctgtagtcccagctggggtgggaggttagcttgagcctggaaggtggaggttgcagtaagtcgagatcacgctactgcactccagcctgggcgacagagcaaaagtctgtctcaaaaaaaacaaaaaaaatttgaaagatcacattcacataacttttattacggtatattgttaaagttgttcttttttttttagagtttggtaccatcttggtttcaggcaaccactgggggtcttgaaacataccacccgcagatacggggggctactatgtactttttgtattaaaaaataggaagtgtatgtgtgtgtgttagagacatgtaaataaaatttcaaggcctgaaaagtagtcaaagttttatagaataacataatttagccatattgttcactgtaaaattccacaaagaaaagcctaaggaccctgtagcacgtaaagagattcttgtcattactcatgtgactgtaagtgttcccccaggcaacatgtcagacaaccatggggaaaaatgaggccaagtagactaaaataagacactcatatatatttctagcctaaaggagtgttctgttttcttct

SEQ ID NO: 11824 - DNA, 1511 bp, Homo sapiens
gggccgtgaggagaaggtgggctgcgccccacagaactggcagcagcttctccactgtcatcaaactggccatgtcctggccccgtctccaccaacctttgtgtgacaaaaacaaggacaaattcctgctactaagacatgctgttaactcagtctgactggaagaatttaggaccactgcatcctgtcttaatccaaggtactggaaaaccttccacatgcccaacctgagacctgttccccatcgctaccatttggccaaacaaccggctacaatgctcttcctcttctggaatgttgctgacccaggccgtggacttggctgagcactgttagacacacacagacctgcaggctgttttagaatgttttgatctctttggggaatctggagtacaggcctctccgcccctgaccaccgaaacgtgcaggcattctcactcacactgggcagcccgctgtcgggtctctctaggcctatgaaccacaaagcagggaagtgggcacgttctctcggggtggctcacagctttgaacctgccaaaggacccctcgactggccacagcccagcccagcctgacgtggatgtggctgcccaggaaaagacttaactgtgaaaaagtactgagaacccacctgacccaggcttgccccaagcagaggctagagaagaggctcctcttctcagtgtttcccaaaggggcggctcttgtggtttcaaaatctctggcaccatcttgacctcttggctctctctgcactttgccccctgtctcaaaaatgtccctcatgtccatttcctgtccaggagactcatgaggactgtgtgacctgcacaagcccacacctgggcaggctgttggtgtctccttggtccttaggcagatactcccctgagtccccgatctagggccagctgcagagggctctctctaggcagagcgttcctggccagagctctacctctttgcctcctgctgacccctgacagcgtcccgtggcatttctttcatgtctgcatattgcatagccttgtcctcctgtgtgcctgagctcctcccttttcaataagattattagtcgtgcatgtctgtgagctgcctttcatcaccatttttcctgagtagggcttagttttattctggaaagacatctccaaggtgaggtccacccccacagcagacctcaagtagaaattgcccaatttttaccagctggagggacacccttgggtttttgtacgaagctatttaatgagcctgtgtcttggggactcagcaggctggagcttggggcctggtggaccatcacctggtgtctgtaggtggacccggtctcccacaggtgacatcaacctgagggtggcgtctttagagacaggcacatgggcagccctgttcccttcgcctctactgcgaggcctggggagatgttgttttcatgctgcttccaccatcacactggggtttctggatgggaaataaaaaaataaaggcagttcatttcccca

SEQ ID NO: 11825 - DNA, 130 bp, Homo sapiens
ataaagacgccagttggtggtcttgagttttctctttcttgcaagatgaaattttattttccacagcaaaattactctactgttaaaattgtgcaaaataaaataaacatttaaaatgacattttacagt

SEQ ID NO: 11826 - DNA, 3031 bp, Homo sapiens
gaggctgaggaggagggagttctcacagtaaagcttcaaactgtgctttttcaggaaaaaggcactttgatattcacgtagaaattcaacctaagaggaaagatcccacagtgagccaatgttaagagatctgatggcattaggaggaagagttttaaaggcaagttttacaaaaggaacttctagaatcttgaaatagacctgactgaggaaaacacattgatgtcagaattctttgtggaattgtttaatttggttttgcagtgccaggaacaattggggacactgtgcactctaacctgcttacacaagcaacactattgtaacagaagaaataaagacactagatttaaattttatcaataaaattacaactaaatttaaaggcaataaaagtttggtacagtaggcattatgtgcacagcaaattgcaaaaggaccaaataactgaaaggtttttttaataaaatgccattttgtggaaactggagtagattaaatgaaacattacctaaaccaaactgcaatatttctggaaatgaagctgagatttggttttaaatgttgagtttttttgggttttgttttttttttaagaaaacatctgaaagccttccaatgctgtattaaaccatgagagaaagcagatgtatttttacatttttttcttttacagaactatttcaaatttccaatttttatactattagaattaaaaaccagctgactgggtgcaatacgggtgaaaatacttgtgacatagacattgagatggattggggtcaggctgttgccctgttttgaatggtttgggtttaaaatagtactatttttgtttgaaaatgtaaagaatttcctagaaaaaaattcatgaaatcaaaaagtagactatttcaccctattgcagctaagtggtcctggggcatggagtcttcaacctctctatgaatggcacaccttagtcacttatgttacttttgtgtccccaccatgggttgggggattttttgtttattctgatctatgagttttgaaaaagtgaataatcaaaaggaaaataattccttgttgttcataaattaagcatcactaaagtctcttgaaaggcatttctgtattgggcaagatttaaaatactaaagccttaggtcctattcatatttaaagtagcatgtttgtaacctgttactatttggagagagaagcagttgcctgccaaattgaagactacctttcaaatagcaaaagagagagagaaggctgatatttcggcttttaaataaagatttgtgtggttctgcttttactgtaactgtcactttcccagtgaaaatgatttcatatacattgagggtcttacaggtatgggtaaagttctataaattgcaacaaaatgatacccaatttcattttatcctttttgtattgtgaaactggaaactttatgacattgtaaattatcagctggtttttctgaatataaagtgtgaaaacacagaacagtattttgatctatttgataattttgtgggttttttgaagaattaatgagcatgtacatagaaatagtgactgcttgaatactgtatttacttgcactctttcagtacatcaagattcctgtatattttagagtataataaaacacagatgtgagttgtatttaatgaataatgtatttgtatctgtgcatattatctacaaatctataaagtttctagggcattgactactagattttaagcattttttctaaaatatttacagaaattataaatctaatcccccatcttttctttataatataaagaagtcataatgaacccttcctaattattagtagtaggaaggtgaatatgcattttaatgacagtggactacattttctattgtaccttttgaaaaaaaaaaaaatcaagcagattctaaaagtatacatatgtgtgctttctctttccttttaggaattctcttctgaattccctgagggaattttctagaatctcagaattgaaagagacctgaggttcatccagtctctaacctcttaacaaatgcaggagtcccttctacaagggtgatctttccaccttgaacacttccaagtgactctacctcaccaagcagtccattcagttgttgagcagctctaactgttagaaaggtcttccttagatggagttgaagcctccctcccggtaacttctgtctttgggcctgggtctgtcctccaagagaaccctgagaatgttggaaggatgaatctcgcacattctgccatgtcttctcttttacaggctgtttgacttctctgctgaagtgatttccagaaggactcatttgacacactattagatttaccacatctaatgaaatccaaggtgtagctataaagtgacaagctgtttttaatttatcacatacaccagaacttctatcctgcatcacttatatgtaaatgatgctgttaccaaaaacattaaggtagttcttgcgaatgccaccccactaagaaaactatttcattacttttgtaatccatctgtgagagtctgccccccagcttaaccacttcctttggtctgcacccaatgaagggaaaccccaaagtactgtctcaaatggtatttgaactacgccagtattgttggaataagtacattaattacttgaatgaatgaacacagcaccgtagaaatttcctttatggttacaccttgtatgtctaaagcattcaggccctgttctgtagtgtttcttatcctcacacagagtagaaaagcctgtttgctttatttaacttatacataaaagatgacatctgaaatatctgatgtgtattataataccagcttctgctctagaactactttgggtgaaatggtggtaatagcaaatgacctcctttaacaagacactcatctcaaacaatgccatttagttcaggagatctctaagtgtagctgtaaattttggggttaatttggcttatattggaccttttaaaagaaataaagttttttaatgcaat

SEQ ID NO: 11827 - DNA, 261 bp, Homo sapiens
agaagccttcaggaatccaaatcctgaacatttggaatgagcccagatagaaatatcgaatgcaaagctactggcttcacagagacaaccatttatgatttgctgttctgtaagagtgtggattctttctatcaactgctgatatcatcttcaggaagcaagtccataacatgacatatctggattttgtgcttagaaccttaaattggaagcattcttaattatgcatctaaatttaaaagaagataatttcaaaacagt

SEQ ID NO: 11828 - DNA, 982 bp, Homo sapiens
gtcttgggcaatttgtgctaaaactaggtgagttgccaaacccaaggcatcttaccaacagctggtttgggggctggtttccctggtgttgtgtgttacctaccctttggcttggcttgacctctccttgtgagctcacctgagccctcccagggccaggttcctgacagtgttggtttttgcacatccactggaaaggtgtcattaatgacccagtgttagaatgcaagaggtcaggttattctagccctcatggctgaaggcccagtcctggctccaccactcctccagccagagggtctggaccatccagtgcctgtcctcgccacagggcctccagggagcattcgggtcaaatccatggacaccctgggctacaaaccaaggctgctgttcatcccacatcgtgtggggcagtgtccatcccctgcagctacttggtgacttaacaactccaggagccctgtcagctgccctcctccacctaaaccccttcgactcttctgctttgacaaagaaaatgacattggggaggggaggtgctccgcctcccagcttttctcaaaatagtcctatagatactggtaatctggaaatgaagaagtaattctgtctctgcacctacttttgcagaatgttcaaggaagtattctgtgttagtattaatgccaaaaagttgtttttaaaggttttgtactcagcacatcatacaaaccacattacttctgtcacttcagggcatcgggactggctggcgcccttgttatgtgctattttaatcagtgtaacattggtcaagttgttacccatgtatgctgtgtttatcatgtgtatatcgtccagaaagtattaaggctttaggtagatgcaactggcgaaccttggagagggaatgctgattgtcttgaccaaacccacagcctgtctcttctcttgtttagttacttacggcaataaatcatctatgagttagtgcaccgtg

SEQ ID NO: 11829 - DNA, 1864 bp, Homo sapiens
tcctcctggcttatctagttacatgggaagttgctggttttgaatattaagctaaaaggtttccactattatagaaattctgaattttggtaaatcacactcaaactttgtgtataagttgtattattagactctctagttttatcttaaactgttcttcattagatgtttatttagaaactggttctgtgttgaaatatagttgaaagtaaaaaaataattgagactgaaagaaactaagatttatctgcaaggattttttaaaaattggcattttaagtgtttaaaagcaaatactgattttcaaaaaaatgtttttaaaaacctattttgaaaggtcagaattttgttggtctgaatacaaacatttcacttctccaacaagtacctgtgaacagtacagtatttacagtattgagctttgcatttatgatttctccagaaatttaccacaaaagcaaaatttttaaaactgcatttttaatcagtggaactcaatatatagttagctttattgaagtcttcttatctaaacccagcaaaacagattcaaagcgaacagtccaatcagtgggtcatatgtttattcaaaatattttatcttttagctagaatccacacatatatatcctatttgattagggtagtaattaggataactaaaattctgggcctaattttttaaagaatccaagacaaactaaactttactaggtacataagcttctcaatgagtcaccattcttcttttttgtaaaaacttttttctttgaaatgctaaacttggctgtatgtcaaattgtgcaaaatattggtattaaagaatgctgcaacttttttatgtctcttagaggttaatcagagtatctgaagggaattgtttttataaaaacattgaaatattagttacttgctataaatagatttagtctgttatatttccttttgtaaagtaaaatatgtccagaagagtcaaagtagttagttttggttatttctaaaccacaaaagttgtttaataagtatatcttaagaatgtgctagagttaaaagttagcattgtttctagattagctggtgtcttcattttacattgtgacaaacagctagagcatcagagcccttttgctataccacagtctttcgtttccagcctttgtcactagtctttgaggaggtttgctcctagaactggtgatataaagaatgaaagtagctgtatgagcagagcagttcaagggccaaaccctggaacggtagcaatgggatataatacctttctaagggaaaaagttgtatcagtaccatttgatctgccatggacatgagtttaaagcggctttctggcccttctttcagtgacttcttccctaaaatgtagaaattctaacttaatgtagttactgtgagccatattactagtgccccctagggtctataattccttaaaattttcattctgaatctgaaggagagagtcttttaactttagaattcccaagagggctttattacacctcagaaattgaaagcactatgaatttgtccatttaaaaatgatctgtagtttttttggtgctataacattctgacacatatcattctgtgattaaatctccagcttactataaatgatatctatattctaaagagctacttctaattattccaatatgaccttaaggaaaagtaagggaataaatttttgtctttgttggagtgaagcatttaaaagagtaagggtaaaaaagataaagtcctgaacctttcaaaatggaaaattaattctaaacttagaaatatgcttctgcctattgctgatactgtctttgcatacatgaataaaaataaagtttttttcttc

SEQ ID NO: 11830 - DNA, 2556 bp, Homo sapiens
ccacagtgcccagtcctgccccacagggatctagccacccttcagtggccccaaggccagactgaggctcatccagtggagaaccttcttaaaccactgcttccttcccggcatgcattttgcattggtccagccctttgaaaccccttagagagaagcatatatggccacaaagcacagaggcttaggtttgccacatgcagacagggctttctgggcccttacctaatccccacccgactcttgctctgagttagagctgagttacgtacccagtatcacactcacagttagaaaagaccgaatcacaatttagaatcacttttcctctgtccccttctccccagctaagaatgtgtggcacctccatcagttatacttagaaggagcagaaatagttattttcgtatcttctatccctcaaagcatcagacatgggaaaattggtttataccaagaaagcttcctctgtggaaatctgtctcagcctactttattcctgcattgggaagccatatcgcagagctaaatgcaatagaatgaaccagaactagtggattccagggctgggggaaaaaaaaaaagaaaaaacctcattactgacctctcaaagttataaggatctctgcaaacaggatctaagcttaggaataatatttaggtgtgatatagtgttagatttttttgatgtattaaagaatgcatctccaatccttaggccatatcaactttggccatcaatatctctccttaaacaattatatttcaccttttagaatctttcatagccagaaaacaagattactgtaagccagttttagctgcactgatttcaaaagatataagaatattactatccttcaaatggaaaatgcgaccttgactttatgggataaacatctttcagacagtcagttttctagtcaggtttctctggtttcagagctgtatatacctgtcaactgaggaataaagggaaaaacccaagttcattcccacccaaagtcagaatccctcattggccttaaggtagcagtcataagacagagaattggacctagagtcccttctgtggggaataaggatacctagagaacattccacatgccaagaggatgcaggatttctacacaaccccttcccttcttggaagtcaagtgtaggtactgcagggcctgtgctcagctgtgaaccccgtatcctgggccccactgccgggaccgggtctgacatgccagtgccttcctgggctgagcacagattagagactctcccccttgtcagtcagcaccttaggaaaccatgatgggcacagagcatcacatgagctgtttctctccttaaagaagatccctggaaaggatgcttttcctctcctttgcctgcgcaggaattctaacaggagtgggtgaggatggcagagggacacagtgcctgtctcgcctccatcagggagagcagccatgccagggatgactagctctttgagcctgtcctcagaggatggcgaggcagccgggcagtggaggccttcatggtaacaaatgaaagctcagtatagaggaacagacactgtttacgtccctcccactgctaaccttatatatctctatagacaaatgtgataatgacatgatttcccacctgccctccaagaaaatggtgactcactctcaagtcagctactgtagagagggttctaattggttctgcaatttgctcttaaactctagcagggaactctcctcttaccacatcagcatgtaaggtgaataataactggttttgccagacagcaggttgtctgaccttcaaccactgggcaattgcctggcagatgcacacagtagctccctggcttctggctctgagtgttcctctcagcacctctgagtaagctgctgccaagcacatatccctatgacaacactttgtaaaagccgcggggcccccatacagcgagtgaccttgcaactgtgcagggttgccattggtcactttctcaccttgggaaggtgtcagtgttttcagttctaaggtaagaggtgtagagctgttcccaccagggctctgggacagactggaaaggaccacagacctggccatccctgggcagcagggccagtgtcacctgctgacctctagtatttcctttgccctagagctagagtcatgatagctgagggtcactcgccctgcaagagtcactaggcacccaccatgccaataaggctctccgctggctccctgcagttggctgggtgtttaatagtcactgaaaactcccagccctgctgcacactagaggcaggtcctctcggtcctctccatcctgtgcttctgtggcccccagcaagctcaccacctccttggaggagagagacatacaaggacagtgggtcatgggtagtaccagcctcaaattcccacaggctcatactcagacaattgtattactgccttatgttttttaagtgtttttttaaattcttcatagttgagtattatttgcaattttattagttacagtgctattaaagaatatgtgctcctttt

SEQ ID NO: 11831 - DNA, 1227 bp, Homo sapiens
gataaaagtatttgtttcgttcaacagtgccactggtatttactaacaaaatgaaaagtccaccttgtcttctctcagaaaacctttgttgttcattgtttggccaatgaatcttcaaaaacttgcacaaacagaaaagttggaaaaggataatacagactgcactaaatgttttcctctgttttacaaactgcttggcagccccaggtgaagcatcaaggattgtttggtattaaaatttgtgttcacgggatgcaccaaagtgtgtaccccgtaagcatgaaaccagtgttttttgttttttttttagttcttattccggagcctcaaacaagcattataccttctgtgattatgatttcctctcctataattatttctgtagcactccacactgatctttggaaacttgccccttatttaaaaaaaaaaaagaaaaaaaagagtttgttactctattgtatgttacaaaagaactatagactgtggaatgcagtttaaagatgacatatgccaacaaatgccttgtattatatggcactgccgtaattcaaatttgtttttattttggaaataaaagttcactgtacttttttttcattctcattgttacatgattttttaaaaaaaggaaaagaaaatgtgaaacacaatttagtcctcattatttatttgtagatcctgcagcatcatgttgtaattaattttttggaagtttccgttaaatgtaatattgcttctcttgttaccatactgattcttttctatttataaatgtattttgatgggcagtaaaacaaagtgtcttaaaagttttaaatagagaaaatgtgctttacacagttgcctataaaaagtgctctatgttatccaagcaattcatactataagcttcactcttattgttgtatgcaatttttactatcatgcaaataagcttaggtaaataaaactaatagatcaccttagaaaattatgcaattaatgtgaaaataattgatgtttgcaatgtgtcttcctttggtttacaatcaattttaaagctacatctgtataaaatttctgtataaaggtgtatttcttttttatgagtttatggctatgaaaacagctattttgttacagctggctgtttttataagtgtatcacaattttctttatgcagaaatgttctgactaggagtggttattgactgtaactacacaattaaaattgtttgtatcgt

SEQ ID NO: 11832 - DNA, 157 bp, Homo sapiens
tatttttggacttcattcattcaagcaaaagaattattaactctgtgtttatctaaaatgttgaatccattctggttttagatattatgttagagttcacagtggtaagactcatatgcctgtatgtgttgctaataaattagattttggattttaa

SEQ ID NO: 11833 - DNA, 213 bp, Homo sapiens
atgtgattctgggtgtcatctgtcacatttgtaaaatgagtatattatcacacaatccttcgcaactgtgccagcacttccctagcaaactgcaaacttgagtttttcaggaaaacagtttacatgagaaaaggcaagttctttcccatttcgaatgaagtaccattaaactctgtcacctagtgaaaaataataaaaatacttgcaactttt

SEQ ID NO: 11834 - DNA, 512 bp, Homo sapiens
agtccacgggcttcacatccttagaaaacttttttagtccatgcattcactaatgtatgcagacctttaatagattctagctttatgtgttgggggagagatggaggggtgttgacagtctgtttcactcagcctacatacataataaaatctaagccctttaattagagatagcaactttcccagggtgaccgaggaatcagtacgtgttgaacccctcttttaagtttccttttggttgtgtcacttggagattgccttttctttcttgtaagctcagctgtgtcctcaaatatattgcattttacccagcatttccaggtgttttcaggggtcaaagtttttaagttatcttagtctttgatattgtgtaagcgaaattctccaatcccatctcctagatgatttttttttaaatcacaaaatgtgattatgcttaacagctgtttcctgtttctcttaaaataaaatccatttcctatttctcttaaaataaaatccattattcttaa

SEQ ID NO: 11835 - DNA, 213 bp, Homo sapiens
aggttttgttggatattgtttaaattcaatctacacctctttctgttgcttcaggagaggatctgtaagagtacacaaacagagtgagccattgccatagaatattctcttgacaggaccctagctcataaacatttcttcagaactatacttcaaatgggatgctttgtattaaaactttaataaatttaatttattttttcttttgaatat

SEQ ID NO: 11836 - DNA, 37 bp, Homo sapiens
attccaaataggagtaattgtactgcaataatttttc

SEQ ID NO: 11837 - DNA, 1014 bp, Homo sapiens
aaatcagtaatttccacaattgtatgttgaatagtgattgcctttaagtgtctgtgaacatggagtaatattactatttaaaataggccatttgtatctacctttggtccttaggaaaattcctaaggaagtcaattaatgcactttagatgttaaaagtatttgggctaaggttattattgcctgatatgaaataatatattcttattctcattgtttgaaacctgtctttgaaattagcacctttgttatttatgttgtacttgtgaaaacagtaaaatagtttggatagttatgcaaatgcacctatgtgtaacttccccccaaccccaagctgtttcggaagatatcataatcattctgtgtaacattatgcaaacttctaagcccaaacatgactttgtttttaaaaagttcattaatctaatgtctaggattataaaacatttttttgtgtctaaattggacccaaaacattgaacagtttggggtagtaagctaaatttcatcttgtggagattttgctaaacagactaagacccatgatttagctttgctcaaattagaatgtttagcatgagttgaggtaccaggtagtgttaagtaggttcatcacgctctaaggccgttttttccttagccagacccctgttgatagaccagatacttgagggcaaactgtttgctcctcctcttgaaaatgattaggcacttaaggacagtaaagctgtattttctggaaggaagactgtatcttctggaatagttttctagaaaactagtcatatacaataaaagtatcaaaaatattgggctctaatttgatctgacttagatgtctgagtttgtgttgtttctctaaagattttggcaagactcaagcaatgtggctgactgtaactttattaatttaaaaggtaggaagtaagctacttagtggtttcacctgtgaaataactattttgactgaaatgtaaaataagctattcaacaaagaacatattaaaacatcaa

SEQ ID NO: 11838 - DNA, 4669 bp, Homo sapiens
actgactggattcattctcataattcctacagcactactgggtgtcatttcattccattgcctagctcttttttgtttgtttctttgtgttgggagggattatttgggagggaaaagggaagtagtccttggcatagacatggatgaaattgccccttgaatgcgggtacttgaaactattgcatttcgttctccggtcctgtgatgtgaatgctctgaaggttttatggttgtggaggtggggtgggggacaatcattaactcaccagcaccaagcatcaccagctcccacccgtccctggtccaagacttgagtcagcaaaatggcgccacaggacactaaagaagccttaaaaccaagataatacgaccacctccacccaatcctgatgttcgcagggctgaagttaacagagcacagaccacctttagttagatgtggctttcagccttttagggaaagactcgaacaaattttcatctattcaagagcatgctgtttgcagcactctttatggtctcctaggagcataacttggaatgtacaggaatatttgtgtcctaaaaaaatcagctgcccttccaatatcatttttataacgttatggtttaattcaagttatacaaaggtgtgactcaaggatgtgcaggtattgactgatggaggccaacaaggaaaatattttttttcagtgagcccagagaaattagaaatcttcaccaatgtcagtgactgcatggtttccaaaaattcacatagtattacctcacagtaggaaggcttctttcccatttaggctcagagaacacttttacagaaatcaaacctatttacagggtggcaccccttttctgtggcatctgatctgtcatctcccaagctcctgaagttctttatccaggttgtatctttgctgagctgacaacagatttctctatggatcaaatattctaatcaaggaaagatacggtgaaacttcagtcttcttctggagaaatgctgaggcgagattagtgcagctacattctgagttgaaggaaatgcagtgttctgagggcccctttgtgtcctgatggctggaggacgcttcctcctggttagatcctcaagctccttgcctcattgacaaatgtctcctagtcccctttttccctctgactctgaggaactaaatagcttgactatctctaaacagagactggccctgccactgaccctcctgtccctctcatagcataccctgacagatactcaatagaaaacacctgcagaccatgtgcacacttaactttcctgcccaacctgcctccccaacggcccatgctagaatagcttgtgcccagaaaacaaacagtgacacttcatctcttcagcgtcagaaaatgggcatagaatgtacccatgcaattgaatgtatctcattctccactggcatagtagatataaactattcctttgcctaccttttactgccttatcctggaaatattggggaaaataagccatatcagtgagatttacctaaaaacaaaggaaggaaagtcactatggaaaccaagtagatgctttttgtaagtttggtggagcataactggcccagaagtctgggtgcctgagttctagttcgtgctctgtcaactggtagatttgtaattctaggtcttggttttcttacctggtgaataagtcatgatctctaaaacccttcctgcccttaatattgtctgaatttcaaggggaaaaaaaaaatctggttcctttaattatttttttttaacacttaaattcctaactttattagacaagaagtatggcccacttaacagttaaggaacgtaaatttgttattggctcgaaataataatttgacacaatactagtcaaccatttagaggccttggaaaaagaagaggaacagcactgaaaattccaagtatgattggaaattatctgggagcggggaattaaatattcaatgcatgaaagcaattgtactggcttctgggaaaaaggaaacaagaacattgctatggaacttgttacccagagaaaggaagtgaaaagatttacaattataagcacgaaattcattggcagattacctgctttatctacagacagattgttttggggtttggttttgtctaggcagcctctggccaggctccttaattgcttgctctgctaatatttcagcttcctctcttgactccttgaggaaccaaccgctctttggaagacaaacacttagccacctctgtgctccagggtaaccctgagaagctctgctgtctggggcaagctttctttccaaagggaatgagaggaaggcaagcaggcagggtcctgcagcgtcaggccttctggggaaagtttcctcattttgtttgacagggtcctcagtacatcagacacccagatttgaatataagttcagagcctgatctcaagctaaatcagaatgctttggggactaaccatgatcgagaattggccaaatagtatggcatataaacagccatccagccagccgcaagtaaaggaacgtttgatccttggcaccttaaatgattgattgccttcaataggcaaactgctggtctggaaatctcgttgaaggctgaatacttcatgcggagtaggacaagccttagcccaccttcaggttgaaaggaaaggccataggactcaaaagataatgactctgaaactaaactccttccttctgaagctgacagaggtacttagtgcatctcaagactccatctcataaaactcatttgtgagggatttgctctagatttttctaaacattttttcatctattgtccagacttgcaaatccagtgtggacctgatggagatacccttcacacctgcgctcccaccccctcggcagggagacgtctcagtagaggagaacacacccattatgctgggatttgtatttataaatcacttcccttttagggatgagcggtgtggggcgtgtgtgcgtgtgagtgtatgcgcgtgcgtgtgtgaccctcaagtgtactttgctcaatttagacgtgcagtatttccagaaacaatgaaaaaagtaagatgttttcttctttatgattctgctcaaaacaccacgtgccgcctcagagctttttctagagcctcggtcctcaatgacgcgcttgacctgttgatgcctcagcccagcgaagcccctcacctgtgccccgggcgacagctcttcagtgtgcagtgcaggcctggggtggactgccaggccttcgctctgtgccagcaacgccgttcttgttgctcctccatgaacaggggtacaagccctggcccctcctcgacactaagccccccacagactcagcctccaaggaaccgctgagcacccttgaagcatgtcattgtcagtgatacctttttattctatggaactctaacctattcgtgtcatattgaccttttgctgcatgagtcataaattatgaaatcagtcttacagtttttgaaatgtagccagcatttgtaaggctaaacctttttcatgaactgaatttaagtgaataaccaagccacagttcctcctcaaatggagagtgatgatcgacatttgaatctctttgccctttccaacggctatggcatcaggttctaaaataagctcgtaatttttcctgttattttaataatatggaaatattagcatagtgtttcttttgatagtgatagactataatccatatttaaattttatagagaagaaattttattgtactgtgatgtagatatttattatccaggtaaggatttgcccggtgtgtattttttacaattgagacattttactttaatctttaaaaaaaatgcattaaaaacacactcaaaaaaaaaaaaaaaaaaaaaaaaaaaaaaccagactgggggaaaaaaggtttggccttatcacagaatttttactgtgctgtataaatgtttgcaaatgcgaaaagtgtgcatttatagtgtgtttccacattaattaatgccgccttcaagagcaatattgtgcaggtaaaacgctgtttgtggctttctgttgcacagttaaagctgacccaccctatgcacaagacaatcaaatataaatctgtcctcctcaggatgcagataatactcatgtaaattatggagcacaatgtaagacaaaaggagacactttacatatgtattgttgatacagaaattatcagggcatgaatgagctgatgtgacattatgccacttctttcttttggttctcccttattaacttggcatttttaatttgaccatagagccaaattagttctccatgctttcttcgtagaaaatccttttttttcccataatgttttcatgccctgagaatcagaaaaatactacagaatagaaaaagatttacagtcattggaagatttgtgttttgcaaacagtgttaagtgatattgctagatggtgatatttttttcagcctaaaactctgttgaaatctgtgatcaaaatgttttaaactatccaaaaaaaatttgtatatttgggaaaaatggatttttacatagcttttgtatgcagatataaaactgtaattatgaatatagtgggcgtagataaactcataagcttaaattctaaaaaagaaaaagcttataacag

SEQ ID NO: 11839 - DNA, 323 bp, Homo sapiens
gtgcccaaagagcacaaacatttttcaacaaatatcttgtgttgtccttttgtcttctctgtctcagacttttgtacatctggcttattttaatgtgatgatgtaattgacggttttttattattgtggtaggccttttaacattttgttcttacacatacagttttatgctcttttttactcattgaaatgtcacgtactgtctgattggcttgtagaattgttatagactgccgtgcattagcacagattttaattgtcatggttacaaactacagacctgctttttgaaatgaaatttaaacattaaaaatggaactgtg

SEQ ID NO: 11840 - DNA, 176 bp, Homo sapiens
gaacctgaacattatagaaaagctggcaataatcaaggacttactgaagtagtctgttggttcagtgcatgcttagttggcagttaccaccctgtgctagcatatttcttttgctagctatccatcatgtaaccctcatgaaaattatctttatacgtggactataataaaatatt

SEQ ID NO: 11841 - DNA, 368 bp, Homo sapiens
aaatgctgcattttgagtggacttgattttctcagtgaagttcaagttctggacttcagccgctattgcaagatgcccaaggattgggtgctgctagagggtgtggaaaagaccaagatgccatggggcctgcaggacttctttctgggggtcctgtgctggagtatatgacagctgcggtacttgagggcttcattgccagaacacattatatacaggatgtcagagctaccagtgtgctgctgggagaaaatgctgcaaaattcatcttttggagggtggggggaaaacccaaaaacaacaacaaaaaaactctcttacagaattttccttaacattaaaaaaaacttgtcatatttttcaaaggc

SEQ ID NO: 11842 - DNA, 181 bp, Homo sapiens
atcacattgatgttaagcacacaatgggcaaatgcagaattatagttgggcctgagatgtctgaacgatgcttgggtggtaattttaatacaaagagcggagaattctgccttgtttgttcaccattattagtttggcgatttgatggtaacaaaatgccttctgtgttcactgttggttg

SEQ ID NO: 11843 - DNA, 4041 bp, Homo sapiens
aattgaaccaagaggcattatacatatagatatatacatatgtaatgtgtgcgtatcatgtcactatatataagaatattgtatgtcatgctgtttatgtgtgactaccgggtttttaaaagtagtgtctggagtttgtaatgagcaccgtggagactatgtatttaatgaaatgctctctttgaagtgaggtacatggttcttaactattcaaatatttattctgttagaaaaaaaaattttctgttttgcaatagaaggatgtggagaaatgctttcagtctacttttcttaaatctctgttcatcagtggcaattcgtaaaaaccttaagtgatactttgtttatatgtttataatttttaggtgtttcctgaaattttcacatattatttcacttttgttagtgctttatgggaagaatagggagtctataccagtgctgtgggaaaaatggtaacatttcagggcttctctatttgtgtttcatttctgtagatgtccatcgtgtttcactaactggcgttttcttagccatagagatgactgtagaacaatagaaactttaataatgatagtttttaacttttatgtttaaattttttttaaatcttaaaaccttcatatctaggtatccattgtgacagacaagtaaaattgcaggtgatttgataattaagcacccataccatttataacttctgaatttaaaaagttatacaatgccagtttgcaatagttgattttgatgcctttgtagaatattttttctgaatccttatgctcttttaaagccaatgattcccactctgttctctgccttgtctctctttgtcttaaaatgctttagtttccatcaggttcaagttcttgactattattctcttataagtagtaggcgtaaataatcaggagttagaattctctcagaagggtctatgatcagtattactttattaagaattacctttcattttctctttatgttattctttcacttttgtagattacatttaatagcttgttacctgtgattttattttaaaatatttattttgatatgatgcttaaatattatataaacatttggaaaagtaacaaatagagtaaattgttaatgtaaatagttggtgcttactttcatttatgtttattatcttaaagcaattgatagattttacatctttgatataaagcactgccatatttatattttaaaaggaaattagacattttatatgtagctcagattaatgacatttttattttgtgtattagtttttgcttttctgagctttttaaagtctaacaaatctttttagtcatcttttatatacttttagttccacatgaaataaatgttgttaagcctgtaggactggatgaatggggttgtgaaactgatttgacaagagaataatttacaaaaatcaaatgagtattgagaagccacagaaatatcaaaaatggtgacatcactattaggatgaaaattttatgaaattccaatgctccctttaaccatataattaaattacaaaggtatacataattaatctaataaaggatcatgaggaatgccaaaagctgaaattttagcaagtctggtgttttaaattcattataaactatttattaactaatgtaatgtcctcctctaagaccatattgtaagagtcttgttaaaatgatggattcaacttctgcctcggatgagaggttggaaatgtagctgcttttctttagaaaatatgtagctgtcatcatttggtactgcctaaaaagagttagactctattggcaattgatagagtattacccacggtgcttattattgtttatgagcttccattgtaatgattcctttttatttgtagcagcataattatttccaaagaccccagtatttgctgctatttttaaaactcccctgatgtacctgaacaagaggatttcctcacatcatttccttgtgtctggacatcaggggtaacaactgtacttactttacaggaagaaattttaaaactgaaaactacctgggatcatagtgtttctgtgattttatttaattgtgtatagtaattatccagtgccagaaaaaccgtcacttgcaaaatactttgcactcaaaatgtttttacaatgcttctaaatgttactggtttctgctttcttttgactacttgactgacaaaatgatctgactactccatttaagagcaaaggtaactcatgtttaggtaattaactgcttgttttaagtgattatatttcttccactgtttttgaaaaataatcaaagatagcattcattgagagacagtgacagatataatttactacatatattgatttttaaataaagttgccttaaataagtgtatgtaagcagtagtagttgctatgtactgatttacctcaaggtgcaaaataattaaacctgtacatattccatttacaaaataaattcagccctgcactttctttagatgccttgatttccagaatggagcttagtgctactgaataccctggccacagagccacctcaggatattcttttctccaccctagtttatttatttatagatatctgtttacaaagtctgtagtaaatcctgatgctgaccatctgaaatgtactttttttctgaatgctgtttcaatctaaaatagcagcttttgagaaaacaatgatgtaaattccttatgataaaaggatgattctatatattctttaatgatattaaatatgccgaagccaagcacacagtctttctaaagtgtgtgtatgtttgtgtgaatgtgaatgatactgatcttatatctgttaaaagttgttttaaaaagctgtggcatcccattgttcatatttgccaagtcttctgtaaagatgtctaggacgaaatattttatgtgctaatgcatgtatttgtaaaccagatttgtttaccactcaaaattaacttgttttcttcatccaaaaaagtttatttcttccacgtacttaaattttctgtgtgggtataatatagctttctaatttttttctttcacaaaggcaggttcaaaattctgttgaaagaaaaatgctttctgaaactgaggtataacaccagagcttgctgtttaaaggattatatgatgtacatcagttctataaatgtgctcagcagtttaacatgtgaatcctgttttaaagtgctcagatttcaactgtgtaagccattgatataacgctgtaattaaaaatgtttatatgaaataacttaatgttttaaatttatttatgtagatcacatcatttttatcgtatgcagtgcaaatatgtgaaatgtcttttggtttattccaacaattatttattttagaaagtaagtttaaagactttaaggacattcaaagtttaaaatagtgttcaaattgcaaaatttggcaatcttcatataaattggtttcttttctaacttttcaaaaactaacattaaatgtcaattataggaaaacatagttggaaatgtaatcatccaaagatcatttttaaaatgaaatttaattagcacatattgaacatttgacttaattgttaaaccccagttttgttttgtttttttaatcagatttttgcacactgattagtttttgtgttgtggcttttgttgctttattattcaaggttttttttttttttcttccccatgggggagattgtcttccaatgtttaactacgtttaaataaataaaaattgaattttattgttcatttatataaaatctgataccttgatgtaatttcacaatacagttccaatttttatggcttttataattacaatgatattttcttctataataaaatccaaagtaaacatttaaattgtagaactgatatttttcatttatatgaagtataagcctctactgggtctatattgtgaatcatcctgcctttcaaatttgtttcataattgttagatgaaaactatttttttggagatgttactgaagttgattgagcaataaaagtctacttaatta

SEQ ID NO: 11844 - DNA, 674 bp, Homo sapiens
agagttattttaacctcaaaaattagctaactttttgcagatggacttggtggtgttttttgttgtcttctttgcctaggttgccaaaaagatgtttgccttccaccttgatgcatcctgttttgtgcaattctctaaaagaaggtgccaaagctttttgattgctgcaggtaactgaaacaaacctagcatttttaaaaaataagattaatggaagactttaaggtattttaaaattcgaagggtatccaaggttctgtatttatttattggggagacactaacccttcaaagaagcaggctgtgaacattgggtgcccagtgctatcagatgagttaaaacctttgattctcatttctatttgtaaattcttaagcaaatagaagccgagtgttaaggtgttttgcttctgaaagagggctgtgccttccgtttcagaaggagacattttgctgttacattctgccaggggcaaaagatactaggcccaggagtcaagaaaagcttttgtgaaagtgatagtttcacctgactttgattccttaacccccggcttttggaacaagccatgtttgccctagtccaggattgcctcacttgagacttgctaggcctctgctgtgtgctggggtggccagtgggactcaggagagagcaagctaaggagtcacca

SEQ ID NO: 11845 - DNA, 1447 bp, Homo sapiens
tttggaagagattcacgatttcaccatgaggacacttatctctttcagtggtcctcccaagaaattatttaacaaactgaaaggagattttgattaaaattttgcagaggtcttcagtatctatatttgaacacactgtacaatagtacaaaaaccaacatagttggttttctagtatgaaagagcaccctctagctccatattctaagaatctgaaatatgctactatactaattaataagtaaacttaaggtgtttaaaaaactctgccttctatattaattgtaaaattttgcctctcagaagaatggaattggagattgtagacgtggttttacaaaatgtgaaatgtctaaatatctgttcataaaaataaaaggaaaacatgtttcttcaaattgcataatggaacaaatggcaatgtgagtaggttacatttctgttgttataatgcgtaaagatattgaaaatataatgaaataaaagcatcttaggttataccatctttatatgctattgcgtttcaatatttaagatttaaagtgattttttggtcacagtgttttgttgataaaatttttttagaattgaagtttgaattctaagacttgaaacaacctgatcactgaagccaactttgtcccagcacattccttaagtcctaattgggaaaaaaaaaaaaaaaaatgaaatagttgaaaaactctggggtgtaaacaaatgattgtaaccctacacactattcaataagtagtagaaggagcatcacacagatttcagtctaatctgcccttctgtgggccataatataaacataaatgtgtgtaatgataaaaagtcattttcttcaaagagactacagctagctgcacattgtgtagagcagcttctaaattgttagactttgtgttgaaatgtaatattctatttattgagaaagtgatttaaaattattatttttaatcatagaaatcagggtttgggctgtattgatattgtcgatcatgaaatgtccacacttattctaagtggccaattatttggaaataaagaaggaaataaagatggcttcacatggaaatttaagttctttcagggtggagatttacttggttcatacaccttttgcctgaattaaagtatttcatgtaggaggacttttatcctttttgatagacagtttcatatatcttgaactcaatatctcagatctcttctactgtattactgaatagcatacatacatagacaatgttcgccattcactagatatttttttctattatcttacacttattcaagcttgtctgtgattaatggaattggtgtcagatgctggaatttattctgaccaatgaacacagctgactcaggggagtacaatctcctgccaagtaatagaaccaaacccaatatgcataaaagaaatacaatactccaggcttta

SEQ ID NO: 11846 - DNA, 2042 bp, Homo sapiens
ctgtggctttggtcccccagaggcatagatcctatcctgggagagtttagatccagaacatcttggagatacacagtagattgcagcccttctgatgagaaatagggaatactcccagtccaggcccagcaaaaccaaaatgctaagcaatgaatattaaggactctctagctgcctgggcattactgttgctaaaagaagaaagtttaaaaaaaaaaatgattttctcaaggaatgcccctggaacacagctctgaagagagtttagtaagtaccatgtaggttctggattctaagcttacattgctctttaaagaacttataaactaacggtttaaagcagtggttctcaaagtgtggtccctggactatcagcatcaaagcatcacctgggaacttgctaaaaatgcagattctcaggctttctctagaccaactggatcagaagctctgggggtgaggcccagtattctgtgttttaacaagcccgtcagggaattctgatgcacagtaaaatccgagaaacactggtttaagaaaaaccttgtaatgatcgaatacccactctgatgttttgccagcaaagggatatctaatatttcagaagcctctgagccagtctttgaaaaaatacaactatggcatctgcagcacaaatatttaaggacatcagaagcatgtcaaagctatttttaaagagagaaactgtataagatgtttacttcatagagatttatgttttatgcaggctgaatgtttatctcaaaagttaaaattatccattctcaaaagttaaaattatatatatatatatatatacacacacacacatatatatatatatataattcaaagcacaataattgaaagcacaataattgacagaaaaatacaggttctattaataaattaataaactgttggtcttcaaaatagaaatgcatgtaatatccatattagttttttcttggtagacaactggaaggttttcttttttttcgtctatgactaattttctttattcaagatacctgaactggggtgctttttaagaaaaatttgggaaatatatatgtttctgtgatatacatatatacatatatatgtatatatatacacacacatacatatgtgtgtgtatagtatatatatatatacacacatatatgtttctgtgttcctcttttagcttgaggggcttgtttattatcttgctctgtgcctcatagggaataaacacaatgaagtccagggttgtacaacattccctttcctaagctttgaaatgtcagtatagattattaagtggtttatattacagaatctgggattcagcagactttcagtgtaaatgcttcctccatttctcctgagagtgggtgattttaattctatctctgaccctggtcctaggtttctaggagagttttgtttaactaagaaattgacagaattcataggtgtgggtgtagagttcaccaagataagattatgaatataattaaaggtctgcattaaaaggtgaatgattgaagagtgttaaagcattagacttagcacattcaataaccttttcgtactccattgttaaccaatgtcatttaaattttgagtactatttgcttttattgcttattttcattttagtgtgcacagtttctcggtatctctattggtcaaagaatattaaatctgtctctgaattacttcaaattctcaggtgaaacctattggtgtgtgtgtgtgtgtgtgtgtgtttattttgcatttcttgttgcctttttgttttaatgtctacataaaatatttctaaaattgatgtttgtaacaatttgggtttcatgaaacaaaaaggaacattactatacttagtgttgttgacttttcttttcctgtcatctcctctttactggattgtaccaatacattttagaagtgaactggacttggttggcattttagtttaatgactgaaaaagtaggttgaaagctctctgtattttagttaacaccttgaataaaatggaaaaagcagttatagc

SEQ ID NO: 11847 - DNA, 1246 bp, Homo sapiens
tggggtggaggtgcagagctttccagtatagccctgtttttgtaggaatattaaagtagtagagtatcagggttttgttggcattcactgagaccttgtattagcatccaagaaatgatgagagagagagaaattatatactatgaaaagtgcacccccacactctgctagaggaatgaatttattcaagagccattcggggcacgtgtgtgtacacaccgtatacgttcacacacatgcactatgtaaacatctgagtatgattacacatttaaatactgcactcaccaaggttaaagtgggtaatcataagctcctttttatcaatgaagtttgaagtttttctatttttcactttgccaaaaatgttttacactcacaaagatattctcacttagtcaactcctgtcaaaatgaaggtgaactggcatggcccgatcactgtccataagggagaaagtggctcattcctggtagaagtatgggtggttatcatttcaaaattattgtgattctcacctccctccccacctcagtgttttgtctgtccgcgcccaagaaagataagcaagtatttcctgctggatgggggttggcaggaagctgttaaagatttatgccagagccttgcaggatggagcacctctgggacaactaagagccaaggcccaccaaggagttttccacccgtctctcatggtcacagcgctagtcattcatttttgagaagttgcttcttttacatcagaaaaccagtcaatcatatggagacttcttttgtgatgaaaaagggctttagaagttaaatacatgcatgcacatgaaaacatgcacaaccacagcctcaatcttgtatttagtttggggaaagagaagagaatttcctgtggattattttttcctcaagtgcacctctctggttaacccaaactctgcaagaaagcactgtgactaaaacatacataacgcctgcataaatattccatggtttcagttaaatttcagtttttagcctttacacatgaggtcaaaggagtgacgaaaatacaaagcaaggaaaaaatgaaatatctggtttttgctgaatgcttaatttattttttactgtgccactccaatatttatcaaatccaaatagcatgaatgcttctctgtagtaatactaattttgtgccttttgtctgctttcttaagaccagttgttcacactttgtagatattagacaaatatatttcgattgaatac

SEQ ID NO: 11848 - DNA, 2648 bp, Homo sapiens
agactctggggagcagatgttacctaaggtagtgaccctgcattgtggtgcctgagccctggcagaagctcttgtaaaatttgttaattgtttaaaccacttcttttggagagcaaggggaaggtcaagaaggcagttttatcaatattgtgtcagtcaccacaaagtaggccagataagttaaaaaaaatttttttttaaataataattgaaacttatctcaaatggagattttggtgggaggaggagaaaacaattgtttttaaatcacacagctcaacggttgataaatgattctgtcattctgttacaggtcattcttttactaggcttagcttccaaattatgctttatagctgtataaacatcgtgattatattcatctacttagaaattgttttatttttaaattaatttgcttagctgtttgttttgatgcttagattatgttctgttaatgggaatttaacatatttaagaaaccaatatttaaaatgttggtctaggtttttttccttaacatatattaccaggctttactgtatttcactcagccttaaatgttataatatttttggataacggttattaattctttgagaccttcgtatagcctataaaatgtatgggagatgttggtattttatgtgtataaaagcaacaatatcagcaacttcgtgtttatactgcaccttggttgttgatgtcaagtaaaaaaaagattgttttgtaacacataaaaaaatggaagaaactgataccacacctaaggaccaaagataagaaagactttttgcccaagacagtgaaagtaattataaaaacaagctttgaccacttaccaagtatctgaagagatgagttcatactatgatttagaaagtggttcaattcccctgttggcatatgattatttttactaaaattaatacagctctgtgggtcttccttagtgttttctttgaagccaatctgttttttttaggacaccagcctttggtttttcatctgttcgagatgcctcttctctgtctccttatcagatagaaatggagtcatgtgctgctgcttcatctagcagaggttggcctctggctctgacactttttgtcagttgtctttaggtggtcctgaatcttgggcccttttgattgtgaatactgtgtagcaggatcttgagagtccttgttcttacataggcattgctctagtttgtctttggcaaaaaaaaaaaaaaaaaaaagtaaatatccagggaaccctgcccagactaatactgttggtggcataagagaatcaagccattctcaagagataacttcataaccagaattgtctgttggctagcagctgtcacagataggcagggcacttgggatatgacctttctgtccaggtgattcacagactagacctttcttatcctcctcctagagttttgacttgggactctagtgttaagatgatgagcccgtgcatcaggtccttctgcactttggtggaagtctcccagggtaggtttcctatttgaaacagtggaatcatgtttccagtgataaagtttaatgacctcatccttttttttttttctcatctgccatttgtgtgtcttagatgggttttaattgcatgaatgtggctaatgtggttctcagaaattggtcagtatggcccaacatagcttctgctctgtcttactgactcaatacctttaggatttgtatcagagtttggatactagtgttagtggtggtgtcaccactacttaattgggagataatgaaaccaatcatggatgctgtttttattgggcatgtcatctaagagaggagaaatagctgggttttgggtctaattatgaataaggactgattcagaaaacgagtttatggtaggtagactaaagtttcacatcagactgtaccattgtgatttagacctatctaaaattcagagcatatcatctgggctacctcagggtcaccacccatgtattgggcttagtcaggattgacagatacattctcagctggcctgtcatataaaacatactgtcattgagcttaagctccgcttgttctgaggtttcacctccatgtgtttcattggtgcaaaagtggatctcttagttggtcacttaattctttctttttcagaaagatagtatgttcactggtatatttggtcactcttagaaccttccttcacattgttttttatgggacccatgaatggttagcctttcttttctattgtagaaggaaataaataggagtaaaaagaccattgtagtaaataagttcaaggggaacttgggaccagaaaccactgttatgtacaaaaaaatggcaaattcaataaactcaaatttaaaataatttttaaattaacagttatgataaattttatattttatacaaatagattgcttagaatggttctcaagaattataagagaaatgaactcacagtacaaaaattttataattactatacttgtgttttgtttgggggctgggaaatgtatttttacattgtagccaatcattttatatttgtcaatttaaatcttatgggtcttttttttttatctctcttgatgtcagattttatagtctttttaaataaatccatttaattaaaacgtt

SEQ ID NO: 11849 - DNA, 822 bp, Homo sapiens
agataccaaataaagccatttattctgttttctgggataatgtaaacatgcctctgccttttccttcaaaagtggaattagaaagctggagtgcttcttcagatggactaaatttatgtcgtgtgtgtgtgtgtgtgtgtgtgtggttacccattttttagaaggagccgtacagaagaaaaattattctacattatgtaggattgctgtttgcattgccattttgcataagaaagtaatttttgattttgaaaatctcaaaacttttagatctgaaatacagccatgtgatcgatcatattctaaaggctatttaaaacatgtaaaaggatttggggaacggcagaaaacatgcagtttgggcatttgactgacttggaagtctaagcttattttagttataactattaaaatcatttttaaaaatttgttagttttgctgacagagaaaaatcgtcagttgtcagattttgcacaccacaataaatgtaccaccacacacggaatatgctaagaaaactatcagatagcgtttgatacactagtcattgtctcaatcactgatcctgtaagttgtcatcaaaatatgatttagaaatattggccaaggtgttgctttaactgaggagaaaagaaagcacactgcctaaatgtgtaaaagaaaaatgcagaggttattaaaatgtaaagaagtaacaatctttggatttgtctatacatatatatatatatatatggctttgccttaatatacccccttttttgtttgtgactttcaactgtaatcagttaataaagtatttattctctgcattcaggttc

SEQ ID NO: 11850 - DNA, 436 bp, Homo sapiens
tgatgaaagcctgtgtctttgagggattctaccctgaacatacctcacagatcctccctgtcatgccacatttcactgattggaatgtggaaatggaaaaggaatttaggatgtgcattttcacctgaggtttccctgcatccctgcagtgccaaagccccaccttcagggaccacctggaatgtgtgaggggctgacagcacagtaacgtgcatacatatctgcagggctggaatggaagctttaaaggtggtagtgatttttattttggaagaatcatgttacctttttgttaaataaaatttgtactcaaatgatgatgtcactgtttttaatgtgcaggtattgaattatatggtctgacttaaatcataactagacttgagtgggctgaataaaccacttcactaacttgaagttcaaaaggatggaaaat

SEQ ID NO: 11851 - DNA, 1992 bp, Homo sapiens
tgtcttatatagactgaactgtattcagtaccaaatagtcacgcttaaaagtgtgtgaagactgaatccaagaagtcttgggattggattttaccatatgaaatgtttcatattgaaaacacaagatgacctttctaatgagctgtatgagaggtgaatctcctcactgtcactgccatagccaagcatcctcatgagagtgagcacatcggcacagcatgcatccagctctggaggccacggtgcaggcatagctgcctgctgctctggcagaggccagtaaatacagttcctagaagcagcctttgctgtctttttacactgtatgcggtttggaaatgaatgtagaaacttactgtgggcatttacctttctgtgccagtttggcttttattgcctgaaccttatgctgacctggagaggagatgggggacagtgctgttgtggggccagcagtgaatctgtatgcggagagttgtgttgtgctgatgtggccgttggtggtcaggtaagaggctcggcaccttcttggaagaaatcatgtctgagggtgtacgtttgatatgatcatgccagattggagaagatccaagccaggaagatgggcttgaagcaaactgcattatcaggagtaccttggtgagaggatcagtgtaaatcctaataggtacaaagacttttgtgttttggctttgtcacagatttattgaaaaacttttttgcttctgcttccatttttagcattttagtttctggttttcatttttggagattccttgccttttaaactcgtggtttttctctcattttcttccctctctccctccatctctgaccacccccaccctaaccccccacccccaccatcctattaaacatttttaaagccctaccccagacattggaaataggtgacccaagtagggggagaaagtattattgttgatagcttctgactaggtgttaagggatcttcattatgaacaagatgaatttttttctggaaacactagatgttatcaatcaaacactaaaatgtaccatacaaatcccttaagcctctcaaatattgagctttagtacaatcatggatagacattctggtgatgatttaggggctttttatacaccacatactagcttctttctctataagagtgcctctttcataaaaccaaatgcttgtctgctagcatacttttcaaagggaatccactgttttctcactttcctcccatatctccgtccttcatccaaaaccttcccagaatccatcagcaagcatgtttgaggcctgtggtgtaggggactgaattttttttttaacttctattccattttaattgtaggatatctttgtccatatacccaggtgtcctgatttgaatgtactatttgatcctcattgtgttcaggcaaaaaataggaaatgagtaattttgagtttgaaatctctcccagaagacaaactacttcagtgagtaaaagctttgacattttatgttttattcataaagggggttaattatttgctacaaagaagcacgatctattttcatcatcgatttgaaaatatctgtaactcctatagatcctataggcagagagttttcctttctgactttttccctttgctttcgtgtgaccacatgttttctgtaccagtcactggggaaagaagtgagtttatctcgtttgttttaaaagttttgcttgtctatttagcattcctttttgggtctcaagatttatggaacaataaatgtcatttaatgctgtgtgcttattttgaattcctcatcaggttttagaagcggggtaaaaatacttagatgcttatcagacttgaaattatactgagtggcattgaacgtgagtttgtcccagtgaaacaggctaaataaattttggcaccagcaaatttgttactttgtttttttaatagtaggatgtacacatttcagtataataaatgttttctgattgttttgc

SEQ ID NO: 11852 - DNA, 2385 bp, Homo sapiens
tgaagctcatcacagcgaaccaggtctctcaaaagaaaggacagatagaccaccctcatcaatgaaaggaagttctcaaacacatcctttggaacttactattgtttcccagttttagttttttgtttcgtttcgttttgtattttctgtaacagaggactatcctcagtctgcatgtaacttttatgatagttattccaaattcaagaagaagcagtattaacatcaattgatcgacacaaagtaatttttaatttaattcatcatttcacatgtttgtactttgtcttcccattaacctttgccagtgttatgattgtataaatttttttaaatgctggttaaacaggaatgcttaaagctttaaaagtttaacagtctaaaacatttttgcttttattcaactgcagaataatatttttattgctactttgagttttgtttcgtatcatgtcctatgctagaaatatttaaatgatgtgaaacaaagcaggactaatttgaactacagctggactccgtttgtgtgatggtgatacatgtcattagttgcaacttctttggggtgatctatagtttgaaaactaaaacctcaaagacagatgttacagaatcagccagttctgtaaaactgatattgtctattggttattgatcttgccatctttatttaaaaccatgtcccttctatgatcccttaagaaagctgcaccaaatcatctgcctgttttttcttgatacttactgaaatagaaggttttattgcagggtttattttggtttgtttatatctttgttgtgaatgatgcttttttgtatttattaatatcaaattcacttatgaataaacttgataatggaaacggacaaaaaaaatcaagtgcgtgtgtgtccttgaccgtcttctgtttctcacgtaataaacaaattatcgagacatgggagtgaccagcaccttttctttaaatggtggaacctggtttccttttaccatgaaattgtcttacttgaaaatattgatcctgatgagagagaagatggtgccaaggctgtctttgtataatgggctcaaattctctacctcttcagggctaatacttttaactgagctgctgcctatagtgtcttttggaaaactacttaaagggtgattttctgttactttttagcaaatttttttaatcacctcttgctacacccattcttttcatgtgcagccgactcaaaaattaccagttttggtgaaaggctaaattagataatttggaaccaggatactaatgatttctcatctttacttttttttaatcctaatataaagtgaatttgattgaaaaggcaaatagctattagggaagcagtttgccattgttgcagagttatctgtactttgtttaactgaaaaaaatgtagaaatatatgtaaagaatttaagacaagagtactgaatggatgatttgtcataggctttcccctttctttctgttctagcagcaggaaaagtttctctatatcctctccctctacctgtaacaattttgttttctactgttaattacattgtgtatttatagttctatgcttactgttgtgcatatactggcaataaaactgtacataacattacttgaaaaagttaataatgtatatcagtttttctgtctcactgtgtaacaagtcactcagttttattttaactttagacggtcttgtatcagtggtggtctcttgaattttgtaagttcatctgaggagaaaagatttttcaggtgtagctaccacaatcaaaggtatatagctacatacgcatgtatatattacagcttatctgtaagaagaaaatgcattttaaacacaactcttctcagtagcattttatgacctttggatatgtttgtaatcatttcgaatcaaaatattgatttaattttgacctctggtttaagatactgctttaactactgttgacaaccaagtagagtgacttaagctgaacagtaactaactggaaaattagataagcacctggcatctaatggcaggcaggcactcaagaaatgaattaactacataatggaaaagtatggtttaatgtgtccaaatgaaagctagtagatgtaaacatggaaaaattgtgtttacaattttataatctcagttgataagactataagaaagctgattatttaaatcactatatacaatacacccttaatttgttcattccagaaacatactgagatgtcagctacttaaaaatggtcacaaaaagctactgtttatatttttcctcctgctattctctcccaaattaattattaataagtgttgttcatttactgcactgctgagaactaattaaaattatatattccagattgtaaa

SEQ ID NO: 11853 - DNA, 3514 bp, Homo sapiens
ggctttgtagtacaagattgaaaaactcaacaagaatttaattctaaaagcaaaaattggtttgagttttcaagtttactaatttggattgtgagaaagtaccaagtaccagccgtccaaactgatcacaattaaaattctgacagttgccttttttttcatctcaaatggcagcatgggactgaaacatgagaatgccaccttttttaaaacttagtttagtgacaaagtcattgtcttttatgatatagttaattttaaagagatttagtattaatgtgagttgaatttgcagtctgttttttaggtgttctgaagataaatgccaaaaatttcagctcttattttaatggagtgttaaaattctgattcatatagtcttaaattatcaactccttaaatgtgcttttgaaccaatttgcagaagctcacatagcaagttcataagtttccaaaaaggaagcccatacataacagtggaggtgttttgtctaaccatcaaaatgtttgagacttttttttaaacatttctgagttcgaaggtaatactgacagatttcttccctcttccctccccatcacccacctcagtgataacacattactgatagaggaagtcattagaatcatttttaagtttcagatataggagacttcatgcaatttggagataagactaattattgggggttttccttggattttttttttaataactgggggctattttatcagcttgcctattaaaggactatggtaagtatagaatcttaatggttgccagttagtaattctttttttttttttttttactgtagacacaagtttggccctatcaaaaacgatgaggaaaaaagattgcactccaggattaggaggtgtgagatattttagcttttttgtcttatctgcgtgggtattgctgctttattttaaaaaatcctgcctaaagtaaacactttgttttaaaatgatacagtatcagattttgttagatgctagaaatggatttattctaaaatttggaactgtcgtacacattctatatgtaagatagcacacaagtagaaatatttaaaagcagtcttattcacagattgcagtaattctgtatttctactaagataatctgctttgtgccaaaacagtaatttccaaacttctgttcaccatgaaaaggcaatcttaaagttcattatgtaaaactaattataaacaggacccaatttatattcatagatcctctcaagtattatacaatttaaaaactcttgttccaaagtcctgtcttaactattgaaacaccttaatctgtggttactaatccagcaaattcaaggaaccaggctatgactaagaatttaggtggaattgatgtctgggcaattaaaataaatggcataagagcttaaaaaccaaagttgtgccagtggctttcaactagaggcagtaacctgtcattccagaggatgctgagaaatgtgtaggggcacttttttggttgtcatatttactaggggcttctgttggcatttaagcctaaagacactcacccctgcagtgcatgggacagcctggcacaatgaagaattagccctcccaaaatgtagattattttatttcaagggatagggcagattaccattagaagcaaaattaaaagtacaagctgggcaaactgacagaatactagataggagagactaattccaaccttctaaatttggctagtaaagtgcaataaaggcattgataagttctgttagctcaccatagcacttgtaaatcaggaattaataattgaatcagatttaagggctctgtcctgttatacatatttaaggcagaaaaaaagttacatgtcgattaggtacttatcaagaatggtcaagctgagattttggttaatagagtaagcttacatatctagagaaacaacatagtggaaaaccgaaaaaaaaaaacagaaaaatctaccggtaatttcccaatagctttgaatattcacagcagagctttattacttgagagaaagactggaagacctgaaagccacttctgctttctaaccccagttccttaaatattgaaatcttgtacattttgtgaaattccagtatgttttgcttaaggtgttaataaaattagtttgcatcatgtagtcattgagtgagggggagatataagccaaggattttaaattgacccttagctatagagaatttgctataagctagtcttgtttgtaaaaaaaaaaaaaaaaaaagaaaaagaaaaaagtgtattttactgttttctgtattaagtaattctgtaactgcatggcagtctttttttttttaaataaatatagttgttactggtcctgttgtagcagtgaatatagttaaaatacgtacattaaaaaaaaaattattaggtccttaccagttactgtcctatagctcattcctactagttttcttgacagatttgtattcccagtgtcccgtattgccactcaaattgctctactatgctaagtccttgttaatagtcttaccctccttgaaacacttgaacacttgatgactttagctttgaggagataccatctccaggtgtgctttcttagtctttgcaggcacctcttcccttcaatatctgttcttcgtatttttaaaaaaatttgttttagactgccttgttctgtgtcagctcgctagctgatctcatttccttccatggtttccttaccatttatatgcaaatgactgtcagattcatatctcctttctagatcttccctaattgatgtatctaattgctaacaaatgctctttgctgtctcaggcactacatgtcattgatcttgcccccaatcctgctcctcctctcatgtttcctctttgactaaatggcattaccactaccaaccattcatttgtcctttttaccaattctccaatgctgccattttaattcaggccatcaacctacctaaattatagcaacagcctccttattagtctccctgttttttatttttattcctttctacactacaaccaaattgctccaaaagacttactgatcatgtcactgcattgctttcaccattgctcttagggtacaatacaaatttatcttcatctttaaggtctcagtatgccacttcatctaggaaaccttcattgatgccctctagattaggtgcccttactatccattccctatacaccctgttctttcccagacatacacttggcacactttattgttactgcttattgatcactgctagactgtaagctttgtaagggcagggaccatataagccttgttcactgttatatctctagtgcttagcacaatgcctggcatttcaataaatgtttggacaaacgaatatttgtgtagtgttttacaatttttgaagctctttcacagtcttatttgaccttcacagtcattctgccttagactgtccattgggtaacttttatccacatattactaattgaaaaatgaagac

SEQ ID NO: 11854 - DNA, 843 bp, Homo sapiens
gaaaaccacccttcaacctgggtgatgctccttggggccctacctagagggactgacttttgtccattgacacaaaccccttttagtactgttttgagttttgtcattaaaacagccacctttgtattttataatttatgacagaatgaagtcattttgaatctacatgaatgaacactttggattttgttgtagtttgattctagggtagaaccagtccatgctgtttttattttttatctccgtaattgtagaatcatgtttactcaacgtttttccccagctgcctcagtaactgggcactcggaggccttggcacgggttctggaggacagacagcaattctatgagtgctcactgagatacttgctggagacctcagaaaacacaagtgccttctccacggtgcaattcagacttcagtgatctccagtggtcaaaagacatttacccttaatatcagacaacatttatattttagtgaagaaacaagttctcgggtggggaatctatgtttcactcagatttatatgtttggaggaaaaaagcctttttttgtaaaatatttaaatttatataagaaaatgttagaaaaaaatatggggagtgtatataaaacttgctttattgcatggggcaggggaagtccaggcctaatactcctaaagtaagagttgggtcctttttttcttcaatacaactgtgctgtaccttgtaaagtattttatctgctgcttatttgtggaatgaaacctcaaacaaacccaaagggggagggtagggcagggcaggcagattggaaatctgcctgcagattctattaaatacacccttttgccaacc

SEQ ID NO: 11855 - DNA, 275 bp, Homo sapiens
gctggaggaagccagtggggtcccccctgagtgggctgggccctctgtccacatgtggggacagggctggtgtggctgctcccagcctcttgctcagagctaggcccccaaattgccttcagccctaacatagtgtctgctgctgcctccctggggaccaggagctagcccagtccctggagctgtccttcattccgttaggaataacactgcagccctctccaccctccggccagcgagtggtcaaggatttttataaaaatcacgataagatt

SEQ ID NO: 11856 - DNA, 331 bp, Homo sapiens
gtgaggtcccaggctggaggcgctacgcagacagtcctgctgctctagcagcaaggcagtaacaccacaaaagcaaaaccacatgggaaaactcagcactggtggtggtggcagtggacagatcaaggcacttcaactcatttggaaaatgtgaacactgatgacatggtataggagtgggtggggtgttgagccacccatcagaccctctttagctgtgcaagataaaagcagcctgggtcacccaggccacaaggccatggttaattcttaaggcaaggcaaatccatggatgagaagtgcaatgggcatagtaaaagtgcatgaattt

SEQ ID NO: 11857 - DNA, 2259 bp, Homo sapiens
gcctcggcctggctggccaggacacactgaaaagcagcctttttcaccatggcaaacctaaatgcagtcagtcacaaaccagcctggggccttcctggctttgggagtaagaaatgggcctcagccccgcggatcaaccaggcagagttctgtggcgccgcgtggacagccggagcagttggcctgtgcttggaggcctcagatagacctgtgacctggtctggtcaggcaatgccctgcggctctggaaagcaacttcatcccagctgctgaggcgaaatataaaactgagactgtatatgttgtgaatgggctttcataaatttattatatttgatatttttttacttgagcaaagaactaaggatttttccatggacatgggcagcaattcacgctgtctcttcttaaccctgaacaagagtgtctatggagcagccggaagtctgttctcaaagcagaagtggaatccagtgtggctcccacaggtcttcactgcccaggggtcgaatggggtccccctcccacttgacctgagatgctgggagggctgaacccccactcacacaagcacacacacacagtcctcacacacggaggccagacacaggccgtgggacccaggctcccagcctaagggagacaggcctttccctgccggccccccaaggatggggttcttgtccacggggctcactctggccccctattgtctccaaggtcccattttccccctgtgttttcacgcaggtcatattgtcagtcctacaaaaataaaaggcttccagaggagagtggcctgggtcccagggctggccctaggcactgatagttgccttttcttcccctcctgtaagagtattaacaaaaccaaaggacacaagggtgcaagccccattcacggcctggcatgcagcttgtccttgctcctggaacctggcaggccctgcccagccagccatcggaagagagggctgagccatgggggtttggggctaagaagttcaccagccctgagccatggcggcccctcagcctgcctgaagagaggaaactggcgatctcccagggctctctggaccatacgcggaggagttttctgtgtggtctccagctcctctccagacacagagacatgggagtggggagcggagcttggccctgcgccctgtgcagggaaagggatggtcaggcccagttctcgtgcccttagaggggaatgaaccatggcacctttgagagagggggcactgtggtcaggcccagcctctctggctcagcccgggatcctgatggcacccacacagaggacctctttggggcaagatccaggtggtcccataggtcttgtgaaaaggctttttcagggaaaaatattttactagtccaatcacccccaggacctcttcagctgctgacaatcctatttagcatatgcaaatcttttaacatagagaactgtcaccctgaggtaacagggtcaactggcgaagcctgagcaggcaggggcttggctgccccattccagctctcccatggagcccctccaccgggcgcatgcctcccaggccacctcagtctcacctgccggctctgggctggctgctcctaacctacctcgccgagctgtcggagggctggacatttgtggcagtgctgaagggggcattgccggcgagtaaagtattatgtttcttcttgtcaccccagttcccttggtggcaaccccagacccaacccatgcccctgacagatctagttctcttctcctgtgttccctttgagtccagtgtgggacacggtttaactgtcccagcgacatttctccaagtggaaatcctatttttgtagatctccatgctttgctctcaaggcttggagaggtatgtgcccctcctgggtgctcaccgcctgctacacaggcaggaatgcggttgggaggcaggtcgggctgccagcccagctggccggaaggagactgtggtttttgtgtgtgtggacagcccgggagctttgagacaggtgcctggggctggctgcagacggtgtggttgggggtgggaggtgagctagacccaacccttagcttttagcctggctgtcacctttttaatttccagaactgcacaatgaccagcaggagggaaggacagacatcaagtgccagatgttgtctgaactaatcgagcacttctcaccaaacttcatgtataaataaaatacatatttttaaaacaaaccaataaatggcttacatga

SEQ ID NO: 11858 - DNA, 925 bp, Homo sapiens
gccctcacctccacgcctacctcatagcttcacagccttgccttcagcctctgagctccaggggtcagcagcttagtgtatcaacagggagtggattcaccaaattagccattccattttcttttctggctaaaataaatgatatttcaatttcattttaaataatacttacagagatataagataaggctacttgacaaccagtggtactattataataaggaagaagacaccaggaaggactgtaaaaggacataccaattttaggattgaaatagttcaggccgggcgcagtggctcatgcctgtaatcccagcactttgagaggccaaggcaggtggatcacgaggtcaagagatcgagaccatcctggccaacatgatgaaactccgtctctactaaaaatacaaaaattagctgggcatggtggcgtgcgcctgtagtcccagctacttgggaggctgaggcaggagaatcgcttaaacctgggagacggaggttgcagtgagccaagatcgtgccactgcactccagcctggtgacagagtgagactctgtttcaaaaaagaaaagaaaagaaacatggttcaaattatatctaaacaaaaaagaataagaaacaaaaaacacattaaaattttaagttgtattttctatgtttctagatacatcatttttgtttgatattttcctgatgcaagtatgtggtttatcacatgtagctcttttgcatgctaaatgaaaattcaaaacttgccaataaatgaatagcttattgcagacattttttaccaacattaattattttgggtttgtttaaaacctagaggcacaatcttgacttgtcaattactaccctttcacaagctaccatctcagatatatatatatatataaattcaataaagctttctgtttgtgttcc

SEQ ID NO: 11859 - DNA, 1636 bp, Homo sapiens
caccctgggctgtgacaaggcccatgatgacatttcatgaggcccagatgtgggcaggcagcccgggctgcactatgcggtcaggattccttgctgctttggtgggacatgaggcctcagtgggtggtgagagggggccatgggccttgtgggaggatatcttttggccgtgtaccctcaggtccagtgcttggtcctgctctggtcactggggcttcccaggaggcagcagggtctggtcataatccagtgtgaagatgaggtgaggaaggaaggggttgctgtccagtgttggcctggtcgctttgattcttcctgcacagctcagcccaccccatctgtactggaagggaccctggagccctgggaccaccccctttcaagtcccaaacactgagtcctctgtcatgtgtccttgtccctaggctacaatgctacacttggctcaggctgatcaccatgctagtcacaggagggagagagaggcagtgtacttgcccccatctcctggagggaggtgcgttggaaattctaggcccttcagcagagacccatttgtgcccagaccacaatatttcttcttcctcagggactacatgccacagacctgtatccccagtggcaactcctgttagctcccaaacttaaacagtgatctcttctaaatatacaaggcatctacccagccccaatagtgaataaaagtcacaaatttaagttcaacaccctaagcaatttctcaaagccagtctacctgactaggtctatccacgcacggttcccaaccccaagggggaattaggggattagattaagagtaggtaaagacccttttgttctttcctgttgtaggggaggaagctgttctccccaccccaggtgcctttggaggttaaggctaggttaggccctgcactccacctggggacggcccctcatcacctgaagtcctctgctgtgttgactggaccctcagttcccacactgctaattactatgaaagctgctctggcctcgtcttctagcttgtgcctagttgaaagtctcacctttacaggatcatttgtaatgctggtgtacatgcagggaactcacaagctgtgtcaggtatgcaggacaaggaatgtctgctctggggggcacaggccaactatatggagggagggtcccaaattagcaaacccttcatttaaagcaaacccttgtcaagcctaccagagcagctgatacgtgtgcataacagtgaggcattgtgtcctggatcgtctgggagcccagtgtcaagtctgctggaatgcaggaagtagaacagaatcgccacaggactgttctggggccagcttcccttaactctgtagcctggcagtctgacccaaagttgccctcacccaaaggttctggctcttccctccctcacttttactttcccttcccccataagttggaggataaaatgggtatcaatgctaatatttccagggagaacatgaaaccagaggtttctttctttctctgtaatctgctatgaaagaaaataacaaatgaaaataaatgtgtactacactttgaaatattttaactaaagcctttattctatacaactgtgaaatacagatttttacccttttggcattgc

SEQ ID NO: 11860 - DNA, 1199 bp, Homo sapiens
ggaccaggatgtcttttcccagccccaagagacctgttgctgctttcttgtaattatggggctccccagagtctgcgtaacagtctcccactggctggctcacccacaggtgccatgtgcacactcctggttttcaaacaattctctggatttatttatttgttttaacttttctgtgctgaagagaggactggggggagggggcttcccctttcagctgcccggccccccacacccacagcttgctcttctatctccacaacgtgagcctggaagaggagaaaatgtggctcctctggagcttggcagaccacttttcggtctttgcgtgatgttccttagcccaaagacggtgagacagggctgaaatcaggtggcttctgccaccctgagccctagacccatgggtggctaaatccactggactgtgaagactataatttatttccataatttatttggagattgaggaggctttggttgcacttctttggctggtgggtaatgccaggggtggggtgggcacaggccctcaagagccccttttgccttgtagtcctacaccttgccctgcctgggctttggtgcagactaggtgtggatttgagctctgtgatctatgtctgctgcctggctcctagatggctctgtgggcaggtgctggccaaggacatcatctaggcagggggagagcctgggctgaacagctgtgaccaaaactcccttctgccccaccctgccccctccacttcctgccctctgttccatcttcccccttcccaaaggccacagcctttattccaggcccagggatgtaggagggggaaggaggaaacaggaagcccagagagggcaaagggcctacctcggggcgcgaaccatgccccagactattatctcagggctttctgggcactgcacttcagcgtggcccacctgcccatgccctgaggccagttggcgaggggtggctcctgagggtttttataccctttgtttgctaatgtttaattttgcatcataatttctacattgtccctgagtgtcagaactataatttattccatttctctctgtgtctgtgccaagaaacgcaggctctgggcctgccccttgcccaggaggccttgccagcctgtgtgcttgtgggaacaccttgtacctgagcttacaggtaccaataaagaggctttattttt

SEQ ID NO: 11861 - DNA, 698 bp, Homo sapiens
ggcccaccgcctcccaccacacctgccacctgttcctggcctccactgccccaggactgaagtgggtacctgcctcctgtacactggagcaaggaccaagaggaaatggcatcttcagaggattactgtgggccatttccctttcgcagttctttcaataggcccagttcttccaaatggaaaaagaaaggtctggaagaggcccacagagttgcacaggcgtgggggtaggatgggggctcccagctgcttgtggaggatgtaatatatacagacacacacatgtttttcacacaggcctggcccacgcatcgacatgtgtgaatttgcacaccactgcctgaattggagccccccagagtgtccctctacccagagtttttatttctttaattagtctgagtgttcccagccatctgctccttaatccctggagaggaacagagccaactggacacagcgttggtctctgtttggaatcactgtgaggtctccagaaggacctggccgccagccccttcatcaccatctccatcattcagctggtcatctggtggcccaaaggtcacccaaagagtcagcaatcagcatgtccctagaagccaaatgcactgcctttctctgtccccatgactgtcccccactctgcaccccaaatgggaagcatacggtctgaataaatccaagttttattctct

SEQ ID NO: 11862 - DNA, 1947 bp, Homo sapiens
agggaatcccaaagccttgtgtctacagagaacctggagttcctgaacctgatgctgactagtgaggaaagatttttgttgttatttcttacaggcacaaaatgatggacccaatgcacacaaaacaaccctagagtgttgttgagaattgtgctcaaaatttgaagaatgaacaaattgaactctttgaatgacaaagagtagacatttctcttactgcaaatgtcatcagaactttttggtttgcagatgacaaaaattcaactcagactagtttagttaaatgagggtggtgaatattgttcatattgtggcacaagcaaaagggtgtctgagccctcaaagtgaggggaaaccagggcctgagccaagctagaattccctctctctgactctcaaatcttttagtcattatagatcccccagactttacatgacacagctttatcaccagagagggactgacacccatgtttctctggccccaagggcaaaattcccagggaagtgctctgataggccaagtttgtatcaggtgcccatccctggaaggtgctgttatccatggggaagggatatataagatggaagcttccagtccaatctcatggagaagcagaaatacatatttccaagaagttggatgggtgggtactattctgattacacaaaacaaatgccacacatcacccttaccatgtgcctgatccagcctctcccctgattacaccagcctcgtcttcattaagccctcttccatcatgtccccaaacctgcaagggctccccactgcctactgcatcgagtcaaaactcaaatgcttggcttctcatacgtccaccatggggtcctaccaatagattccccattgcctcctccttcccaaaggactccacccatcctatcagcctgtctcttccatatgacctcatgcatctccacctgctcccaggccagtaagggaaatagaaaaaccctgcccccaaataagaagggatggattccaaccccaactccagtagcttgggacaaatcaagcttcagtttcctggtctgtagaagagggataaggtacctttcacatagagatcatcctttccagcatgaggaactagccaccaactcttgcaggtctcaacccttttgtctgcctcttagacttctgctttccacacctggcactgctgtgctgtgcccaagttgtggtgctgacaaagcttggaagagcctgcaggtgctgctgcgtggcatagcccagacacagaagaggctggttcttacgatggcacccagtgagcactcccaagtctacagagtgatagccttccgtaacccaactctcctggactgccttgaatatcccctcccagtcaccttgtggcaagcccctgcccatctgggaaaataccccatcattcatgctactgccaacctggggagccagggctatgggagcagcttttttttcccccctagaaacgtttggaacaatctaaaagtttaaagctcgaaaacaattgtaataatgctaaagaaaaagtcatccaatctaaccacatcaatattgtcattcctgtattcacccgtccagaccttgttcacactctcacatgtttagagttgcaatcgtaatgtacagatggttttataatctgatttgttttcctcttaacgttagaccacaaatagtgctcgctttctatgtagtttggtaattatcattttagaagactctaccagactgtgtattcattgaagtcagatgtggtaactgttaaattgctgtgtatctgatagctctttggcagtctatatgtttgtataatgaatgagagaataagtcatgttccttcaagatcatgtaccccaatttacttgccattactcaattgataaacatttaacttgtttccaatgtttagcaaatacatattttatagaacttcc

SEQ ID NO: 11863 - DNA, 272 bp, Homo sapiens
aggacccagccgccatcagcccaacgggaagcaacctcccaacccagaggaggcagaataagaaaacaatcacactcataactcattgtctgtggagtttgacattgtatgtatctatttattaagttctcaatgtgaaaaatgtgtctgtaagattgtccagtgcaaccacacacctcaccagaattgtgcaaatggaagacaaaatgttttcttcatctgtgactcctggtctgaaaatgttgttatgctattaaagtgatttcattctg

SEQ ID NO: 11864 - DNA, 182 bp, Homo sapiens
ccacctgcatggcccctgcagcactcaccagttgcatcttgtgaatgaaggtgcttttctgcttgctgcttcagtcaatccttttgatgatctcaccactttaagagttccagatggaaaaagacaaaagtttgcttcatccggggatgcaggatgcagaataaaccaaactagttactcaa

SEQ ID NO: 11865 - DNA, 635 bp, Homo sapiens
gccagccacccctgacccaaatgaggagagctctgattctcccatccgggagcagtgatgtcaaacttctgctgctggggaaatctcatcagcagggagcctgtggaaaagggcatgtcagtgaaatctgggaatggctggattcggaaacatctgcccatgtgtattgatggcagagctgttgcccacaagcgccttttatttagggtaaaattaacaaatccattctattcctctgacccatgcttagtacatatgacctttaacccttacatttatatgattctggggttgcttcagaagtgttatttcatgaatcattcatatgatttgatcccccaggattctattttgtttaatgggcttttctactaaaagcataaaatactgaggctgatttagtcagggcaaaaccatttactttacatattcgttttcaatacttgctgttcatgttacacaagcttcttacggttttcttgtaacaataaatattttgagtaaataatgggtacattttaacaaactcagtagtacaacctaaacttgtataaaagtgtgtaaaaatgtatagccatttatatcctatgtataaattaaatgaggtggcttcagaaatggcagaataaatctaa

SEQ ID NO: 11866 - DNA, 344 bp, Homo sapiens
ggatgacactgtgatgaatggattctttgattttcttttgaggatcaatctatgtttctctttctgcttctctactttacactccagtttccatccttttcagccaactggactgaaaaaccaggaattggggatgttaaacagttgcagtggaagtcatgaggttgcttgatacccagccttggttctgtgccaagcattactgcaggatctccagccagttcagcacgtttacctaggacagctggatctgggggctcatccagaaagagctttattggaagagagaaaggaaatattttggtcttttaagttgaatgatacagtaaaccacttgattcaat

SEQ ID NO: 11867 - DNA, 87 bp, Homo sapiens
gagggagcgggtagagggatgggctctgctcagctattcttgggccagatggggcctgaccgatagaataaaagacttttctacaac

SEQ ID NO: 11868 - DNA, 598 bp, Homo sapiens
gatgacagcccagtgtcggcctggccgggtgggcagcctcaggtcttgagaggataagactctgtctgaggactccatctgctccgggaagccagcccagggcagccagctcaaccacttctaccagaagaggctccttaaggatgaccaaaaccaatgtctcaggccaggaaggcagaagagaagccctggtgggacactgcaggagaccctgggctggctgggttacagcagcagggaggcccagcagcccactggcagaggcgagagctctgggatggcaaggcggctgtgaatggacagatgcagtccctcgggcaggtgttcatcgccctcatcctaggtactagccctggatgtccccatggcttcacacacagaagagcccttggttaccctaagtgggcatatcccccatgccactcagccctgccctatcccctcacccccatcccggctccatctgtagccgtccacaccctacacagacttggggcactatgctctcaaccagtttgtcagcccactcctcaggacacttcctcaggtgcagacccttggacttgtaataataataagtattttcataatcactgca

SEQ ID NO: 11869 - DNA, 2363 bp, Homo sapiens
aagaagagatgctgtcttggtcttgttggaggagcttgctttagttagatgtcttattattaaagttacctattattgttggaaataaactaatttgtatgggtttagatggtaacatggcattttgaatattggcttcctttcttgcaggcttgatttgcttggtgaccgaattactagtgactagtttactaactaggtcattcaaggaagtcaagttaacttaaacatgtcacctaaatgcacttgatggtgttgaaatgtccaccttcttaaatttttaagatgaacttagttctaaagaagataacaggccaatcctgaaggtactccctgtttgctgcagaatgtcagatattttggatgttgcataagagtcctatttgccccagttaattcaacttttgtctgcctgttttgtggactggctggctctgttagaactctgtccaaaaagtgcatggaatataacttgtaaagcttcccacaattgacaatatatatgcatgtgtttaaaccaaatccagaaagcttaaacaatagagctgcataatagtatttattaaagaatcacaactgtaaacatgagaataatttaaggattctagtttagttttttgtaattgcaaattatatttttgctgctgatatattagaataatttttaaatgtcatcttgaaatagaaatatgtattttaagcactcacgcaaaggtaaatgaacacgttttaaatgtgtgtgttgctaattttttccataagaattgtaaacattgaactgaacaaattacctataatggatttggttaatgacttatgagcaagctggtttggccagacagtatacccaaacttttatataatatacagaaggctatcacacttgtgaaattctcttgtctaatctgaatttgcattccatggtgttaacatggtatatgtattgttattaaagtaagtgacccatgtcaaatgtcttttatttatttcatgaggaaaagctttctgtagaggaacaaatttgagaacaagtttcaggaaattgtcttttttgttgttgttctctaatcatgttctcctttctgtttcaacgattttaaaaatattttactttatggtatgttttattttttttccttttgtgggtaatttttgttctattgattatccatataaattttttttttttttttttgagacggagttattctctgtcatcttggctggcgtgcagtggcacgatcttggctcactgcaacttccatcccccaggttcaagtgattctcttgcctcagcctcctgagtagctgtgattacaggcatgcaccaacatgcctggctaatttttgtatatttagtagagacgaggtttcaccatgttggccaggctgatcttgaattcctgacctcaggttatccacctgcctcggcctcccaaagtgctaggattacaggcgtgagccaccacgcccagctgattatccatataattataacactcttctatttattttcagtcaccaataattccttttgagcaatatttaagcctagcatatttcttccttccctcctcctctactaaccagttctggtcgatatattattggattttactcttatactgtttgtttgtttgtttgtttgtttattttgagacagagtcttgctctgttgctgaggctggagtacagtggtgtgatctgagctcacggcaccctccacctcctagcttcgtgcgattctgatgcttcaaccttccgagtagctgggattacaggcatgcgccaccatgtcgggctaatttttgtgtttttagtaaaggcgaggtttcaccatgttggatgatcttgaactcctggcttcaagagatctatctgcctcagcctcccaaagtgctgggattacaagcataatccaccacacctgacctacttttgtatgttaaatgtgattatacttctctttgacttgtcagcttagctttagctgatacactctggtgcccaactattattgtatcagtgaacttccactttcttttccttttctctcaatttttgttgtatcattcctaccttgtgaggacatataatatttacattctgttgtcatcctcacatttcttagttccacagtttaaatgtatttgaaactcaaaacattcccattaatctcttggtcagctgaaattaatgatttaatagtttccttaaaaaagactcatggaacaatttccctaaatttttgccatgtcaaatatgtttatctgtagcctttacacagtaaaaacaatttggctagataatacaattctcagttcatatttttctttggaatattaaagtattgctatagagaa

SEQ ID NO: 11870 - DNA, 2118 bp, Homo sapiens
gcttggccaagccagctgcaaacctggccagaggagttctattgcatctctcacctgttctcacccctctgcagccccaagaccccactggccacccctccctctggtcctgtggcaccccctacctctgttctgcctgtcctcgctctctccccgcctagtcatctgacaggcttatcattctctttaaaataccatctctcagagtgggttctgccgaaccctcctctcacaggaagtccagaggaagggggagtatctgtgggcaacttggtttgggagatgatgcctgccttgagaagtcctgagtacagagactggttccccccagacacgagtaacatggcatcttgcaaacatcagcctccactctcccagcttgctttagttttttcagcaacacttatcccacatcctatggaattcaggttctagaacagtgtcatccaacataaatatgaagcaagctacatgagtagtggggttttttggttttgtttgtttgttttgagacagagtcttgctctgtcgccgaggctgcagtgcagcggtgcgatctctgctcactgcaacctctgcctcctgggtttaagcaattctcctgcctcagcctccccagtagctgggattacaggcacctaccaccttgcccagctaatttagtttcctggtaaacacatttttaaaaagtaaaatgaaacaattcatttttataatatactttacttaatccaatatatccaaaatattggcatttcaacgtgatcactattaaaaattttaacgtaatagtttttaccttccctttttcatcctgtcttcaaagtctggtatgtactgtacttttgcagttcttcccagttcagactagccacattccaagtgcttaattgccgtgtgtggcaggtggctgccctattggatagcacaggtctagagaaatgatacctttttttttttttgagacagagtctcactctgttgcccaggctgcagtgcagtggtgtgatcttggctcactacaacctctgcctcccgggttcaagtaattctcctgcctcaggcttctgagtagctgggattataggtgcgcaccaccacacccggctagtttctgtatttttagtagagacggcgtttcaccattttggccggcctcctcggcctcccaaagttctgggattacaggcatgagccactgtgcccagtcaggatgtctttaatgtaggaatcattcaagatccctcctcagtgcccatgtctcccccacctcagggtgctgtcaaccctcccttggtttccatgatcattgctgaactcagagctttcttctatccccagacccacatgggagtctcccagcacctctgactcagcttggccaatgcagaacttggcatctgaacccctgcctcttccctgaaccactcctcctcctgatttccctgctctctctgctcagaacactaccattcaccccatctcccagagacactctccctcctcctctttcaccttcatacaagcaggcccccgtcctatcagtacacccccctgtgatgcctctgaaatatgtaccctcctcccctctcctactgtcattcttatacctgtgatctctgcgtttctcttctacactgctgccagaggcctttttgccaaaagcactgctgattgtcactcttttactttcctggttcccctttgacttcacacacttgacgtttacattttgtcacagttggtcccccttgccttcacatacctgatgtttaaattttgtcacggttagtctccaaacttctcaactttgccagctttctccaatgaaaccatcagtagagacattgctgttcctgcccatcccagtgccagctactccttcctggaagccttcctggatttcacgcatcccatcctctggccagaaatggcctccgaactgtgcagctcctgcagcaccatttgtatcatagcatatctgttatgtgtcgttgctttctgtgtcttggtttctgcctgctgcccacttccctagactggagcctactggggcatggtattttattcatttctgacctccaattccctaagtggagattaaatgttagaaacctg

SEQ ID NO: 11871 - DNA, 452 bp, Homo sapiens
cgagcaggccacagcctggcctcgggaaggtggctcctgcagttcagcgtccctgggcccattaatcccactgtggagacttctgggaactatttattgagcaggcctgtgcctccacatcatcttgttgtctctggggtgtggtgtcacagcactcctctttgccctagagataagggacctgacttccccttctcccatcctgaacatttgtacccctggagaagttccttagcagggaggaggaagaggagaggaggaagcaaagaatcacaaggaacctctggctaggtgatcctgatgtttcctactgagtttttctggtatccagatttctggaaaccgagtaatcatgtactgtttgattgggtggttcatctgcttccatcccagtgaaatttacctgtagcccagtgaagggtgtgtttggaacattcattaaatgattctaa

SEQ ID NO: 11872 - DNA, 580 bp, Homo sapiens
gtgcccagcgtgcccagctgccctgttggcagaggcctgtgtctgtgccacacctgccacggtggcagggggggtacccggggcagcatcgtggctcctgaacccagacccaatgcttagccaaacgaagtggctcccatgtggcaagcacccttctcagtttcgcagtggcttggctcgggatccttggcagttcccccagccccaccctgtctgctccttcccagttccttcccgggccccacacgctgctccagctgccaactttgctgcagagccactgccgcccttgagcctctcaccatgagtgagccaccagctctccacgttcccctcatagcagtgtcactcccaaccccaccatggcccagggacccgtggacaggttggggatggggtgtgtgcccactgtgctcatcacaggagcctcagttgagagtgagcggggtacagtaaggcagtgcttcccacactggacctctttcctggttctcttttgcaatacattaacagaccctttatcaacataaacaatagtaactgagctattaaaggcaacctctctgactccttctgccta

SEQ ID NO: 11873 - DNA, 6805 bp, Homo sapiens
cctgggacctgacagtgacagtgggggtgggttctcagtcccctgctagagaacccttaattataggcattgtggagtaactttgataaagggcccagccctttctgttttggaagctagtgacagaatcccaaggatttgaaagctcggggagtccccagcctgcctgctaggatgtgacgctggggaagtgcagcaccatgtcctttggagcccttctggagactccggcccctaggagtggcctctgcaccatagcctgcggctcccctattcaggtctccttccacaactctgaagagagagaccactgccctttgtggttggacagaatatctgtggcatcatgggctatggctgctggaaaggggccagtgggatcctagatttgtcttcaagtttggcctgtggccatgcctattctgttgactttaaaagcagcagcatcaagaactcctagccttcccaaatgccccctggggagttctggctggggcttcagccttcctggctggcttttggatatctgctagggggttagagtggtctcagcggcaggtggaggagagcaggatgctgggctcaagcgcttggcgtgtggatctctaccagtaccctgttgccatccccatcccacaggcctgcataggcagcagcggtccatctgtttaacagaaatgtgctgagcactcccatacaccaggcgctggtgtgtttgccagagacccagcagggaccagaacagatgaaaatcctgccatcttggatctttacagatgacaaacaaatgggatacgcagtattctggatggtgatgtgtgtagtggacaaagtgaatcagagaagagcagagggagtgctggattgggagatcagtcgtgattttagatagtctggtcagggagggcctcaactgagaaggtgaaatgtgagcaaagacgtgaaggaagccagggaggtagcaggtagctctctagggagagttgcaggcagaggagattgggtcttgactggtgtcctcaggaaggaagcccctgggatggagtgcagggagccagctggaagggaaggagaggggccagggaggccacaggcccggccatatgagcatcatgggtcattacgggggcttgagctggctcagagggaggcagggagcttttggacaattttgagttgaggagtgatgtggtttgaatctgaattatattttataagggttaaccacagatccaaggactcagtaaaagggtgaaaggcttctcatgcagttagccttgctgccagttcccataaatcagactcctccccactccgtttctgaattttctataggatcctcggcctcagcagatataaacgcttaccattgttgtgttcatgtctctagcccctgcacactgcaggcccctctcagcttcacatacccctctccatgtatgagatctggtgctagcaatcagattcaacccgaaggaacaagtgcatgtgcctgctgctctcaggagaaaaggcagcctgttctgggaggagctccctcactggcccacccacttgtgttgaagcaaaaagcaagaatcaattacttaaaggcaaaggagtgatattgctaaagcatgtgagtaatcattgcttctgattattgaagaggtcagattatgaatgaaaggataaaatgttttaatagtagagcagtgtcctgactataggggcccgttcatggagctggtcatttcttgaaatgagaagaaaccaacctggaagatgtctttttcagtagagtatggaataatcttacctgctctggattgccatgagcaggtgaaaatgaaggctctgatattgtgtggtggtgtcacaggatggtgggggcggggcagaagtctcctgttggtgttctgatgcctgttcagctttgtcctcaggaaggtttggtcatcttggttctgccatcctcttgccttcctacggcagcagctgttcatggcactgaagatgtcccttcactgtcccaaaactggcactagaagtggctgggcaggggggccagagtcataggaagggtcttggagtcatcagatctgggttccaggcatggtgtgccttttcttggcaggattgatcttgagcaagtcaatgaacctctgcatcaatttccttatgtgtgaagttagagtgcttggctgtgctacctgattcctgagattggtgaaagagggcttggtttaccaaggctctccatcaggtggttgacctctaggaccagggccctctcagaggtgcagcttccatgtcagttggtgttgtaaccatggaaaagtccctttccaatcaaacttttagcacccctttccccccatctctgctccctttgccacaggataccttgtaaagttcctgccccagtatagggatatttttactgtcttttttattttttgagacagggttgcccagggtggagtgcagtggcaggatcacagcttactgcagccttgacctcccaggctcaggtcccatctgagcctcccgagtagctggggctacaggtgtgtgccaccctgccagctaattttttatatttttttgtagagacaaaacttttatttttttttcccatgttgctcatgctggtctcaaactcctgggctcaagcaatccacccacctctgcctcccaaagtgctgggattacaggcgtgagccactgtgcctgacctgtcatttttatagaatgaaatgtgcttatttctaaacattctaatcaaattttaaaatgtgcaaagaatgaagtgaaaaactgaatttttttttttttttgatacggagtctcactctgttacccaggctagagtgcagtggcgcgatctccgctcactgcaagctctgcctcctgggctcacaccattctcctgcctcagcctcctcagtagctgggactacaagtgcctgccaccacgcctgggttattttttatatttttagtagagacggggtttcactgtgttagccaggatggtctcgatctccaggatggtctcgatctccaggatggtctcgatctcctgacgtcgtgatccacccgcctcggcctcccaaaatgctgggattacaggtgtgagccactgtgcccggccaaaagaacagaaattattttatcctgaagtaagctgtttatatttgggattatactgaacctatttgtccaataacctgagttttcaaataattttagttctataagtactataattatataaatattaatgaattcagattagctgaaaggaaaaaaagtagaagcctgactacttggtgctaactactaaagattttggcagaatcaatgttggatttggctttcctgtcccttccccatgccagccccccagagtgttctgccttgtgctgcctcccttcacctggagtgccacacccctctctctgccagttcagctcttcattcttcaaggcctgaccttgtctgacccttgtgcctctaaacccgtggccccacctctcttggttcctatgtcaggtgatgtttgtgtttttggttatgcccatctccatagccagaccaagcactctggaagccagggttgggtgcttatttatctgtttgccatgcagaaaatatcttgcacaaaattacctctgttaaggaatctgaagctgaatttagtttggctgagtcagggttgggttttttttaaggggctgtggggtgaaatgttgactggaagccacccacaaacacacacctgctggttaggaacccggctgtgggtggttctgagctgtttggcttcagttgacagtttctgattgccctgagcaccaggtctcatcttgcatctcatcctggcctggagaacattcagtttccttccaacccttcccacctttcccccactcccttggaggaactgaagttggggttgaggagagccagatggctggagtgggtatttgaaggtctttctgtcacctgttcagtgtggtctgccccacccctgctgaccaagactgactgaaatgtaaaataatacagaccatctcacactcagaaagctggcacatttttgaaagcccaagtgtgggtaagtgcgtggaacaacgataattcacactgctttatgagtagaaattgtgagaaatattgtgccaggcaatttgcaaaatcttggaaggttgtgtgcacttaaccacccagcaactactcctggatgcatcctagagaagtgccatgtgaacagagaatgattttaagacttcactgaagtattgtttaggtagcaagattgggaaaagcctgcatttcatcagcagaagaatggataaataaatgggttgtttttggtccttggaaagtgaatatgaaagagttacgtctcaacacagatagatgaaaaattatgctgagaaagttggtgaagctacatacaaggtacccttagtgtaaagttaagcatactgtgtacctgtgggcacgttacttcaacttgtttttcactttttctgtaaaatgggatagtagtggcaatctcacagggtgattgtgggtgggggggtggtcaatgaagtaatgcatgtaaaatgcttagaatagtgtctagcatgtaagccttgtggacatatagaaagtgttattgttttgcacagtaatctattttctgtggattcaaataatatgaaatgagtataaaatcatgtattggaacgatgtgtgcaagtcaccattctgccttcctaaggcaggagacctgatggatttggggagggtacatggggccttcagttgtgttttctttgtttttttctaaaaattgatgcagaggcatcacaatgttaagatttttacagggtagtgtggtgggtactttttaactgtttgcttaaagtgtttcaaagtaaaaatatttcttaagcatagtctctgacatcttatgactttatagaaatccctgccaggtacatgatgttacttagagtgagccacctaatctttcaaggcttccatttcctcacctgcaaaaattgggagtgtcagaggcgtttgaaccagagtgactccatcttgaatagggaactgggtaaaataaggctgagacctactgggctgcattcccaggaggttaggcattccaagtcatgggatgagataggaggtcagcacaagatacagtcataaagaccttgccaataaaacagcatgtggtaaagaagccggtcaaaaccaagatggcaatgaaagtgacctctggttgtcctcactgctgtaattatactgtaattataatgcattagcatgctaacagacactcccaccagtgccatgacagtttacaaacgccatggcaggcctggcacgatggctcatgcctgtaatcccagcactttgggaggccaaggcgggcggattatgaggtcaggagattgagaccagcctggccaacatggtgaaaccctgtctctactaaaaaatacaaaaattagctgggcatggtggcacgtgcctgtaatcccagctacttgagaggctgaggcaggagaatctctagatcccgggagttggaggttgcagtgagccaagatggtgccactgcactccagcctgggtgacagagcaagactctgtctcaaaaaaaaaaaaaaaaaatgccatggcaacatcaggaagtaacactatatggtctaaaaaggagaggaaccctcagttctggtaattgctcacacctttcccgggaaacttatgaataatctaccccttgtttagcatataatcaataaataaccataaaaataggcaaccagcagcccttggggctactcttcctatggagtagccattctgtatttctttactttcttaatattaactactttcactttgtggactcgcccgaattcttttcttgagcaaggtccaagaactctctcttggggactggatcacgaccgctttctggtaacaggagcaatacaaatggctattagtaaacgaacgcttaagtaactctagtacatctatgatgaaataccaggccacagtttttttaaaaatgaggatgttctctatatactgacgcacagtcaccaagacatgcactttataggaaattataagctcctccttgcctaaatctccttaattttgcttaataaataacaagtgaagccagaagctgtaaactcataattttaatgaagaaatgggatccagaagatggagatgtttttcattctactttattagatgaggaaaaggagagtaaatacttgtatgccagctaccacaccttttaaagttaatgttaaccctgctaagaacagcaaggagattttatatcagccaggttttagttgccagaaaccacaccagttattttagcaaagaccttataaagaagtgtactatatttaagtagctaaaaaggcaagaagaaaatgccaaggtgtcttggaggtagcaactgctaagcagctgccaccccaggactgggggagctagaatagagtctccccatgtttgacgtttgtctgctaatagcattcaagctctccccctcagtttgcctggatctggacaagctgataagaaagcccagccacttcctctttgcgtcagaggggaagttcaaactgtgcaaaccctgactgtcaaatgcactgagctctcataaccacaacaaaaaccagagccacttgttcgtcctttcactgaagcccaacagactggcgtgggtgcccgctttgctttccctagaaggcctcatgtgagtagtaaactttttcataacctc

SEQ ID NO: 11874 - DNA, 306 bp, Homo sapiens
gtgtaaatattttgaatttagtctactttgaaagtatatggagtgttcattaaaatcacattttttcctattataaagatactacaagttctttatagaaagtttaggaaatagagaaaaaaatttaataaactacatctattcatcaatacccctctgacttaaaatgccaactctatagaaattagctagtattaacattttgttatttcccttgtgtggttgtatatatatgtaaattatatttttaagcaaaatacattttttgtgtgtaaacaaaattttataaatacaactgtattgcaa

SEQ ID NO: 11875 - DNA, 1520 bp, Homo sapiens
aggaccccgaccggcatggccactcagacacaagtccacaccacagcactaccgtcccatccgttctcatgaatgtttaaatcgaaaaagcaaaacaactactcttaaaactttttttatgtctcaagtaaaatggctgagcattgcagagaaaaaaaaaagtccccacattttattttttaaaaaccatcctttcgatttcttttggtgaccgaagctgctctcttttccttttaaaatcacttctctggcctctggtttctctctgctgtctgtctggcatgactaatgtagagggcgctgtctcgcgctgtgcccattctactaactgagtgagacatgacgctgtgcgtggatggaatagtctggacacctggtgggggatgcatgggaaagccaggagggccctgacctcccactgcccaggaggcagtggcgggctccccgatgggacataaaacctcaccgaagatggatgcttaccccttgaggcctgagaagggcaggatcagaagggaccttggcacagcgacctcatcccccaagtggacacggtttgcctgctaactcgcaaagcaattgcctgccttgtactttatgggcttggggtgtgtagaatgattttgcgggggagtggggagaaagatgaaagaggtcttatttgtattctgaatcagcaattatattccctgtgattatttggaagagtgtgtaggaaagacgtttttccagttcaaaatgccttatacaatcaagaggaaaaaaaattacacaatttcaggcaagctacgttttcctttgtttcatctgcttcctctctcaccaccccatctccctctcttccccagcaagatgtcaattaagcagtgtgaattctgactgcaataggcaccagtgcccaacacatacagccccaccatcatccccttctcattttataaacctcaaagtggattcactttctgatagttaacccccataaatgtgcacgtacctgtgtcttatctatattttaacctgggagactgttgtcctggcatggagatgaccatgatgctggggttacctcacagtccccaccctttcaaagttgacatatggccatcccattggccagaatccacagacacacctaagcctgtggcactgggacagaatagattttccatttgagaggcacttcctgtgtcagtcttgtttgaaggaggtggtgatggtggatagaggtgaaggaggtagggagtgccctccaagtgcaaaaataacaaatatgattattgaccatcggggaattctcacacattgatttgttttttaagcaattgccagaaacccccttttttagcttttgcttggggtgggggtaggagttaaggtttattcaatcctgtcctgggtagggcgaaagttaatctagccatgtgatttttcagaaaagtaagtggaacatgctgccacttttcaattctgtcagtgcttccacatggaaacaaaatgcaataaaatttttccaaaacctg

SEQ ID NO: 11876 - DNA, 3360 bp, Homo sapiens
cttgatccattccagacgctttgctgagtttcataaagcagggcactgagacacccgtccgtgttcctaaccagaaatcctaaagaagaggaattatacagaaggaacagcaggaggttttcctggacaccgccaacttcacattgctcagtggactcattctaagggcaagacattgaaaatgatgaattccaatctggatacagtcatgacagctcatgtgctcctcaacttaggctgtgcggttagccagcctgtaatgagaggagagaggcctgagtcacctagcatagggttgcagcaagccctggattcagagtgttaaacagaggcttgccctcttcaggacaacagttccaattccaaggagcctacctgaggtccctactctcactggggtccccaggatgaaaacgacaatgtgcctttttattattatttatttggtggtcctgtgttatttaagagatcaaatgtataaccacctagctcttttcacctgacttagtaataactcatactaactggtttggatgcctgggttgtgacttctactgaccgctagataaacgtgtgcctgtcccccaggtggtgggaataatttacaatctgtccaaccagaaaagaatgtgtgtgtttgagcagcattgacacatatctgctttgataagagacttcctgattctctaggtcggttcgtggttatcccattgtggaaattcatcttgaatcccattgtcctatagtcctagcaataagagaaatttcctcaagtttccatgtgcggttctcctagctgcagcaatactttgacatttaaagagaaatttagagaatattctcatcctctaaaaatgtttaaatatataccaaacagtggccccctgcattagttttctgttgccactgcaacctattacttggtagcttaaaaacaacacattagcttatagtcctggggatcagaattccaaaatggatgtccctgaatgaaaatcaaggtgtcagcagagctgtgctccttctgaaggctctagggagaagccggttccttgccatttcaagcttctagaggctggctgcattcccaggctccagtggctggtcaagcttttctcacatggcatcactgtgacactggccctcccacttccctctttgacttacaaagcccaccaggaagatccaggataatctctccatctaaagttccttcatcatcctggaagagccttttgccatgcaagacaacatagccacaggtggggattaggaccagaacatctttggggtgctgttattctgcctaccacaccttcctgccactgactcccacaggagaggctacaaaatgatctggcgcacagggatgttttgtttagcttgcggactctaacacttaaaaaaaaacccagatcagaagatctggccatgctggggctcacattctcacctagcaacaactggctggagctgggcaccagctctgcctttagaaggggtgtccacttcaccaggtcaccacagcccacactacgccctatcacttcccacaatgaggctgagtgtttgtttctactgatcaatgcccctgcaggttgcatttattgtaatgaaaaagaaagactgggattaatctctaatcaggtgagtagaccatgagaccaatgtgtgctcacattaccctttttcttttttttctttttctttttctttttttttttaatgtgagacaggatctcattctgttgcctaggctggagtgcagtggcgcaatctcggctcactgcaacctctgcctcctgggctcaagcaattctcccacctcagcctcccaaatagctgggatcactggcacaaaccaccatgcccagctaattttgtattttttgtagagacagggtttcaccatgttgcccaggctggtctcaacctcctgggctcaagcaatcctcctgcctcggcctcccaaagtgctgggattacagatgtgagccaccgcatccagccccacaccctcatttataccaattacctgcccagtaactgtggacttttgcttcctcacccctgctctgatctggaaggagagggattatgttatagcttgtcagcacagtcccaagttcaatatttctgcggcaaaaacttccttcaaaaaataaatgtacttcattgtattcaatgaattcaccttggaaatgcaccgcctcaacttgttcacatggcataaatgaaaggaattttatagtctcctaaatggcgtgtactgcaagacctcttgaacactttccagaggataggatatttaagtcatgcccttggcgttgcctatggcacctttcccttctgaaagtctggttcctgcccagtgacccttggccttgtgagccgagatgctgaccctgcataaagggccaaaggagggctgcggcttccttccctcactgaagagcccttatttgaattcactgtgtggagccctagccctccattctcgacattccccaacctcccagccccttccaagcaggactaggtgccctgcattccacccaaggtgggattggccttccttaggctggctacttgtcaccatcaccgacatcactgttgcctgcaaggacaccacgtggccattttccttcaactgagggctcaaaactcctggacaagttgctggctcctgagaccagtatttcctggagctgtgcctcagtgaaggggcccagcctgaggaaccctggctcttttctttaaagcccaggccccacttacgtaaaacatttcagggtcactggaaacagtgaagtgccatttgttgaagcctactgcatgccagcccactgctcatccacgtggtctgccatgcctacgaggaaggccagcgcatgcaggactggtctctaatgctgtggtcattgcacagaagggaaaggtctcaaggaagagtcaactggaacaagcacaagcccaccggacatggccttggtaaaggttagcagactggtgtgtgtggatctgcagtgcttcactggaaataatttattcattgcagatactttttaggtggcattttattcatttcctgtgctttaaataaacaaatgtaccaaaaaacaagtatcaagctgtttaagtgcttcggctacttgtcccctggttcagtagaggccccggtttcccagttgttgactgtgacaggctcagcatgggctcagcagatgctgtcttaatttgtggatgatacagaaagccaggctttgggatacaagttctttcctcttcatttgatgccgtgcactgtgtgaagcagatgtttttgtccggaaataaaaataatagtcttggagtctcgcc

SEQ ID NO: 11877 - DNA, 224 bp, Homo sapiens
gccccactttcctttttcttcctcctccagcaccttcgttgtttcctgggtagtctgcctgggtgaggctcccttcctgtttctcatctgtggcttctgaaacacttagactctggacccagcaagagtttcaggaagtgggttgctaggcagttagacaggcttgttggtgaacacccggtatgtagttccatttcagcacaataaaaagaaatcttgcattc

SEQ ID NO: 11878 - DNA, 660 bp, Homo sapiens
cccgctccgctcctccctgtgtccgtcctgtgtccgcgcgcgcgggtgcctttcccgccggagactcggccggtgtgcttcgtgctgtagttatcgttagttcctcttcccgagatggggccgccgagagaccccagcgcctttgaaaagcaaggtttgtgctgcgcttccagttccgaaaagcagatgtttaagcccttggactgagggtgggatcgcagctccgaagacggagaggagggaaatggggccctttcccctctattgcatccccctgcccgactccttccccgcacccacgtgccctagattcatggcagaaaatgaccaaatcctgtgtatttgttttatatatttaataactgttttaaatgaaagttttagtaaaaaaaatacaaaacaaaaagattaaattgctattgctgtagtaagagaagctctttgtatctgaacatagttgtatttgaaatttgtggttttttaatttatttaaaattggggggagggcatgggaaggatttaacaccgatatattgttaccgctgaaaatgaactttatgaaccttttccaagttgatctatccagtgacgtggcctggtgggcgtttcttcttgtacttatgtggttttttggcttttaatacagacattttcctccag

SEQ ID NO: 11879 - DNA, 3522 bp, Homo sapiens
gatgtgggcttcccagccgctcacggttttacagatactatttacaggcggaaactcctcggctgctttttcaaatgcttaagccaggagtgctcagcccatcaacttcctgagtgtctaaagaagatgaggaaggtgtgcaggaagaaaactcccttgggagaacgcacaccctcccgtggtggctgttcctccctgtcacctgcctcctcatcatggaagggggtgggctatgaaagccggtctcaaagataactgcatccttcattccaggaaagccctagaattagggcacattgcaaactgaaatatgactataattcttatgggaccaaatttaagcaatttttgtttttggctgaagagacaccaaaatattagaggacaaatatttttagatccatttaaggagttttgaagtgcctaagatgacctatttgtcagtggtgcaaaattaattctcttcttttttgagttgtagtgaatatgcaatttctgtgttccccttccaccctttaaatcttaggatgacaagttataaagaaagaagatctttgtctgggacccccaaagggatcctttctctaaggtctctgacggtgggtccaggaccagacctctctacaaaaaattgccccaactacagtttgcaaccccaaaccacattagaagtctgtgcagacatccctccgtggtgtgtgtcttggtgcattggaaaaggagtcaggagccactgtgaggtgagaatgaaagtggatctcagctgggcacggtggctcacgcctgtaatcctagcaccttgggggtcaaggtgggtggatcacttgaggtcaggagtttgaggccagcctggccaacatggcgaaaccccatttctactaaaaatacaaaaaaattagctgggagtggtggcataggcctgtaattccagctactctggctgctgaggcacaagaatcatttgaacctaggaggtggcggttgctgtgagccaagatcatgccactccactccagtctgggcgacagagcaagactctgactcaaaaaaaaaaaaaaaaaaaagtggctctgactttcccataggcttaatattacatttggacatcgtggccaactctatcaagaccacaaataccacttacaattaattttaaattattcatctgtacatagttttctaaaatgtatataattcaaacagagcatcttgtaactgaagacacaccatatctatgatatcgcattagtccatgtggggaaaagaaagatcagattgttactgtgtctgtgtagaaaaggaagacataagaaactccattttgatctgtactaagaaaaattgtttctgctttgagatgttgttagcctataactttagccccaactctgtgctcacagaaacatgcgctgtaatgaatcaaagtttaatggatttagggctgtgcaggatgtgccttgttaacaatatgtttgcaggctgtatgcttggtagaagtcatcgccattctccattctcgattaaccagggacacaatgcacagcagaaagctgcagggacctctgcccaagaaagcctgggtattgtccaaggtttcccccccactgagacagcctgagatatggcctcatgggaagggaaagacctgactgtcccccagcccgacacctgtaaagggtcggtgctgaggaggaatagtgaaggagggaggcctctttgcagttgagataagaggaaggcttctgtctcctgcttgtccctggtaatggaatgtctcggtgtaaaaagctgaccattcccattcgttctattctgagataggagaaaaccgccctgtggctggaggtgagatatgctggcagcaatactgctctgttactccttgctacactgagatgtttgggtaaagagaaacataaatctagcctacgtgcacatctgggcacagtacctttccttgaacttattcgtgatacagattcctttgctcacatgtttccctgctgaccttcttcccacctgttgccctgctacactcccctcgctaagacagtaaaaataatgatcaataaatactgagggaactcagaggccagcgccggtgcgggtcctccacatgctgagcgccggtcctgggcccactgttctttctctatactttgtctctgtgtcttatttcttttctcaaaaaaatttttctttttttaactgcaataaagtaggtcgttacccctaaagtgagcgagtcccttcctgctctaacgtccagtgcttccttgagatcatggaattctggagagtttctgtggatatatttgcacagatatctttgaagacacaaacactcacctgggacgttggccggagatgtctttttatttttgtgctgtaaaattctcttacagcaaaaataggctttagaaaggtcttctactgtcttcagcaaccatctcatcttccagcttcacctgattgtccagttatcatacatttgactttcaaatgtatgaaccagcatgtaccccatggatttaatcttatctaccccgtggattcaatcttcttatcagaaggttcttttatgtcaaaaaacctgctgtcaaggcttgaagagccggcacactcaatggcaaacacagcaccgagtctgctctgaatcctggaggatctggccctcctctcaatccccactcacagtcaccgtcttacaactcagggccacctgggatcagtcatcagtcagggtgcgtaagccttgaataccaggtagcctcaggagtgaaaagataaatgtcctagatcattaccttattcagtgtccccaccttgcagcgcattccaaccacctgggagcatttaaaactccagatgcccacaccacaccctggggccacccatcagaccttctggaagcaagacctgggcctccatggccccaaaaactccctaggtgatccgatgtgcagccaaatctgagaggccccatttaaaaaagaaagaacatgggtggtacattgaggagtatttacattttataaaatgacttaaaaatttgaaggcatttttgagcatttccaattatatggaagagttacttctacggaatagtttttgctcatggaactcaaacagatgaagcaccactgttacagaataatgtgctccagatgaaaatgtctcgtttctgtgaatttcatgaagagcagaacatttctcaagaatcctcttgagccagtaatcaatcctgtctcaaaaaatgttctttgccatttcctagatactgcacaaaagtggccatgtcgacatttgtccacccaccctccaataagctggagcgacaaagggacattccatccctgtacccttagtggtagccatgacacgatggccagatcatggactccggaaagctttctgtttttactggaaacatagcaaaccttgatttagctccaagaaattgagtagggaaatatttgttttttagcaattgtcatagtaaataaaactctaagcaagtgt

SEQ ID NO: 11880 - DNA, 2360 bp, Homo sapiens
aactgaagatttcctctggaagctaccacatgcaaacatacaagcagtctcacctcaggcatgtattttgaaaagcattttgtcatatcccctctccttatttttctaatatttagactttgaatatttagaactagagttcctattttcagctagttgaaaacagagaaaacctagtgattctgtctggtcatcccacacacctctctactgagtgctccagagtcttagctcacatgcactgagaattctttacagcaaagaagagatttttagagtgggaagaagaggcttatccttctgcattagtataaagagtctgtatttttaataaatgttaaataagctaacaatgtttgtacttatgcattccccatgggtaaaaataaataatagcattgttaaagatagttattaccaaaaaaagagagttattacaaataaatatgtctctttatttttaaaaatgaaatcttaattcatttactctatttgatgataaactataaattcattgaaaatgtgaattctattatgggtagcctttttaccaattataaggaaaatttacagcagtgaacatgaacattcacttagcttcctcagtctctccatcttaaagatcatttatcagaggaggttcagcattttttgcagcataacttttcatgagtctgtattactaatggataagtcaaatccatcctgcacttctacagtttagaaagtatctggactcagaataaatgtaatatttatacttgtttccagaatgttattttacattttatgttcaataagaacactttttaaaagacgtatattcaacataaaatcagctatcagacttcagattagactttatttatgtgggtctataataattgtattttcaagaggttttcactatatttgtattggcctggttttctcagacgattttggacaaatcattagaaactgggcatcatatccacagttatgtaaggcagtgatatactataaggataaacaaagtcaagtccataaagcaataatccctcagaaggaaagtccttacttttcacatattaatatttagtaatttttcctgcttctaaaagtgagagtatcacaccctaaatgaacactgtctactaagagacatcattccatttccacaaatgaagattttattccaagaaacgagtttactgattggagcatagggcttgttgttatttttattcaagcttttagtaatagccttgaatttattatttttcttataggctttttgttaaaatagtgaaggaacaaatgttaaagggtaagataatttccctgcaaaaggacacagaaggcagtcttaagaagatgaatggatgagagaagggagagaataaaatgcaataacgagccagcatttactatgtattttctcctcacctgtctctccatatttaggtcacttaccagtttctgtgcccttttggagcttttgttgagggcttcattctcaccctgtatttctttagccctaaattgacactctctccaaaaatccattccattgtctgtggaccaagatgttctatgtaattcagaagcagaactcttggctaaagggctagtgtggccttcagaaaccattcaattattttctccctacacctttgtcagtttgaaaccagtgaggaaaaaaggtatgttgataagaaacctatattgctaggtagaatttgtacttgttttcttggtagcagttttgaaatattctgtacagtacgttcctattgtttaataataaattcaaaaatatttctaaaaccttaaaaccaactatgccaagcattaagataaacaaatatgatgttctttgacgtaaatcaacgtgatgattctttcacatgtaaacacattttagtgtttctggtttgtcatttttgttgttgttgttgttgttgttatttactctataccctttagcaaaatacagttttaaatttttattgtttttagtagtttcccaactttaagacttatctaatttaactgagaaagaaagcctttttcatatatatatatattggatttctaaggatggtggtttgagccttgattagacttttgatgtgctaagccagacaggcagtctgtacattgatggccatcacaatgcagctttggtttaatttaattcaggcctgctgctgagttatgcacagactttttgttgaccaaaataaaatataaagggttttcttctgtttgacatttgtgttcattttttctctttatgtattacattttaacctatattaaataaatgtttaaatgataatttgcttatgtcttataaaactcagcataagaaaaat

SEQ ID NO: 11881 - DNA, 3861 bp, Homo sapiens
cttcagcacctcagtaacttcacttcatccacaggaaacactgctcttcctcacctgtcacataaagcatttttttaaaaagtcagctgctccaaaatcatcaactcagcccctgggctgcccctcagaggcggtgtctggggaggactttgtgctcagcactctgcaccggccactcttagcccccgaggcgttgaagggctcaggcaatgtttccattaagtagagactcagctgttgtcacacccaaagggatgctctgccaaaggtttaaacacccaggagaccatcagcctctcctgggagcacagttggctacaggcctcttgtggagagtttcacgggcaggggtgattccaacttctgcctgtggagagattttctgccctgccccaccagggccctgcatgttggagactgagctgggtgcactggccatgccctgtgaatcctcaggctgtgacgccctcaggtactcctgggaaaaggaggtacacagccatcatgcgagtcggtgccaggggaccccccggagatcctgaccagctcctccagtcatgctcttgtccctcactgccccagtaagctggaggctgctccagaactcagcagtgttggaggggcctctaagctgcactctctttctggcccttttgtctgggtgattctgtcctcaaataaagcccttcactcagccagacctctccacagctcaaagcattgccctaagaatcagaagtaaagataatccaagagcaaaacccactgtacttggggcctgcaatggctgtgtgtacactacatctaatgcccaaatgccagccagtgtggatgttgtgaccacagagcaggattgtgcattggctttagagctactcctcagctgatggcccacttttgtttatataaataagagcttctgccccacctgcagacatgtttactaatgatcatagccaggattagaaccactttcaaacattggggccttcttaacaaaagtctttgataacttaagaaccaaagtaacagagtaaacagaggcatgatggatccctgggccccactcccctcctgacaggttccccaacagcccatttgcccacttcccactgctcagcccacaccagacctccaggagacatccccccttgaggcagagagatcctgttccctattcccagacaagaattatttaatcttccctgttctctgtggtccttttcttccccaacaacagatagctcaccttggacagctcttcgtcccttgttcatggaaccagctgcctgcagtcaggccccaggttcttccatgggtgaacagagcatctgacaaaaggtcccagtttggccaggggtgagggagagagcaccagacaggctatccgagaatctgagagctgggcccggcagttcctccagctacccttgtgacctaagtccagtcacacatttcccaaagtttctctttgtcataaccctggtctggctggttttgagggcttgagaatgggtcagggactccaggccaagtccaacagagaccccaaacccaccacacaccagcagccacaacctcaccaccaacaaagaggacttttgtggggccacaagtaagaggtcatttctggaatggactcagacctttaaacaggagagttgagcacttccagtcagtttttaagcaaggcatggggaacagggaatagaacctttcaaagaggttgcccagagaaaagctgggcctcttgcattcggcttccttggagcagcctcttctggcagaaagccatcaggtgctcaatcatcttctcctggccaaggctctgaccatgcttagtactggaatagaggtggccaggcccccagcgactcttcttggcctgatgtttgtcctcacaggcatgccacgtggcctgagatgattcagaacaaatcatgctaactttgaatccatccagccacttgcaaatgataatcagaagtcagcttgttcactgttagaaagaaactaacaaaagagaacccagagcaatctagaatctttgagtgcttggctttccaaggatactgcggagactctggccaagctgatgaccttctgaagtgtcactggcaccatatgcaacaagaaccaccattcactgagtagctaatgggtttggggcctgggacattccatctgaggtccttcctgaacatgtcactccacagcagaggaccggttgcagcttacccagaaccactcctccaggagagctggatgttttgcgtgcaacaccttgagcactgactgctattgttcaaaaaaagcctttgctgcattcggaggactgccccgtgccctgaggtgacttcctaactatgtggtttcattagcgaatttattttttgtgctgggtggacatttgtattttgttaggttgctgtttaagctcaagtttgctgtgctctctgcagctacaaaacatcttggcatatttaagagtggcttttataaatagctttattctgatattaatcagattcccaactttactgagaattaaggactggggtactttaaagaaatgcaaatagcaattgaagaaccactgctgcaggtggtagccctggctagactgaattacactagaaatcagccagaaggaagcgtccttgggatcccagatcactctttttttttttttttaaaaggggcagccccttgatggctcatctctctgaataacagttacgtcttcatatcgataccagatgccttcttcatcatgccactgaagccactcaccaccttcaagaacatgccaacctctgtcagattcacttacccacaaacaaggaggcacgtttggcacaaagtgttgtcctccaggtccaagtggactctacagagtgcttgacctcaacacactggattccaggtggactggaccaagagcaggcaaagacacgggaactgaaaaactccacagggtttggagaatagaaatgaaaagccacgtcatataactcaagaataaatggtgttttggaaattttaaaattatcatcgaaggtggtgaaactatttcaggcccaaatgaaaggaaatcgccagttggggatgaaatcacagagcctgtgttttatgatatggttggatgtccactgatgaaattttaaaggagtttcagttttaaaagtgcgcatgattctacatatgagaattctttaggccaagaaactgtccttggctcagaggtgttgggaattaaagcagagagaagccattcgtgatgcttagaaccaaggatggtcatgtacacaaagaccatcgagacggccattcttgtttacaaaacacttaccaagaaagcactttgtaggggaactttagtaagttcttctcatttcattatgtttcttccaaggaaacaggagagactgaattaataattctctctttcctcttaagcacttttaaaataataaagtacatcttgaaatttggggaggcatctctgatttaaaaaaagaaaaaggctgcttgatgtatgttatgcagagacactctgcctctggtggctgcagagcaatacccaagcctcatttggaaggctcaacatttggaattgcactttaattgattaatcctcaattcatgtggccttacgggatggtgggtctgggaccccaattcattcttatctgccaaagaattatctagaagcacatcaaataccagcaccccacctgctcaatgggggtggaaaacttttgtatccctaagcatattattttatagtgtctgccatgccatgtggaaatactttatttttaacctcaggatttaaataaagtaaacactatgacattt

SEQ ID NO: 11882 - DNA, 146 bp, Homo sapiens
ggggcctgtggcggtgcaggcgcaggtgcaggtggacagggactggaatgggggtcatggagaagcgggcctggaaggagcattgcagaacacagcagggtggagacgtctcctccgctgcaggcgtgcagtgaaggtcattcatt

SEQ ID NO: 11883 - DNA, 189 bp, Homo sapiens
aaccgaagaagatggcccagctccccaagaaagcctcagccattcactgcccccagctcttctccccaggtgtgttggggccttggcctcccctgctgaaggtggggattgcccatccatctgcttacaattccctgctgtcgtcttagcaagaagtaaaatgagaaattttgttgatattctctcctt

SEQ ID NO: 11884 - DNA, 1537 bp, Homo sapiens
ctcagaccataggaggccaacccaaaataagcaggcgtgacctgccaggcacactgagccagcagcctggctctcccagccaggttctgactcttggcacagcatggagtcacagccacttgggatagagagggaatgtaatggtggcctggggcttctgaggcttctggggcttcagtcttttccatgaacttctcccctggtagaaagaagatgaatgagcaaaaccaaatattccagagactgggactaagtgtaccagagaagggcttggactcaagcaagatttcagatttgtgaccattagcatttgtcaacaaagtcacccacttcccactattgcttgcacaaaccaattaaacccagtagtggtgactgtgggctccattcaaagtgagctcctaagccatgggagacactgatgtatgaggaatttctgttcttccatcacctccccccccccgccaccctcccactgccaaagaacttggaaatagtgatttccacagtgactccactctgagtcccagagccaatcagtagccagcatctgcctccccttcactcccaccgcaggatttgggctcttggaatcctggggaacatagaactcatgacggaagagttgagacctaacgagaaatagaaatggggaactactgctggcagtggaactaagaaagcccttaggaagaatttttatatccactaaaatcaaacaattcagggagtgggctaagcacgggccatatgaataacatggtgtgcttcttaaaatagccataaaggggagggactcatcatttccatttacccttcttttctgactatttttcagaatctctcttcttttcaagttgggtgatatgttggtagattctaatggctttattgcagcgattaataacaggcaaaaggaagcagggttggtttcccttctttttgttcttcatctaagccttctggttttatgggtcagagttccgactgccatcttggacttgtcagcaaaaaaaaaaaataataataataataaggcctgctgtgtaagctgacagtatttgtagctgatagggggttgggaggaaagtgtctactaggagggtggggtgagattctgtgttgatgtaggaggccgagaaggcccttaactcaaagtagcttatttatccaaaatgttctggatgcatcatctccaaccaaggaccccttatttatcatgcctttgttctcttttccctcagatgtatatttctttaaaaataattttcctaataacaaaacttatttctaaaacagcttaaaaattcaaagaaaaaccccaaacactgacattacctacacttccactacccaaagacaaaatgtgcccactgtgtgcttttgagtgtattttcttttagtttgttttttgttgggtgcatatttatgataataacaatgatggacttcaattgtactcactgttctattgttggttttaattagcagcaagttgtgatcactttcccaggtgaataaatcatttcaaagcatt

SEQ ID NO: 11885 - DNA, 3591 bp, Homo sapiens
tatccatcagaagactgcaaatctcactattctctggagctatatataaatctttgttatgatcatgtcatataggaagaatggcttgtgcttaaggacaaagtctagaaaccactatcatagttgctaaaaaaaatggttttcaaatgtcaaatacatgagtatctccctccatggactggagaattgaaaaattggtttgtatattgatatttccaggttcatttgcatatacttttttccaaataatgcacatttaatatgttttaaaatgtcttatttttaagaattataactaaaagaccaaatactgaagttaagtgcattgttttcaggaatcaaaagataaaggggccgggtgtggtggctcacacctgtaatcccagcactttgggaggccgaagtgggtggatcacctgaggtccggagttcgaggctggtttggccagcatggcgaaaccccatctctactaaaaatacaaaaaattagctgggcatggtggcagttgcctgtaatcctagctactcaggaggctgaggcaggagaatcgcttgaacctgggaggtggagttgcagtgagccgagatcatgcgactgcactccagcctgggtgacagagccagactctgtctcaaaaaaaaaaaaaaagaaaagaaaaagataaagggattgtgaaaagagcatttatattggactaatcagatgagagtgttttgttattttgaaagagtttcttttactgagaataatcttccttgagtttatataaactgctatttccatatgttttaagttatattttggcaagtgtagactcccaggagagacttgtaggtacaatctaggccttgaagaaacaaaggctggaatatctgcccatgctttgggcatgagatgctcagatggtgcgtgggtagatctagttgaggaagtgtgggcctggctgttcatgggaagtcttcagtggccttcatggatggccatccagtcctgagtggtcaccctgggggtcctgggacacacctcagtaaagagcaaaggcaacgccctcagggtcccttcctccaagatggccatgtagggtaatggagatgaccagtccacactgataaggagttcctagcaaggcttccttgtgggtaccacaggacaactctgcccatagcaaagatgcttcagtccagagggagcccatgggctgtttgaatttgggagaggtgggattcattacaagactttgggctcttatgtcacatcacatgatttggagaaattagacacaatctcttatttttataccactgtcttgggctaaaataaacaggttgtggctgatggtgttgaagataaataagcttaaacaaataactttggccgggcacggtggctcacacctataatcccagcactatgggaggctgaggcaagcaggttgtttgagcccaggaatttgagaacaggattttgagaacagcttggacatcatgacgaaaccccatctccacaaaaaaattcaaaaaattagccaggtgtggtggcatgtgcctgtggtcccagctactcaggaggctgaggtgggaaaatcacttgagcccaggaggtcgaggctgcagtgtgctgtgattgtgacactgccctccagcctgggtgacagagtgagaccctgtctcaaaagcaaaacaaacagcaataacaatattattattgttataactaaaaaaaaaaaaacaaaaacaagcagcttttgtgactaagaaggaaaatatgcatatagtggcatatttttatatgaatcatctcctctgtggtcttgcccagtaccatccagtggagctttctgcagtgacggaaatgttctgtatttgcgttgtccaacgtggtaaaccagacacatgtgattcttgagcacttgaacaatgactgatgtgattgaagaacccatctttcaattcaattaaatttaaatagccacatttaactccagccttgggtttgacctgatggaaaattcccatgagagagtgctccaaaccgttccaaggtggggccagttgcgattctaaaggaagaagcactaaatggcagggtgatcagtccaaagcatttatgaggggagcttacatacagcatgggctgcagcgtccttgtgatgggcagtgagacaagggatgttctacctgggcatgtccccagcgagggggttgggggatggagttcacatgaagatgtaaggaatttgggtgggggctgggctggcttctacatgtttagcaacacggctgatctttcagtgtttccagcaacaacctaagcaccgttatcagtgcctaggaatgttcaaggcccaggctggggttcagacctgcagaggaaaacatcagctggctgggtcaaggcaccatgtgttacttggtcaggacagagacaaaaatgaggaaaactaggggaccccacacacatgtggctaccatactcctgaacaggtctagctagttatttgtttttttggaagttaatctggggtagaaatgtatggtgatttttattttctctgtctgaagaaccagccatttttaaaaaggttattattgacatcccaatattttgtcttggtgggcttactcataagtccaaacattttattctcaacaggtgtaaaacaggcagagcattctaaaaccacatggtagtgctttggtggaggactgcttccacttagaaacaaactctgagaagtaggctaagagaagacaagagggccgggcgcggtgactcacgcctataatcccagcactttgggaggccgagatgggtgaatcatgaggtcaggagttcgagaccagcctaaacaacatagtgaaaccctgtctctattaaaaatgcaaaaaattagccgggcgtggtgggcacccgtaatcccagctactcaggaggctgaggcaggagaattgcttgaacccaggaagcagaggttgcagtaagctgagatcccaccattgcactccagcctgggcaacagagtgagactccatctcaaaaaaaaaaaaaaaaaaaaaaaaagagagagagatgaaaagagtaggaaaatgagaaatcaccttcgttgaatcttaaatagttacatttttttctttttaacactaaaaatacaattcaaatttattagctctactacttgaatgattttggaattttatgtcatgctaaggtatgtgttacatatggccaagtggaaaatatatctgaagaggggctttcatacaaatagactgttcataatttatgtaaattttattttaataaaatcagttttttgtttaaaaaccttgtttcactgtcacatatgaaaaaaatactgcattgatatataattatttcatgttacataataacccaaaacaaataattacttgaatatgtttgtagagatactatttaatttattcatataaatgtgcagaaagattccaaaggagaatatatatcttgtgaaaatatggagatttgaaaatttgacatgatgcaaatagactgatacataatttggaaaggttatttacatggcagaatacatgtatgaatattaaagt

SEQ ID NO: 11886 - DNA, 1795 bp, Homo sapiens
cctggcctttcctggacagactgaagagctgagcagggcactgccagcctgtccctcattacccaaggcaaggggcaggacaggccctcagaagcagctcttggaggagatgagcattttgttttgcacaggaagatgctgctgctgccctgactgggatgagggtgaggggtgacgggtgtggccctggatgtggtggttttcccttggccactagcccatcttcaatgaccccttaatctgcagcagctcacaggctgggggtgaggagtccctggcttctcttagcctgagcctttctcccaagttccagagcctctccgggcctcagtgctgccatctgtacaatggtggagtgagtacgctgtaaaggaccttccattcattttgctgaattccagagtccttttggaaaactgactttagtctgctgggctgtattgacctctggcaggctcgaagcctcactgggtatgcagtcaacaggatgggcctggagatccgtgaactgcaggccacgtacccatgacgtaaacggcggcactggagcaagctggggcggggggtgggtaaaccctcactgccagcaggccccaagtggcttgtaaatcattctcctgtgatgtctgtgggcctgcgtggggacaacaggggcacatgacatctgcctgggccctgaccaataaaccctcagacccaggacccaggaccctgctgtagttggggagcaggagtacctttgggaggggaggactttatttaaacagtggttctagtgtgggaccaagagaggcaggagctgggtcttggggcagctttattcctgttgggcctcagtttctcttccccacacagtttatcttccgtcacattgtgccgggtgacgtgcacggtctccctctgccctagccggagatgcatgatgacaggcagtgtgatgtgttctgaaagtgtccagggcaaagcgtagggagagggtggatttgtgcagggtgcagctctggagaagaagctggatcactcttggtcccattccctaggccctgagcaagtcaggctcctggctctgggtgtggctcccccaaacgaagtactgacttcagcctgtgaggggagggttgagggaggctctggaaagcccagccacacctgagtccctggcagtagccttggggcagagggcacccgcagagtcccagagatgatgtgggcagtgggcagagagagccttggcgcctctgtttgccaccacttccccaggaaggagggacagcatttctctggctggttccactaaatgtgccagcccaaatgcagggcatgggctctggttctgccaggagcctgtgacacccccaggaagggggtggaactgaggaagagcgaggatatgcaggcactcatgcttaccgggactggggcagctcactaggattctatcctttccaatcggcatcagccagctcttgtcccctgataagtgaggacagcctgaccctggcctcaaatgcagccatccctgagttcatgcgatgctgacgggaccccagcacacttccctgcctcctttgagatctgcgagcccttgctgcagttcagattcaacaaggccctctgcccaccctctcactaggcctcacccaacaccagtggaactggagcctctggctgggcacagtggctcactttgggaggctgaggcaggaaggctgctggaaactgagagttcaagaccagcctgggcaacatagtgagaccctgtctctacaaatacaaaataaaataattagctggg

SEQ ID NO: 11887 - DNA, 130 bp, Homo sapiens
ctctgtgtgccctccctcacttgtgggccccccttgcctccgtgcccaggttgctgtgggtgcagctgtcacagccctgagagtcagggtggagatgaggtgctcaattaaacattactgttttccatgc

SEQ ID NO: 11888 - DNA, 259 bp, Homo sapiens
cctccctaccttttcctcctcctgccttgcctctgctgaatggggccagatggtttgaccaaggtcatgtgtccatcttcaaaaagagtcagggtggggaagagtaacccctgggagaatgggtctggctttggcatcccggtgaggagaagtgtggtggatgactaggccttgggtgagcaggagaagggaagtgtggcctagaaggattctggaatctgggaccaggagagcagggattaaacatgtgcaaacttga

SEQ ID NO: 11889 - DNA, 235 bp, Homo sapiens
gaagcccagggaaggctgtgcagggacgtctcatctcccatgtgtgatgctgacaccagcggcctggagtcgtgggaaggaggggagccttaccaagactcctgcaaaaacccttggacctctccacgtggttgccgtctctggcccctctcaggctgtgcttacctgtgacagcagctctgtccccaccccatgggcctcatgaataaatggcttcttgccggccttcctttct

SEQ ID NO: 11890 - DNA, 326 bp, Homo sapiens
ggcatgccctgccccaccactcgcccatcaggcctgtcctgcagaggatggtcttgggcagggatgggggctaggcttgccatcacctccagtttggcttctgagcagagactccctgcccatcaagtctgaaacccccatggatgaggtcagctccttgtctgctgggtggcccctgccattctgaatggaggcagaaccagcaacaactctgggcgtgcctgtgtctgcacatgtggatgtacatatgtctgtatatatgtatatattttgaactttctaaaaaaaaatctggaaatagaaacaagtaaacccctgtgtgtggc

SEQ ID NO: 11891 - DNA, 676 bp, Homo sapiens
ctgttgggccagggtgggaggatgggtggtcaggtaagacagactctagggagaggaaatcctgtgggcctttctgtcccacccctgtcagcactgtgctactgatgatacatcaccctggggaattcaaccctgcagatgtcaactgaaggccacaaaaatgaactccatctacaagtgattacctagttgtgagctgttggcatgtggttagaagccatcagaggtgcaagggcttagaaaagaccctggccagacctgactccactcttaaacctgggtcttctccttggcggtgctgtcagcgcacagacccatgcgcatccccacccacaaccctttaccctgatgatctgtattatattttaatgtatatgtgaatatattgaaaataatttgttttttcctggtttttgtttggttttcgttttgcttttagcctctacatgctaggatcacaggaagactttgtaaggacagtttaagttctcctgcaaggtttaatttgttatcatgtaaatattctaaagcaggctgccttgtggttttggccagccttgtgctatgttgataagattgatttactgcttaaaatcactttactttatccaatttttactgaactttttatgtaaaaaaataaaatcaattaaagaacttggcatgtgtgttccct

SEQ ID NO: 11892 - DNA, 282 bp, Homo sapiens
gtgatctccagatgtcacttggtttattcctgcaagtcagatgcatcatctcactcacagggggtgcattttactcatttatttctcagaggagcagggcgtggtggcacacacttgtaatcctagcatcttgggaggctgaggcatgaaaatcgcttgagcccaggaggcagaggttgtagtgaggcaagattgcgccactgcactccagtctgggtgacagatgaagactgtcttggaaaaaaaatataataacaattaaacaattatttctcagagggc

SEQ ID NO: 11893 - DNA, 257 bp, Homo sapiens
aacctcatcgccagtaccttaaaggacaagaccagcaactcccacctactgtagtggagctgctcaaccacctgcccagagctgcagccccctctactccaatgctgggacccagcacagagaacacatttggcctgcatgttgggaggagcatcctccaaggacaaccttgctcatctccacagagcactttgggttttaattcactgtcttatatgcagggacaggataaaataactttctagtttggactttca

SEQ ID NO: 11894 - DNA, 160 bp, Homo sapiens
gcgcagggcctccttgcccaggcaggaggctggggtgctgtgtgggggccaatgcactgaacctggacttgggggaaagagccgagtatcttccagccgctgcctcctgactgtaataatattaaacttttttaaaaaaccatatcatcatctgtcaggc

SEQ ID NO: 11895 - DNA, 429 bp, Homo sapiens
cctgatttcggagcagctgaagctacataggactgtttttggacgtggaagatagagcaacatagcaagaatgggtctttctcctctgtagtaatatttcaggctggaccggcgactccactgtgaccagagggttgagtgctgcagtgatggcatgccttggctgccctgggccctgttcagaaaacacaagggaccacaatcctgcctttgctgagagagaggctggatgctagacccaagtgaaaggggtcctttggagcctttgtttaaatatgccttagccccagctgcccatttttggttgacaagcctttcagagccagagtgggtatagatgtgccagccaggagatggcaccggatggcaggtgtgcaaggtgacaactaggataatcatggctggaataaagtaagtttccacactgga

SEQ ID NO: 11896 - DNA, 362 bp, Homo sapiens
agcagagcaagaagagaggaagcgggggtagtgggtggggggtaggggaagaaacattatctcctcttgtacagagtctatttcttgtaaccatttgttaaactcttttctttttctgatctcatggcatgcttttatgtattttgtacaggaggcaaaaaaatacttaaaataagcaaagaaactgaacagaattgcatacattgggttgttttttctgtgctgtctgtacattgcttctgctgctgtgatttctaaacctgtgctgttattcaactgacttttttttgtactttgacccacgtttttttgaaataccagtaaaaaacaaagttcttgaaataaaactttttaaaaagtta

SEQ ID NO: 11897 - DNA, 2312 bp, Homo sapiens
cctggaagatgcagggaacctccacgcccaccaccatgagctggagtggggatgacaagacttgtgttcctcaactttcttgggtttctttcaggatttttcttctcacagctccaagcacgtgtcccgtgcctccccactcctcttaccacccctctctctgacactttttgtgttgggtcctcagccaacactcaaggggaaacctgtagtgacagtgtgccctggtcatccttaaaataacctgcatctcccctgtcctggtgtgggagtaagctgacagtttctctgcaggtcctgtcaactttagcatgctatgtctttaccatttttgctctcttgcagttttttgctttgtcttatgcttctatggataatgctatataatcattatctttttatctttctgttattattgttttaaaggagagcatcctaagttaataggaaccaaaaaataatgatgggcagaagggggggaatagccacaggggacaaaccttaaggcattataagtgaccttatttctgcttttctgagctaagaatggtgctgatggtaaagtttgagacttttgccacacacaaatttgtgaaaattaaacgagatgtggaaggagaacctcagtgattttattccctagtgaggcctctgagggcctccacactgcctggcagaacataccactgaactagtatgtgctagaggagggcacaaacatccgctccttccctaggcctgctggctctggttttctatgcagatgattcattggattgggggtgagtgttttgtttttctgggggcagtgtgagctttgagggttggaatattgggaggcattccttagtttcctcaactagcctggaaagttaggagtctagggtaattacccccaatgagtctagcctactattcactgctttgtgtgcatttttttctccctctttaaaaaaccctttaaaagaaaaaaaaaagtagatagtgctaaatattttagctcatgaaacttggttaggatggctgggggtacaagtccccaaactacctcttgttacagtagccagggagtggaatttcgtcaaccggtacttttaaggttaggatgggacgggaaaagtgaagcaggatattagctccttataccttctcccttccatttctgagatctcacattccatctatcacagggttttcaaagagatgctgagggtaacaaggaactcacttggcagtcagagcatcatgctttgaggtttggggtgctcaggctgggagggtagaatgccattccagaggacaagccacaaaaatgccttaatttgagctcgtatttacccctgctgataagtgacttgagagttcccggttttttcctcttgtccttccctcccttctgtccttccatgtgtggggaaagggtgtttttggtagagcttggtttccaaagcgcctggctttctcacttcacattctcaagtggcagtttcattatttagaatgcaaggtggacatcttttggatatctttttctatatattttctaaagctttacatatgagagggtatagggaggtgtttataaaacacttgagaacttttttccttaatatcagaaagcaaaaaaataaaaccacaattgagatttgcctttcaaaccctcaggtttgcctctaaccaggtgtccctggtcaccatcagagtactggaatacgggaaccgaggagaccttggtccttttgtttttgttctggactcttgggagtggaaatgagaatgagtttattcctactggagcttagttccaatgcatttggctccagaaagaccccagtgccttttgacaatggccagggttttacctacttcctgccagtctttcccaaaggaaactcattccaaatacttcttttttcccctggagtccgagaaggaaaatggaattctggttcatactgtggtcccttgtaacctcaggtctttaatgtgatcactttcaaatttaaaagatccaggtggaaatatttttactatagtaataattctacaaaatacctgaattcttaacactgttatatttcagtataagtggtggctttttcttttcatgtctttgatctggttttattcctgtaattcagccacctgattttgtgaggggggggaataatatgtggtttttgtacaaacatgtttctcagtgtgttgttattttggaaaaaatgaggggagggagtttggcaagaatggagaaaatgaatgaagaaggcctaatctctctctttttcagtgaataaatggaacaccatttc

SEQ ID NO: 11898 - DNA, 2378 bp, Homo sapiens
cgtgtctctcaacactggggctgctgcaacaccagaccagtgatctttcctaagcatcgttatacttctaaaaccttcagcattttgcagagctttgcttttcattcctggacatgatgtagaagaaactgagggtagttcttcggggcctatttctgctgatgcctgagcaaacaacctgcttcctcttgtgctctgcagggtttgatggagcctcatttccctttgtgaacacaaagtgcaaaatgaattctttttaattttagtaatttttacaaaggttatctaatgtcttttatttcttgttttctttatgattttatcatttgattcattctcacatttttttcctttaaatatttttagttgacctttttcctttggttttcaaatgttcaacatgaatcagaatagtgtaacaccaaatgagaacatgtgttttcataaaggggttgaggccaccagtactgcagcgaatttccttttcttctccctcctccttccttctctgagcttgcttttagggaaggttaatcttacaggctacctatgtttctctccaccttactaaaatctaaataatgatagatattttaagtttttaaattgagtagttctgagtaatcctagaatatttttccaaattaaataatcctttattatttgcaagttgggccaaatttttttttttttggagacggactcttaacaatctaagattgtttcaacaggactttcttattcccattcctaattttttcaaactaattgcttaaatctagaaccagttgagattagtactgtacaatggtatgctttgattgtatttatagaaatataacataaaacatggaccatgttttgaaatcttagaggaattctggtttaaaatctgaaatactttaaagttttctatccttttactgattatgcagcttcttataacccccaaggtacagattatttcagcttaaaagaaataattggcaccatgttctgagaaagattttgagatatacattgttttttgtttttgagacagggtctcactcttgcctaggctggagtgcggtggcgcgatcttggcttactgcaccctctgcctcccaggttcaagtggttctcctgcctcagcctcccaagtagctgggattataggtgtgcgccaccacaccagctaatttttgtatttttagtagagacggggttttactttgttggccaggctggtctcgaactcctgatctcaagtgatccacccgccttggccacccaaagtgctgggattacaggtgtgagacactgtgcctggccagatatacattgttttagatcccctgatacagaactacttttgagatggtaagattagaatatcatgaaagtttaaactgaatccttgcagcgacttccggaatttaggaagcattccctcttctacaggggtctggtcacaagggctggattctctgacaaaaatttcttctatggattctggacagaagacacttgagggtgatatgttttaaaggaaagaggttatgcttatcttcttagcagttgataaaatattaaaactctcttgccatagagaatacaccatcaaagaaaacacaaccctttccctttggtgtacagttatttattaagttgattttggggtttctttcgccagggatcttttcaaaactggtagtagttatttttaaaaatcatgtttgacatctttctattgctcgtaaccagtccctgtagctgtctaagttatgggtggagaagcctgggtatgactttccgttgtgtacactcacacttcatgattgacatttatttattcttttatttccatttggttatgcttatttttgtttgaaatttgtttttttcaaatatgtttcctttttgaacttacagaattgttgaaattttctactaacagccagctaaaatttggtatatgttagctctatctgtttcacttggacgtttcattttgaaagaaagaaattttatgtttcacatatagttttatacaaagtagccagtcccataatgaaatgctgtattgccatagtggtcacacccaagtggtccagtatctcaatggtgaggcagccagactggtcagggctgctttgttgaaatgtgatgattttcatatgccttctttctctttctctctctctttttttttccttttttggcccaatgttgaagatgtagaactttgtttttaaataatgtttttataatttcattcgtatacctaagtttgtattttttgtgactttggacttcaacagtttgtatattgggacttctaatgtgattactgtactaaataaattccactaataaacatcttacattaacacctt

SEQ ID NO: 11899 - DNA, 2336 bp, Homo sapiens
tgatgacattctggtctcgtcttccgtctcccccgtgttcccctcttgtctcccctgttcccctctcccttccctcctcccatgtcactgcagattgagacctacaggctgacgttccgggcaaatgccagggcccgcaccgaccacggggccgacattgtctcccgccccccacacttccctggcggccccaactcgggctcccgggtccttggccccctttcccgggctgtccactagaccagtgagcgcttgggcgccgtgctgggcagcccgctaggctcgccttccctcctgctttgcgtgcccggggcagcagcagccctgccccacacctcctctcactccccagcctgggcccatctccctgctttggtcttgccccatcactgcgccactgctccgtggaggaggttgggagggggttggggtggttgaggctaagttgggatctaggagaggagaaccagattctatcctcatctttttttggttctttggtccaaacccaaaagaaactgacatgccctcccttctccctggatctacctggagggaagagtggaggtggattccgagtggtgacaggacgctgaccgtggagcttaagccactgcctctccctctggtcccacaaatgggcgcccccccctccccatgcaggtggtgtcgggcccttcttgctgccctgccccaagttgggggtcagtgctgcctgtccccatgcttaacatacccgcctagctgctgtcacatttttcttgttttgtccttttatttttttctaataacctaaaaactggcaaaatagttctgcaggttgaagccatgtctacatgaaagtcctcagtaagtgttagagggaacagggcggagatatccttatgccacccccgctggaggatgtgggcagcttagggccctggaggcggtgcggcagggaagaggggtgcagaggctgtggctggtgagccggtcaggcacacaaggggcccttggagcgtggactggttggttttgccattttgttgtgtgtatgctgcttttcttttctaaccaagaggctggttttggcatctctgtcccattccctgggatctggtggtcagccctaggataaaaagccagggctggagaacaagaaagggccaggagatggaattccttcaggccggcacccacaccctaggacatgtaagccctcatgtccaagggagcctcatgcagatagtaggaaatcaggtctggaaatttaaaaataaaaggcatgagactaaggctatctgcttcccttatgccctgactggagaggggagggaggagaggcaaggcccacagagggcatcccagctaggccttgggatggctgcagtgaggagaaatcccgggaactgtattgacacaaagattcttattgcacttgtattttttgtattaaagtttgcatggtttctaataaaggattcaaacataagtttgtagtgaaatggcctgggagattccaagggcttctctggagggggattggctgcagtgtagatttgcctctgaggaggctgccccagacttggcctcctcatgccccctcctgacctctgcccttctctggtcctggcatccctggagaaggtaggggtcttgacctaagtttagatttgatctccatgtgcagggaggctgtcctgggcctgacaggtcctccccctttctgaggtagcagtgccttgtggaggtttgacaccatgtccctagctccccaagcacacaccaggaaactgcaggggctcacggaggaagtgctgcctgggccagggggaccagctttcctccgtagagaccatgtgcagaacacttctgctgtgccaagaacatgagggagccagtgttttgtcagcaggaagaaagggcctgctgggatgaaagtgggaaggaaacagggttgcgtagtcaggagacacctcaggggcaacagcacaggcccagagtacctgctgcctccactgcgtctgtcctggggtcatgaggatgctgaggttgacgacaggttccaggtcctttcactcctttggccaaaggttgggggtaggtggcccaagtggcgtgctctctaggtagacaacaggagtggtcagagttccctcaaaggatcctccactccagagcacctgagaaggccgggaccagaggccctgtgtgatgtgtactccgcagctgtttggggtgggacatttctgtacttctcgatttgcttatggctcagccattacctgtgtcagtccatgattctgttgtaacagttttaagagtaaataaataaagctgcctgatgtcccatc

SEQ ID NO: 11900 - DNA, 1767 bp, Homo sapiens
gggcggcaggaccagccagcagcagcccaagcttccctccatccccctttaccctctttgctgcagagaaacttaagcaaaggggacagctgtgtgacatttggagagggggcctgggacttccatgccttaaacctacctcccacactcccaaggttggagcccagggcatcttgctggctacgcctcttctgtccctgttagacgtcctccgtccatatcagaactgtgccacaatgcagttctgagcaccgtgtcaagctgctctgagccacagtgggatgaaccagccggggccttatcgggctccagccatctcatgaggggagaggagacggaggggagtagagaagttacacagaaatgctgctggccaaatagcaaagacaacctgggaaggaaaggtctttgtgggataatccatatgtttaatttattcaacttcatcaatcactttattttatttttttttctaactcctggagacttattttactgcttcattaggttgaaatactgccattctaggtagggttttattatcccagggactacctcggcttttaatttaaaaaaaaaaaagaagtgggtaagaaaatgcaaacctgttataagttatcggacagaaagctaggtgctctgtcacccccaggaggcgctgtggtactggggctgctgctatttaagccaagaactgaggtcctggtgagagcgttggacccaggcttggctgcctgacataagctaaatctcccagacccaccactggctaccgatatctatttggtgggaggtgtggccctgttcttcctcaccccagttccatgacattggctggtataggagccacagtcaggaaagcacttgaggcagcatctgttgggccacccccggctcagtgctggaatgttgcagtgtaggtttcccagggaaggggggtgggggtaggtgggctccacaggatgggggaggagcatgtccactgagtatcttccttatgttgctgtgatattgatagcttttattttctaatttttaaaaaatggtcatattatgagtcaaagagtatcaaatcagtgttggatggaccacccaagggtgaggagaggggctggaagccctgggcattaggagaagggagtgggtgctggcatggacatgactggatagaattttctcaggagggagcttggtggattttgaaggtaaaactttctgggtttatcatgttttaattttagagacagggagtgatgaatcatcaccggttgtccccttatctaactccataaaagtgggaatttcaaaagaacacctcatccaaggagctggggcagacttcattgattctagagagacctgtttcagtgcctactcatccctgccctctggtgccagcctccttaccatcacggcttcactgaggtgtaggtgggtttttcttaaacaggagacagtctctcccctcttacctcaacttcttggggtgggaatcagtgatactggagatggctagttgctgtgttacgggtttgagttacatttggctataaaacaatcttgttgggaaaaatgtgggggagaggacttcttcctacacgcgcattgagacagattccaactggttaatgatattgtttgtaagaaagagattctgttggttgactgcctaaagagaaaggtgggatggccttcagattataccagcttagctagcattactaaccaactgttggaagctctgaaaataaaagatcttgaacccat

SEQ ID NO: 11901 - DNA, 1309 bp, Homo sapiens
gcattccctggcctctctggctgccacttggttatgttgtgtgtgtgcgtgagtggtgtgcaggcgcggttccttacgccccatgtgtgctgtgtgtgtccaggcacggttccttacgccccatgtgtgctgtgtgtgtcctgcctgtatatgtggcttcctctgatgctgacaaggtggggaacaatccttgccagagtgggctgggaccagactttgttctcttcctcacctgaaattatgcttcctaaaatctcaagccaaactcaaagaatggggtggtggggggcaccctgtgaggtggcccctgagaggtgggggcctctccagggcacatctggagttcttctccagcttaccctagggtgaccaagtagggcctgtcacaccagggtggcgcagctttctgtgtgatgcagatgtgtcctggtttcggcagcgtagccagctgctgcttgaggccatggctcgtccccggagttgggggtacccgttgcagagccagggacatgatgcaggcgaagcttgggatctggccaagttggactttgatcctttgggcagatgtcccattgctccctggagcctgtcatgcctgttggggatcaggcagcctcctgatgccagaacacctcaggcagagccctactcagctgtacctgtctgcctggactgtcccctgtccccgcatctcccctgggaccagctggagggccacatgcacacacagcctagctgcccccagggagctctgctgcccttgctggccctgcccttcccacaggtgagcagggctcctgtccaccagcacactcagttctcttccctgcagtgttttcattttattttagccaaacattttgcctgttttctgtttcaaacatgatagttgatatgagactgaaacccctgggttgtggagggaaattggctcagagatggacaacctggcaactgtgagtccctgcttcccgacaccagcctcatggaatatgcaacaactcctgtaccccagtccacggtgttctggcagcagggacacctgggccaatgggccatctggaccaaaggtggggtgtggggccctggatggcagctctggcccagacatgaatacctcgtgttcctcctccctctattactgtttcaccagagctgtcttagctcaaatctgttgtgtttctgagtctagggtctgtacacttgtttataataaatgcaatcgtttggagctgctgccccctttcttcctggcctcggctgctggaattggaatcaggctgtactctttccatccatttgggcttct

SEQ ID NO: 11902 - DNA, 536 bp, Homo sapiens
tgcaggtctatgaagaccagtggtagtgcccagacttctcctagacatctagtctaaaacattctcctaggaccagggaagcctggcttacagtgccatttctgctgggcaccaccacctgcctgagggcctagctcaccacagcacatcctccaggatctagccttctatctacctcttctctggaatgtttatggtggttcagaagaatgatgactcctctttgctgagaactgttcatccttcttcaagaagaagcttgccaggccgggcacggtggctcacgcctataatcccagcactttgggaggccgaggcaggcggatcacaaggtcaggaattcgagaccagcctgaccaacatggtgaaaccccatctctactaaaaatacaacaattagccaggcatggtggtgcatgcctgtaatcccagctactcagaggctgaggcaggagaattgcttgaacctgggaggcagagggtgcagtgagccgagatcgtgccattgcactccagcctgggcgacattctgtctc

SEQ ID NO: 11903 - DNA, 630 bp, Homo sapiens
gaacccaggagccacggcctgctgttgcttcagcctggcctgggcagccctggaagctcggaggagaggccaccttcttaggtgcctgtagtgactgacaagcagagttagtggaaggtgactcccagtctcctggtggctctggcctcggccctgctggatccacctcctagacccggggcctcaaggctcatggggtagtacccagcctgctccccgagtccagcgaccctgtgacaccggtctgcagggagttggggactaagggcttccagagagtggctggaagagactccaggcccctggggagactgtactgttcctgaacactggccttggccacactgggattcggagaggaaggaggagagccccatgcttcctgtctgcctcctccaccatccctgacctcagttgagctgcctctggccttgttgctgctgccacatcctaggtctaagagttgaacgcctctcctaggccactacaaactgacccctcagcagggctggctgccacagggctgccctgcctcataggtagccatggtgagggctatctgctgcaggggggtcttggggagagtggtgactccattgacccagcttttcattaaaggataacacactg

SEQ ID NO: 11904 - DNA, 236 bp, Homo sapiens
cccctggcccctcctccagagggtctgaggcaatagctgtgaatgtggatttaagtagagaatcgtagcaatgaagcgagcctttgggggcatgtacaacctcaatctgaaggagcagtatctgtgtggctcaccagcaggcatgcttcgctttgtagacaaggttcatttacattaattatcaaaactttgtgctaatgtccaattaaaatatcctgagttttattatttaaaac

SEQ ID NO: 11905 - DNA, 2055 bp, Homo sapiens
ccatgttcatccactgtgaccactaggcaggcactgctctctgcagagggggtcattccaggccctccagtgtgtgtgatagtcaccatgccatgcagggatattcttgaagccacacatggctggcggaacccagagcccccaccccagcccacctggctctttgttgacagtcggcgacaaggttgtgcgtggctcctgacctgctgctaagagtcacttgaccagactgcatctgcatgggctgcgcggaggttgcccagccccagtttcttccggcgcagctcttaggtgttcactctcgccagctcagttggctttgtgaagtgtgaaaccctacaatgtgaaaggaaagtgcttgctgtgatgttcctactgtggcccagctgcccagcatggacctggtgactctccacagggcctctaccatcctctctgtggccacttcctgagccagaggccaggtcttcatggggccctgagcttctgctgcctctggtgagagggagagcccttcccatccttacccaccaggaactagagccccaaccacagcagatgcttcctgggcagccactggccaggccgttgtatccatgtcacccttagttgtgggcattcatgaaagcaatgcgcttgcttcagcacattgggatgcacagaaacgtgagggcaggggggcagttgtggtcgcccctccccagttgtgcatgtacccggctacttaggtatgcttaggggagctggtggccaggggtgccccttcaggcctgctctcacagtgaaaccacttcaagacagggcaggaagttaccttcctggtgcacacaccgaagtgctcgagggagaggctgccgccccctctccccttccctggctgtggacactggcagccaatggggaggcggcctctcccctgttgctgcccgtgtccacacaggaatgtacactggtggcagaaacatgcatttgccataaataattcagaaacacttgtatggtcctgtaaaacttctctggtgtttgttgacttctgcctgtgggtctgaggaagggagaaggcagaacccataggcagtccctgggcaagggaggattttcccggccgcagcacagccttccattcatgtgcacgtgagtctggtgaaaatggccttgtgaagtccagtgtctgtcatgcccctgagttcttttggtcccagagaggcagcctgggcagtctgtttacagctggcaaacagactggctggcaagttgtggggctgggtcagaaagtgtctggacttgtaatcgggtgccctgctgtccacaggtggactctggggaagccaggcccctggatcccaagtcctttgtgtccggagcctttcctggcctgtgcctggagggtagcacatctttccagcctcccagggctttgcagcctgcagatgccacctgtccctgagagaagttagcgtccctggccctggccggtggtctctcatccttgtgtgctgctctgctaagagatgtccaaggcggagccggggcaagatccttccagactcatctgtcagagccccaagccctttagacccagagcccaaggaccatgcctttgggacattaggactgcagcctttgcttctgtgtattttggagttttggtgacttttgtcacctggacacactcatttgttagccatagtgggttcccttggtcagcaacagtgcatgtacctctggatgtcatctgaggtgagaccaccgaggccttttctctctgtgtacagaggggagttaggagttgctggactggatgcattacgaggactggggacagggtagagggacatccagggatcagggcatgagtgggggcaaccccccggcctctgccctggcatggtctccgcatgggctgaggtgtagctgattggctgccacatttcggccatgctggctggcgtgcccatgttgcagatattttcccgagttccccagaatggatggtattgaatctcagccacatgcaacactgtgtccagcattctttgcaataaatacttttta

SEQ ID NO: 11906 - DNA, 1066 bp, Homo sapiens
gcctgagagagggggtcacagtgatagggccaccctggatgggaagacctggagggcagccacacagctggacggatgctgccacatctgggcatacagtgtctggacgctgccacatctgggcatacagtgtctggacactgccacatggagccactgtcatgcaggtcatatcagatctgagtgccccacagagtcacagtgtgtctggacagcctggacattggacattgctaagttgggtcactgccacatggagtcttgccatgcctgtgtgccccacagacctaatatatgtccggacagcttggatgctgccacgtaaggtcactgctgtggcgagtcttgctatgtctgggtgccccatagtcacagaacacctggacaccgccacatgcagtcatcatcatgttactttcaggagcctcaacacgagagctcaacactgcctccgaccagtccctctgaggcccacaggtctgtcatcccataggccaccacacagagaaatgctggctgagggtcacttgcttgctctgtgccccatgaggcagcacctgccccagatggacggggctgtgaggggtgtctccaggcacaaaggcccgaacacaggaagcctgtgaccatggcagccttgtcttatgggcgcatatgtgcgtgtgtggctgagtctctgacagctgtgagtgtgtgtgagcagggtaagggtacgtgaggggtctgagaggagtgggtgcttgtcccccaaacctgcatgaagcaagaacaactcctggccaggccctgtcctccccacgtacccctgcatccccagcctcgacccagggacatgcagggctcacaggagacagggctcaggctgccggagctccaaccaaactctgtcccacttcacgcacggactgtcctgggcaaaggtgttcacctttccgagcctcggtttccttatctgtaaagcaaagcgacaccagcaagcctgtgagcattgtgtatatagcagacatggaggtcctgcagcaggaggtgctcaataaacacaaagcgactgaaggatgggaccagc

SEQ ID NO: 11907 - DNA, 333 bp, Homo sapiens
ggcccagataatgagctgagattcagcatcccctggaggagtcggggtctcagcagaaccccactgtccctccccttggtgctagaggcttgtgtgcacgtgagcgtgcgtgtgcacgtccgttatttcagtgacttggtcccgtgggtctagccttcccccctgtggacaaacccccattgtggctcctgccaccctggcagatgactcactgtgggggggtggctgtgggcagtgagcggatgtgactggcgtctgacccgccccttgacccaagcctgtgatgacatggtgctgattctggggggcattaaagctgctgttttaaaaggc

SEQ ID NO: 11908 - DNA, 129 bp, Homo sapiens
gcgggaagcctatgtaagcaagagggcagggccggggtttgtggtcccccccccaccacaaacacagcacttcggctcctctaacctgtgccacaggtgaccaccaataaaatcctctgctgagaagtg

SEQ ID NO: 11909 - DNA, 263 bp, Homo sapiens
acatgctacatcctgcccaagactgcacctctggaggtgcagggcacccttgagaagcccctcacccctaggccgcctccaggtgctacccaggagtcccctccatgtacacacacacaactcagggaaggaggtcctgggactccaagttcagcgctccaggtctgggacagggcctgcatgcagtcaggctggcagtggcgcggtacagggagggaactggtgcatattttagcctcaggaataaagatttgtctgctcaa

SEQ ID NO: 11910 - DNA, 1742 bp, Homo sapiens
ggggatgacggcgtggacgaggaacagctgagggcgacagaggatctaggctaacaggagagactccaggagtgggggcagatcccaaggcagcctcctgctccccagtggtgggtgccccagctctacctggtgtggcagggctgaggctccatgtgcatctgtgagcatgcgtgtgacaggtgcagagacgggggactggagggagacttttatacgttttgtacctttgtaaccagagagatgcttatgttatttttcagcttttctgtctcctggggggtttgaggctgggctgggagggggagggagatagagggagagatgcagtttgaccccatttgggtcctgagcaaaccctatgctcatctctctctccttcctggggtggactcagatgggtgggacacatgccttcctccccctattccacccccaagttgatctgagtatcgtcaggggcccaaagtacagaattgttctttgctttttattgaatgctccaaaggccaaacttctggggctgggggttggtcttggaaacaggggtcctctgacttcctcatgggggcttgctcataccgcccctcctggtggatgtgtgtgtttattatgtggagtccctgccacttactgccttatgacctaggactgatgctgtggggtgctggtggagcagctgatgtcgtgtttacagagcaaggcttccctgtctcccacggggaggggctcgggcctctagtcagacattcctgcagagggtcggtggaggggtcattcacctgcccctgcagcaagcaaaagttgtctgtggtgccatttgattccctgacactgccccctgcttgaattgattccgaagggtagggtgggaaggtgagcaaagggagcagaaacaagggaattcaagacccagaatgtaggtgccactgcctcctatgtttacaggatcctccgtggccctaggcacctgggctgcaggaagtgactccgttccactcctcctttattcccttaaaaagggaaaaatgactgttacgaccctgttcacaaaactcttacttttgctattttgtctgctgtccagaactgaagactttaaaattttgttactgtttacaagtccagattcaaaaaatgtttttactttgtttacaactcaaaactttgagttttacactttgtttacagtagataattttttttcctttgtttccaagtgaaaggtagggaaagtgggagagggacttggaggacccacctgtgaggaccctgacctggccatcttgaggggttttctaacccccaggtctcccaggccgaaggtcagccttgagtcccgtttaacagcagatccagaagaccttgagagtaggcgtcctctaaccacgggggagagtggctgtgcagggctggggggtggtctgtgcagacacctcctcacccaccaccccatgcatactcttgggaagcagcttcctgggagattagaaattctacttccctgactggagctaaatcccaccagccaggacccaaactctccttaccgagaaggaccccagctcttgaagggctgagtggcctgctgggggtgggagggtgtctttactatgtcctaggtttcgtagatgcccctctctggggttcccctcctccagcccagcggccctctttcctgtctgtgtaaattgttccgtgaagccgcgctctgttttgggaataaacttctatagaaaaca

SEQ ID NO: 11911 - DNA, 697 bp, Homo sapiens
caccttgctgtcctcccttccctgcagctccagtcagtgtgcaggggactcaggggcttggccctaagaatgttttgcactgacagtgggaggggataaggtggcagaaggaacctgagcaggacccccacctgaagtagaacttaagagaggggccaagtgtaggattggggaccatggtctgggagctgttctggggcagggggaatatgcaagctaaagcccctctataccctggtaggcttcctcttcagcatgcccccctcttcaccccacacccatgtgtacactcagagtcctgctgccgctccaggctggaccagacccccatccccacccctcctggtctgtatcctgggcctcagcaagccatgcccctggggtgaggggaggcatctcccaccagctctattctttgccttagctttgcagtgagtgctgctcatgtcctcccctccacccgcacatgggggtcgctgcccttcactcctacccccagaggccttggccaagctgctgctttgaaagcgggatcttggagacaggccatccatcctggagcctcatggaacaggatgatggcactgagaaagccaatgaccgaatctcttttctctgtaaaaatgtagactgaaaagccatgtgtattttcctatgtgctgtagctctcctttggaaataaatcacaggcatctgg

SEQ ID NO: 11912 - DNA, 699 bp, Homo sapiens
ataccccaccccggctcctctgcacccagagctgggggccacctcagaagtgtcatctctctctgagcacgcattcccctgcagcagtcgaggactgagcagattgagtgatgctggggcagagaggcctgggaggaaaggtgttcagccagtcgtttgtaaggcgctcgtcggcacctgctgaaacgcccccacctgacagccccatcctcaaagactgtcttaattactcatggcaggttctagagacttaaggggaaaagctgctttcaaggccaccacatgtctgtgctccccaaccagctctatctgccttgtgttcattttgttattttgtgacgtgagactgcaaagaccaataaaaacatattttataagaacaaaaggcctgggtgcctacccgtgtgggggcactgtgggaagcctttgctagggtgtcttgtgctgtgtggtttgttttgtttgcccctttattttgctttgcttacccagtcttcccttactcttggatgcttcttaaccctcaggcaaacctgtgttccccctgtattcaggctctgctttaaagcaagccatgaggctgttggagtttctgtttagggcattaaaaattcccgcaaactataaagagcaatgttttcagtcttttaggattagaagaattacataaaaattaataaacattttcaatgatggaaa

SEQ ID NO: 11913 - DNA, 269 bp, Homo sapiens
gcttgctagctgctccagtacttgagagcgactctgtgtcccaggcacagctgtgctgcgtcagggaggaagccagtatggccaggtggtggctcctgcagcctggagctgatgtgcagtggcctctgtgagccccagcctgagccagtcccagctgtgcttggagtctttatttattttaactatttcttcaacattccacatttgatgatgatacctctttcttccctgagtgtatatgttctaatacaaatctttttgtttattgt

SEQ ID NO: 11914 - DNA, 925 bp, Homo sapiens
gtgtgccacaccccagagccttcttagtgtgacaccaaaaccttctggtcagccacagaacacatacagaaaacagacatgacagaactgttcctgccgttgccgccactgctgccattgctgtggttatgggcatttagaaaacttgaaagtcagcactaaaggatgggcagaggttcaacccacacctccactttgcttctgaaggcccattcattagaccacttgtaaagattactccaacccagtttttatatctttggttcaaaacggcatgtctctccaacaatttaagtgcctgatacaaagtccaaagtataaacatgctcctttcctctcttgctgctactcttgcttttggaagttaccacagggtctgcagaaacctgttgtataactgtagacactctctaatggttctcaaaggaggaaatgtagccttcagtctcctcatttgtcctttgaggaagtccacatttgttcacagttgcagcctttggttttacagtgggaaatggtggtggatgatatggacatatgtagcccagtggcattgtactttctgctgacagctgcacacattacagctgtctccaaacccacagtgatgcttagggaaagaccctgctcaggacccagcaggtcagcaccccagagcagactgataggtccgtgggacccatgttagagcagaaaatttgggctcagcacattttactgttagtagagagccaggaaacgttttctgggttggggattttgtgggattttttaatttttttagtaggttttgtttaacctctgtgcagtttgtatgaatgaattgctatacatttataaggagccagggtctggagggttgctatcactttgtccagcccaaataccttcctgggcaactcctaccatttgtttgcagttgcct

SEQ ID NO: 11915 - DNA, 778 bp, Homo sapiens
ggctgaaggctgctcaagttcacttctggatgctggaagctgtcgttgaggagaaggagtagtaagcagaactaagcagtcttggagggcaaggggaggggaatggtgagatccgagccctgtgcatggacttggtgagactgttgccttaatgacatcctgcaccgtgtataacttagtgtgtcattttgaaacttgaattcattcttatcaatttaagggatcttaaaaggatttggaaatggaacaagtagcttccagaccagatactacctgtggcaagaatgctgcctaccagttaactgctggtcctaccacagtcaaagtattcctcattaaagagagaatctcaggttctcactggaggcactgtgcatattttcaaccagatcaccaggagctgagatcttcttcagtccctagccaggaatacccatttgatttccagggtgccatctaatcctgggctgtacatgtggatatggacttgaggcccacctctgtgtccaagtggattgagcatatatgcctaggaggagatagactgttaatcgttggattttgattttttttttttatgcctgcaaataatcaaaagtaaaactggagtagcctaattttctgggagcaggtggagaactttccctcctacacagtgaggacagtcccagtctgctgggataagtgagaaagcccagggtgtaggaaggccctttttacatactcttttctcatgagagctcactattttaacaataaacaataaacgttgtttcta

SEQ ID NO: 11916 - DNA, 586 bp, Homo sapiens
ggccacagaggctccaatacctgggaatgttcacaaagtcatcaactggaaaaaaagcaaaaacccacggccaaaataaattggtactgtttgttacaaagttctgtcttgtcatggggagtcgggcatattcttggcagcactccactcaccttcagctcctgcaccgacatcaggaacccacggccaccacctcctcccctcaaggcatgctgagcatgggcacagacagcccatccctgctccatgctgtctgtgagcaggccccatgcccagcacgccagccaccgcaggatacctcagtcataccagttgtaaacctcaagcccctgacccccaagggcacaacggtggccaaactcagggctcacaggccagcagtccatgtcagccacatcaggcacatggaacacagtgctattcatgaaggtgggttcaccatgccccagacgccagaaggtcagccgttgatcaatggaggctgagaccatgatgcttgggcttaggatcttgaggcctgtcacatgggcagcatgtgcacaggggacagagtattcctctagcacacgcagctggggtaccagcc

SEQ ID NO: 11917 - DNA, 1061 bp, Homo sapiens
aaccttgctgcaagcacagcccttatgcggttaattttgaagtgctgtttattaatcttagtgtatgattactggcctttttcatttatctataatttacctaagattacaaatcagaagtcatcttgctaccagtatttagaagccaactatgattattaacgatgtccaacccgtctggcccaccagggtccttttgacactgctctaacagccctcctctgcactcccacctgacacaccaggcgctaattcaaggaatttcttaacttcttgcttctttctagaaagagaaacagttggtaacttttgtgaattaggctgtaactactttataactaacatgtcctgcctattatctgtcagctgcaaggtactctggtgagtcaccacttcagggctttactccgtaacagattttgttggcatagctctggggtgggcagttttttgaaaatgggctcaaccagaaaagcccaagttcatgcagctgtggcagagttacagttctgtggtttcatgttagttaccttatagttactgtgtaattagtgccacttaatgtatgttaccaaaaataaatatatctaccccagactagatgtagtattttttgtataattggatttcctaatactgtcatcctcaaagaaagtgtattggttttttaaaaaagaaagtgtatttggaaataaagtcagatggaaaattcattttttaaattcccgttttgtcactttttctgataaaagatggccatattaccccttttcggccccatgtatctcagtaccccatggagctgggctaagtaaataggaattggtttcacgcctgaggcaattagacactttggaagatggcataacctgtctcacctggacttaagcatctggctctaattcacagtgctcttttctcctcactgtatccaggttccctcccagaggagccaccagttctcatgggtggcactcagtctctcttctctccagctgactaaactttttttctgtaccagttaatttttccaactactaatagaataaaggcagttttct

SEQ ID NO: 11918 - DNA, 48 bp, Homo sapiens
aaagggatccagcacacctcctcggtttttttttcaataaaagtttag

SEQ ID NO: 11919 - DNA, 743 bp, Homo sapiens
gatgccttggccatggcacaagagaaaccagccaggaaaaaccagacagactttcacactaaagaagaggcctccatttttttttttcttttttttattggtgtagttacgaagcctttcaggctgcttctgtttaaaatataaaagaaaactttgccccctttgcatcttcataaacctgctgcggcagactcctcagccgatggtggctctgggtttccttgagtgtcatatgtcctagaaagttgctggctgactcttttttgtctggggcctggggaaagggcttggactgtgaaaagaaatgtggcccctttccatcttcaagagagatggaattaatgatggatggaccctggagggaatctccccagccgacttccactgggctgacagactttgctgaccacaggggaacgatgttcttttctttcttcatgatcagacataaacttagcatcttaatggaagaaaaatgaggggaacttcaattatgatttattaaagacaatttctattacaccctcctttatgacaagtgacattttagatgtaaaagtaaaaactttaccatgccttttttttttttgttggcctaacattgaggccttaaaacctgaggctcctgtgcctgatggaattcttgtaacatacacttgtgtatcatataaagataccactctgtttctcttatgtattcttactctagttgtttattaagaatgacaagcacgtcttttcaa

SEQ ID NO: 11920 - DNA, 96 bp, Homo sapiens
gctggaagcactgaacctacctcatcctcctggagggtgtggctaccctcgccaccccaaattccatgtcaataaagaacagctaaattctcctag

SEQ ID NO: 11921 - DNA, 283 bp, Homo sapiens
gctcgcctgcaggcagctgctgtgagctggcctacctgcctgccccaggccatgcctgcctttgttgtggggaacacctctgggctttgggcctcagcttatgcatctggtgggagagggtggggaggttgtggcccctgcaggggcagagtatcctagggtgtgtatccatctggctgtctgtccattcatcctgctgctctgacccttggcctcaggcttggccctgcccaagctacttcctgtacttaaaagtgttaataaaaccagactattcaggccc

SEQ ID NO: 11922 - DNA, 112 bp, Homo sapiens
cccctgcccaaggcctaccccagttcctagcactgccccacatgcatgtctgcctatgcactgaagagctcttggcccggcagggcccccaataaaccagtgtgaaccccca

SEQ ID NO: 11923 - DNA, 270 bp, Homo sapiens
ttccttcacacggcaatgtttggggaaactaagcccagctgtctgtgtggctagtggcacagtgtgctatgtccgtggactccacaatcttgaggactcccggtgcctctctagggccctggtgaccaccagcctcctttcagaaaccagagtgggtggggtacggtggggtgggtgggcgggaggggtgttttcatggcgcgatgcactgtgacttgttattcaagttgtatgtctactgttccatctatcacgttttatacctttcca

SEQ ID NO: 11924 - DNA, 2394 bp, Homo sapiens
ggacagttatctaagctttgattccttacagcaggaggctgcccttgagcctgagcagaagcagctacaatggccgtcaggggccacatttctcaaaaggttggcagaacctgaattaccagaccctttttaaatcccagttgtgtccctttttaagctgtgagaccagttttttgaattccattgctttgaaatgtttcctattactgatttttttttttaactttccttgacatcttgaatgtgtttttttgattgatgttcaatatacccagtacccatggtaggtgtgggtcatgggcctctgctgtgtctcttagtgttcttttccacgggcccctaaaaaagtacaggagtggccaggcacagtggctcacgtctgtaatcccagcactttgggaggccaaggcgagtggatcacttgaggttaggagtttgagaccagcctggccaacatggcgaaaccccatctccactaaaaatacaaaaattagccaggagtggtggtgtgcacctgtagtcccagctactttggaggctgaggtaggagaattgcttgaacctggaggcggaggttgcaatgagccgagatggcaccgctcccctccatcctgagtgacagagcaagactctgtctcaaaaaaataataatttagctggtcatggtggttcgtgcctgtagttccagctacttgggtagggactgaggcgaaaggatcacttgaggccaggaggcagagattgcagtgagctgagatcacgccactgcactccagcatgagtgacagagtgagaccctgtctcaaaaaaaaaaagaaaaaaaaagggaagaaaggaaactgaatctcagggaagtgcccacctcctgagctaataagaggaaggaatatgggggtgaggcagagctggcaaaaggctgttttttgttttgattgtttttaaagaccaagtgaagtatagtataagaagtggggaaggagtggaacaaggagttagatctgtaactgtgagtagtcaattgagataactcaatacctttggacctgattgtttttaaagactgagggtagtataagaagaggggaaggagtagaacaaggagttagatctgaaactgtgagtagtcgattgagataactcactacctttggaccagccagggctgtttataagtgctaaagcccgaacaaaccaaagagttggggagaaaggcctaactaacagctgagtgattgtctaacagactgtcttttaggccagtgactctggcatagggcaggctgcatagccagcaacatcccttaccacaggtctagtgattcctctgggctcaaatgtggaggctacacacccactccttagcagaggttggcctggcacctgctggtgccccaagaactatggcatggttagaccctggccacttgattgcatgtgcctccccagtgggcgtgccctggttcccaaccagttgtggccactgccactgccctgcctggggcaggagttgaggttaaggctaactacaggctccttccaggccacctaccactcagaccctgcaggaggtagcacaaagcattcacagcctgtggagtcagaggccaatttcttctccctgagcaagaagaatggaagcaaatgaaaagtgctcacagtatgctcaactgcccctgctcaggtgaagaatagcctgtctggatggagagatgtcaggctacttgatactcagaaaaacaggtctcaaaacagtgccttccaaataatacatgtggatgtggacactcttctatagacgaggtggagcttaattcctgtccttacccccatattcccacctcattaccaccctttgaaggtgaactagacttaatgatacttcccacgactaaagtagggaaagggaaaagtcacaaacttatagtggggaagcctggcagacacctaaccaagtgatgtcatgtatatgtcatgagaggggtgcatcacttccctggtattcctaccaaaaacccaaattcccagtgtatgatcttgagacaaatgttagacaaatccagacgtggggtacattctacaagatacctggccagaactcaagactgttgagatggccgggtgcagtggctcatgcctataatccccgacactttgggaggctgaggcgggcagatcacttgaggtcagaagttcgagaccagcctggcaaacatggtgaaaccccatctctgctaaaaatacaaaaattagccaggcatcatggcatgtgcctttagtcatagctacacaggaggctgaggcaggagaattgcttgaacccaggaggtggaggttgcagtgagccaagatcgcatcactgcactccagcctgggcaacaagcaagactccacctc

SEQ ID NO: 11925 - DNA, 732 bp, Homo sapiens
tgctgactccacgatcctgccaccctgtagcgccagtgtaatcccccaggagaacatctttgacactctgcagactgctagtgttctgtctaaaaaccagacaaggaaatacccttcttttatgagcagaaggaaacaaaaaaaaaaaaagaagaccgtttacctagaagaagctatgtcaagaggctgaattatttttatttttaaacaggtggtgagaaatttctgtgaaacctgtgaagctgaaaagggggtgggatgggggtactcaatggagtatgtctgatggatcccgaagaatggagaggaacacaggcgctgagtatggagcagcctggagacccaccccacctgcagggctgccctgagcgcctggatttctggttctgatgccaatactagtcaccccaagtagtctgctcacagtaacccaaacctcaagtaaactcccctttccctcgctatgtgcactgatatgggtttataattttctgaaagttacccactgaagcccatttctccgttgagtcatcttgtaatttccagctttctccccgctaaggaagatatctagtgttggggatcctggcccctcaacctcctgtggaacccagcagttctgttatatcccctgctaccctagatgaattaagacggttaaatactgtgtggaacttttattagataacacactttttattagataacgcttaaaggaagtcagtacataaa

SEQ ID NO: 11926 - DNA, 804 bp, Homo sapiens
tggctgggggcgccggcggtgtgctggtgggtgccgtcggctccatgcgcggagagtctggctactctctcgtttcctttctgttgctcgtagctgctgaaattcctctccgcccttgggattgcgcatggagggcaaaatcccggtgactcatagaaaatctcccttgtttgtggttagaacgtttctctcctcctcttgaccccgggttctagctgcccttctctcctgtaggagaacgccaagaacgaagagattctgaattccctcaagtacgtccggcctggtggtgggttcgagcccaacttcatgctcttcgagaagtgcgaggtgaacggtgcgggggcgcaccctctcttcgccttcctgcgggaggccctgccagctcccagcgacgacgccaccgcgcttatgaccgaccccaagctcatcacctggtctccggtgtgtcgcaacgatgttgcctggaactttgagaagttcctggtgggccctgacggtgtgcccctacgcaggtacagccgccgcttccagaccattgacatcgagcctgacatcgaagccctgctgtctcaagggcccagctgtgcctagggcgcccctcctaccccggctgcttggcagttgcagtgctgctgtctcgggggggttttcatctatgagggtgtttcctctaaacctacgagggaggaacacctgatcttacagaaaataccacctcgagatgggtgctggtcctgttgatcccagtctctgccagaccaaggcgagtttccccactaataaagtgccgggtgtcagcag

SEQ ID NO: 11927 - DNA, 761 bp, Homo sapiens
agctggctcagggtggggctgtcccttccaggagttttgcccctacaaggggttagtcaagaagctgaggcagaactcactgggggtgggcagttaaggtggaggctgattctaattgtctggttgaggggccacaccacctattccccccacctaactcatgccattccagcttccttcaggaccctgcttctgagtgacggaccagctcacacaatgtcttgtttcagtccatgatcccactgacctactcttgcctgctggagggtaatgagaagctttggttctgccatctctcccactctgccaggtgctggctgtggagcaaaggctcacctttgtggagaggataaaacctgcccaacctacctcaccatggtttttcacattgcaaagggtaataacatgggcagtgcggacttaggctaccccctccagtttgctttccgtaaatgcaaattgtccttactgcaagtcaggaatgattgctgactcacagtagggctgctatgcctgtgtgtaaacttggggatggctgagggaacatagactcactcttccacattcccaagttggtctagtgtgctgcccagtagcaaaccatggcagactcaccacctattctgagttccagggctgctgtagggcagggtgggcttcctcccagacttgccttaccctgggctgatctttgcccctggtatgcattaatggactccactgaatcctgaaaaaaaaattaaacttccttcttacttgcc

SEQ ID NO: 11928 - DNA, 2500 bp, Homo sapiens
atggttgctcctagccaagatgttggcctttctgtgcccacccagacttggtttgggccaccagaggctgaagtgtatttcctgtgcattccaagtgttgcctgcatgcctgttctgtctgggccacattcacagattcaggattctcaggggcttaccgtgttacttcagcatgagctcctggcatgggggtgctctgtcttcgcctggctgcaactcaattcttccttctacccaaaaacactccagtcagttgtacttactgagaatccctgagtgccctctgccccttctggcaacatgcacattcctgtcttctgcctgctccctcatgtcagtgcagttgggctgggctgacctactaaaacctgctccatgtatggacctggaaggccattgctgccatggcacttgggacacttgaggaagaaacagaaaccttatttcttcctgtgtgtcccctagtggttttctttccatttgtgttatgccacagagagaaatttcctgtctgaactcttctgctgcctgcctaggaaggaaacctgaagatttgggcagcctgagtctcttggtttctgagctggctcctgaatatatgttcaagtgggtgtgcccatagggcctgggcacgtgtctctagcaaaaccagggcctgagcataagaactgggacccttctaggcagggtgcagtggctcacgcctgtaatcccagcactttgggaggcccaggcaggcggatcacctgaggtcaggagttcaagaccagcctgaccaacctggagaaaccccgtctctactaaaaatacaaaaaattagctgggcgtggtggtaggcacctgtaatcccagctacttgggaggctgaggcaggagaatctcttgaacccgggaagtggaggttgcggacctgagatcatgccattgcactccagcctgggcaagaagagcgaaactccatcttaaacaaacaaacaaaaaaaaaagaactgggacccttctgccatctgacatagcccaaagcacatctctatcctttctcccagttgcccctctccttttttgttgttttttttgaggttgagttttgctcttgttgcccaggctggagtgcaatagtgcaatcttggctaactgcaacctccgcctcccaggttcaagcaattctcctgcctcagtctcccgagtagctgggattacagtcatgcatcaccatgcctggctaattttgtatttgtagtagagatggggtttctccatgttggtcaggctggtctcaaacacctgacctcaggtgatctgcctgccttggccttccaaagtgctgggattacaggcatgagccaccgcgcccgccctgcccctttccaagagatatgctcagcataatgagagatcaaccgtggtggggagtgggtccaagtaagggttctcattgttgccttttaagaggcctaagtcctgcattaactcagtccaaccattaagtgatgcaggctgctcttccctcatgtgagaaaaacctgtttccctctggttcttcctggctttgcacctggtggctattacaaagcagtactgcagtatgtcttggacctggaaagttggacatgtgtgtggctcaacagttttctcgggggagttcagtgaccttttggtggccaccctctgttctcacctgtgagttcttgcaggtggcgacttcatctgcaaggtcacttacatagccccactcagctgcttcggaaagcgtgacgaagcagtagtcctcagtgtgtgtgtaagtgaagaggaccttgtggtagcagggaccatgcttcattcgtggctgtgtccccatctgagggcctggtatgcagtaagatcaataaatacttgtggaatgcatgactgctggctgcctgtgtctgcctggtgggagagctgtggaactaggggtccacatgaggacagactactgtggtgctgcctacctgccaggctggcccaccttccccacccccacttgaccttactctcttgaggtcctaaaggtatgattcagacctttcagccctttccagaactttgaccctctggagacagggcggttctgcagggggcggtctagcccctagctttgttctgggcagcccaatcagctctggattgcccgagctgccctgaagagtcagccgaaagagctggaggcttcttccctgtggttgcgggttcctgcattctctgctctaaatcccagcctgcccttggggctgcccacgcccccttcagatcctttgctccggagagagacctgtccgagcagaggcctggactacatctcccggcgtgcctggcagtgtggtggcctctgtgcgccgtctgcactcgttgcaggcgacgatgcagagggctgtaagtgtggtggcccgtctgggctttcgcctgcaggcattccccccggccttgtgtcgtccacttagttgcgcacaggtgggatagagggtgctgatcttggagg

SEQ ID NO: 11929 - DNA, 72 bp, Homo sapiens
gcccagccttgatgccatatgccttggggaggacaaaacttcttgtcagacataaagccatgtttcctcttt

SEQ ID NO: 11930 - DNA, 419 bp, Homo sapiens
actgcccagggctcccccacccaggcccccaccctcttgctgctcgccctgctccctgcttcggtccagagaactggcagatactggtgggaagcactgtgcctggccccccagcttcctgtatgggcctcgaaacacaatgggccttctcgctcactggtagagacaggggttgtggtccccaacctgccttctgctctgcccctgcacaggacccaaaggccccaggccctgcaaggtgtgctagttcctgctttcccgcggacttcctagtgcccaaatgccctgtgaggctgagagacccaggcccctgtggctttcaacacagcacagctgtggaagtggctgtgttcttctacagcctgtggaagaacccctgtagcagagcctcccgtccaccctcaggggctgagacagct

SEQ ID NO: 11931 - DNA, 253 bp, Homo sapiens
ggggatgcagtggggctggccgagccccggttttcccatcagcaaggggagtgctggcctgacacatcagaagaccctggacttgtcattatttgtctggggggcactgggtgaagctgaagctgttggacacctgccttctcatgtggacatcatctggcaggatccctgctgggcacaccccacaaaccccactccctcaagaagggccagggccagggctgtatggaataataatttaatgctcactgtg

SEQ ID NO: 11932 - DNA, 2827 bp, Homo sapiens
gccctgttctgggcccccagaaccccttcctctccactgcaggcagggaccattgttctgaacttgccgtgaggacacacagacttgcttttaaagggttatatttctctttggtgtaaactaaaagaaatgtttttagctgtagcctggaatccatatatataaagtgaaggagggcagaccacacgccctctcagccaggctcctcagctttgtggctctgactggtgtgtccaggctgccttaggaaggaagaggtgcccctggtgggcttggcagcagggacagggtgcccttggacattggtttctcttgtctagatctttgagatctgtggctgcagggccctgctgattgtaaggtaaagccctgggctggtgcagggcccctccacgcccactcttcccttgttccccagaagtagagggctctgggtgcccatttcttgggggctttccagtcttatgctgtgggtgtcagctagctctttaataggtgccctcagggcaccacagggctgactgcacaaagctggacccatccttcggtctgaccttagcatggggctagattaatgaagctgggctgaggccaacttatggcagagggcggcgcctgggttccccaggcacctgttggcacgtgacaggttggcacctgtcctattcctgaaacagcctctctcaccaagttcccttgcctaagaaggccactccctcccaccccactgaagtgggggatagtcggtgtcctagcaggcctcagggcctctggtggctctggcccagacagtatttgcagttcttgtgctatgggtgggagtcttcttcctcaagtttcggcagctgtgctgctgctggatgggctgctcctcccagggctcaagggctgtggtccgctcagggtctcatttccccaggccaagttcaaggcagcagccctttgtgaggcgctcttggccctgggcctggagggagaactttaagcttttttgctcacagggacgtggtatgggccctgggtgcaggtgcccacattctgctaatgagagctttgtctgatcagtcctgggtccatcagtttgtccatgtgtccggctgccagcccgtcccttgggatccttcccctggggtgtagccttgttcattagtatatactcattccttcatgctttcctcagcagaacacttccacttctgaggtgagcttttgccccatgcccttcctccacaggtgttgcctttttataaagacctgatagcagaataaattggtgtttccctgttgacccagcaccatttctgtgggcctagaatatggccctcaacccttagagtggggcagtgagggcttgaggagtgacccttcctttctcatggttttagtcattttggctgccagcccttaatggcacagatctgctgcttctaacagatggccaggaggtgacaccgatttcagccattgccaaggttagcaccctctcctttgagcctagggccacactgttcattgtcactttaggcaagtgcctgtttggctttaaaggtaagcctgccagctgtgagaagccttggtaactgatggactcatttcctggtccttaaagatgcagcctcttaagggctccttgatggatgccatctctcctagcccccagccctggtgccactggtgggcaggttcccattctttggggctgggagggacagcttgcctgtttctggtcacaaattacagtcttctctcctgtaccattctgtggcttcagccatgggggcagtagcccttcattagtgtagatagtcattccctggtagggtggagggtaagacatagggtctggaactgtttgggaccttttggggatgtcctgtgcctcccagattcctcgattctgggaggagaggctgccgcattctgctgctcctcacagcgagcaaagctgcacccacttacattcagtattttcctggcactacaaagagtgggaaggcctgggatttgctgctgctcccttagagcagggcccctcttttcagcactttggacacctggagacccagccctgttatttaatggtagtgggcaagtgtgtgtgcatactgtctgccactgctttctccctgccccatgccagagagccctgtccctgccaggcccagccttcttagccccaacttgggaacaaagtgcaacatgggatcatgggttggggtgctcaggtgagccctctctatagtgcttccctgggccaagctgacaccagcccctgagggtggggtgggacgggtggtgcttaaaagaggaaggggaccagtgtagcaacttgccagggaccccacccctccctctctgggcctgtgcagtgagcatggggattcccatcaaggggcctggcacctgtgctagttacgtagccgctgctcacgcgctcactcctgaccacatgcacgttccctagatgcagactgctttgaactttaaagctgtacaatttggttatgtttgtgctgacttaaaatatattttaatgaggaaaaaataatggagaaccctgggaaggacctggttcttttgcttctcggggaactgtaagccctcgcgttctgggaatcgctctctgctgctctttcctggaagctaagcctgtctccaccgcccgaggcctgcgccggtggctcccgccgcagttgcgtttgctttggaccttgcgtgcgggggagggggtgctcggtccgagcccgctcctttctgtacacctagcgctgcccgccccgcttgtgtctgaggtcgtgtatgtcaaaaataaagccgctagaaacgg

SEQ ID NO: 11933 - DNA, 565 bp, Homo sapiens
caggatgggggtggggggatggagagaataaattaacccccacctggccaggcacagcctgaagaggaaccttgcagcagaggcatagatgagcctctacatgatgtatgttcttggagagagctgctgagggctgctcactccccagtgaccatggctgttcccacagggacatctcaggggctgagttcttttttttttttttttttgagacggagtcttgctctgtcgtccaggctggagtgcagtggcgcgatctcggctcactgcaagctccacctcccaggttcatgccattctcctgcctcagcctcccgagtagctgggactacaggcacccgccaccacgcccggctaatttttttgtattttgtagtggagacagggtttcaccgtgttagccaggatggtctcgatctcctgacctcgtgatctccccacctcggcctcccaaagtgctgggattacaggcatgagccaccgctcccagccaggggctgagttctttcaagatctgctatgtgttctcagttctttatgacaattctgtatcatttctgtaatc

SEQ ID NO: 11934 - DNA, 102 bp, Homo sapiens
caaggcagccaccctgtcacctagctcaatggagccccggatcccaagccctgcattgtaagcccacagtaggcactcaataaatgcttgttaaaggaaggc

SEQ ID NO: 11935 - DNA, 1329 bp, Homo sapiens
gtaggcagcctggtgagggggggcaggggatgggcaggagggtgggagagtggatgaggggcttctcactgtacatagagtcactggcatgatgccctcgctcccccatgcccccacatcccagtggggcataactaggggtcacgggagagcagtctcgtctcctgtgtgtatgtgtgtgagtggtgggcaggccagtggcagggccggccccagcccctgcatggattccttgtggcttttctgtcttttgctagcttcaccagtttctgttccttgtgggatgctgctctagggatactcagggggctcctgctctccttccccttcccttcttgcctcaccattcccctaggcaggccctgcaggtcccacactctcccaggccctaaacttgggcggccttgccctgagagctggtcctccagcgaggccctgtcagcggtcttaggctcctgcacatgaaggtgtgtgcctgtggtgtgtgggctgctctaggagcagatacaggctggtatagaggatgcagaaaggtagggcagtatgtttaagtccagacttggcacatggctagggatactgctcactagctgtggaggtcctcaggagtggagagaatgagtaggagggcagaagcttccatttttgtccttcctaagaccctgttatttgtgttatttcctgcctttccgagtcctgcagtgggctgccctgtaccctgaacctcatgagcctctaagggaaaggaggaacaattaggacgtggcaatgagacctggcagggcagagtacaagcccagcacccagtgtcccagccttactgggtccttaccctgggccaaacagggagggctgatacctccttgctcttcctagatgcccacctcctacaatctcagcccacaagtcctctccaccctagggggcttgctgcatggcaataactcataatctgatttggaggtttgccctttacaggggcagattttctgctcagttcaacaatgaaatgaagaggaactccctctttctacagctcacttctatcagaggcccaggtgcctcagagccacattgagttgctttttctgggatgaggaagtagggttaaactccccagtttcctgagggaggctcctgacaggtgccctttgtcagaccctaccacagcctggataggcagccacattggtcctcgcccttgctcggcactccgtggtggtcctgcccttctccctgcatgcctgtgggtctgctctggtgtgtgaaggtcggtgggttaactgtgtgcctactgaacctggcaaataaacatcaccctgcaaagcc

SEQ ID NO: 11936 - DNA, 508 bp, Homo sapiens
gaacagtgagtctgaccaatggccagacacatgcctgcaacttgtaggtcaaggactgtccaggcaggggttttgtggacagagccccactttcgggaccagcctgaggtgtaagggcagacaaacaggtgagggtgagtgtggcacccagagactgctcttcctgccctcaccctgccccactcctacgactgggagctgacatgaccagcccactgatcctgtcagcaggtcctgctcctgttgccaggctcctgtttatagccatgatcagatgtggtcagactctttctgggcctggagaccacggtcacttgttgactgtctctgtggaccagagtgcttgaggcatctcaggcagcctcagcccaagcttctacctgcctttgacttgcttctaggcatagcctgggccaagcagggtggggaatggaggatagcatgggatgtatggagaggatggaagattttcatgtaaaataaaattaaaaaaaaaaaacaatctctt

SEQ ID NO: 11937 - DNA, 304 bp, Homo sapiens
cttagttcttgggctggacctgcttagctgccttgagctaaccccaagctgcctctgggccatgccaggccagagggcagtggccctccaccttgttcctgccctttaactttcagaggcaataggtaaatggggcccattaggtccctcactccacagagtgagccagtgagggcagtcctgcaacatgtatttatggagtgcctgctgtggaccctgtcttctgggcacagtggactcagcagtgaccacaccaacactgacccttgaaccaataaaggaacaaatgactattaaagcacaa

SEQ ID NO: 11938 - DNA, 141 bp, Homo sapiens
tgggaatgtgtgcgggctcagccttcctggacacactaggtgtgggaagccataggagcctccagatgggggctggcctctcttgcccagccagcgggcagggactgtgggttggtgaatgcattaaagtgctttggggaa

SEQ ID NO: 11939 - DNA, 501 bp, Homo sapiens
agcaggacctgctgaagaggagactttctatgcccttggtccgtatttttaacagaagacagtgcaacaactggtctccaccagtatttgtcactttattttttttaatgacaaaaccaaaaacagacatggggtgggtagctgggggcccggacacttgggaccctgacccctttgtccctgcactcagccctgtggccccttcctgtcctgtctcaggccaggctaaatatgtgccttcctcagggctgtggggcaggcactagggggcctttcccttcctttcctttctcaggccttgctcccccaggatgacccactcttaggggggtggtggcatctggacaaatgccaccacagcaggtggggtggcaaagctacctggaatggatttgtgtgctgatttttaaggattattacagataattaaacagaacggtcagccttctgtggtcttaacccctgggtatttttctgttctccctccccatctactatccc

SEQ ID NO: 11940 - DNA, 415 bp, Homo sapiens
agccagggcccctgccactgcctcttcttttccctgctgccacttttccagtcctggaactactctgtcccactcttgctctattcagtttacagtcaaccctcccaagcacacaccccgcttcccttggaatccctgaggggtagaaggggccagaaaaaacgcttataaaaccagaggccctctgagatcatgtgagtcctccatggcaaggaagcagttccagggagagtcaggttccagctagttagggctgccagcctagggctttgtgcctacacctcactaagcccatggagaggtcacagatgggccgtgcacgggcagatgggccccaaaaaatcttggcgaaggtcggtaaagtgctaagctgttgtctgcactctttcatcataaagtcacttttttccactgc

SEQ ID NO: 11941 - DNA, 200 bp, Homo sapiens
ggccatccagggcaaggaactgtctttctggttcaatagactgccccgacagtctacaagcctcagcccactgaccatacctcagcccctagcccctggggggcagctttaacctgggcatgtttcctgggtaccagtggggccaggaggtggctctggctcagagccgtcagtgtggctgaataaaggctctcttgggt

SEQ ID NO: 11942 - DNA, 593 bp, Homo sapiens
ttggccacacactgagttgcacatattgagaacctaatgcactctgggtctggccagggcttcctcaaatacatgcacagtcatacaagtcatggtcacagtaaagagtacactcagccactgtcacaggcatattccctgcacacacatgcatacttacagactggaatagtggcataaggagttagaaccacagcagacaccattcattccatgtccatatgcatctacttggcaaggtcatagacaattcctccagagacactgagccagtctttgaactgcagcaatcacaaaggctgacattcactgagtgcctactctttgccaatccccgtgctaagcgttttatgtggacttattcattcctcacaatgaggctatgaggaaactgagtcactcacattgagagtaagcacgttgcccaaggttgcacagcaagaaaagggagaagttgagattcaaacccaggctgtctagctccgggggtacagcccttgcactcctactgagtttgtggtaaccagccctgcacgacccctgaatctgctgagaggcaccagtccagcaaataaagcagtcatgatttactt

SEQ ID NO: 11943 - DNA, 320 bp, Homo sapiens
gggtctcctgcctagctgcctagcaagctggcctctaccacaagggctctcttaggcatgtaggaccctgcagggggtggacaaactggagtctggagtgggcagagcccccaggaagcccaggagggcatccataccagctcgcacccccctgttctaagggggaggggaagtccctgggaggccccttctctccctgccagaggggaaggagggtacagctgggctggggaggacctgaccctactcccttgccctagatagtttattattattattattttggggtctcttttgtaaattaaacataaaacaattgc

SEQ ID NO: 11944 - DNA, 1211 bp, Homo sapiens
ccctgggaggtggcagacagaagcaccccctgccccggcaagaaactcccaggctcaatcaaggtgtggcttccattgaggagcccaggctggggccacaaccctgaataaactctgttggcccataaccttcagctgtgagcgggtcggtcccacagtattggttgggtgttggtttgtgtgtggacaagaggtggttggtgggtggtgaaggctaatggcagagttagcaccccactctcccaagccacccctgcaagcagcacagcagggcatataccagtcaggaatgcccgttacctggttccttgcctggtctgctttcttccaagtttgcctggggcctagccctgctagaggctacagcactttacaagcaaggtatgctttcttccagcccctaggctgtgggcactgtatacaagtaggaacttcctttccttcacttcccttttaacccctagtcagagcatttcagccgtttgctacctcgattcctcctgtgttggacagaggctgggggcagtgccagcctgattcttccgacctacctgccatttgttcccgccttcagatggatggacagtttgctggctattgataggagtggggactgggtgggggcttctccctctacccagggctgggctgatccccctactgcaactaactgttgccccccaaccccgaacccccagttgaggagttgagagagtgcaggctggggtcaggacaggctgcggatgcttgtgcctatggggagttactccaacccacctattctgtctaatctccatggctttgcaccaaatcctccacccctccaattgggaggggactgttcaccaccttgtggtaagggacaacaccctaaggctggtgccagtagttatgagtagcctaccaccccctcccttacagtaacccccaccccttcaggatcagtcaagggaaagcactagaacccctgggtagggaaagaaaggagggaaaaaccataaaaggaatacttataatgtgaaggtttgtaaatagtccatgatgatgtcgtggcagagtctgatttctatatagaggtgactttttttttaagtactgtgcaagctctgtgcttctataatgtgggaaatggcttggggaggatggcccctagcttaggaagactgttgtgttatttgttcaatttcaataaaatgatttgtagatcctgc

SEQ ID NO: 11945 - DNA, 795 bp, Homo sapiens
cctcttgtacccccaggtggaaggcagacagcaggcagcgccaagtgcgtgccgtgtgagtgtgacagggccagtggggcctgtggaatgagtgtgcatggaggccctcctgtgctgggggaatgagcccagagaacagcgaagtagcttgctccctgtgtccacctgtgggtgtagccaggtatggctctgcacccctctgccctcattactgggccttagtgggccagggctgccctgagaagctgctccaggcctgcagcaggagtggtgcagacagaagtctcctcaatttttgtctcagaagtgaaaatcttggagaccctgcaaacagaacagggtcatgtttgcaggggtgacggccctcatctatgaggaaaggttttggatcttgaatgtggtctcaggatatccttatcagagctaagggtgggtgctcagaataaggcaggcattgaggaagagtcttggtttctctctacagtgccaactcctcacacaccctgaggtcagggagtgctggctcacagtacagcatgtgccttaatgcttcatatgaggaggatgtccctgggccagggtctgtgtgaatgtgggcactggcccaggttcataccttatttgctaatcaaagccagggtctctccctcaggtgttttttatgaagtgcgtgaatgtatgtaatgtgtggtggcctcagctgaatgcctcctgtggggaaaggggttggggtgacagtcatcatcagggcctggggcctgagagaattggctcaataaagatttcaagatcctc

SEQ ID NO: 11946 - DNA, 304 bp, Homo sapiens
gggctgcagttgctgagggccgaccacccatgccaagggaatccacccagaatgcacccctgaacctcaagatcacggtccagcctctgccggagccccagtctccgcagtggagagcagagcgggcggtaaagctgctgaccgatctccctcctcctcaccccaagtgaaggctcgagacttcctgccccacccagtgggtaggccaagtgtgttgcttcagcaaaccggaccaggagggccagggccggatgtggggaccctcttcctctagcacagtaaagctggcctccagaaacacggg

SEQ ID NO: 11947 - DNA, 118 bp, Homo sapiens
ggctggtagtgactggatggacacattgctgtgggtagtccctcctactaggaggcttgtcatactgtctagaggttgactcttagttctgtaaataaagacatccatttcaaacagc

SEQ ID NO: 11948 - DNA, 594 bp, Homo sapiens
ctccagaccaccttgagtgtggcacctcccctcccaagccccccttgacatcctctcagctactccagggcacctgactgctctgaggagagggaagaaggcctgctggggctttccatggccttctgctgtttctcgccaacactacccaggactcttgctacctggttccaactccagacaaccactatgccaggcccggagcctctgaggcatcggccagtccaggccctcatctgaggtaagaatgtacatcagctggcagccccaagcaagtggctgcagggacactgatgccacagctcctgggccggccctcacatctgaaactggttgccgagagccctgagccaaggcaaggatttgccaaaaatgttctgggggcccagcaaatgcaggagccgacctggggctgcacatccctgcccatccccagaaagactgttcctgtcaggatttgtttccctctgctgtggcggtgactgcttctggaccagaacagctccagctcccaggtattttctacaggaccacttgagtgggcagccaagcccaggctcgcagtatcaataaagcagttctctgaggaatgac

SEQ ID NO: 11949 - DNA, 1865 bp, Homo sapiens
gcaccctgccccaccccacctccactcccacctcacccggcctcttcgcctttcccaccctcctgccccacactccccgccttagagcctcgtccctccctcactgaaggacctgagctggccaggccctgagagtctggtctgcgccttgggatggggagtcccaaagcgggacgccgcaggtgtttggcacccaaatcacatctcacctccgaactgttcaagtgtccccagacccttcttgcctgctgggctccccccagtgggatgggacagggaggccacacgcactggtgccaaaaccaggcctctgctgccgcccttcctggaggctgcctatgttgggggggaccctgcctcagctgacccggcctctctgccccacccaagcccaaacttggtttctgtgagaatagtggaggaaggtgagatggccagtttgaagcctgtgcctcccagcttaaatcctagcaggagagaggctctggggcagcccccatgggctcctgcccctttcaggcctacagccacatccccaagcccaccaggtgtcaggatagtcacagtgataccagttcagacactaccccatatacacctggaacattgaggatggaaactggactcacattcgacataccccactgggcacacgcacaaacacacacactatggggtggggtgggtgtaggggcttacaaagccttacacagggcgaggggttggtgggagggttggcacctgcacactccatctcctgctcaccacctgcctctaatctgagctgcagcctggctggtcctcccatttctaaagctgaatgtcaaacagtgccaaatgctggggcagggggtgaagaaccctctgtcccacccctagccaccagtgtcctccaagtgccccctcacctctccaggtgctcattgtaaccatttctcactagtgtcaggcccccagtgggaccacatgccactgcctgcacctttcggcagaggaacccccaccagacatcaccctttgccttagcaggggtgactttgtctctcctggctgggccatccttccgccaatctggcccttacacactcaggcctgtgcccactccctatctccttcccacccctacacacacactccctgcttgcaggaggccaaactgtccctcccttgctgaacacacacacacacacacacacacaggtggggactgggcacagctcttcacaccattcattctggtcatttcccccaaaggcatcccagcctgggggccagtggggaactgagggcaaggggatatagtgatggggctcagatggactgggaggagggggagggtgatgcattaattaatggcttcgttaattaatgtcatgttgcttgtcgctttctcagtgtgtgtgtgtggtccatgcccactgctggtgccagggtgggtgtccatgtgcacccggcctggatgccagctgtgtccttcgggggcgtgcgtgtaactgtagtgtagtcaggtgctcaatggagaatataaacatatacagaaaaatatatattttaagtttaaaaaacagaaaaacagacaaaacaatccccatcaggtagctgtctaacccccagctgggtctaatccttctcattacccacccgacctggctgcccctcaccttgggctgggggactggggggccatttccttttctctgccctttttttgttgttctattttgtacagacaagttggaaaaacaacagcgacaaaaaagtcaagaaactttgtaaaatatcgtgtgtgtgattccttgtaaaatattttcaaatggtttattacagaagatcagttattaaataatgttcatattttcacttca

SEQ ID NO: 11950 - DNA, 1625 bp, Homo sapiens
gtggcctgggacaagcctggacttctgatagagacccatcacggtgcctacagagctccccactccctgattgtcaagacctactctgaagatcttccctgccaagacacaagagggctgagccaggtcctagctgttctccagacccacctgctgactttagactctaagagagggccctagccaggctggacttctgaccactgacttctcctgacctgagggccctggcacagagggcatccctcatgctgagaaggtcaagagcctctgctggcttcctcatcccctgtccagatccctcacatcagggtctgccccgctaatgtggaggaaatgagggagatacggagtgggagggattgggggaggaaaggggaggtttccctctgttagggagagacctgttttttggaatctggagcctcctctggggtggggagaggaaaccacccaagttatagggacagggtagggcagcatctgttatgggccctgagaagcccagagatggagctgaaactgtccagtatgcaaggatgccaggagaagggcaattcacacccagggtccatccatactacggagggtccaggaggtctcccagccacccatccttggcaaccagatgttactggggccaagctaggatgggagctgagggggaaggaagtaggggaatggaagtggaaggatgcagcccccccagacctgccgagaggcctcatgcatgtgcatgagtgtgcccatgggcagacatgtgcctgtcccagcacagcgggcagaatgagattgtccacactggccccaccctccaagtcgacctctaccccatggtatgtagtggagcatcagggtaggctatcttctctgccttcaatcttcagggactgcagggaagagggaagcacgcacagcacggttcctctctccactgcattgtttcactgggctcacctgcttctgaaaacggctccctgtcttgggctctaatgaggatctggggttgggagaggctgttggtctgagggcagtaatcacaggctgcaggctagagggggcagttatgactgcctgaaagtgggtgagggattgcacttcagaaaaacatctaaaaaacttagtctatgtttgaattccccacctccatcccatctatgggaagagccgttcagtgtttagagagtggggagatgggtccctgcacttggcctctccataagccttggagggtcagggctgataccaggggtcctggcaagccattgggcagagacagaccacaagagcagggcatttttttacgctgggcatacatatgcacacaagcatgcacagaggcatgtcccgtgcccagcctctccaccgtcactgtccgctgctggctggaggggatgcaggggtagtgtatgcagaccttccactgggcaaatgccatgtgtcaggagggaaaggcctaggaagcccccatggggaaggttctggatttattccctcctctaaatgctataaatacgttagcacttgagtcgactggaggctgccaggaattcaggatgcatacagctgtaatttaacccagagcagctccacgtgagagcattaaagatgtaatgaagatgttt

SEQ ID NO: 11951 - DNA, 1112 bp, Homo sapiens
ctgtacggggcaatctgcccaccctcacccagtcgcaccctggaggggacatcagccccagctggacttgggcccccactgtccctcctccaggcatcctggtgcctgcatacctctggcagctggcccaggaagagccagcaagagcaaggcatgggagaggggaggtgtcacacaacttggaggtaaatgcccccaggccgcatgtggcttcattatactgagccatgtgtcagaggatggggagacaggcaggaccttgtctcacctgtgggctgggcccagacctccactcgcttgcctgccctggccacctgaactgtatgggcactctcagccctggtttttcaatccccagggtcgggtaggacccctactggcagccagcctctgtttctgggaggatgacatgcagaggaactgagatcgacagtgactagtgaccccttgttgaggggtaagccaggctaggggactgcacaattatacactatttatttatttattctccttggggttggtgtcaggggcgagccaaccccacctctatgccctgagccctggtagtccagagaccccaactctgccctggcttctctggttcttccctgtggaaagcccatcctgagacatcttgctggaaccaaggcaatcctggatgtcctggtactgacccacccgtctgtgaatgtgtccactctcttctgcccccagccatatttggggaggatggacaactacaataggtaagaaaatgcagccggagcctcagtccccagcagagcctgtgtctcaccccctcacaggacagagctgtatctgcatagagctggtctcactgtggcgcaggccccggggggagtgcctgtgctgtcaggaagagggggtgctggtttgagggccgccactgcagttctgctaggtctgcttcctgcccaggaaggtgcctgcacatgagaggagagaaatacacgtctgataagacttcatgaaataataattatagcaaagaacagtttggtggtcttttctcttccactgatttttctgtaatgacattatacctttattacctctttattttattacctctataataaaatgataccttt

SEQ ID NO: 11952 - DNA, 1258 bp, Homo sapiens
agagaagaggggacaaatttggttgtgaagtaaacaagaaacacaagacggctaaaactctccaggggcaggtaaagccctgctgggctcagaagcactatagaatttgctgtacacactgaagtgggtctgtgtcacacaggtatttcttggtcctctggagagcagaggactcactcagctctttgcttcatgcctcgctttaatggtagtaaacacttaaccagtggaatagtctgactgctggtactgatggcatcagaagaaaacaggttaacaatcaagtagtgaaagcactatattctagtcattaactcaacggagccagtctcaactctgctgggagcacccacaggtctctgtgggggagacagggactataacagggaggcagaattcaggttggcttgacaacacaccttaggaacatgtgctaaggggctaaggaggcatcagctgtcttccttattctaccagggctgaaaatcggagtcacttaggaggcagcatgagaacagtggcacaccaccagtgaggcacatgttgcctttttgtctttaagcaacaccttagacagggcctgaaccctgggtgggggcactggatgcctgaagtaagtaagttttctcagtggggcagtctcataaaatcaccaggacattgaccacctgacctcccctaactagtgctggccaaggcctgagagttcacagaacctgctaggtcttaagagccaaaggaaggaagtggttgagggccaggaaagagaaggaatgtcatgccagggtgttactcctcaccaaaacttggcagttctttttggggccatgggacacctttctctgaagaggggttggataaggcaaaggttgaagtgtcttctctaggcacgttttctagcatgtttccttttacttggttctgtctcacaaagctgggaggtagatgattcttccgggtcctgagcacctgcttcatgaaggaagataggtagcccagagaagaagttttggacttaacaacataccaaggcagctctggcctgtgactcaggcgtttgttggagagctgcaggaaaaccactgcagtgtgcctgcaacaggacaagacccactcctgtttctggcggtaccagctaccctggaatggtggcgtgtcctgctgtacccaactgacttgcttaggtacctggcagctgtgaccacagctcaagtaaaaaaacaaaaacaggcaaataaataaacatgcttaacatgtc

SEQ ID NO: 11953 - DNA, 120 bp, Homo sapiens
atatctctgccaacatgaggacagaaggactggtgcgaccccccacccccgcccctgggctaccatctgcatggggctggggtcctcctgtgctatttgtacaaataaacctgaggcagg

SEQ ID NO: 11954 - DNA, 602 bp, Homo sapiens
ggccagctgaggtacaggcaggggcaggcaggaccaccagcagggggctgcctctgcaccctacccgcccaaggagactccaccctggggtcccaaacgccgctaacgcccagacgcatggatgcaccccctaccctgcctccatctatgggagttctttctctcagagtgggggcagtttctggcccaggggtctgagctgcggcagccccagggcagggggccctacctcctcagctctgtgcttggatacagggagcagccaggagactccctagtgcccccaccatggcgggtgtcactcacgcactccccatcccttagggcttcctggcctactgcatccttgtgggagtcagggaggagggcccgttgggtagctggggccaggcttctctccccaccacctgcagatttcttgctgcttccactgatacccttttgactggaatgaactggctgggcttgtcagggggcaccccaaagagggggcactgccaggtagctgggggagtggcatggggcaggggcccagttctcagcagcagacactctgtacagttttttcaatccctgtttttgaataaatattctcagcgacc

SEQ ID NO: 11955 - DNA, 910 bp, Homo sapiens
agcccagcactgctgcagggggtgggctgcctgcctgctctgagctctctcttgcacgctctctcttctctcccaggctctggctcatgcacatgcaacaggtgcgtctgtctatatgtctgggttcttgtcttttgtggtctgtttgtcttttctacctctttctcttgcagtgatagactgagggggtaaaatcaagagaaaaaactctcaggaatcaaggaacataatcctgtggagggtaatccattacatgagcttctcctgttcttccactttcctgcctggctttcactccttcccctgctctgcccagcctttccctcccacccactcctccttctgcaaatgccctgaaggccagcccttaccccaacacccacttccccacctccttaggccccagatacatacatgcccacatgcacgcttacatgtttagagccatccttgtttccaaatatgacccttcgcttgagggcaactgcataggtacatctaactctggactggcatgcacattgtcatgtgcagctttgcatatacacacatgcatacatgagcctccacacaagcacttgcacacatgtggactcctaaccatgctaacctcactggctgggaaggtggggaccccatgggccagcccttgcaggaggcccttttgcaaggcttagggtgtggccagccctgaaagctacttggacacaggtttcagctggccccagcccagaagtgacccccagaaagggagggccaccgctttgccccctgcttttacccttccttctgggtgctctacacctcaggttaccaggcctgaggcatctcagccaagcttgtttcctgctctgaggcttgtggggtgggagccagagtggaggtcggtgaaataaagtgatgcaattag

SEQ ID NO: 11956 - DNA, 13 bp, Homo sapiens
agtggtcttttcc

SEQ ID NO: 11957 - DNA, 76 bp, Homo sapiens
cactcttatcctccttatttaagtccttcccaggctatgccccaccctctttgtattaaaagcctcctcttttggg

SEQ ID NO: 11958 - DNA, 72 bp, Homo sapiens
ggcctggtgcacggggggcatggcaccaggcccctgctcggctctccacagggctaggtgggagagcccaag

SEQ ID NO: 11959 - DNA, 633 bp, Homo sapiens
tcaggggagcaggaatcaggagctcggtggatttgcaggtggcaggccagggatttgtaccatgggacttgggtaaataaaggggactgaactctgtgggaatcacatccatactggagccctggatttttgcagttctgccctccaccttgctatctgcaccaggaggctctccacctggcagccagaggtccccagtgggccgggctcacacacaaatgatgcttcagacccgaatgagaggaccacattttgcttaatgtaaaggagccacttgaaaatgtctgctccttcggggtcctgagattgtggctccccctctggaggaggtggctccacgatgccttgattttcactcatcatttggacatgtgactggcttttcctacctctgccatggtgtagaaattgattgcacattgattggatgagccgggggttttctctaaatctgactaaaggcccaaagtgggcccatctgagtcaggtttgttgagaacaagccctctcaagtgggtggtggcttttcagtggccctgatttctgttccacacgtgttcactggagccaggtgacttcctccttgcgtgagtgagggcacaggaatctcaaaattaaacctgacttcattgc

SEQ ID NO: 11960 - DNA, 135 bp, Homo sapiens
ccgtgagccggaatcctgcacggtgccacctccacactcacctcacctctgcctgcctggtctgaccctcccctgctcgcctccctcaccccacacctgacacagagcaggcactcaataaatgctaccgaaggc

SEQ ID NO: 11961 - DNA, 423 bp, Homo sapiens
gaggctggagcagggccggccacgtgtggactgtggggctgcccaccttccgctccctgccaccatcctccttcctgggctccaggaaagtgtttctgggaggtcaggagggctggcagctgaacgcacttgcagcgtccgagggccaccgggctggcattttgtgacccttccctgttgctgtccctgcatctcgtctgtgtgcccagggtgtccggggaccctgcctggctggcttaagggggctgggtcaggggcctggcatgaacctggcctcccggggagctgagactagggtcccagcacagcccagaaacctttggccacaagaagtggggtcagtcagggctggggcaggggtcactgcagtttgggatggttgaatgctgtattttctaaagaataaaatatttttaaatcaag

SEQ ID NO: 11962 - DNA, 3068 bp, Homo sapiens
ccctgttgctgcttggctatttctgtatagtgagggcggccagcaggaagaaactcagagggaactgagataatagtgggattggatcatttgactgggctggagaacatccttttacatggccttcccatggatgtgctgtacatctgctcaaaagaaaataattactttgatgagcgtcttcaaaaggactcttggtgcaacagactcaattggaactcagcttttctaactgtcactgcaccaagctctgctggaggagtgaccagactcacgatttggtatagtggggctctcaagcatcttcaatttgaatgtacatgctgctgaggagccggtgaagtcatcagttccgcacatcccttctaccctccaactgcatgggaagccaaagtcctggttttgaaatgcttgggcagctcagccgcttgccctcaccctgcatgtcttgttactgggtctccctgtgtacttgtggcattatccacaaccatcatgtttcttaggtgccaaacatttacagaaacattttcatatatcttggggtcagagaaagggacagatacagaaggaccttgcttgcaggaagccatgcagttagtttctgcagttagtcgtgtgaggctaggtggttgggcaggcctcgggctgtaggtgttgggtgggaaaaagacccaagggcctgaaagggagggaaaggggagggtagcgggagggtagcaggtgagttcctagggctggaaggtttagcagcagcctggtgcagtgccctgtcatcaagacaaacccacggtcctcctgggtgcctaccaagcttggtttgtacaaaagcaaggtgggagtctatttttgtacatgagatacatcacacttacctgtgggccagtattgtgaagtgagtctgagttgtttacactgatgccttccctgcccaccacaaattgtgtacatagtcttcagatgataccacccctttccccagctcccaaccaagagctggttctaggcctgtgttatatgtcatatttagcgtttttatatatgacctttgatttctgttgtttgtattttagcacagtgtatgcaccttcatttaaatacatctgtgtgcatacagatacgcatatatgtgtgtgcgtatgcatatatctctcatctgtagtttccaagagttcagctgaagcagatggagtcctgcagcccaggagacaccctgcatccctgctaatagtgtttgccacaagtattagtgagtcttccttattaatattttcatttcagaagactgaagcaaagctgatagtgtttgctgtttctttggcagctaagtgagggtcttgggatgacttgctgtgttcctcaagctgcactttggggccatctctgcagtattagccccctttttgcttggtggtactctgtctgtgcctgtgtgtgtgtgtgatagtcactcttgcatggcttccatgtctggtttgtggcatttggggataaggtgctgaagccagagcatttgcagtttgtttgaggcctcgttgccaatgatagatcactcctgttgacctggtatgtctgcttgcttgctgcttttccttgctttctcttggaagaggaaaggactctggtcaggcccaggctgagtgagatgagctgcagctggctcatggccttcttagagcagagagaggagtatgtcattttactaagttcctaaacaaacatttatgcaggcaacactccttgcagatccagaaactgaggcacaatagggttatgacttgctcaagaatatgtagctgctagggggtaaatcaaggcatcacaatttctgttcagcgggcaggaataggctgtgaattgctagcactttttttttttaagcaattactttttgacttgttcctctgaaagtgcaagaggcgtacacctttcccaaatgtagactagaatctgcaggatgccacccactgtatagttctgctttcccagagaggaagaacttttagaaaccaaatgatcttaattgttattgcccacccctggcttttccgggtagaaaattcacagtaggaatgattgttaagagagagtgcttggaaccatgggttaacaggaaaggctacctaacttcacatatctgcaaccagagcagccaccaagcattacttagcagcaggaaaatgattgtatttgagttcctgtgtgtccaaaactgagcaccatgttctttgaaaacatgccacctcaaggctgggcgcggtggctcacacctgtaatcccagcactttgggaggccgaggcgggcggatcaccggaggtcgggagtttgagaccagcctgaccaacatggagaaaccccatctctactaaaaatacaaaattagccgggcgtggtggcatgcgcctataatctcagctacttgggaggctgaggcaggagaattgcttgaacccaggaggcggaggttgcggtgagttgagatcgtgccattgcactccggcctgggcaacaacagcaaaactccgtctcaaaaaaaaaaaaaaaaaaatgccacctcacagtctctatcgttgggccctgtggttgcaaagctgcctcctgaattaagaaggaaagggaaaagatatagctggaagcgagtggaagagatgctgagggctggggctgcacagacgtgctcagcagggctacaggtgctcaagccctattggggatgggtggggagtggggcagcggcgtttgccaccttaagaattggggccaaagccactgatgtttatttgacagtgacactgcactgggtacttaaagaaattatttcccgttgtaattataattactgcttattaaggaaaatatgggaattttagaaagaatcaagtttgccacccaaatgctaccactgttaatcttttggtgttaaatgttccccctagacatttctgtgcatagatttttggtgtgtttacatagtcgttattctgtatatacaattttatgtcccttttgtacttaacgtataaacattttttccatgttacagtcttaaacagaattttatggctgc

SEQ ID NO: 11963 - DNA, 1277 bp, Homo sapiens
ggactgctggccctgactctgcagcccactcttgccgtgtggccctcaccagggtccttccctgccccacttccccttttcccagtattactgaatagtcccagctggagagtccaggccctgggaatgggaggaaccaggccacattccttccatcgtgccctgaggcctgacacggcagatcagccccatagtgctcaggaggcagcatctggagttggggcacagcgaggtactgcagcttcctccacagccggctgtggagcagcaggacctggcccttctgcctgggcagcagaatatatattttacctatcagagacatctatttttctgggctccaacccaacatgccaccatgttgacataagttcctacctgactatgctttctctcctaggagctgtcctggtgggcccaggtccttgtatcatgccacggtcccaactacagggtcctagctgggggcctgggtgggccctgggctctgggccctgctgctctagccccagccaccagcctgtccctgttgtaaggaagccaggtcttctctcttcattcctcttaggagagtgccaaactcagggacccagcactgggctgggttgggagtagggtgtcccagtggggttggggtgagcaggctgctgggatcccatggcctgagcagagcatgtgggaactgttcagtggcctgtgaactgtcttccttgttctagccaggctgttcaagactgctctccatagcaaggttctagggctcttcgccttcagtgttgtggccctagctatgggcctaaattgggctctaggtctctgtccctggcgcttgaggctcagaagagcctctgtccagcccctcagtattaccatgtctccctctcaggggtagcagagacagggttgcttataggaagctggcaccactcagctcttcctgctactccagtttcctcagcctctgcaaggcactcagggtgggggacagcaggatcaagacaacccgttggagcccctgtgttccagaggacctgatgccaaggggtaatgggcccagcagtgcctctggagcccaggccccaacacagccccatggcctctgccagatggctttgaaaaaggtgatccaagcaggcccctttatctgtacatagtgactgagtggggggtgctggcaagtgtggcagctgcctctgggctgagcacagcttgacccctctagcccctgtaaatactggatcaatgaatgaataaaactctcctaagaatctcctgag

SEQ ID NO: 11964 - DNA, 2351 bp, Homo sapiens
aagggggcagaggaggggtggtcaggatgggctggggggcccactagcagcccccagcatctcccacccacccagctagggcagaggggtcaggatgtctgtttgcctcttagagacaggtgtctctgcccccacaccgctactggggtctaatggaggggctgggttcttgaagcctgttccctgcccttctctgtgctcttagacccagctggagccagcaccctctggctgctggcagccccaagggatctgccatttgttctcagagatggcctggcttccgcaacacatttccgggtgtgcccagaggcaagagggttgggtggttctttcccagcctacagaacaatggccattctgagtgaccctcagagtgggtgtgtgggtgcgtctagggggtatcccggtagggggcctgcagggagccagagggtggaaatggcctctaagctagcaccccgtaagaagagcctacctgaccgacttggggagggaacacagaggtgttgggaaggtggagcaacaatgcacctcccctcctgtcgcgccgtgatatcttggtggctccctgccactgcccaccgcctcttctccatctgagaatcacggagaggtgtagataatctagaggcatagactgctagagcccccagggatctggggtggtcagggctcaggcttcactttgtaaaccaggtgggggcatctcacagcctgacttcccttccccaggccagggttgctgggatgcctgcccctcctgagaggaccccctccccattgtcaggctctccatgtccacgagcggggaggggtgggttctggggcattgttgtcccttgtgtctgtggactagagatagggtgggggagctggggaagggtgcaggcgggaagagtgggctgtctttcccagggtgatgcaagcatgccgcagccctggaggctgggaatgtggaggctctgtgagccctgcagccctcagaatcagggccagggatgcagaagattgagaggatatggagatggatagagggcaggagacccttaggatagattgtgggacccaggcaggaacaggtgtccacaagaactcaggatggcatcagttagctcagaagccacctggaagacccagtgtttccatctctggaatctctgttttatgctaaatggatttaggaagactgtttttcttttaagggggaaacaaggtagagaaaaggacgaagaagtgtaagtcccgctgattctcgggggtaaggctcggatggcaaggacgcgttctgcctgggcatgtaggggaggtgtttttgccatcaccagtttctcaggctggggagcacagaggggaggaggaggactaaatgaaaagttgttcccagcctgcacatgaacacattcatgacacacaaaactggctggaaggagataagagcactgggtttgagattccctccattaaaacaaccaagacaaagaaaggaggggaaaaaaagataaaaagcaagccagggttccctgccctattgaaactcaaacccagactgccttgggttttatctttcccttacccctggcacctccagagaactgggacctgaaatagtccctccgttctcccctttgaccatgtaataaatgaaccagaagcactgagattaacctatcaacgccctgagaagccttccagcctgcggtgctgtctgctgggaggtcagctggtcaaggcagaggaggagaggaggaaaggatgggggctgaagagcagaagggaggggagacagaggggattaaagaggggaggagagagtgcagagctccaggaaagggtatcagagctgcagccagctctgccctctaccctagggaggccagaaagacacaaacagccctccgggcctttacgctggactctggcttggcaggctccaggcagggtcctctgggaagttactctagaaaacgaagggaggaggagcacaagatcctcagcaacgaacacctgcacttagaaaaagtggacagcttctgccaaccacaccctacccatggtactgtatgctattaactcctggaaacgccccgtaaatgcgagttgtttttgtatttgtgtgttgagatgggccttgtggtttctctgtactcagagcacatttcttgtaattactattgttatttttattgtcatgactgcccctgagctctggtgagaaaagctgaatttacaaggaaagggatgaagttaatatttgcatcacataattatatcattactgtgtatctgtgtattgtactaaatggactgatgctgcgcacatgagctgaaaatgaagagccctcccatcc

SEQ ID NO: 11965 - DNA, 173 bp, Homo sapiens
atgctgaccttcacccagagctgcctatgcccagcctccaactccagctgagtcctggggttggggagggggtcggggtcccaggacctgagcctggccatgtcctcaaccccaaatcccccgactccctccccagatctgtcctgggggatgcaaataaagcctgctctccc

SEQ ID NO: 11966 - DNA, 83 bp, Homo sapiens
gggcacctttattgtctgggacaggccctcagcccctcctgccccatccacccagacaagcaataaaagtggtctcctccctg

SEQ ID NO: 11967 - DNA, 2695 bp, Homo sapiens
tcacatcattacgtttcttttatatagaagcataaagagttgtggatcagtagccattttagttactgggggtggggggaaggaacaaaggaggataatttttattgcattttactgtacatcacaaggccatttttatatacggacacttttaataagctatttcaatttgtttgttatattaagttgactttatcaaatacacaaagatttttttgcatatgtttccttcgtttaaaaccagtttcataattggttgtatatgtagacttggagttttatctttttacttgttgccatggaactgaaaccattagaggtttttgtcttggcttggggtttttgttttcttggttttgggtttttttatatatatatataaaagaacaaaatgaaaaaaaacacacacacacaagagtttacagattagtttaaattgataatgaaatgtgaagtttgtcctagtttacatcttagagaggggagtatacttgtgtttgtttcatgtgcctgaatatcttaagccactttctgcaaaagctgtttcttacagatgaagtgctttctttgaaaggtggttatttaggttttagatgtttaatagacacagcacatttgctctattaactcagaggctcactacagaaatatgtaatcagtgctgtgcatctgtctgcagctaatgtacctcctggacaccaggaggggaaaaagcactttttcaattgtgctgagttagacatctgtgagttagactatggtgtcagtgatttttgcagaacacgtgcacaaccctgaggtatgtttaatctaggcaggtacgtttaaggatattttgatctatttataatgaattcacaatttatgcctataaatttcagatgatttaaaattttaaacctgttacattgaaaaacattgaagttcgtcttgaagaaagcattaaggtatgcatggaggtgatttatttttaaacataacacctaacctaacatgggtaagagagtatggaactagatatgagctgtataagaagcataattgtgaacaagtagattgattgccttcatatacaagtatgttttagtattccttatttccttattatcagatgtattttttcttttaagtttcaatgttgttataattctcaaccagaaatttaatactttctaaaatattttttaaatttagcttgtgcttttgaattacaggagaagggaatcataatttaataaaacgcttactagaaagaccattacagatcccaaacacttgggtttggtgaccctgtctttcttatatgaccctacaataaacatttgaaggcagcataggatggcagacagtaggaacattgtttcacttggcggcatgtttttgaaacctgctttatagtaactgggtgattgccattgtggtagagcttccactgctgtttataatctgagagagttaatctcagaggatgcttttttccttttaatctgctatgaatcagtacccagatgtttaattactgtacttattaaatcatgagggcaaaagagtgtagaatggaaaaaagtctcttgtatctagatactttaaatatgggaggccctttaacttaattgcctttagtcaaccactggatttgaatttgcatcaagtattttaaataatattgaatttaaaaaaatgtattgcagtagtgtgtcagtaccttattgttaaagtgagtcagataaatcttcaattcctggctatttgggcaattgaatcatcatggactgtataatgcaatcagattattttgtttctagacatccttgaattacaccaaagaacatgaaatttagttgtggttaaattatttatttatttcatgcattcattttatttcccttaaggtctggatgagacttctttggggagcctctaaaaaaatttttcactgggggccacgtgggtcattagaagccagagctctcctccaggctccttcccagtgcctagaggtgctataggaaacatagatccagccaggggcttccctaaagcagtgcagcaccggcccagggcatcactagacaggccctaattaagttttttttaaaaagcctgtgtatttattttagaatcatgtttttctgtatattaacttgggggatatcgttaatatttaggatataagatttgaggtcagccatcttcaaaaaagaaaaaaaaattgactcaagaaagtacaagtaaactatacacctttttttcataagttttaggaactgtagtaatgtggcttagaaagtataatggcctaaatgttttcaaaatgtaagttcctgtggagaagaattgtttatattgcaaacggggggactgaggggaacctgtaggtttaaaacagtatgtttgtcagccaactgatttaaaaggcctttaactgttttggttgttgttttttttttaagccactctccccttcctatgaggaagaattgagaggggcacctatttctgtaaaatccccaaattggtgttgatgattttgagcttgaatgttttcatacctgattaaaacttggtttattctaatttctgtatcatatcatctgaggtttacgtggtaactagtcttataacatgtatgtatcttttttttgttgttcatctaaagctttttaatccaaataaatacagagtttgcaaagtg

SEQ ID NO: 11968 - DNA, 430 bp, Homo sapiens
ttctgatggaaggagctgtgcccaccctgtacacttggcttccccctgcaactgcagggccgcttctggggcctggaccaccatggggaggaagagtcccactcattacaaataaagaaaggtggtgtgagcctgggaagtgggtgtctccagttccatgtggccaaatcctagggcctcaacctcgcatcctgaaccttagcatcgtggaacacagaagcttccactgtcagctctcaagagcccatggccaggaaggcccatgctgagctttcagtccagccccttcattttacaaacaaggaaactgagctcgaaccacccatttgagatgtcactgtggcccccagctagaggcccagggctgggagcattctccaggagcagaggttcagtctgcttcatggtctcttggaccagttttgactac

SEQ ID NO: 11969 - DNA, 203 bp, Homo sapiens
gaagtgtgcgccactccccttgctgcccgaatgctcggaaacaggagcctttcccaggaactcttttttatgccagaacgcttcctctcccctgctgtctctggggctgccaccctcccccacagtccaggcccttcagccaagggctctgcaccagcaccttggaagcaccaataaagaggatgcccacgtggccccagcaa

SEQ ID NO: 11970 - DNA, 612 bp, Homo sapiens
cacattcccatgctgggggtgacgggagggccccgccagccgctggtgtgcagaggtcatcccgcagcatcgttccttaccctctctctgcccttcctttctacctctgctcctcttgctgtctctgcccgctctcgcctgcccccagactactgtgacttaaaaagagggaagaggagccagcgcccgagggggccactggcggctggaggtccccattcagttgcactacaaacactgaccaaatatgcaaggaaggagctgtgtttgtttgttgtcgtcccagacagtgttgtgagggacctgaggccctgccccgtgtccgaccaccgagtggcaaggtggaaggaagcacaggcacacagaccgtgggtgggtctcctcaccgtggctgtgggcagtgcgaacacataacaccctcgggctaaaagtgactcgttgaccaagttggaaccggaatgctttcttactcaaaatggcttttgtaactattgatttctgaagctggttttatgagttgtgacagtgttaccaggttgggggtatgtgtttatttcctacaaagtacttacgggactaatgggcaaaacagagatttttaagtcttccgta

SEQ ID NO: 11971 - DNA, 356 bp, Homo sapiens
aacagaatttgaactgtaagcaagcatttctcaggaagtcctggaagatagcatgcgtgggaagtaacagttgctaggcttcaatgcctatcggtagcaagccatggaaaaagatgtgtcagctaggtaaagatgacaaactgccctgtctggcagtcagcttcccagacagactatagactataaatatgtctccatctgccttaccaagtgttttcttactacaatgctgaatgactggaaagaagaactgatatggctagttcagctagctggtacagataattcaaaactgctgttggttttaattttgtaacctgtggcctgatctgtaaataaaacttacatttttcaat

SEQ ID NO: 11972 - DNA, 992 bp, Homo sapiens
gcatttgtcctaatctgctgccagaattaaagacctatttttagaggattttggcttaaaaagcaagggcaaacagtcatttggaagccactcaccactgttttatatctcttttttatatctctttggcgtttccctacagaaaagaaattggacagaacagaataatatgaagcaggatcacaaaagaaaaaaaactttggctttcatattctctttgtgaggacaaatctgttgtttgtttgattactgtttactgagccttaatccaccaagtttatatttagaattttatttttttaaggtactaattaacttaaacacagagctataaaatgctggattgaaaattttatattgtaatgtagagataaaagcagtaggagaaacaaatgacataatatgtcgtcataattcctgctattgttaataaccttaaggagtagttgataaattataaaattttaaaaagtcaattcagttctagaaatagatttaaagaatatgaagttctatctagtacttgagcagctgtatttcttttctacacattgatggacttttaatattttattctcatttaatataaacctcatctagggtatatacaaattaaaactgagacacattggctttgtaaatcagtatgtttttacataatggttttgttagatttatttttccatcagtgaaaacatttcttaaacacaaatttcatttccatttaagcaatttgtaagcaaagtccaggtccatttagtttttggatatatttaatgtttgtctcctgaagtttgtcttcatgtactgtaagatattagttgtctttccatgttttaaatgtatgattatatagcacatattttattagttgtttaataagaggtaatacccatctaggaaagaaattttatgaagttaaatacaagtcttgaatagtacattttcacttctgtattcgagggactctaaaaataaatattgctccagaa

SEQ ID NO: 11973 - DNA, 524 bp, Homo sapiens
gaaggacaaccaaagtgagctggatctttgaagcacaaatgcagcaaatccttcaccctgctttataagtggagctggaatagtcctggggctctggggcctgcaggtatcagcttgctctctttgcactttcggggaaggaggactcacagtgaggaagcaaaaactgtgcacagaagtggatcacctgctggtggaaatgtggacatctcttgttcagcagatggcagtttttaaaaaataaaggttgtgaggaaaagacttatataagaagaaaagcatttccagtggtgtggcctgaaaacaaagaataacctaggctgctggaaagcacccttttggttgttttcattctgttccctcccattgtagattgaactttgttctctgctttctttttcttggaaagagaggacttagctttaagtcagcactgatttgggactgttcctaaggcatatcagtgcttcattgtcattgtgtttttaaactttttaaaattaaaacagttcattttggggatg

SEQ ID NO: 11974 - DNA, 1108 bp, Homo sapiens
cttcagggaagcctggacacccgaggcacctggaccagctatgggtagttctgtgggtggaacacattctgtgtaagagccccactgagggctctgcagcggagtgacagcaaccccagagatgaggcaccagagagtgccactgcatgagacacctgtgaccattcgaagtctgaaatgcggggggggagtttcatttttaagtgaagaccaaaagccctttaaaaataatagttttttatcattttatagtaatcagcattttctcttttactaatatactcattccttttgcgtatgattggcctttggagctacatgctccaacaaactatatcttaattgttaactgttaataattatctggcccagaaaaagagatgcagtgattttacccttcacaggaatattgaacttcttctgtaaaagagagagagaaacctctctctctcatgcaccacatggaaacagagtgtggccctgaagttgtggctttctttgtgtcaaaactgtggtctgagtttttagagaaggaaaaatgctactcagtgagaaatccaagaaatgaaaccaggaaggttttcagatcacatttcccagagtgagttcgggagaatcttgcctgtcgtgatcacactgttccccgccgccccaggtcagcacatacttgacccagagtgggctctcaggatttgttgattgaagggtgggtgaaagctggctggagactcctggcctggccacctgcaagaggcggactttgaagaaaactgtgatccagttgagccactttgtccctgaggggaatgctgctttgcagctttctgtaacttctcacatgggaattgcactggtgacagataaggtttaacagatgtacttttttatcctcagaataagacaaggcaaactctatatggctagtattactgagtcaggtccctcccgttgacccattaattccagcattgatcaatacaaccaaattccagccccaggacaagagtggcaggcatgggggcctggtactccaggctacagtgtgagcccaggtgttctgcaccttgcagcctgcacactgcaggtgaaatcatgagcagtgttctgg

SEQ ID NO: 11975 - DNA, 99 bp, Homo sapiens
ggcgggtatgaagtgtggggcgggggtctatacattcctgagattctgggaaaggtgctcaaagatgtactgagaggaggggtaaatatatgttttgag

SEQ ID NO: 11976 - DNA, 4149 bp, Homo sapiens
ctggagcagaataagtctaaaggcagagccccagcctcagagacaaataggcttcatcatggaaacttctgagcagaacattgagtttgagaatcctgaaattgagcctatgagaaagagactcatttcttaagaatgttttccaagtgacattctcagtgataatggaggtttcactgtgaagcatcaccagcagatccttgttttgacaaaaaaaaaaaaaaaaaaaaaaaaaaagagagcgatcattgtgttaagttatgtgggtgttttcatcagctaggagcaaggctgtggaataaggagtcagattctcagcttgctttcactttcaaggacttacagaggagtagtcaccagcctcacagcagaagttcagcccggcccccaccgcttcccccagcctaccccatagaaacgggctttgggctgacaagtcaagttttgaacagagtagaaggcagctctgcaaagtagcttctagtttttaggaccagaatttaagccggcaaattaggaattatttcctcaagtgaagtatattttatatgaatgccccatttgggccttaaaagttgtgaaatttcttaatagcattttgtttttaagtgccccagtcctgccctgcagcaggcccccagtgcagcattaccatttgaatagggcactgtcaggctctggtggtgtggacacaggcatgtcatacctttgaaggaaaggctggggctgggaatgcccacatcctatcaaatcttcattttaggttaaactctccattggttctgaaaatgctaagtttgtgtgtgaagcacagccttattttccttttctgtcattgttgattgttttccttaacactttgacaaaaggaccagtggaccaatctgacaaagccattctggttcctttccttgagtgtactgagaatagttttaaagctatgcagaaaagggagctgttattcacactgcccttattttgttgtagaattatggagttaaaagaaaatgtgattccgaactctaccaatgtattcctaggctgtgagtactttcccggcccaaagtgtgaaaatatgtaaagaagctttgttatgctgctattgatctgccatgatttctatttattcttttatggcatgtaatggtgtttagtaatattttaatgtagattttgatttatttcagcaatagtaattttaagatattctttgaatgaaagtgtcttcgtttctatgatacaggtcattttgtagtatttaaccaattaagatgcactgcttacttttctgagcactatttaatgatggggtaaaaacccaattggctcaaccagctagcataaggattagctgtgaataatgctgacagatatgatggttccttaggaacaatcatttaagctttaatggtaactcaatcataagtccatagattatttttttctagctaaaattttagaaaattacttgtgaattacatacttgttttagtttggtcttagtttttagcataaagaatgattggcttttgttgatctaaacatgcttcctggacagggtttctgcttctcattttagtgtcttctattgctgtctacctaattatgtgtgaattgtgcagaattcagggaagcttataagttttcatgctcaattgtgaatagtttgttttcacagatagtatgtaaattaagcaaccaaaaatgaattccttatgcatcatctgggaacgagaaagctatagtgggatacagagtgttgctgacaccgggagatggtgtccagggagccacgtgacttccataaagtggacgcaccagtaggtgtgattgcacctcaagtgtagtctcagtgggcttcggtgaacagacgaatcaagggattcttgaatcgaaattatgcttttgagtatgtaatattatgagagagttaagagagaatatcctaaagagagtctgtgatcatactaattttcacctttaatgctaggaatggatatgatagacagtaaagagcatctatgataaggcttccttagtgtgaaagtaaacttaagtgcccaagtcatggagacttgaaaagggtaaacctgtttcacctcccaaatttatatattcaaagtatttacttaaaattcagaagccagaagttcatgtcatgattaccaggaagttcaggccagaatgaatccctagagaagccaggccaagcctggataattgcagctggatgaccctggcccgaaagtcacagttcagttgccttattcctagttcaggcttactatctagaacctcatgctagcttaggttgcatgtttacattgctgcagtgtctttactggaagcttagttggatcgaaatggacaccgagatggagatgcttctggctagatttcgcagaaccccaggagacctgcatttagaccactctgtccatttgtgtgcccacccccacccccagggtctaagtgtagactccaagaggagcagcccagagcttggaggagaggtgtgtctggggcaccactggtgggtggtgctgctcttctttttgttgtagttaatgcggtgtcttttaatggactctcaggcctcccagacagccttgttcctttaaggcagaagctcttcttcattgtgtacctcctgggattcatgaggtgtgagatttggcctgcttgactttgaattcaagtttttcaagtgactctcagtgtcagaagaagcatttcatgctgtccacatgtggtatgtccacagctcaccttcaaaggcttagatgtagccatcacagagagtggtattttattaagaacccaagtcccagcctgaccaacatggtgaaaccccatctctactaaaaatacaaaaattagccgggcgtggtggcacgcgcctatactcccagctacttaggaggctgaggcaggagaatcacttgaacccgggaggcagaggttgcagtgagccaagatcacaccactgcactctagcctgggcgacagtgagactccacctcaaaaaaaaaaaaaaaaaaaaaaaaaaaagtcacgctgggcccctctctacagggggacacacaggcttagtttagtatatgtctaaccagattttgcatgtcaagcatttgtccttttcctggcttatgttttcttgtagaaattatataaaccctatcaaatccactactaggtaaatttttaaaccatgcagctttattactctcctcccccaaagaatgtagtttgaaattttctcatttccatagtagaggccctaactgccattgtattactaataatgcaacatgaaattgaaggtgcctaactgctcaaaaaacaaaatcagccatcatactgtaactctgagaggaatgagaggtggcacaggcacgagtgggctcagcccgtgtgagtgaggagaactgaggaatcctagggtgcgcatcctgcatcctggctgcacgtttgctgcagagtatgtttttctttcttgcctcccttcagttttcttcagttgcgttcagtgtatcttctggaaccaatagtgccctgtgttctcaagtctctaaaatgctaagatctgagcaaagtcaagcagcttacactaggcttttttacagctgtgcttgagaacatttccgagtggaccagggccttgaggagcctgtttttcagcaaattcaacagatgtgtgcagtgattccctccgttttgtatttgacaccttcatttaaaatgctaagatgcaatatcattcacttcaaagtggggaaaatgcagaattgtgtttcctttttatctgtgtgattccttaagaaacatgtttttaaaatatgtgttctaaatggttttttattctgtattactgctttggccatgtggctctcatgactttcattgtaccagattctcagctccctgaaacatggggacgagaagctctggaattacagcaagatttttgttccatgagcgcaatactgtatcattaacatttttaatggtatggattttatagcatctgtgtatgtttgcaaatattaagttattacatgttttaaaatgagcgtttttcatcttaaattttatatgtttgcaaatatatttttttaataaaatttcaaaaccaagttttagcaccta

SEQ ID NO: 11977 - DNA, 165 bp, Homo sapiens
gacagttgctgctggaggatgaccagggaagccccctgataagccaagagggccagcacagcccttgctcccaggctcctgcctgaaactatctagcacactaggacccaggtggtaccctactcagtggctgagaattggataaagtcttgggaaatgagacaa

SEQ ID NO: 11978 - DNA, 1591 bp, Homo sapiens
atggggaggaaatgtcactgccgaagaccaaaaacaagcttcttggtataaaagactcttacagaatatgtgtattgtaatttattgatctggatgcttaagtgtcatggacagtaaatgaatttgaactttatgttgaggacatgacattggtttgaaaatataaactgcttttgagcagtttagtcagggcatttgagaataaataggaactttctcttcagttgtaaactctcttgccctctctcagggtctcataaactccccagtgatgtaaacgttgctattgaaggttctcatgtggtgaagcccttcatttaagttggcttgaatctcatcagcaggcagcctcatgcaaccatgagggatagtatgtgacgagggagaactgtccactcatgccattttctctcttgtctagtatttcattaggatctaaagttgtctgagttaaatgcacttatgtgactcatgtgtcctcttagaatcccaaatagggggaaaaagttttggtggtttttgttttttttttcattttctgttggattacagaaaaagaatgggacccattcaggtctcgatttccaaaggtaaagatggaaggctgggcagactggcttttgttacctgacatgccgtagggtgagcttagaggaagaaagaaaacaatttttatttggccaaaacagaacaaatgctgaaaaggaaatcttgtttttttcctaaagccaaatagaaatgatttgggtataatttaagagtccttgtgttgtacagatatggtgactgatgtagttattaatactaccaacttagtcatcaagcctcaattttcctttacctgaaggattaagtgaaagcttttggagttcatgatgttcagtatgatcagttaaccttaacctctgagcatcctgaagcaaaatctaaataatgcagctattaccactggtggtccaggctctggtgaagccctctgagcccaggaggaagagaaagcattgtccagaggtaggaacacagtctgggagcccagagctctgggaggagtgggaaaatgctgcttcctgctgcttgcttctaggcacctgcttccgccatctcacttaccatggctagagatgggggtgagactggggaaggacaaaagcagggaacagataagtgatggaaatcagaagggaatatagaaagaactctggatgtggagaaatgccggtacctgagcattttgtatcaatgggagtaccctctgtaactgctcagtaggttacaaatgaagagtccaccagtattagaaacaatttaaacttgccagtaccaactgggatgtgtgccttcaatttgaaaattgtatgttttattttttaaatttgttaacagcattaatttatagagtattgatgtcatttatgtttctgaggtgtttcaacacaattttggatcagctgcctgtttgcaaaaacataatatatttctgttaaacagttcttcacctaacagcatattgctcttataactggtagagctgtttcaaaggaagttggtttctggtccaagttttgacctaaaccatgtccatcttctatta

SEQ ID NO: 11979 - DNA, 358 bp, Homo sapiens
atgtctgctctaagaagcagacaaccggacatgcgcattcatagcagaaggaaaccatcaagaagtggaaggctgaccatgatgagcagtagatgaatgtgtatgtctaaacaaggactgctctgtgtcctcacagatgaatgaggtcatgctgggaattccctctgcagggaactggcctgactgacatgcagttccataaatgcagatgtttgtctcattacctttttgtatagtttattaaagtattaatatagttttaataagtaaatatttttaggttgcagaatggactcctcatctttatattcacgaaaaagcaatctgaagaaaacaaataaaagcctgtgtatttagc

SEQ ID NO: 11980 - DNA, 101 bp, Homo sapiens
gagcttttgtctcaaataggattggtcattgcaggccagaagatagtgtctgagtagggctgatgtgtttcctgttagtctgattttgcttttgccaaaag

SEQ ID NO: 11981 - DNA, 4376 bp, Homo sapiens
tgggtgccacccagcactcagccccgctcccaggacccgcttatttatagaaagtacagtgattctggtttttggtttttagaaatattttttatttttccccaagaattgcaaccggaaccattttttttcctgttaccatctaagaactctgtggtttattattaatattataattattatttggcaataatgggggtgggaaccaagaaaaatatttattttgtggatctttgaaaaggtaatacaagacttcttttgatagtatagaatgaaggggaaataacacataccctaacttagctgtgtggacatggtacacatccagaaggtaaagaaatacattttctttttctcaaatatgccatcatatgggatgggtaggttccagttgaaagagggtggtagaaatctattcacaattcagcttctatgaccaaaatgagttgtaaattctctggtgcaagataaaaggtcttgggaaaacaaaacaaaacaaaacaaacctcccttccccagcagggctgctagcttgctttctgcattttcaaaatgataatttacaatggaaggacaagaatgtcatattctcaaggaaaaaaggtatatcacatgtctcattctcctcaaatattccatttgcagacagaccgtcatattctaatagctcatgaaatttgggcagcagggaggaaagtccccagaaattaaaaaatttaaaactcttatgtcaagatgttgatttgaagctgttataagaattaggattccagattgtaaaaagatccccaaatgattctggacactagatttttttgtttggggaggttggcttgaacataaatgaaaatatcctgttattttcttagggatacttggttagtaaattataatagtaaaaataatacatgaatcccattcacaggttctcagcccaagcaacaaggtaattgcgtgccattcagcactgcaccagagcagacaacctatttgaggaaaaacagtgaaatccaccttcctcttcacactgagccctctctgattcctccgtgttgtgatgtgatgctggccacgtttccaaacggcagctccactgggtcccctttggttgtaggacaggaaatgaaacattaggagctctgcttggaaaacagttcactacttagggatttttgtttcctaaaacttttattttgaggagcagtagttttctatgttttaatgacagaacttggctaatggaattcacagaggtgttgcagcgtatcactgttatgatcctgtgtttagattatccactcatgcttctcctattgtactgcaggtgtaccttaaaactgttcccagtgtacttgaacagttgcatttataaggggggaaatgtggtttaatggtgcctgatatctcaaagtcttttgtacataacatatatatatatatacatatatataaatataaatataaatatatctcattgcagccagtgatttagatttacagtttactctggggttatttctctgtctagagcattgttgtccttcactgcagtccagttgggattattccaaaagttttttgagtcttgagcttgggctgtggccctgctgtgatcataccttgagcacgacgaagcaaccttgtttctgaggaagcttgagttctgactcactgaaatgcgtgttgggttgaagatatcttttttcttttctgcctcacccctttgtctccaacctccatttctgttcactttgtggagagggcattacttgttcgttatagacatggacgttaagagatattcaaaactcagaagcatcagcaatgtttctcttttcttagttcattctgcagaatggaaacccatgcctattagaaatgacagtacttattaattgagtccctaaggaatattcagcccactacatagatagcttttttttttttttttttaataaggacacctctttccaaacagtgccatcaaatatgttcttatctcagacttacgttgttttaaaagtttggaaagatacacatctttcataccccccttaggcaggttggctttcatatcacctcagccaactgtggctcttaatttattgcataatgatattcacatcccctcagttgcagtgaattgtgagcaaaagatcttgaaagcaaaaagcactaattagtttaaaatgtcacttttttggtttttattatacaaaaaccatgaagtactttttttatttgctaaatcagattgttcctttttagtgactcatgtttatgaagagagttgagtttaacaatcctagcttttaaaagaaactatttaatgtaaaatattctacatgtcattcagatattatgtatatcttctagcctttattctgtacttttaatgtacatatttctgtcttgcgtgatttgtatatttcactggtttaaaaaacaaacatcgaaaggcttatgccaaatggaagatagaatataaaataaaacgttacttgtatattggtaagtggtttcaattgtccttcagataattcatgtggagatttttggagaaaccatgacggatagtttaggatgactacatgtcaaagtaataaaagagtggtgaattttaccaaaaccaagctatttggaagcttcaaaaggtttctatatgtaatggaacaaaaggggaattctcttttcctatatatgttccttacaaaaaaaaaaaaaaaagaaatcaagcagatggcttaaagctggttataggattgctcacattcttttagcattatgcatgtaacttaattgttttagagcgtgttgctgttgtaacatcccagagaagaatgaaaaggcacatgcttttatccgtgaccagatttttagtccaaaaaaatgtatttttttgtgtgtttaccactgcaactattgcacctctctatttgaatttactgtggaccatgtgtggtgtctctatgccctttgaaagcagtttttataaaaagaaagcccgggtctgcagagaatgaaaactggttggaaactaaaggttcattgtgttaagtgcaattaatacaagttattgtgcttttcaaaaatgtacacggaaatctggacagtgctccacagattgatacattagcctttgctttttctctttccggataaccttgtaacatattgaaaccttttaaggatgccaagaatgcattattccacaaaaaaacagcagaccaacatatagagtgtttaaaatagcatttctgggcaaattcaaactcttgtggttctaggactcacatctgtttcagtttttcctcagttgtatattgaccagtgttctttattgcaaaaacatatacccgatttagcagtgtcagcgtattttttcttctcatcctggagcgtattcaagatcttcccaatacaagaaaattaataaaaaatttatatataggcagcagcaaaagagccatgttcaaaatagtcattatgggctcaaatagaaagaagacttttaagttttaatccagtttatctgttgagttctgtgagctactgacctcctgagactggcactgtgtaagttttagttgcctaccctagctcttttctcgtacaattttgccaataccaagtttcaatttgtttttacaaaacattattcaagccactagaattatcaaatatgacgctatagcagagtaaatactctgaataagagaccggtactagctaactccaagagatcgttagcagcatcagtccacaaacacttagtggcccacaatatatagagagatagaaaaggtagttataacttgaagcatgtatttaatgcaaataggcacgaaggcacaggtctaaaatactacattgtcactgtaagctatacttttaaaatatttattttttttaaagtattttctagtcttttctctctctgtggaatggtgaaagagagatgccgtgttttgaaagtaagatgatgaaatgaatttttaattcaagaaacattcagaaacataggaattaaaacttagagaaatgatctaatttccctgttcacacaaactttacactttaatctgatgattggatattttattttagtgaaacatcatcttgttagctaactttaaaaaatggatgtagaatgattaaaggttggtatgatttttttttaatgtatcagtttgaacctagaatattgaattaaaatgctgtctcagtattttaaaagcaaaaaaggaatggaggaaaattgcatcttagaccatttttatatgcagtgtacaatttgctgggctagaaatgagataaagattatttatttttgttcatatcttgtacttttctattaaaatcattttatgaaatcc

SEQ ID NO: 11982 - DNA, 2969 bp, Homo sapiens
ctattagaagggctgaataaagggaacatgcagctctgcagcaatattctgataatgtattgcagtgcggctcacatcactgtccaccaccacctggagcggctcatcagaactgaaggggagttttcacttaccttattgagcgtgattctgttctacttgatatttccttcaccacctcatgtcatttctcatggatttggttatgatggaaaggaagaatgcagaggaggagaaaagtgacagatcctccatttttgttgggatgcgggcattttgaatgtgatcatctttgctgaatgtcattatttgataacattttgtttatgttacttaaacatcattggataaatttgaactccatgggattttatctgtggattcagcttctgttggacaactagcctcatctccagtatcctgctggttcactctaattggtcattcctaatgcattagattatcaaaaagtataaattcgctgtgagtgagtggtgttggcagtgtttgtataccatgatgcatggagtgtttgacgaagaaacaaaaaacaccaaaaattgcgagcctttaccctcctctatttctttaatctgttgtttgaagaaccgcattttgagggtgtaaccagtagtcacctctgggccaggttggaaaagaaatcaattttttaaaccactaatgcttgccaagaaatcgccttatgagaacatggtgtgtgtctctgacaatgcgtggcacatctaaattgatcattcataattttatctacccagtcatgtactggagagtggcaaaagtctgaggcacctgcatatctctagtccctgtgttctgcacatccccacggtggggacgccaccaagcctcagactcttaccatcccggtgcatgcaggtctccatgaagaagctgggactcattcacatttcaagatccaaatgctgtgcaaacagtgtaagcttagattttctgtaaatgaagggtcatttctctttttttttttttttaaagaaaatgtgtctgcaacatggattccaaagcattttcagcatcaaacatgaaaacattgatgaatgaggaacaatcacaaaagctgtgtctctgtatatagctctacacaacatgtatgtggatacagtcattatttaaagcacatgccagggaaaaagaccaaattttgaggtcttttacatacagtgatatggtactaaggagaattaaactcctactgcttcctctgaatattaagaaacaatttaaattgttataacttcataaaactcatgactgagtctggcaaacatgtgcaactcttgtattgctccattttcttgtcaatggaagaaacccttccacgtgtatgcaagtgggagatgaaaacctgcatttttaaaggacaaacagtgaatttaagcatgagtggccttaataaatatagttgtctttctttgctgctgtggaaaggattctaaacagatgtccctgaagtcttgcattgaatttagtcattattattactttttaaaatgttggtgcaattaactctggacctctcttgtgagccatagagatatttaaaagacaaacaccttatttgtcggggaagatgaaaccgtccctgagttgcaccattctttcttggtgcattcgcggttaagatactcaagcaggtttcttgcttctggctttgttcttgtcatcagtaagtataacaaactatgtaatgcttatgtgttgcataaacaatccaaatgcattcatgttttaaaagtttgtcctttaactatcagagggatctaggtcttggttagagaagtaagcagagttctttgcaagcttatttagcacattttgacacaatgttgcactgaaaacccaggccacaaatgtgtcccagtgaacagtttggatgtcctcaaagaagtggttctcactgcctcctacaaccaggtcttgacctgaactctgcaactgaatacttgaagtaggaagtaggaaatccagtagggaaaatagggtccttgaaacagaaaaaaaaaaccaacccatgtatagctagctatttctatgtatgtgccaattttgtcacagctcttgtttggagggatcattttctgcccaactttcattggttaaaatattactgatcttacctttatgaggtcgtataatttagtcccttaaaaattaaattctctctaacataacaacctttcccatttcgtgtaatattctctgatgtttgggggttaccaaaaatatccctttttcacatattaagaatagtctctgggtttacaacaaacactgtgatgttgggaagctatttcctttgcgcaaactttaacaggttttcttctaatcataacatagttgaaaaaagaagtttgggctaacatttaggagaagttggtcttactttgtgcaaaagcaggcttgtgctttataccccatttgatttcgatgtacagtctcaattttgtatttaatgatttttgtgtatccagtatgcacgttaacagcgtgtcaactttcatttgaaagtgggtttcaatttactttttaaacagtgtttatgacgagacctcagatgtgttgacgtaagctctatctgcaatgtttttgtgtagagtggcgattgaatgctgcccagggtcagtgtatctaattccccgagaccctcgtttgatagtgcttcttgtaatatttcttcaagtgagtggcatgtgggttgtgatattgaccatgtgattatggacatcgatatgaaaaataaataaataaaactaaggaaccctggaaactaccagtgggcatgtattagccagtcattgtaacctcgtgtctagtagaacaatgtacaaggtatgtacagttcataaatttgttgtcatgtgtatgagaagtactttgtgctgatcgccttatttatattcatcaaataaaccttgtttctttctgaagtg

SEQ ID NO: 11983 - DNA, 2486 bp, Homo sapiens
ctgtagtaactttttttttaagagattgttgtggactttgtttattaacaatttatatttcattctctaaacaaaaggttcttgttctttctcaaatgttttttcttttatttaaatcatgatggcctgtaacagttgaagcatctaaaaattgaaataaatatatatttttaacatatattgtacttgaattatctcatgttggcacttctaagttttactttttgtatgttacctgtacttaggcttcaaattgaagcctgttttatgtgtaaaatcagatgcttgcaggaggacggtaaacagcaaaggctttacttctttttctctaatgtcacctgatataaagtacttttgttgaagtgaattattttgatgtaggcttttgtatactgtgtttacacaggtataagtcagtaatagcagtgttaatatttacaggattttggctcgatacctcaagatttatctaacagtgcagtttcatttagataataaactatgtacataggacacattttttatctctaggcttagtcatgtaaaaactgcctattgctaaaattctggtaactttttgagagtattggataattttcagtacctgcgcaatccttgatttaatgaaattaaattttttatttcaaaagataggcttctgtttatcaaaggcgttgaacaatttgatttttaaattagttttagcaaaatggaagtataatgggaatatatttttgaggtggtcttagtagtaattaccatttgttgaacacattaatgctatactagacagatacagtggagatagctttcaaacccgtatctattcctaactactgcctctaatactaattactaacttgttactaatgctaacttttaaaaatgtttttgaaaattgcaatttctacaaataaatgtcatagtgcaaataaatgtcaggatttagagaaggagcctaaactgaatttgtgttatttcagtaaaagttatggagttatgggtctagacgtgttaataagttagacagaactttggcactttagaacaaatgcatgagtggtatttcagttcctaagttacataaaaagtgtgaaagaacactgtgaggtcccagcaacgccagactatattaaggtaagtagaaagtgtttttatagggcttcaatacccaggtggtgacagagcagaagaaccggtttttttttttttttttttactactaagcttttacaaaagaagtatctgttttattgtatagaacaagtacagcattttactacatagtatacaagtttttaatgagcatttaaaaaaataagtaaatctaggctatttgaaaaatacagttgagccagtgagcacattttataatttggaagacacaaatcaaatgtgaaggatttgattttctacatttaaaatgaagaaccaaaactctcttcttgattttcagctaaaggcaggagactactttccaactccttttgcttctggagaaggccctgaaatcacattgatatatgtttgttagtaaaatgtgcacacctgacttgcaatgttgtgttaaactagaattatattcacttggaaaacatatcgcttaggataaaattttgtcattcaaaaattttttcagaaatgcttgtactagaccacctcatttggatatatagctatcacatttgtaagattctgtttttagcataaaaatcaatagggatgaaaattttcttagaactcaagactccataactatgggggtaaatgaagtcatcccttctcccccagtccacccccaagtgctcttagatactgaaggagtctcccttaacatacagtgttttttttttgttgttgttgttttgtttttttttggagatggagtctcgctctgtcgcccaagctggagtacagtggtgcaatctcactgcaagctctgcctcccaggttcacaccattctcctgcctcaacctcccgaatggctgggactacaggcacccaccaccacgcctggctaactaactaactaactttttgtatttttagtagagacagggtttcactgtgttagccaggatggtcttgatctcctgacctcatgatctgcctgcctcagcctcccaaagtgctgggattacaggcttgagccactgctcctggccaacatccagtattttatcttgactgtcctaaccttaccttagatgctaacagaagggtcctgctgaaataacactgggtgctatattgatgggtaaatgtgtacatcctattccttcctctttatctcacaatttttgtctccactaagcaagaagtaaactaacacttcgtcactctaaagaaataacttatgtaaaactcttagtaaccctgtttgtcttcaaatgagtaaatagaccaaagtggggggacaattttctagttctgtagagggaaaaacatctgagtcaacattttgaaatgcagagggtattggtac

SEQ ID NO: 11984 - DNA, 1852 bp, Homo sapiens
cagaagcatgtgcacttcgggaagcaggcctgcatcttacctgtacagtatttgcattccacagatggaacggtttggagaagcactttttcatacttttgtgaaagtatacatgttggcccagtctctcgtatctgtacctttgtccctagtactgtaactgccaatctgtctgtgtaagctggaatctgtggcaactattaccctgtgttgtatttcccaagtgtctggatggatggagaggtactcaaacaagttactttcagttgtcctgctggattttaaaaaaatagaaaaagaatctcaaaactactgttttacatagattgtttgaagagtccttcctcttgtgcttctgtaccactttcccagctcttagatgtggtagctaaaggcacggaatttagacggccttgtaaatagggcatgaggaactcatctgtgtattgggatggtattagagagagaatcaggaaagaccaactcatgaagtgaacttggtttgatcttactcaactagaaagcttgaaaacatccctggggattctgaaggcttaattttgcaaaggaggatgcattgtctgaactttgcaacttcatccagtgcaagtttgatgcaagaatgtattaggacataaaatagaggctgaccttaaaagggccaggacagaagcggctgccagctctgaatctttaactgaaatgcacatggcaccaggaggtgtctctcatagttggttgctagcctaaaacatcagaatagaacccaaagggcttaggaaggcctgccaggataacaagaaggccctgtattcattgtgtttcatctgcctaggcctactcattattttagagaatgaatgaagcaacaaggaagagagaccatgactctatcgatgacactgtttatagaaacacaggagaggaagaatttggaatgaaaagcacttcgtcagaaccttctgtgggagccattgagagaaaagcatggtccagtgccttctgagaaaggccagagctttgggctttcctgctctgcttttgggtcgtcaatttgccatctctggttctgtgctataatcagaattgtaattatgttctccagaggccaatttcattaactctgattaattagaatcagctagccagattagtaacctctttgtccagccttgatttacagtgcagggtaaagtgcagaccttaaaaacagctaagtacctagaagagctccctgcaagtgtaaatattaaggatgacctgtgcaaaattatacccacaccagcactagtggtaattattctaaattattgccaaaaagttttttttaatctgtctttcaagtttacagaaaagaaagcagtaaatgcattgatgtcattttattatgtacatatatcatgtgcattcaagctgtgtgacaagatatatcaatataaaaacaaggtatatactttattattttttgaaaacaaggatattgtgatcaattttaccctgtaaaacatatttctgtatttataggtcttaaacatgatgaattttttctattacaagtttatttaaaactgctttctcaagtcgttattgatacagcaagtgaacctgctgcagacagaagcagaggaaagccaagaacagcctttattggtgaagaaaagaatgaatgattctttgtaggcgccatcagccacttttagaagccatcagccagtgtgttgggaaaagaggtttgtcaagtgttggcctatgggaaggtggtcaatgaatgttttgatgaaatgaatgtttttgtataatggccttaaacttttctggaagtatttcaaataaattacattattaagtcatc

SEQ ID NO: 11985 - DNA, 6411 bp, Homo sapiens
caaaacgaaagagtctaagcattgccactttagctgctgcctccctctgattccccagctcatctccctggttgcatggcccacttggagctgaggtctcatacaaggatatttggagtgaaatgctggccagtacttgttctcccttgccccaaccctttaccggatatcttgacaaactctccaattttctaaaatgatatggagctctgaaaggcatgtccataaggtctgacaacagcttgccaaatttggttagtccttggatcagagcctgttgtgggaggtagggaggaaatatgtaaagaaaaacaggaagatacctgcactaatcattcagacttcattgagctctgcaaactttgcctgtttgctattggctaccttgatttgaaatgctttgtgaaaaaaggcacttttaacatcatagccacagaaatcaagtgccagtctatctggaatccatgttgtattgcagataatgttctcatttatttttgatgtagaatttacattgccatgggtgttaaataagctttgagtcaaaagtcaagaaagtgactgaatatacagtcaccttttatgaaatgagtctctgtgttactgggtggcatgactgattgaggtgaagctcacggggccaggctgaccgtcttgaccgttccacttgagataggttggtcatcgtgcagaaggccccaggacctcagcacacacagcctcctcttggtctgagtaggcatcatgtgggggccagatctgcctgctgtttccatgggttacatttactgtgctgtatctcagatgttggtgtctggaagtttattcttaagagactgctacccagctggtctgtattattggaagttgcagttcgtgctttggttggccttctggtctaaagctgtgtcctgaatattagggatcacaattcactgaaatacagcagtgtgtggaggtgatggccagttaatctgctgaactggttttgactaatgacaaacctctttttaagatggtagaatggaggtgatagtcacaaaagtaaatgttccatttttatgaatgactttctacagagtttctatttctaaagaaaaaacaattgttcacatcccatctgatgattagcatgtgtgtaatgaatgctgtcttggtctcccctgtggaaacccttctccctgtgccttagagcaggtgtgtacatctctcactacctttctcatgggtgctgttagattttggcacccgttttctcagcattcagcccagggaatgtggttttcacttcttcgtcagataagaccaacatgaaggggtatgttgagaaacatcctgaggcaaggtgggaggtgggatggggcaggactttcccttccaagcacatgcatggcaggtggggaaaggggggcttgcacccctgctggaaagaaaaggtttgtgtatatttctgatgcaaatgtcatactcactgctctgtaaaggcagctggcagctttttgggaaaagaacgtgctcgtctgttctctggcatcaagtttcttgcagctgctctgagggagagacagtgagctgcaagactgcctccccataacaacaggcaactcagagaagagtcattttatgttgttcctatggaatctggaatgagtgcagagctcctacccacacatgactgccccgccatttcatcctaggcattctgtgaaggagattggttagtccaaacttgctaacatacgaaaattcacttggaacatgatgagagatttcttattgaggccaagagatgtttcctgtcccagaggaaccattaggagtcgcttttagggtattcagctttgttcatgaaataaggcatctctgagaaagtggccccagggagagaatggaggactgggaggagaagcattaactgagctccaagggtgtgtgggcagagagcttgctatgtgaactcactccttaagaaaatggaagagaaaaagagagtgctagttaaaaaatcgggatgttttagtttggatttagggttttgatacttatgttgaaatactaatgtttctgatcaataaaatcaaactcttaatataccgagtaatgaaaccatagtgtgattgcctcagaataaattgagaagtccaacttcctagttttgtttaattagtttcactttttctactctccccagtatgctagaaatgggaatcgttgccctgcagattacggcaaaacatctgttttaagcaaagctgcattttttgactcagaaattgtcccagacggtggatataagatgaaattcagaaaaacgttctgccaagtcacaggcttttagatattatggaaacaagaaatggaaaacaggatgatctccatgagaggccttgatcctgagagtaaaaggcttgtgtagataggttagacaacgtcctctagaaaagagaccagggataagtccaggtttccaggaaaaccaagaagcctgcgggtagctgaaggtagagtgctagttgttcatcttaacttaccaatgagctacagaaaggacttagcatctgatgtcatcagctttgccaggagagtgatcaaggaggttaaagctcaggtaaaggtgtgccttctcagagattggctacaagcaacagagaccacctcaacagagaccacctcaacagactcagcccagccatacaaggtgccaaagctcctccagagggctgtcttgggcctttgaggcaattgatctccagaaagagtcagaagtcattccagtccaggcccaggtattcagatggtgacccagccagataatagtatcttgagcaaataatagtatcttgagtgcaaataagcaggaagactgtccttcaaaaaatgtggggttacatgattttcagagcctttttttcagagttgagcatcttttcttttaaaagaaataaggggcaagaggaccaattttattccttgaggaaaaatgacacacccttctcccaaaagaaagaaaactctctggccccccaacttcaacactaatttggctccctgaagaagagagaaaatattatttctgtctttattgaagagaaatgggcaatgccaatgtgaaggttactagtcttttttattttctattggtgaagactactactgctcttatttagcagatcttataccttcagtggtcaccagtatagcaggtgaggtataaggaaaacagcagtgtgatgataaatggtaattaatatactttgtctgtgtcagcaatagggaatggtggggactgtggcaaactgaagcgcccctgttccacccacagtgggtaattttccagtcgactgtggccatgaagtacttcctgatcttcccatttttcaagaaaagctgacaatctggatttttatatgaaaaattctgattttaaaaaatattggcaactaagttaaaattcaagtgaatttagacccagcagaagacatggatggacctgatttggtccactgactaccagtttgttaacctgtgctttataagatttgaaggaaaggcattcatggtaattacagacggtgccaccagaaaatgctcttgctaaatgcagccagtagttagattgcttctttctccagtctcccccgcaaagaaatttgacgtgattctgaatgcactggacatgtcttgattgcgtctttacatttcacagtgtcttaaaagaaaggcaagccagttgttaatttcagaatcagatttatgctctctcaatttaaaaaatgctgggaacaatttcatttttttttttttgagatggagtcttgctctgttgcccaggctggagtgcagtggcgtgatctcggctcactgcaagctccacctcccgggttcacgccattctcctgcctcagcctcctgagtagctgggactacaggcgcccaccaccacgcctggctaatttttttgtatttttagtagagacggggtttcactgtgttagccaggatgatctcgatctcctgacctggtgatccgcttgcctcggcctcccaaagtgctgggattacaggcgtgagccactgcgcccggcctaacaatttcatttaaactccacaacctaaagggctttgtttatagttttagctcttggcataatttttttcaggtggtgtgcaattctgagcataggccaagacatgattaggaaagcaggcagttgtagagagtaaggcaaggaacctcctagcgtccattagagccaggtatttgcattatcttccgttttaagtggtctgtgaattgactgtgttttggaggtgtgaaacagtatacagagaaaagcttttcctgatactgagatatcagttaggagtccaaatggggtgttgggtcatccttgccatatcacctcctttccaggctcagagtgaaaatagacaaaaggaaatctgactgcaagccagtggctttgattccagtttcagagtttagggactaggagagagtttagattatctagcatattctccccctggtgtcagacagggctgtgcctgaattattccagacatatggctgtagatggtattctttattttataagaaggagattctgtaacctaccctgctgatcagatagttctttgtatgtcttagagaaattcaagccagcttccttttgttcggcttgtagtggagaaagaacagctggtcaccttccatgtattcaaaaaccacagtgaagtcatccccctggtgtttttatttcagtgataaataattccacccacttaaaccattcttcatggctcttgttttccaggggcctaataattttcactgctgtaatgtttctcagcttcacacttagtttagttgcccaaacaatgttggtgccttactcacattggtgccttgtgaagacgaggctcaggatggggattatggggaaattcttgcacacccagctcctcttaccacttaaaaatataatggcactttcacaaaatgatatgtcacctatattcattgagaattatttgactgccacatttttcccctgatgatagtcatctatcataacttgtgtttgttttcctcctgagatcaaacacttggtgcttattcctgatgtatactctgagaccagctcttaccttctgagtggcagctacccctccctcccaattttagatcctatttttacacatctctatagatatcacctttatttcatgactcacaatattaaatggtacagacttcagtttaaccactggtgtggtaacagcagtagttgctaagtaccaccttcccattgctgtttgagggctaatttgcaaagacatttgaatctcccagtgaagatgtctggggaattttggccagttgtcttccctcttgcccttttgttctttaaaattcagcttggaccatagacacctccaggatcttgtttatgttctgctctcaattgaccaagcactgcgttttgcacaatcagaagtctcacaaaagcaaacagttatgactgcatatctgatgtttatatcctataaaatttcaggaagattcagagtcaatcttctatttgtacatgatgtagacaaaattagctgctccaattgttagacaaaaaattgccattggattacactaatgtgctcatctgttgttttaaaagtttggtatcaggcggggcacggtggctcacgcctgtaatcccagcattttgggaggccaaggtgggcggatcacctgaggtccagagttcaagaccagcctgaccaacatggtgaaaccctgtctctactaaaaatacaaaattaatcaggcgtggttgtgtgtgcctgtaatcccagctactcgagaggctgaggcaggagaatcgcttgaatccgggaggcagaggttgcagtgagctgagatcacgccattgcactctagcctgggcaacaagagcgaaactccgtctcaacaacaacaacaaaaagtttggtatgtttctctcaagaaaaaagcatggtgagtccagacagcagcaaaagcttttgtgaaaaccaattgtgttcatctagatagtaagtaactcctatttttactgttaattttttaaaagagaatttttccctgtggaaactccctgttagtacgtcctaggggagaaagcctgtggaatatggtggttattgatggcgttgcctttgtttcatctttgagtttgccctttgtgggatctagtgggataatgagcactgacagaactcttaacagcgtgctgtatttttgacattgaaaatgttaatgacttgatttgtacataactctgtaactaggtgaaagtagatcacagctgacatttacaaaatgtttttgtaccttagaatttctgcattaaataaaatgttttgttttaa

SEQ ID NO: 11986 - DNA, 1268 bp, Homo sapiens
gacaacaaactgcccctcactactggcttggtttggtctactggaagcagctatcaaccgactttgttcttccaagtcctagtggaaaagacaaaaaagaaactaagttacttgtctgcagtcaaatggcaaattatgcagttaagatacattcttgagagccacttcttctgtcataaatatgtatgcatacttctgacaacttgataaaaagaaaagctacacccaaacaatacaacaccaaaatgaattttggcaccatcctataaaagccagcattcaaactaaaatctaatattttatctttctttttttatgaccaacaaccaaataaagcccatcatcaatcatctctcactatatattatagtaaaaccctcgaaagggatcacccccacactcctttcccttcccctctccagcccttttctccatccctgtccaattcatctttgctaaatcaggtgtcaccttccctcagcctcgcctatcaagaaagcctcacttcaatgtcatctttgccacttccctcttctttgtccagagagccagcccacagccaatgcttattgatctgttctaagcatcccagctgtctcctcttttctattcctactgtcaatctacaacccataacacgctcttacaatttcatggatcatttaatgcattcttcaagttttgctctgaaatttgtcttttaaaattattctgttggatggacaatgatttgacactcctggcaatattaaaaatatacatttcattatatatttcatataacatatatatttatttatttcccccccatagaaggcaaaatggctttcagcaatggcagttaagtctacacagcctctcaactgctttgacagagacaacctcctctgaaatattaaagttctggtatatttttgaaacagtcatattacatgtcaacgtaactataatgtaaacatcatatcaaaaaacagatgtgacccttttctgctatggtatgaatcatctgtttatgaagtggctgaacaagcagaaacagcccttcatttggaaattcaaatctgaaagtcatagtgctgaattaagtcttcacaaacaacacataaagatccagacattaggactgtataccttttcaatctgtttttgtttattgagttctttctgttgcttctcttttactctctctatttctttttgtttttctgatgccctacgatcctaaagaacagatgaataaaactaatgaattaaatatgaaataactt

SEQ ID NO: 11987 - DNA, 496 bp, Homo sapiens
ctttttaagaaactgttaagccaggcatagtagcttgcacctgtagtctcagctactcaggaggctgaggtgaaaggattactggagcctaggagttcgagtctgcagtgagttatgatcatgccactgcactccaacttgagtgacagagcaaaactctttgtctcaaaaaacagaagaaacttaaatttctttcaaagttgttataccatttacaatctcaccagcagtgtatgagatttccagttcttccacatccttttcaacctttgggcttatcagtcttttactttttactattgttttattttttcccactgcactttcacatctagattatcagtctttttaatttcatgtgtatattggtatcccactgtggttttaatttgcatttccctgatgactaatgatgtttagcatcttttaacatgtcatgttccatctgtgtatctttttactaataaaaataaagtgtcttttgtttgtacatttt

SEQ ID NO: 11988 - DNA, 849 bp, Homo sapiens
atgaaattggatatctaaccaaggacatgtttgataaaattggtctaggcttgttacaacaaaattagtttgtatcttggttattaaacagtatctgggactggtttgggcagaatattaaacttattttgttgccaattattgtttaccgagtataatgttgctatttagcaatgtgcttggttttaaagaaattctccttgggaaaaaagtatcctcttttaattttacttcccataagcgtaaatgcctggacatagctcttgtgcaacctttaaataaattgttttgagtgttttttgagccccagacaaataatgttttaaagttatccccttgctactttactgatacctttatcattcctgagacagtttgctaatttaaaaatgtagcattccatttgtatttatttctctcccttgccaaaaagattttctaatactgcttgtaccagccagagaaagatccaaaacactactcagctctcttgcactgaggaaatttttccccctacattgactcctggcctacatcagccaaacttaaccttggtggggtttggatttgatagccaattagttctgtgctggttgcaaagaattgatatttagatggtttttaatactcagcagattgtcttcctttatattgtgtcttttttatgttgcatgttgcttttgttatcagcctgattttttgctcagtatatgatagttctgctgatgttttgtttattgggcagacatatcttcattaagagtttttggaaaactcatcaaattcgatgaatacattttcttcataacccatttggaattattcctaataaaatgataaaatacgtaa

SEQ ID NO: 11989 - DNA, 2754 bp, Homo sapiens
tatttgccaagattttccagccaaaaaggattatgcatcatgaagcatactgacatttcaaccagacgcacaaaggagatctctcagtggcagcggagtggaaaattgccatgaatgctagttacagggtagaaagactgtattgtataaacagacctttttagtgcattactttttaaagtggatatctgtggtggttccactttaatactgaaacaccgaaaggcatttctatatttttaatcatgttctaaagtgctcttatgagagacttgtgggccatcagtattagtgatttcatactgcagtgctggcattgcagatatttttttaaattggtgctgctttgcccaatcatgttaaaactcagggggatataaaaataacattcacactggctatcttcttaagaacagaaagactgaactgtcctatggttagaaggaattgatgcttatgtagtgccttctgttgtcctacatgtttcacagttcagctgctagtcttgaagcttttccttagcttcattatgatacgtaattttataaggtattctgttgagtgatcattgtttaaaaaaaaagtttcttgctacccattgtgtttattaatagacatgatgggtttttttcagttgtcatatagattttcattattttcccttccattttcaaaatttaatgttaccagtttctccaaagacaagaaggcatctagtattaatgatggaagagtttattttctcttaccctttactaatttaaacattaggctgggtgtggtggctcacgcctgtaatcctagcactttgggaggccaaggtggacaggtcacttaaggtcgagagtccaagaccagcctggccaacatggtgaaaccccgtctctagtaaaaatacaaaaattagccaggcatggtggcacgcgcctgtaatcccagctacttgggaggctgagatgtgagaatcacttgaacctgggaggcggaggttgcagtgagctgagattacacccctggactccagcttgggtgacacagtgagactgtgtctcaacaaaaataaaaaattaaataaatactaatttaaatattattaaatgtttaaactaatgaacttggctgcttttcaaagacattttaattataaatctcataatcagctatttttttaaactgaactattcttatttcaaaggcattcatgagttttttatgtgatacttatttgagtgatgataagattgatttctggcattatttgtttggtagcgttttatttttcccaacattaatgtttcttaaaacacttttcctactattgtttgacatgggaactttcgcctgagtcactgtcatggttagcttttgttgttgttgtttttgtttctgttttgtttaaacaatactaccttgccaaaaatagaagaatgtgatttggtagagtagggttgtttggtttgtgtttgaataagagtatcctacagaagccactttttttttttttgagatggagttttgctcttgttgcccaggctggagtgcaatggcgcaatctcggctgactgcaacctccacctcccgggtgcaagtgattgtcctgcctcagcctcctgagtagctgggattacaggtatgtgccaccacgcctggctaattttgtatttttagtagagatggggtttctccatgttggtcaggctggtctcaaactcccgacctcaggtgatccgcccgcctcggcctcccaaagtgctgggattacaggtgtgagccaccgcacctggccagaagccactaactaaaataggcacacatgacacagcatgtggttaatagctgtgtcttgaattatcctctaaataaccaaatttagttgtatgtatttgtaaaggatatggcttcagaagctatcttttgttctctgtcgatataactcttaagggcattcctgacccaagaaagactccttgcgtttgtaactgtggtctaatacccaaatgtgccctgttcttatggatacagtctcttgaagcatacctcaaagtcatagagagaatatggcatttgaaagaaatcgtttgccttggatcatatgagttattttgtgaaacaacagctgacttttcagaaaaggagcaactacttttatatgctaaaagtatttcataactttctgggaaaccttatttaggtataaatggtcatcttattatttttcaaaaaggtatattttaataattgtacaatttatatacagtttgtgaccagaatttgtaagttgttggtgtcatatcaaggatcttttaaattatgccactacaggatgtatcatttcaagtctattttgcacagctaaacagtagcaaaagatgccaattagcatgataatggtgtcttcatttttactgtatttaactgaaacctaacacatgttgaaaaccatatcatacctagtttatctcttaatttcaaactatgtacttgtaaaaatgatgtaaatttgcactgggaacctgggaaagagtgactgataatttttggtgcgtgatttttagatttgtctttttttttttaagaagaatttgttactatgtaaaccctgacattaaatgttttatctctaccagcatcaggaggaatcactgctttaagggtattatgtaatgcctagtgccttctatttacagtgaaaaagaggttttgtgaaggcatttatggtcattaccaaaaactaaattaaaggccttggatttt

SEQ ID NO: 11990 - DNA, 60 bp, Homo sapiens
acccaagggtctcatcttattaaccatttcttgcctctaaataaaatgtctctaacagat

SEQ ID NO: 11991 - DNA, 2468 bp, Homo sapiens
ggccagctgccgggctcaggccactgcccaccctggcctggacagcctccttcagcccttctgtacctggcagccctgggccccaggccctgggacgtctgtgatgttcccacctgcttctgtagaaatgtgtcaccccagagggcctggctctccctgggaggctggggcccctaagctcctaggttttccttccaagcacccagccctcctgctccaagagggataacctgcacccctccctgcaaggggttcagagcccagcacaggagctttctctggcagaattgaggaggaagaggtggccctctgacttgacaagccttctgttctgcccaggccttcccaccaggaatctccgaggctccccagggccccgcttctccgtacaccccagctcctaggtctcagagaactcccccacctgtggttttacctgcagccagcagagcttagcttcaaggacacctgccttcaaagccactgaggggaggaagggcagggcagactgcagatggccttgttgctggcatcccggccaggtgggcggggactaacaaagacagctgtttagggtcttctcccctcacccatgctttcatcatcccctccgcacagcctccccgtccaggccttctaaccacacctacccagggctgccgcattcctgcactcagaagtctgcagcggtgcctcacaaacttgattgtgcataaaaatcactggggatcttgttaatacagcttctaactcaatagatctgggagatcctgcatttctaacaagctcccaggtaaggcggaggctgctggtgtgaggaccatgctgtgagcagcagggcgagagtgcccagggctgatatatattggaaatatcacccctgaagccatcgctggcccccacctcctgtggactgatgccccagggattcccaccccacttctgcaaccccaggtatccttcattatccaccccatcccagactcccaccccagggattgcccgtgaagactttggcctagcaaattgtgttggttatgtgagtgttgttttaatcagagatgtacatgattgccaatctgcatttcttaccagtgtgaccacactgttacgatgcaattctagccaaaaaaaaaaaaaaaaaaaaaaaaattttttttttttactttttcctagtcttatggaaagcaaatatacaatgattttcagtaggcttctggaatagaaacagtggtttgaagaccccactgccacctttatggactggcccctttgagtctgaatccccggcctctgtcacctgagacccaacccctagctgggccaactccagtgaattcacccatttttcttcttcagaaggcctttcctgtgtgagacccacatattttaaccttttgctcctatcccatttttaaagaattagagaataaaccaggcctgtttcttttcccctgaaatccctgcctctggcttcctaaacccatcatctaaggtgacagagcagtgctggaatagcatctcctttcactttcccaaaactgccacagatagctgccactggcatgctctttgattcctggaagcaaacgtgggactgtcggaggaaagggattgttctggtcttactcataactgggtggtttgagggtgactgaagtcgtgcttttcctgtgtgtgctgccagcacagggctgtaaatgcagatattgcgcctgtgtgcgtgtgtataagtcaagctccaagaggctcctgaatgtgactggcgtgctgagaatgtgtttacgctgtttaatgtctgccaggtgagggttacactgaagatgcacaatccctaaaataaagatcaccacttccccaaagaagcagccctcgggtccatgtgttgttcagacatgtgaagagaagcaagacagagggtctcagatggacgagggctctccaagggaatgcctggggattcacccagtggtccccagaggtgctccatggaggcaacaagtcattccatgaagccccagaggtagaagggacctcaagcaccacgccctccagggcagccgtgcagacgaccttggttcacttttcaggggtcgtcccaactctgtatctccagccactccaactgtggaggctgtaaatccagattttcactgttccagtctcctttgcagcttaggatggctatgtgatcaggtgtggccaatgaaattgaagaggaagtctacctgggcttctgggaaagcttttccaataaaagacacaggcatggctaacacctccctgggcctcttcttcctaccttgattgagggtgtgatgcctggagccacagcagccactttgctaccatgacaaaaaggccaagagaatcacagagtcattgaccctatcattatttcaccaagccaataccagccgccatccttctccagaattcttgtaaataaaataaatccctctttgttt

SEQ ID NO: 11992 - DNA, 403 bp, Homo sapiens
tttggacttgaatatcaagtcgttgaaatttatttgaaatacttgctggcactgcacctggatttgtactgcaagacctgactattcataacggaaaacgatttctaaagcaacagcaggtatttttgtacagggaagtttaaatgtgtttgtgtatggaaaactctccactctcctcccctagatgccatgcttccttttgtctgttacggttgccatgttctttgaataacaaattatataacattttatcctctctcaccacaaggacaaagtatggatgtggcagagtcctcatgaaagatgtatccaaacaagataacttatatgtataaaattaaagcatataatatacatttactgttagtttgttttgataaggaataaaggaatttctaacatg

SEQ ID NO: 11993 - DNA, 87 bp, Homo sapiens
aataaccaacagtattcaagaagcaaccagcaccatcatgtgataatggtactatggcatatatgcaacattaaaattttaaattag

SEQ ID NO: 11994 - DNA, 335 bp, Homo sapiens
ggtggctgtggctcttcctcagccaggggcctgaagaagctcctgcctgacttaggagtcagagcccggcaggggctgaggaggaggagcagggggtgctgcgtggaaggtgctgcaggtccttgcacgctgtgtcgcgcctctcctcctcggaaacagaaccctcccacagcacatcctacccggaagaccagcctcagagggtccttctggaaccagctgtctgtggagagaatggggtgctttcgtcagggactgctgacggctggtcctgaggaaggacaaactgcccagacttgagcccaattaaattttatttttgctggttttgaatg

SEQ ID NO: 11995 - DNA, 450 bp, Homo sapiens
tgcctccttccggggcagagagcaggcactcccagctggagcagaatagcagttcagggtcgcttaaggagtcaccacaacttatgtgttgggtgaccacaaaatcaacagtaactgagagaaacgaattcattttgtaaataatgttcaacgttaagaatacctatattccttttgtagatgagtatgattttgaaactgaagaaattaatacagaggcaagattttaggagtttgaattggttcttgtttgttctcattctacatataattttgtttatttcagataattttatgtaaacaaattaagagttattcattcaaattttttgcagtgttaatctgtaaatgatggcttgatgtacagaaaatgtatttttgcttaaaagatgcctgggtaccttttattttatggcatttgtattaaaaataaagtatgatggtaagaag

SEQ ID NO: 11996 - DNA, 268 bp, Homo sapiens
atgtttttcagatcctgaattccagcaaaagagctattgccaaccagtttgaagaccgccccccgcctctccccaagaggaactgaatcagcatgaaaatgcagtttcttcatctcaccatcctgtattcttcaaccagtgatcccccacctcggtcactccaactcccttaaaatacctagacctaaacggctcagacaggcagatttgaggtttccccctgtctccttattcggcagccttatgattaaacttccttctctgctgc

SEQ ID NO: 11997 - DNA, 394 bp, Homo sapiens
gagctactgccttgcccttccttccctccctgtaccacctgaaaacagatcacacatataaacttatttctaaaattaaaagaaaaaaaaactatagcagagaggctaaaatctatttatcgaaaccagcatatttttggaaagctaaatgtttcctcgatgactggcagcaaactcgtggcccccacctttgtatattcaggaaacttatttaaatccagtgcgccgaaacgtatttaattccaggcctccgcttctcctggggcagccagttttaaccccagcctgtcaccgtgagcgccccagaagagcgcggcgcccctagccatctttatacagccatgtaaatcctcctgtacaagcgaacacggaatatatacatatataactcaat

SEQ ID NO: 11998 - DNA, 1059 bp, Homo sapiens
accatttggtcctagagtctgctgggacagagtcctgtaatcagtgcatgtccttagtctgttagttaaacccattaggaattttctgtcaactaccatgcccatgagatgtttatcaatacaactgccattttagctatgtggtaccaagattagcaaatgaccttcatatccactgatttcctgatgtccatgtctatatgtttacaagcaatatggagcaccattctttaaatactgttcatggagaatacatagtctaaccactaggcgtgtccctgttatcagcaaagatcaatgatgcttcattcatgtactatgtatgcattggtggtaaatggatgtgagggcaagtacatcaagtacattcactctgtttcacgtatgtggatgccagttaattaaatgagtacgtaaataaattaattaaaacacatagatctgctttgtgtttttatttttattttttgaaaaacaaaaggcaagtctccaacaattaacttttgatgctttctgttcccctaaaaccaaaaaatgaaccccttgtgtcgttgttaacccatcctttcatttactcatataattagccaaaaaaaaaaggatggctacataccaatggattgattctcttaattgccacggcaagggggcgatcctatcatgacttaacatcaagcgcgcagttcaaaactactgtcttctgtcaaagttttctcctcttaaatgttattttgcttttacgtctcaactgtgtatgtaaaaaaaatgaatatttaaattacaaccctagactaaaaatgtgtttataataagatgtggatatttccttcagtagattgtaaccataatttaaattattttgttccacactgttttttatatctgtcatgtacattgcattttgatctgtaactgcacaaccctggggtttgctgcagagctatttctttccatgtaaagtagtggatccatcttgcttttgccttatataaagcctacagttatggaagtgtggaaaactgtggcttctcaataaatattcagatgtcctaagaatat

SEQ ID NO: 11999 - DNA, 261 bp, Homo sapiens
acaggctaattgcccaccactcccaggaatattgaaatagctacatgaccataatgtgtttaaaatgtggtatgctcttgagatatttaaagttttggcagtaaaatactctgtttttaagtatgaatgtatttcattcatatttcctctcacaaaggaaaatgacttcagtatagatttgtttttattaaaatgcattttttattcttaagtggtaggaagcaacatccaaaaatgcttaataaaatgcttttaagctgc

SEQ ID NO: 12000 - DNA, 113 bp, Homo sapiens
agccatgtaactaacaaaggatttgctttagagataattatttggaatttttatagcttacttcacaatgtgcccaggtcagctgtataaaataaatactgcattgttgtttc

SEQ ID NO: 12001 - DNA, 5178 bp, Homo sapiens
tatgattgggatcagggaatgggagaagatgggagctaagaatgtaaagtcagaaacttgcactgttttaaatgttaaagcgcttttgggggtggcttatgggggagaaaagggaaaatgctgtcagtagatggaggcaaggttacaggttgactcaataggtagtcacagttcttggcatgttgaatattatttgcacatttcactttggaaacacagtagactctatcgaggccaggcttggtcacttccttcccatcagttctgtgttgagttgccatctctcaagatggtaaattgtttcctgctcgcttttatcctctctggttctcttacttttaggacccttttttcagtaagtaatttgtttattagccaggacccaagactaagttatttacatgtccattgtaaatgcaatgtaaatgagagttctgataaaatatttttgtattttgtaatatcaaaggaatttctatatcgtaggactcagtggggacttgcatgcacatccaccattgtctctgagtagtattgaaatgtggcccggtaccaccttttttttttttttttttttttctatacaaatttgttacatgtcagtgagacctttttcaaaggaacatattcaatttggctttttgtggctgaaaaaacataactgttagacccaaagcattttatgctccgttccatcttaaggagccatccttaagtctgctcccaccctcagtagaatttattttctacaaagtggtagtaatttttttttaaattgcaaatgtaatttttgccaattagagaaaccaaccggtgtcagtaaaattctgtgagaaatgccatccctgctgggaatgttgaagttacttaatgttgatctatcccttggggaaagtaaaagtgactgtgagtggtgccattgtgtgatgtcagcatgacgttgttttgaatgtggcattatgttctggtgctcatgtttcctggattgtattatctgctttcctttaccaaggcagacagaactgctgccttagcctgacaaccggttgtcctcaaagcaaatgaacttaagcatttgggattgagggacagaaggattctgagggggctctgcgagggacggtgtgtgacatgtcatgcctggagaaggaacaaggctatttgaaaacagaaggcaggtcaagggtagaagttaaaggagaatctgaaggcaggtcagggaaaagaagaactggaaatgaaacagaggacaggtgacaaccacctcgaagagctcccagagattgtagaaagagtccagtgtaaccagcttagtaaccagagtatctggattacccaggaaggttgagctgctgagatttcagtggtgcaatgtctttaaaaaaacaggctttgttgggagggtatttccattttgaactttgaggactgttggtcagaaaatgggctcaaaagtgagtttgcttaatgaagacatttaacggttgtgctgtttatagtaaaataaaactccctaccttgcttcagttaaaaatgaagcacttggtttcttccatcctcctcctccccttaatggattgtggcagttgaaataatccatcggatgacccacctgtagtgagatgtactgtcgatgtagtgcccggtgtatctcagtggccatctgccatggtgaggtgagcgtgatctcttttcagtatagtagttaacattttctagtattttttatggagagaatgtcaaaagtggcatttcagaccccgtcccagatgggtctgaggaaaggaaggctgtaaaggacatggtaatggcactccattcgggatgtattaaaataatttgcttttcaggtattaatatgacatttgtcattgtcactgatttttttaaaaaagcaatgcacatgttggttgtggctgttttccgcatgctatcttcatatctaaatgcttcattaattatccgagcctccggagaattaactctattacgtttgtatagtaagtttgtaaactgcttggcaaactgattaagaaataatttgcaataccgtgctactaaagtggcaggtttctggtagaaattgtgcgagtccaatttggagttttaagttccttgattgatgaaactaaaaaggcaattttggaaaaagagagggggaaaagtagatcacttatcttagcaaacggttgaaaatatgtctgtcctctgtggccccaaatccagtgaaagaaattctcccagtaaaagttgcttcctaactctgtttttctcagaatacctcttacctttctcaaagaaagcttcaaccaccatcatcagaaagaaggtggcctaaaaactgacacatggccagtgcccggaggggtctggaggcataagtctagatgcccagagagcatccaggcactgaactgctcagagcttgagatgaaatgacatacaagcttcagggtaaaactgtctactagcaagattacctccctcaattctaccattgcagatttcttctgaccccaaatgcaaccttacagagaatgctgaatgaggaaggccaattccttacaatgatggcagaacccccaagcgaatgccctattgaggagaaggacatcactgtatttggaattctgcctgctagtgatagctcacacatcacatcccagaatcccactcccaatgcattatttcctgaggcaagaacttaaggtcctcacctaattcctccatcacaaccattaactcttattggacaagctcctcctgtgagtagggcctgtactcacttcctcttagatcataattccatcttcaagagactgatttccagaatagtaatctttttccagcgttctctcttctccaatgccctggttgttatttttcccacctctcctaatattgatcttcttgtcttttggttagaactgcaacttcggagttgagttcatttcctattgctgctcaattcagtagcaacatagctggcttgttcccagacccaggaagtataagtcattgacagtttcctgagtggctctgccaatccataccacccttggtactgtgaaaaggcttcttggcagccaggtggcattgaggatggtattcagggcgctttccttctgtcatatagttgtgggatctctaccaagtgtgaaggtgaatgaggtaagggagatcagaaccatgcttcctggtttttcatacatccaaggaagaagtcctggtgtgggttgtttgacaccttctttccactttcaccttttattttttattccttcctttctacccccaaccagtcgagcaaatgagcaattttgtgtttctaatacaggatctggaagtagtgctttctaatcctcatttcctgtaggatgttcctgcactataacaagattatgttttcttccttctgcagcagctttctgcttcttgggtactactagctattgttcaattcaggtgaggcctgtgatgacatatatgtagcatgtgctctgcgctccctgcaagctgagcagatacaaccaatgcatcactgtatactcttgctgagaatgtggatgcagcctcacagatctttgcaacactccaaccagccaggaccagttgatcagaactgatcttattggtctgataaccaatcttatttgtgaactgattcatatctgtctttccactcttggttctcttgccgtagaacaaaaacagtttaggaagcataattacgaacatttaggaaccaatatgtataagtaattcggagactccaattcacctgcccctcccccatcccaggttgtggaggctcgaggaagctgacttcttaggctaaaggacaaaaaaatctctttacctccttggccattttcatgttctctgccaattactataggcagtcttcattttgcagaggtgaggtaagacttcatcttattcttcatgtaatcccaccttctaacaaaaaataaataaatatttaaattccaaggagaagtgttctttgtgtatttctagcagaaaacagatgcttaagcctaagaaggaagatccgtccatgacaaaggaaagtggaaaactgaaccagttatctgaatacttcatgccaggacagttgctattagcaactgttttgcaccttcagggctttaaaatgggctctgcagacagcatttgcatatgcaagactcagtagccaagcctccactgccaattgttgaaggcagtttcagatcgccaccttttgaggtacatttctttaagcacaagagaagtagaaatggcctttgccttgtctccagtggtttgtccctctggtgcctcagcagataccagagcttattcttatgaccatttggaagtagtcctcaaagtaaagatcaagaaaaaattggattctttttccattttctcataatagtagcctagtcaacacaagactcccataaaatatgactcactattgggagccatactattttataagcttacttcctgctgacaaaactagctttcctcaaggaaatataaaggaggggaaagtcacatagtgttaggaaaacattcctgtgttttgaatacgatgaatccataggatagagaaaaatctgcttgttctattctgagagttctctgagatatcccttcactctgcttggcatttggccattgatattcaacaggtcactgaccaagcttttctaaatttttcagagagagttacttaccagtaaggtctgttcttaaacctacctagttgattttcatatctttccataaagtgtcatgattctgtcatagaccctgacttaacattgtaaggactatgagtcctccattttttaattaatttttttttagcaaattaggacttcggcaggttttcctctcctaaactcattctttcctccacaggattgctttgtccatctcctgctttcatttcaagtgcataaacaaaacctcaaagggcctgggaaggtgaggcaggccagagtctgtgttctgtgttgagtgtcaagctatttgttaagaaggtctgcaacaggcctttggtgtgggctctgccagagactgttctgaacactttgcttgagatccgtgccctgtaaaatggatatgatgttttactgatgtctgtaatacatttgtaaacttccaataaaatttgaataa

SEQ ID NO: 12002 - DNA, 1465 bp, Homo sapiens
gtgctttgaagaggaagccattatggatggatgaaggatagtaatgcaatacctccaccttaatttgggtgcatgtgtatgtgtgtgtgtgtttgtgtgtgacttgtatgcttgtgtgtgtaaatgtgtgtacatatacatatatacatatctacacatacatatatacacatatatgtgtgtatgtagatatgtagactatcctaatgatgtaaagtttaatatttatgtttgaaattatttattgtgatgtaatatttttgtacgtaaaatgattctattatgactgcctttgcatgtagtaatatgacaaagtgatccttcattatcacggtacactattgtttacttttcatctgtaaatgttttattgttacttttttaaaatgaatttttttaaaacaatctagccatcatcaaggtgctataagagttgtataaaagatatttttggcatttctaggcaagtatcagccaataagtatgttagtgatatcacagattgtaccaactattaactatgttaaataagtattcagtttcatgtgatctctgggaaaaaaatatgctgccttggtgctaatattgtatgtatttaaatgatcatccgactcagaaatataaacacttttaatgaaagggaggaacggaaggacaatttccagtgcacagaatcacttggatgaaataagaccagctctttacccttatttttggatatgccttttttggaagagacttagactttatccttattgttgttagtgttgttaatattcgttgcttcagcccacggtgccttggtctctccacaatcaaatggaggatcccccaagcagcttcattacagagtgatattgggaaagtgagatcctctcaccattttgccaagatactctaaaatgacatccaagtttaccagtagaaagacacaggatgcacagaatgggcatgaccttcagctcacgagcacacctggagaaattcagaaccaggttctgaatcatcacgattgccttttgcatgaaaacatcggctggtgatgtgacttctcttcaggccatgagcctaacaccctgccggttttcatgcccgctgcagtaatggacgtttgtgtgaagaaatgaactgtggagtacaaaatgctttgagtctttccgattgctcattaattcacttttttgttacttctttccaaaatggaagtgctgaagccatggtctttctgcccctccaagctgatgaagggaagcctttgccaatggcccatggaagacacttggtttgagaaaccctgcccacttccaaagaccaaagagattaggaaaagcctggcagtattctccaactccaaacaagctctagagtgctccaggaaaagttatattcagtatatgaataagtgttattctccattattaatgtgttctgaaaatatattatgaataaatacatcaccacaccc

SEQ ID NO: 12003 - DNA, 2844 bp, Homo sapiens
gggccgggcccgaccgccggcagcatccgtcattggagtccagttacccacccgatcttcacaaatcatcaccacatggggaaaagcgggcacacgcaagggatccgaaaggcagcagagagtatagcagacaacccaatgaacaccacacctggaatgggacttcgaggaaacccgacagcggggcatgccgacccaaggaccgggcgccggagggacggagggacgcgcaggccgagcgcgcggcagccgccaacggccccaagaggcggtccccagagaagcggagggagggcacccgcagcgccgacaacactttggagaggagggagaagcacgagaagagacgagacgtctctccggagcggaggcgagagcggtcacccacccgcaggagagacggctcccccagccggcggagacggtctctggagagactcctggagcagaggaggtcccccgagcgcaggagagggggctcgcccgagcgcagggccaagtccaccgaccggaggcgcgcacgctcccccgagcgcaggagagagcggtccctggacaaaaggaacagagaggacagagccagccaccgagaaagggaagaggcgaatctgaaacaggatgccggcagaagttccagacatcccccggagcagagaaggcgaccttacaaagaatgtagcaccgacctcagtatctgagacgctgagtcacattccaacctttaccgtgtcaaaggttctaagaggaaagtcacaaacctgaaattatttagtttcttacctaatgaagcatctgacacctgatgatcctatgaataacaacaaacattttatgcatttgaaatcttataagaaaaaatatatatgaaaagtattgtgcctgatgtatcatattaaagaaagtatttttaaatgcatacttttttggaaattatttgccaaatgctggcccaaagggatataaattttgtttctacgtaacctgtagaatcgtcaagaattgttcccgttttggggcaatctttttctctcctggttaaatggggctgttgatcattttctctacgtaagggaatttattgattaagtttaattaatttgatatagactgtcatgtagtgatgtagtgctatactgtagtcggaagtttttcttaaaagcaaagagcaaaaatgcaaagttttatttgtaaaagctgaggacccttggggatggattaggtttgccgatgatcctaaaagtaagcaaactgtatgacaagactactattgcaaatgaaggatatttatagctaaactgcgcagcacaaagaagttttatattgtgagttatagttggttcagaaaacagtttgtactctccctggcccaggaaggcacacagacaaaaatgtcggccacttttactcaaatacagcccaagcacagacagtcaggttcgtgatcatcaccaacatctgataaaatctcattgaaggcaatgccatcacagctttgctcaattactacgaggaagagacaacaagcatctttcgtgttgtctcgtctgattggaggctgaatagtagatggaatggggggacagtgtgcctggtgtgaggaagacgtaagatccccaatttggaaagcatgcccccctcccttttagtagaagcccatggttgccctttgccaaactggggaggaggcaatgagccttggtggaaggaacctctctgttgatatttaaagaagtgagggctgtgggtattcattgttagaaatgccaatttcactttgaaaccatagtccaagtctctaggttggtagaagggaaaggaaggaagtggtcccagtgattctaggtctggttgggaaacttctgcctcatgactctgtcctttgagtcctttggacagcagcacaaaacataacaatttttatttttaaacagacccattctttttgatcccacaggagctgtggttgggtcggccgtagccccgggatgtggtttaagtggattactgcctagctgagccaaaatgtttgcttgtacctgttggaccactacagcaaaccgctgcttacagtgcattgtgtatttctgtagtactgttttgcattttccatagagacagaaaactttgcaagtcaatcactgttgttcccatggtactgtaagaaaaaaaaaaaggaaaaagaaaaaaaaaaagaaaaccagccaatcattgcgtgtacagagctaaaaattgtaattaatagagcctgttgggaaaaaaaagaaaacaactgttgcctttttttcttgtataaaagagaatttatgacaaaatttagctgtgaggaatgtgatacgtgtttatatttctgaatatggaacaaattgattcatggggatatattttaatgtaaactaaatcaggtatgtaaagttgttttaaaatgggagactatataagtaattctctaaagctttagttggtttgaatatcatcatttcctccatggtgagcctgcttgtgaattattaagcacttgtttgcattctctgttcttcactcatttatttcttgcagtgtgctatggacttaatgctctttctgtattgatgaaaagcagtatgtgggccaatctttttataaaacactatgcatatataaatattacattgttcatagctttatttgacttatgggtttatacataacattagaatgagtagctgtagttgtgtggacatttataaaacaagttcctttcctggaacagacacaatatacattctgtagctaaaaaggagggaaaagtctgtgaatgctatttttattattaaagttttccatacaaagcatacattgagctgt

SEQ ID NO: 12004 - DNA, 1878 bp, Homo sapiens
atttgtctccagaacggcagcaggaaagtcttttttgtttcccctattcaccagtgtcttaccagcctctcgcaccatgtgattatttgcctcgcttgttctgaaatctctacacatttcatccttttgcttgcttacgtggactggggcatggcctaagacaagatctttatagccccctttctgataatcagagagaacgttttgtctagtccgaccaagagcgaaggaatgtttgtttgtactgtgccaaactgttcctcagatccaattgttagcacaaaatgactatatactccttttaagaagcaggaaagcaggtttcctgagtgatatgttgaggcacaattattttttcctttttggttacttggtgtctttatttaagaggcatgaaattttgagagatttgggggctttgctaacctcccttatgctctgtatacaacacttctccatcccccaactggtgtcttaccccaaatcagaccatctgagcccactactatcaaacaaacaaacaaaaactgttaatatattagccataatgtttttaaatgataaaggatgaaataaattcccagtgctcatcatgagggaaacatgtgactatacctttcctatgaggaaagccaggttatacatagagttcctttgtcatatctttagacttgatttgagtagacagcaatgatctttacatagcttagtgttctgatggcaaaatattgtatatgataataattatgtcctatttatttgagatttgtgtttaaaattaaaaaaaaaaaaaaaaagaagaagctatgccctagatgtagggctttttttcccaaccaaaggtctaccaaagtttctatagaaactgtgattgaatggtccccagatacgttggtcccctttattagggatttatctattatcaccctcttttctgaaagtcattctgcacaattctcagttgcattttggacttgatgagatgtttaattcagatgcagctcaaggagaaggatagctccttggagggccagccttcccaggtgttcgacatttgtacaggtgcaaaatacgaggggtccgaggtacagggggagggtgggtattagacaaggcccctatagacatggccaaccacaggggaagtattttgacaacattaagatgccgtggctgtgcactgtactgaacttctgaccattaggtgtattgataccactgaaactgtgtaacattgtctcccttttctgtcttccctatgcttctgttggatgtgatatttcatttgagagtcatcgtcagtaacctgtgtaccttctcaaaacctatgtctgttgcactgaggatgaaaatccaacactaacaaatgttctttgggctaaaaataaagatcatttaaatacatggttttccaagaagggttgaacctgccacagggttgtgctactgtaatgtctccatgcgtcacttggactaaatctctctaattccattgattagagtcacaaatgggttataatatgttaagttccaatatttttctgacttgattggaacctgcttctctgtgaggctatttttgtaatgagttttttgtacttaatttaactgccgcggtctttggtgggggtgggaagggattttgttcttttgttgtttattgttaatgctctcctatgccagcctgtcattgttccagttgtttgaaaaaacaaaacaaaacaaaacaaaaaaggatgcattcgttgtctgggttctcgagtcaccttatggctgtctaaaaatgtcactgttccgattgcggtctctgcagccttatttgagtgttgccttagactgtctgactggacaaataaactctctttgccctatgttaac

SEQ ID NO: 12005 - DNA, 1465 bp, Homo sapiens
gttttgtctacctcagttcttgtcataccaatctctacgggaaagagaggtaggagaggctgcgaggaagcttgggttcaagcgtcactcatctgtacatagttgtaactcccatgtggagtatcagtcgctcacaggacttggatctgaagcacagtaaacgcaagaggggatttgtgtacaaaaggcaaaaaaagtatttgatatcattgtacataagagttttcagagatttcatatatatcttttacagaggctattttaatctttagtgcatggttaacagaaaaaaattatacaattttgacaatattatttttcgtatcaggttgctgtttaattttggagggggtggggaaatagttctggtgccttaacgcatggctggaatttatagaggctacaaccacatttgttcacaggagtttttggtgcggggtgggaaggatggaaggccttggatttatattgcacttcatagacccctaggctgctgtgcggtgggactccacatgcgccggaaggagcttcaggtgagcactgctcatgtgtggatgcccctgcaacaggcttccctgtctgtagagccaggggtgcaagtgccatccacacttgcagtgaatggcttttccttttaggtttaagtcctgtctgtctgtaaggcgtagaatctgtccgtctgtaaggcgtagaatgagggttgttaatccatcacaagcaaaaggtcagaacagttaaacactgcctttcctcctcctcttattttatgataaaagcaaatgtggccttctcagtatcattcgattgctatttgagacttttaaattaaggtaaaggctgctggtgttggtacctgtggatttttctatactgatgttttcgttttgccaatataatgagtattacattggccttgggggacagaaaggaggaagttctgacttttcagggctaccttatttctactaaggacccagagcaggcctgtccatgccattccttcgcacagatgaaactgagctgggactggaaaggacagcccttgacctgggttctgggtataatttgcacttttgagactggtagctaaccatcttatgagtgccaatgtgtcatttagtaaaacttaaatagaaacaaggtccttcaaatgttcctttggccaaaagctgaagggagttactgagaaaatagttaacaattactgtcaggtgtcatcactgttcaaaaggtaagcacatttagaattttgttcttgacagttaactgactaatcttacttccacaaaatatgtgaatttgctgcttctgagaggcaatgtgaaagagggagtattacttttatgtacaaagttatttatttatagaaattttggtacagtgtacattgaaaaccatgtaaaatattgaagtgtctaacaaatggcattgaagtgtctttaataaaggttcatttataaatgtc

SEQ ID NO: 12006 - DNA, 1022 bp, Homo sapiens
tgtctttgtcctgatccaatggagaaagaaagccatttttccgtaaaaagggatggttcatcattgtgaaagaaatggttatctcattggggaagaaaaggggagggggaaggcaagaatcactgaaaaatcttaaatctgtgttttctggaataagatatctagacagcctaaatctgattttggtctttataaaaataatatcttgtgttctcatacttttctgtcactgtaagcctgcccagtaggcagtgttttgcagactttggggagtggtctatgtggccaaatattgtgtgtatagacagaatttgaaatcaagtcctgcttcatttacaagaattttggtgggcatctaatcctacataatgaaaaagaaaaacagaccatttaaaaactcagacaagattatatttaatatattaattactaaaaaggcataagattacactgaacatattagctactaaaaaggcactgctaagacattcaagcaaatagctattacacactactgcagattttacaggtttctaattctaacatatgtttgaaaaatccgtgagtattccaaaatatatttaataatggaatatctgcattaatataccatccatgtgtttttaccatttgccttaatattgaatatactgtttacctcacactaaaaagaaaaccagaagccttatttgtgattttgggagtggaagcttccatttttgtgtcaaaaatgaatcctgattcttatggaaatctctgttattaagatatttcaagatgagacaacactgaagatcaaattgtgtttagtatcactatcttctctcctcgtttctctcttactcctcatcctcccagaatctaccagtttatggtagaaagatgggaaccttatttgaatgtgttttttttttccatgatgtccaattttgttgtgggaaaggatttggataaaatttttgtttaaattttggtagatttttatctatacaaatttaaataaaattatgttttgtaagctg

SEQ ID NO: 12007 - DNA, 1376 bp, Homo sapiens
cgaagagagaggtgtgcttcaatcctggaggggcagcaggaggcggagctcttttgcttggattcccatcatggcccctttgcagaaaattgtctaggatttcagcaacttcatatttgtatatgtgagctgtgagaggtggcattcacttaactggcccagccctctctgcttcgtgattttatttcattgaattataaccacaagccaccacccatttgacatcctctctggattcccaaggagcatacctccaaaatccgagaagagcaaatcagagtcttcaaaatggatcaccactaagggcatgttcattcttcactttctttctgcttttacaaaagaacttggatgtatgttccaaagggtcctcattctgttcctcttttgaacttttccttttgtccttgtattaaagtggttttaaaggggtctaaaaagattttggcaaaacatatttgcagatgtagattagctggtgaagaaaattactgctagagatcaactgattaactggtaaagaacgtttattttataacccttgaagaatagaaggacatagttggattattgtgtgtgcattgtatttttacttctattttttttttgctttccattttccagttagcagagataaaatgagagcgttttaacttcaatgtaccattttactgagtgctaaggaagcatatcaattccaatattttataaccaaagctctatcagaacatatttataaaacttgttggaatttttacggcttttgtgtagtcatgtaggtaaatcatttaaaatataaaacaatctcaatttagatcaagggttatttcttagatcaaatttatgccaattatatgaaaagattttaactccgagacaggagtctttcagtgctgaatttttagactgtaaatgagttcttcttaacttagctgtttccctacttctgtgacttctgtgttagccatcttatttctttaaaatctgagtcctgattggcttaatgattttgcagcagacatgtctccacatattctcaaatgctgtcatgcggaaacgtatgaaacagatgaagaatgactgacccagattttagatgtataatgttgttaaagtacatactactgtaaaaatatgggatgaattttatatattaagaaatgccaaaaacatagtttctgcaccaagttaattatccctgtcctttcacatttatagggggaaaataaatactttaatgttgtttatagcctaacagttatttgattttattcttgcagagggaatggaaaggaatggaaagatttgttggcgtaatttttgaatatttgttatgatcatatgaataagtaaaaaaattcatcctgctgatggca

SEQ ID NO: 12008 - DNA, 2400 bp, Homo sapiens
atatgctgagtctgtttgcaaaaagagagtgtttaaacactccaacacccagacttagaattaaatcagtaaagcaatctgttatttcctatccccgaattaccttttctatgccaaaacataccttcaggatattgttatgtgttgtatagatgttaagtgtttcatgtggtttttgtgtcattgctatttatcaatagcaataattttgcactgaaaactttttatagttcaaaaattaagcatggactccccagtatactttaactttctttctttctttttttttttttggagacagagtctcactgtcacccaggctggagtgcagtggcatgatctcagtttatgcaacttctgcctccccaggttcaagcgattcttttgcctcagccacctgactagctgggattgcagcctgcaccaccacacctggctaaatttttgttgttgtcgttgagatacagtttcactctgtcacccaggctggagtgcagtggcatgatctcagctcactgcaacctctgccttctggattcaagtgattcttgtgccttagcctcccaagtagctgggattacaggcgtgcaccaccacgcccagttgatttttgtatttttgatagagacggagtttcaccatgttggccaggctggtctcgaactctgggttcaagaaatcctcccaccttgcctcccaaagtgctgggattacaggtgtgagccaccacgcatggccctgaactttctctttttaggaataccaaagttttcaactttttcagctttagaatttgtaaatatttttgtagaatatcatatgactgtaattccagagtgttccaacttgtttatgatatatttgggtaaatttacaactgttcttttatttgccataatctggttataacactgtttgtggtaggaaaggaaaacatgcaaaacatacacacacacacacacacacacacacacacgcagagttgtgattctcagtaccaagctataggaccatgttatagatcagcgtttagtcacctccaggttatatgcatcgagaacctgaataaatcatgccactatattaatttatattacatgtttcatatttaaatcatgttttcctaaaatgtagcaactacatgtgataaaagcaaattagaacattctgtaggactgtcttgcataccttctgtctggtttccactgattccttcttagccatggagagcatttgtgattaattaatttatatatgaaataatggtttccattttatgcgagtatttgtaactgcatataccagtgcgtgtgcgtctacctctgtcagcatgaaagtattccagtctttaatttcaaaaacttcaaattagcctcatgaagagaatttttccctgtgaaaagtaagaccaagaaaaaacaaactaaagacatgtgacttattcaatgaaagtgaaaaagaagctctaaaacagtgtcattgattaaaaagaatatctggaatgtagccccactctttgagtgggattcatttcttactgcttatgaactttcaatttagtagtcagaaaccatggatttattttactgcacaatgtgaagtttacattttattaacacttgagtagtctgatttagagactagttacttctattttttaaaataatggagtaacaaattacagaatagctaaataattttttaaaaatattttacagttgtaaaaaatatccatcagaaaaatgacacacaaaacaaaatatctggacctttacagaagacgtttgctgacccccactttaaaggattggaacagtcttctagaattgaggaatatttattaaaatacctgtaaagaaaatagtgaatcactgtagcaatggctttgattcagaccttaaaatcacataagaagaattacaacatgttatggatttttaagtggcaggtattgtaactgttttttgtgtgcaaaatactgagtaaccactgggaaaatatttcagatgaaagggatgacaaaagcatgttgcgctttgcatcagcaaggcattgacttctgaaaaaatgatctgaaaaaagtttcaccgtttgtcttcttacctcattttaagaagcatgtgaaaatgggatactatagactactgagaatttcagaaattgagaacaatttcataataaaacggctatatttgaagagagaatacattttatataaacaggaaaatacatttgacactttatggaattttatgagactttttgtgggaacagaaggtcttcaaattgtaaaatgtaaagattgctctttttattaagtctttaacagggatgtatttcattgtatgttttgggtatggctttggaataaatcattttatattttatttgaatatcaga

SEQ ID NO: 12009 - DNA, 3348 bp, Homo sapiens
cttgtgaaaattgaattcccatcaaactgaatgtaagcatttaatatctaaacatttaatgtggacttccaataaattcttttatagaattagaaagtgggatttactgtagagtgtaaaaatttttttaaaattgttttacactatgtagtaatatttacagttaaattattttgtgcaatatttgaactttatttttgaaactattctttaaagatttattttttaaagcattcattttttttccttgaatagcacagagatttattactttatcctcatataaatatggctagagaagaagaatggtgttcatatatgtattgtagatatacaactagttgtatctataatttgtaagtgtttatatatatattaagaacatttgaagagtaatgttaacatactgaaactttgaaatctttcacatttaaaatttcaacatatcttaattactgctcatgaaaatgtacattaagtgttaaagtaaaaaattattaaatctgtggctattaaattttaaactaatttttttcctttaaaagtaagagtcacactgacactgtctgaaatttaaagagtgaatgatttaaacttaaaaaaaattttgatctgaaaatttatttcacccagctttcacaattaagtctgtataaaatgtggtaccttttggtacctatccagagaaacctgtacatattcaatgttatctagatgtgattggataatggagaaaatttatttataatgattttgcaatggcatcaataacatttaaatgattttgaagaagtattattttactaccctataaaatgaatcgaaaataataaagttcttaacataatttactctttaaaaattacctgttcatattttgtaaacccatatttttagcacattaaaaatgaatgtttgatattacagaatattcataacaaaatggaagaattataggaattaacttgaatttggcatttttaattttgtgatttatcattttattttttcttgaaatttcaaacacaaggaaagcatagaatagcttttaaaagtagctatgccttcttccaaatgttattttattcaaaaaggtaaccaggttgtgttttaaacctgtgaaatattgtgatgcattttattactgaaagttatttaactgcctttacttgcacataaaaactctcatttacggccaggtgctgtggctcatgcctgtaatcccagcactttgggaggccaaggcgggcatatcacctgatgtcaggagttcaagaccagcatggccagcagtttggtgaaaccccatctctactaaaaatacaaaaattagcctggcgtggtggtgtgcgcctgtaatcctagctactcgggaggctgaggcaggagcattgcttgaacctgggaggtggaggttacaatgagccaagattgtgccactgcactccagcatgggtgacagagaaagactccgtctcaaaaaaaaaaaaacaaactcttatttaatttttagttaaaattaaaacactagtacttcagaatatagatacaagtacaccatcttgaagaatttggagtttttcagggcaattcaaatgacctcattttttgttctttttgtattccagacagtgtttctgtcattggatctctgattggtagtgttaataaatattctttcagtgtgagccagattcataaaattaattttcttcattttagtagtaaaaagtagtctaatagctttttgtcagcttgatttttttgtgtgtgtaatattcaagggcagaatgacaggacagataagcaataagaaatgtatagaattagaaaatatagtagttccctcttacccatgggacatacgttccaagacccccagtgaacgtctgaaaccatggatagtatagacacctctatacactgttttttcctatacatatatacctatgataaagttctatttataaatcagggacagcaagagataaacaataactgcaaatagaacaattataacagtgcactgtaataaaagtgatgtaaatgtgatatgtctgtctctttctctcaaaatatcttattgtactgtactcacctgtaatcagactgtggttgaccgtgagtaaccgaaaccacagaaagcaaaatcgtggataaggggagactactctatatgaaacttaagttacaaaattctctgaagcatttgaaactagacgttttggaattataaaatagtccctttaaaatatccactagtagaaaaaaacttcatttgcagagaaaagattgcaataaaactcattcctaaacttttcaattttataaaattaaacattctttttttatccgtattaacaatttctagttacatagtttctagttacatattaccatatattactctttatctacaaataaatagctgatactcaaactgatcatattttgattgttaaacacttggatctctcaatacttctgtaagttaaagtgaacttaaacagtttcttgaaaaactccagtaggtggcagaatacctattgaatattcgttgctatactttgctgtttgtcattaaaacatctctacccatattcttgcaaaataatatttatattttaatggataggaaaatgatttgcaattagatgtttccattcttgaaagaaaaaagctgcaaataacattttcaagaatataaaaaaatgagtaaacaaagggaaggttgtttggtcatttatagacaattaagcacagactgtagatgtccttccaattcttgggaggctaaactgagtctaccatttcttacatttcttttacctattttttgagaattgccagttgtacagtgtttagcatgtggaatgtaccaaatatatctatgttgtgacttaagatattctaaatgtggataacttctgacctaggaaacatgaagtttgtagtgaagtaagtgaaaagaatgttcaggaaattttttttctccatctcttcagttggcatttattgagagttttatttgaatgcttattaaaagtatatgatttataatatttagaaaatagaagaaaaaagaaaactgtagatgttttatcttgttttaatactgtatgtttagtacgtatacatttatgttctagtgtatcaaaatttttcattttcattaaagtgaatccaattttccatattctaggtccattttaaaccatgaaaactttaatcacatattttgtaaagggctgaaagtatgatttaaactacagattgatatattttaattctaaatgaaaggtaatgtaaataagcatggatctgattgaataaagattttaaaatagt

SEQ ID NO: 12010 - DNA, 706 bp, Homo sapiens
ggaaaatctccacataatagaaaactcatggaaataatatactttgtggatgctaagaagttgaatcgatgtcatttttagcaatagtgttgccacgatttgtctttttttatataatgaaccactcttttttaactttgtaaccttcccttgaagacagaattttggtgttggtgcttgtaagcattttcattaataatatgagaaatgatacctggagagagagattatgagcaaatgtattgcttcttttagaggaggaagcatacaacctcttttgtgtgaattttgttattatggtcaaagaatgcattcctaagttttcatttgagtacccaaatacacaaaaggtgtccctttaaggaaaataaagaattaagttttaaataacattacattttacaatctgacatctggagtatattgaacataggctatttcttgatataacactcatttaattgtggccatccaaatgaatattattgcagaatttatcttgttcataatgatttgtaaatggtgttatagctgaatacctgtgcatgaaaatgggcaatattttcatctgtttacttgtagtgccatagaggccaatatgcacaatattaactaatgccaagacatggctgtttaaaaaatttaatgttcaaacagttatcactgatgcttttgcactatttattaataaaatcatatattgtgt

SEQ ID NO: 12011 - DNA, 2206 bp, Homo sapiens
gaggcaacagagccatctagaagaacaagaaatggaaatagtgactcttggattacagcatggagactatgtcagcagcaatactttaggatccacgtggcagaactggaaacaatgctaccatctgataagggtatttgtaaaaggcagaatgtttgggccatgaagaagtaggggctgaagaggaaggtggaaggagataaaatataatatttagaggcaatattttctacttgcaatcaatttgagtgactcaggtgaaatttagagtcatatttcccgaagcagaagttaaagaaaattttttaaacatttgctttattattgttttcttctggtaaataataaatataacagaagtgttaactattgtattcccatttttttctccttccatctcttctgcggtaattcatcacatagtatcttaaagggaacaaataatgtttcatcctatggaaatgtgaaggatgaattgagctcctggcccttctgatgctttgaaatggaaggattgttccttagagcttctctgcagaatcagtggagattttcagtttcccaccctgcctggctttctctcttggtgactcccttggtgttttggagtattctttctataggggtacctgtgaggggcagaacacgtaagccacagaacatggtgaaaactaagtgtcactaggaaaagtaatgggaaagtaaaccctgcatatatgaaaacttcctggcagcaagttttcatatatagagggacaatgggagacagcatgctgtttttatagaaaagaagttttacataatatagttattgacaagcttttggttttggctaaatacacacacacacacacacgctcatatgtgtttactctgtaagtctaatttgattttatcactctcaaacatattttaaaggaaacttgcttacaggaaggattaaacttgaactacttatcctattctttaaggcactccattgcctggccccaatttactaatcctgtcttatttcccacaaatcctttatactctactcgatgaaacatccttgtgcacacccttgtgcctttgctcgcattaatccttccaagagacttccctcctgttctccattaatgaacgtcctacccagtcttcaactcccgggtcagatcctgtgtcctccataaaaaattttccagacaactccaatctgtccttcttccaagttcctagaggccttaattattcattctagccactaggtgcatagaatttgagatttttgtaataatagaagtagtgtgaaccctagaaattagaaaatcaagctttgggccaggtgcggtggctcatgcctgtaatcccagcactatgggaggccagggagggaggatctccagaggtcaggagttcgagaccagcctggccaacatggtgaaaccccgtctctattaaaaatacaaaaattagctgggcatgatggcaggcacctgtaatcccagctactcgggaggctgaggcaggagaattgcttgaactggggaggcagaggttgcagtgagacaagatcacgtcactgtactccagcctgggtgacagagtgatactccatctcaaaaaaaaaaaaaaaaaaaaaaaaaaaaaaaaaaaaaaaaacctttggtgccttttctctcttctttacctgagtaaataattggcacctgccttctttctccttttatgttatcataagtggcatgtatcaaaccaaacaggctaggggagaataggtctaattgtgacagacttaaaaacaacacattatttggaaagacaagccatgggaaagaaatatggcgtttctatttttttaagataatttagtatgtacaaaagtatccaaatttaaatatagttttcaatggctgatagttttgttttctcacccttcaatatttctagaaaacatccttgcatacaaagcaggatagctaagaaagggctgtaacaaacaaaacttcaagtgtctagcacatactacatctaagaggctaaactctgataggaaaagcactttaaacataattaaaagcttaatgtaaattagtagttgaaattctaggccggtgcggtggctcatgcctgtaatcccagcactgtaggcggccgaggtgggtgaatcacatgaggtcaggagttcaagaccagcctgaccaacatggtgaaaccccatttctac

SEQ ID NO: 12012 - DNA, 3661 bp, Homo sapiens
ctatcggggcgggccaaccccgagaatgaagattggaaaaaggaaaaaaaaaaaaacacgtcaaaagttagcagtgaaattgttctccatttgttgtacagtctggaggattttcactacgttttgacaactctgaaatgtgttaactcttagtgccatcaagaaccccatttgggagtatttttgatttttctactttttgttgaaaaaaggaatttgtactctgtgcattggatggacttgtttggtacttgggattttcctctcttaaccgtcaacatcagtgttgtaaatttgctaaactgattcacttttagcagcagactttgaactgcagtcctgccaacgttggacactgaggacgcccgacagagcttgtgcacctaagctgcagaccaagcctttgcccagaatttaaggattccaatggacgacctatttgcacagtactgcatgttgattatcactgcctttactccttttttttttttttttttttttttttttttgcttccagttgggatggggaaggcctttgtgtgtgtattggggggaggggttaaaaaataattatcccaaactttttaatgtattgctttttttttttttttttttccttctactataccattttaagttctgacctcaggcctccatttgggccgatggcctcttggaggcttaaagttttctgtaccttgtgatgaatgttaataggtgtttttattatacaaagctgaatgtcatttctcgtttgtagctttctgtcactcattccatcttccttcagacatcaccacgtttctctaaagtcagaaaacattccgttttggtctttttcaaaaaggtcccaaatgctgcactctacacatgaaggccctctcacacagacgtgacgtcctgccagaaagagaatgaatgacagaaaaaaaaaagagagacaaactctaggaacaatgccgattcattccacgcagcagtattgggggtggttcgggggaggggtgtttcggattttctttttttcttttcttttctttttttttttttgcagcaaccattaataaatgccaccacattctaccagcacaaggaaacataggcagcactgaaaaaaaaaaaaaagctcatattaattagactgacaatatggccttggaaggctctcccttgtggaaccaagttgccatgggccttgggtgctctgcgataacgggtgtgggttggttttgtttgcaaaatggccaaaaaaaaaaaccggcttccccgagcagctgccctgaaagtaggggtggcggcggcggcgctgagtttatacattagttcagacctacttggtggcattaaactgtttgaatgcaaattcgatttcagattgaacttgttaagggagttaacgagggctgagttcagcaaatgctaaagtgttaatttcaaatatgcaaatttggtactgcagtttgttatgcaatattatatcaccaacccagtatcacaaaaactcatagaagatatcatgtaggccctgggctttgggggggtcccaaacatggtatgcagaaatgtgatggttacaggtcagtacaacctcagtccttagaacccctccacacttcagctctgcacccactttcctgtcatttatttatataggactgtagttttttttagttcgagagcctttcgaagcttaatttatattctttctttgtaccttttttctaaaattaccaaagatattacacaaaggtaaattatgttctctgttttatgctttatctgatgaagccaaatatcctcttattgttgatcaaaggaggcaaaagaatttagaggcaaatgacaagcgataggctattgcaacctgagaaagagaactgctccttcatcgtaaatttagaagaccaagtagataatggaaccaaagttgttacttttttctagtagttatttttcctttttctttttgtgtacctctacagagaccaaaactcattctcttaaagagattttatggggctactgcagataaaaataggacacaatattaaaggagctacagaaggaagggagtcccatctcaaaaaaaaaatgaatgtatgccactgcaattagagtatccaataaaggagacagtttagagtcaggacagaaaagcttccataattgaactagattacataatagtatttctagaaaaagagatatttttagattgtatgccacttttgtttaagaactgtgctgtgatcactgtattaattttggtttatcttggcatatatccttcagtttgtttttatttttaatttttcctttttttccgattaggctttggtcagcatttttcatttaaagaaaagtaacactcccatccactcataagcttggtacaaaaacttctctggcagttacttttgaagcttcactctgctttctgtataaagggcagtctgtggtcacgcaagactttaaaaaaaaaaaaaaaaaaaaaaaaaaaaaaaaaaaaaaaaacttttccaggcagcttcatgatgtgcaggcagtagccagacagggtcatgggaagggggccctgtgcttctaaactgagtggttgctggttagtttggtattcaaaagaggataaaaatctggtagattagttcattctcagcatgtgtagctagacatgagtaaagataacagcatgagaaactgttagtacgcatacctcagttcaaacctttagggaatgattaaaatttaaaaaaaaaacatttcactcagttgcacttagtcgtatgtcttgcatgcttagtctaaagactgtagcaaaaaaaaaaaaaaaagaaaaattagattttacatatctttgcaggtatcacagccttgcagaagaaccaactgaaaaaaaaattctcaggctttacagcaagcaaacttcactatgatttttacaattctgattctgtatcccctgggggttatcccagttgcttctttaggatggggtttattacgttgtacatatatcccgatgtgtctgtgtgaatctttgtcttttttgggggagggcagagggcggttctttttttagatattgttcctaaaaaggaataaatgcatacacctgtttgtcaaaacacctttgctttttgtgcaactgctttatattaacgatactaaaaaaaaatagctttggaaaaaaaactactgtatgtaacggaattgcagaatatgctgcacatgtattttatttagttatccttgctttaagaatattggatgacatttcctgacatgtgggagggagaaactccctaactttttttttctgcttttaaactgtaacatagttgaagatttcttttttctgttctcattgattggagcattttgtacaggttttgtgtgtgtgtgtgtgtgtgtgtgcgcgcgtgcgtgtgtgttaatctgttttttgatacattcctatcccttgtgtttatcctaccactgccttcctggctatcttaaacaagttcatacatttgaaaagaaaaaaaaatgttgtttaaaaaatgttttctcctgctgcagtaaatattttgcatgatgaaattccagggtcacacttttccaagtttatcagtgaagtagtgattaacaatggggagtgtcaaaactattgaacttttgt

SEQ ID NO: 12013 - DNA, 19 bp, Homo sapiens
ataaaattattctttggag

SEQ ID NO: 12014 - DNA, 1955 bp, Homo sapiens
ttgcactctgtaaagaattctttgtcctttgctgattggttttggaaacggtcttaacaggagggagagtgaagagaagacttgccgaagccgatgctggtcaatttagagtgggtttctgtccttgcagatgggcaattaggactcaaagtggcaggtggggtggggggagattgtgtgggtttctaccgtcacattacttgctttttaaaaaaaacacacacaaaaaactttttttttggctttctaaattctctgttcttttcactctgatttttttttttttttgccgtttaaaattccttattcagcctaattattgttttctacactcccctttcattgaggcacaagaaatgggtttccctttaagtagctctgctgtacctagttaatgagaatatgcataatcgtgacaatactgcttttgaataccacactgtacaaggaggaacactagcttggagaaatctgtcttctgattatttgttgtgacacattcctatgtactgtgagctgggcattgtttttttctgtcccagggaaaagaaaaaccatacttaatgtgattttgcactgacagcacacaaatctttaattttcctttttaaaacatttttttttagtgataaaaggaaaataatagttggattgcataacatgaaaactataatcacaattcagtatcaggatataaatcaagctctaagtctttggaccctctgtggaaacatttctaacccgaattttaatttggccttttcaaccaaaggcttagagtggtagcaagggatttcttccaataggaaacctgatgtttctgatttaaagagaaggtgatattttaattgtttgaattaagctccttgcaaagttcgggtgtgtttacccacttagggctttctttcccagtcaacgctaacacattttgttaaatgatccctttccctgctcacattgtgtgtcatttctcatcatcagtagtcctccagcctgggcagctgtccccaccctttttcatgtaggtgcaggaagttaaatctcatttccaggatgcatgtgaacatttacaaagttgaactttgagtgcattctgctcatatgaattattgggattgttgatatatattgtattatgctaccaaagaaatattggttttattagaaggaaatggtcatcctctggaccatggagactagctcagaatacgctgatttccctctcctgactttgccaagcctttggctgcttttgcctgataaagggcagggccatctgaagacacttcccccagtcggctttggagtcacgggagctagtgcctgctcacacatttttcaaaagggcagtgcactcagaacttcactgtacctgggatttttaattcctcttgcagtgttgaccagcagagagacttgaggctactttaagcctccactatgtgtttgtagataaaattctccattcaaacattttaaaggactttgaacattatctgcttatggaagttgtgcccttcacttggttagtaaccacctcagccataatacttaccatcataggtttcttaaaatgctttttttttttccctaaacttgagtttccttagtgatttcaaaatgaagtataagaatatcagatccagttagcaaaagcctaggacttgtttctccaaacattgtactaacattcaacttgttttaaaattatgactcaagaattttaaaaaattattctggacatgaattaaaacttttttataatataagtatttttctgattgaaaaaaggatataattgacttcactctaattgtcatgtatatttccataagtaaatggattttgaagtatttttattttttgaactttatttaaagcatttgtgatgacatgttcaacttttgcatgtatgtagcctttgaagtaaaaataaataggaatgttaggctcac

SEQ ID NO: 12015 - DNA, 1068 bp, Homo sapiens
tcgctctggagtagaaaccaaatgtgaatagccacatcttacctgtaaagtcttacttgtgattgtgccaaacaaaaaatgtgccagaaagaaatgctcttgcttcctcaactttccaagtaacatttttatctttgatttgtaaatgatttttttttttttttatcgaaagagaattttacttttggatagaaatatgaagtgtaaggcattatggaactggttcttatttccctgtttgtgttttggtttgatttggcttttttcttaaatgtcaaaaacgtacccattttcacaaaaatgaggaaaataagaatttgatattttgttagaaaaacttttttttttttttctcaccaccccaagccccatttgtgccctgccacacaaatacacctacagcttttggtcccttgcctcttccacctcaaagaatttcaaggctcttaccttactttatttttgtccatttctcttccctcctcttgcattttaaagtggagggtttgtctctttgagtttgatggcagaatcactgatgggaatccagctttttgctggcatttaaatagtgaaaagagtgtatatgtgaacttgacactccaaactcctgtcatggcacggaagctaggagtgctgctggacccttcctaaacctgtcactcaagaggacttcagctctgctgttgggctggtgtgtggacagaaggaatggaaagccaaattaatttagtccagatttctaggtttgggtttttctaaaaataaaagattacatttacttcttttactttttataaagttttttttccttagtctcctacttagagatattctagaaaatgtcacttgaagaggaagtatttattttaatctggcacaacactaattaccatttttaaagcagtattaagttgtaatttaaaccttgtttgtaactgaaaggtcgattgtaatggattgccgtttgtacctgtatcagtattgctgtgtaaaaattctgtatcagaataataacagtactgtatatcatttgatttattttaatattatatccttatttttgtc

SEQ ID NO: 12016 - DNA, 3785 bp, Homo sapiens
aattgcacatggaattgtgaaaactatgaatcagggtatgaaattcaaaacctccacctgcccatgctgcttgcatccctggagaatcttctgtggacatcgacctcttagtgatgctgccaggataatttctgcttgccatgggcatctggccaccaaggaatttcgcaccctgacgattactcttgacacttttatgtattccattgttttatatgattttcctaacaatcatttataattggatgtgctcctgaatctactttttataaaaaaaaaaaaatctgctgtgcacaattttccatgtacattacaactggttttttgtttttgttttgttgccggtggggagggctgggagggggagggaacttttatttattgtgttcacaaactccatcctttcagcatatccttttaagtttagttctttcttccagttatactatgtactatcagttttgatataactatatatatataaatataaaattatatataaagggttatttgaaaccaatccatggcaacgctggtgcttgatacactgtgaagtgaatacaacattgaacagttacagatctgggacagtcccttctatgaaagtgctgaaatttaattaaaatcagtcttatatgaagtatgttccaatccatgtgggaacttgactctctcatctgtctaaagagtactggacgatataaaaatatatattttttaaacaatgtgatctcaaatttaaagactgctccagatagcctgcatttgcaatggaataactgacaaatcacaagtggtttagttgggcagggctttgatcattcaaaagtaactaaagtagctccagaatgccaagtattcgtgtaaattacggttacatgttatcatttgctgttcttacataagcactcatgaaaatatggtattctgtaacttgaattccatccattttccagacctctactcatgtctgaggtaaatctagaaattgtcttagttttaggattgaaacagtctataaactgtatttttggtccatccaggaagctagtcccttgtttctcctttctacatgacattgcagtggtggtttctgtaattaaaatttgtttgcctcatgtccctttgtctgataaaccttcactctaccgattcagttgtgagcattctttttttccttctcaaaacctactatgatttgttttactgaacaaaggttatcaaccacacatccagtcctgacatggagcttttcagtgtttggagacatttctcaatcccctgctgtggtaggaactccagtggtgaacggcttgcgcgcctgcagccagagttgcagggaaagctcgtacttactgcgagcagcatgtaatcttttttcttcctggacataaagatagcttgagtaaactgttctatttcattctcttcactctttttactgtcttgcaaaaaaaaaaaaaaaaaaaataatcaaagaccactaataagattccacctctccttattaaaataattttttaaaattttgttttgcttttgtttggatgtggggtctctcttctatttgacttttacatttagatacagagtttgtagtacttcagagacatttcaagcatgagaatttgaggttacctctctttatttgacctttagggactcacgggagggcagcctgatttgtaatgaagcaccacattttggtgttaaaaacctggtttgcttaataatagcagtaatttctgtctgtggaggcaacaaataaaaaaattaacagcttgaattgagtagccaacaggaaaggttcctttcacatttacattaaaactattctgtagtcactaatgtaccataatttaaattcttttctcaaaggtatagattataaagcagtgccatttgttgctgtggtcctattctcaaatgcatggacaatgttcccccctttttaaaataatgcttgtgtctgggatgcaagctttgcttatctttttaaatacatttttaaagtatttattaatgaaccaaaggaaatcagatgctttctataagcatcagaatatataatacatagtgatttgactatgaattttaaatccacattttaatattggtgggatattgcaaagacattccttctaaagttttaatattccttttattaagggtctcagggagggtaaattagtcagccatatttattttccagaggtttaagaaattgctgtttttaactttttgaaaaaacttaaatgccaccaaactcatgtaggttgcactgcttattgaaccaataactgttggtatgcactttgttcagacacactgtgtactttttcaaaaactagtttcatgtaaagtgattggaccccatagattagtggaaaaagctgattaaccagctactcataggctgctaattcattcatgccaatgttttggtttttcagttttgcctccgtgataaattaaagaatggggaggggtgaaggaaggggaagaagattgctttagaacaagtggcatgaaattaccatctttgtagaaaccgcagctaacagtgggagttatctaagcaatcagatgttacagggccagccctttagctgctgtggtgtattctgttgggtagtgaggtagtaggtactttatagacttttaattttggaaattgatgacatccctcaggcatgtattctggaaatggaattcctgtaacttcctgtgtctgcagtatgccctacaattagtaggcagcgtgtaaaaacactagtgtagattataaagatatacattaaaagaggaccagaaatacttggtattcagtggcacagaaagcaggttaaacaaacaaaaagcacagtgttacgcttgcaagtttccatttgttttaataccacgcaatctttcacactcgtgcgtgtgcgcgcacacagagcttacctgacttgctctgcttgagtcatgcagttacaaaaaaaaagacatcttgacacccacacaatattctaatcaaaacctttcagtttcaatctggatatttaaaaacattggcagaagcttctgtgagtttagttccactaagatgtttcacctgccttatcaagaccattctcagtctacttttttaagctaccgtatcttaaattattgaaaatttattaattgctgaatatataataacctttgcttgtatgtaaccgaaaatggtttaagagccaacatttagagtatgacaatggagctgaacagtttttaatgcgcaagcagttctgttcttgtgtatgacttgtaaccttaatttactgtgtaaagatggttacattatttccttagctttgtttgttggagacaaatagagaatgcttgttaagtatgtcaaaacaatcttatcttgtgaatttttgttaatgtattatacgagctatatttttcatttgcccagaaagacagcttgtataacgcttttggaagtttctgctctgtaatgtctttagagctgacagtctgttaggtttgtttttttcttcatgctaaagtgtcagttggtggttttgtgaactggtcaaaaattcacaggtcttaaatgttttgggggaaatttatattggacactgctctttgtctagcaaataaaagatgttaatatattcctgttactggcatgtgcacgactatgttattagaagccactttatcattttcctgctttaaatagaaatgtctatttatgaattctgcttgtagttttttcacaaataaaatagtaaaatttacattgg

SEQ ID NO: 12017 - DNA, 1005 bp, Homo sapiens
ctcttaggtggttttattcattgttgagaaatatggtagattgggtttcatttaccgaatgagaattcttcattttcactttgtaatttttcttagtatatagtcagcccactgtatttgtgtgttccacatctgtggattcaaccaactgcagatcaaaaatattgaagaaaaaatcgcatctgtaccaaacatgtacagacttttttcttgttattattctctaaataatacagtatgacaactatttccacagcatttacattgtattgggtaatataagtaatctagtgatgatttaaactgtgcaggaggatgtgggtaggttatatgcaaatactgcaccattttttatcaggggcttgagcatctgaggattttagtatcctcaggagtcctggaaccaaccccccacagatacggggacaactttatgacattgtttttcaaccaatgaatgtttataccttttgttttccttgccgcgactgtgaagataaagttcaaaagtatttttaccaaagtgtagctaatatttcaagctgaaaataatagttctactgcccgtgtctccagaatgtagagcccatcaatatttttattttaggaggtgtacttgacacccaataaactgcacgtatcaaaagtgtacaatgtgttggcgtatgtataccctgcgtaaaactatcaccacaactgaagtgaggaacggacccatcattcccaagtgcccttgtgccctgttattagtttgcatgtcctagaattctatgtaaattgaatcatacaatatgtatcccttttttggtcaggcatattttactcagtatagttattttgagattcatccatgtggtagcatgtgtcacgagtttttgtttttatgtttttcattgctgagtactgcttcattgaatagatttgttcattgacctatcgatggacacctgggttgtttccagtttggggctgttataaataaagctgttatgaacatttgtgtac

SEQ ID NO: 12018 - DNA, 864 bp, Homo sapiens
ttttcacttctgcattatgtacataaaggagaccactaccactggggtagaaattcctgcctcgttcaatgcggcaagtttttgtatataagataagtacggtcttcatgtttatagtccaaatttgcaaaccctacaactctgggtgtcataggtctattttaagggaagagagagaaaaacacccttactatcttggaaggcaatattaacaaacagagcttttttcaaatagcaattgtacttttctacctgtacccttttacataaagtgtttaaatttcagaaagatcttttattaagcatactttcacagaataacttgtttaaactatattcatataaaaaagttaaacacgctttttttcctgcctaaaacacaaatacaactgccagtatgtatttttaatggaaccctattttataatggtacgttactgaatgtgtttcatatgcgtgaccgttaagatattatcatttaggtgaaggtttcaactcaaaaccacccaacccggtggttaacgatttaatacatataaccaaaccggcagcgtttagagttgggatatacatttaaacattttcctggttaaggttcccaagagagtgtaaaggttttagcagaaagcaaaatatcttgcatctttatggaagtttaaagcatgtttgcaaatattgcagcccattgaaagaatttgcatgtacaggaaagttgtggatggagacggtttgtggaattttaagtgctcattgtagtaaacttttgctttgtagatttgaaggtacagacttatacaggcaagttcacaaaatcatgattagttacaaacagtaaaatgaagttaaaataaattattattttct

SEQ ID NO: 12019 - DNA, 1830 bp, Homo sapiens
tattaactcctttttattatttattggaaagttatttggttaccaaaaaaagtgctttcatgaaatgcagtgattatgcatgtttttttcaactcttatttttaactttctacttcattataggtaaatatgaatataattaaaaaaacagtaaatccttttaggggaatctgaaatgccttaatattaacttgataaaccaaaggaatttacatattacatacttcagacttttgatataaatgttcttaaactatgagtttaagcactgcctatggataaagactcacacactctcacatgtacacacacacgcatgagaatttctttttacattgaaaaactctttcatttaattcaaatgctattttcccattataatagcattatttggaagacttaaccagtatcaatttgaaatgctgatttaagtccccaaggatgaaaaatacattttaaaaattattttgttggagaggagtggcatgtgattcaaaagagcattgttggaaaatgctactgtggggcttagaagaatgatgtttggtttggtatgctgctaactagttgtaagactttacaaatcactttgccatctgtacctctcaattattcctctataaaatatggagataataatacctatctgatcagactttgccccatgaattagtttttaaaagataaagactgaagtatgaaagtgcttttgtcaccccaaatgcaattgacccatgcaaaatattagcatgaatttatttaatcacataaaagtcatgaagaccagccagattttcaagcttcattctgtttcattcagttatattccaaaattcaaatgatcacattttattctttctcaaaaaaaaaaagtttttttaaattaaaaaaggaattgtttccttcacagctatgaataagctttcaggttttattaaaacctagaggaaaaaatcaggaatgacctgaatctcaacccaaatattaaacaaaatccacataatccctcatttcaatttccaattccattaagggaccctctctttttggatggcagagatggttttttaatgaaatcccaccatctatctgagtgagtctggcaggctttttagttcctgagttaaatttgtaatagaaccaaggcaatgctgctgactttgatatgtatgactcagtctttcaatatgtggttttcaaaaaattgttgaagacgtgacttcatagcaatatatagagaataaattaaaatcagcagattgagttttcaacattgcaaaatcagttttttacctctttcctaccaatttcacattttgcagaaacttgttcacatttccaacaatatcagaattagaaaacagttcagataacaagaaagattaaaaattagggaaattctgatatcaccataaagcactattttacatttagagattacatttaagataaagtcatcatacacaaaaacaataaatatttataactttctctataaggtccgcatatactgtatatattgaaacaatctgaatgactagtagatttcatatgaccattgttatttccactttctccaatacttgtattttatgctacatgtaatgaagttggacctttttattatttagtaattcctatatgttcctatacttttcattttcaagatgattgctctattgtttcatgttgtttctagcaatatatctccatgagatatgcactttgtttcatattgaaaagtataaaatttatctttcaattcctgtgtgtgtatcctatggttatctgtatgtattattttctattctaataaaatttataacaagc

SEQ ID NO: 12020 - DNA, 1673 bp, Homo sapiens
agacaaccaagaggcttatgagatctaatgtgaaaatcatcactcaagatgcctcctgtcagatgacacatgacgccagataaaatgttcagtgcaatcagagtgtacaaattgtcgtttttattcctcttattgggatatcattttaaaaactttattgggtttttattgttgttgtttgatccctaaccctacaaagagccttcctattcccctcgctgttggagcaaaccattataccttacttccagcaagcaaagtgctttgacttcttgcttcagtcatcagccagcaagagggaacaaaactgttcttttgcattttgccgctgagatatggcattgcactgcttatatgccaagctaatttatagcaagatattgatcaaatatagaaagttgatattcaacctcacaagggctctcaaagtataatctttctatagccaactgctaatgcaaattaaaacatatttcattttaacatgatttcaaaatcagtttttcatactaccctttgctggaagaaactaaaaatatagcaaatgcagaaccacaaacaattcgaatggggtagaaacattgtaaatatttactctttgcaaaccctggtggtattttattttggcttcatttcaatcattgaagtatattcttattggaaatgtacttttggataagtagggctaagccagttggatctctggttgtctagtcattgtcataagtaaacctagtaaaaccttgttctatttttcaatcatcaaaaagtaattataaatacgtattacaaacaagtggatgtttttaatgaccaattgagtaagaacatccctgtcttaactggcctaaatttcttctggtagtgtcagttcaactttcagaagtgccacttaaggaagtttgatttttgtttttgtaatgcactgtttttaatctctctctctttttttttttttttttggttttaaaagcacaatcactaaactttatttgtaaaccattgtaactattaaccttttttgtcttattgaaaaaaaaaatgttgagaagcgtttttaacctgttttgttaatgctctatgtttgtatttggaatatttgaataatgacagatggtgaagtaacatgcatactttattgtgggccatgaaccaaatggttcttacttttcctggacttaaagaaaaaaagaggtttaagtttgttgtggccaatgtcgaaacctacaagatttccttaaaatctctaatagaggcattacttgctttcaattgacaaatgatgccctctgactagtagatttctatgatccttttttgtcattttatgaatatcattgattttataattggtgctatttgaagaaaaaaatgtacatttattcatagatagataagtatcaggtctgaccccagtggaaaacaaagccaaacaaaactgaaccacaaaaaaaaaggctggtgttcaccaaaaccaaacttgttcatttagataatttgaaaaagttccatagaaaaggcgtgcagtactaagggaacaatccatgtgattaatgttttcattatgttcatgtaagaagccccttatttttagccataattttgcatactgaaaatccaataatcagaaaagtaattttgtcacattatttattaaaaatgttctcaaatac

SEQ ID NO: 12021 - DNA, 707 bp, Homo sapiens
agaggcctgatttcagctccaccagatgcagatttgtgttttgttttcttgttatcactgtcacacagcttataacatgtatgcttttcagaatacagttgtctagccaagccatcaagtgtctgaaattcaatattggtttatgcaaatacagcaaacttttatttaagtagatgggagaatatgtttaaaatattaggaatcctagaccatattttcaagtcatcttagcagctaggattctcaaatggaagtgttatatataatatgttaaaaacattttgctttcctggctaattatttgatccttttaaattcaaatttgaatcatttgtcatgtatgattatttctgttaaatgtacacagtatttaagatggatatttggtggctctatttgttctgatatcttttggtctaaattatgaggtaccaagattgtttctttgtttctttttttcaaattgtgtttagaaatactgtaataaatatgcagtagtgatataaagaattatatccaaggtaatataaaagccattacgtatgaactcatccgtgtctcattttgtgttttattttgtgatctcttgtccactaagtatcttgttaaatgccagtatctcagtctttctgaagccctgaaatggtaattgtagcatttcagaaaatgtctttcatttcaatcaataaaaagcttttgtaaaattg

SEQ ID NO: 12022 - DNA, 9049 bp, Homo sapiens
aacacacaatcttagtgagttaagttgcagcataaatccaagggcccactgggaaaagatactgtcgggtttttccattcagcaataggacacgaaaggcatagaaggagaagacaaagtgtcacgcagttgactggttttcggcctttcttgagaaagcaaagtgggtcccagacattgaagaaaagcatttttatttgtttatttcctcatctgagcctttgccaactgtgcaactctctccttttgttatcttgcttttatcaatatatagctaagtttttgtttcattttgatttttttttttagccaaccaccttgtcaggaaaggatgaaccacacattaaaatgttcattctttcaggaatacaagtttgtagctctatgtgcatctatttttgtagaaatacaaaaagtttggtttagcattgatgggctatttttgagggatgtattttttttaaaattgtaaaaattgttgagttctgtttaaagaacttgctctcagagaagcactggcaaaaatgtttaaaatgcttatctctaagatgtctattatatgctctgtctgtgctttctaggttacctcaaatgttttgtttttttccttcttacaaaagtagctataccgtagtcaaaccaatgcagtattgtttttacattgaatctcagtaaagatttaattccatgctagctcaattagttttgaattatatgtatagcttgaaaagtttttttttaatgactgtgctaaagaaatgatattttattgctttgatttctcccaaagaataacttggaggttgactaataagaaagttggcataaactttcaatcaaatgaagagtttgcctagaggagactaattctctttctagcccatccaaatttgataaatggaaccagaggttatatacaactacaaggaaaaaaatgcatttaaccatgccacctatgagtgccagtgacttattttacttgtttttaattattcattcatggcaatttaaaaagtcatattttaagtgggatttgtttttcctgaagggcatttgaaggaacaatatctgggaaggtactagagaaattacaaagcccgagctctttcttataatgccacctatccctgtaagctaaacaaacaaacaaacaaacaaacaaacagttctatatataatagtttcaacacagaacttaacaagtctctttttttgtttgtttaaatctggctttacttgatttaattcctttttagaaagaaatttagggcaaaataaagtgtatattaggatttaaatttatgccacaatttaaaaataaaaccagaggttatatacaatttaaattgggctaaaaattaaaaatttgaggatttaacttgatatagctctcaggatctaaataaagtttaaattatcattaagacactgctaggagaagattaagattatgaaagtaacagttattgatactgctggacttcaaaggcaaagttcatttcttccattaactgcttccagagatgtcatgtaaaaaagttagtgtattagagaagttttttagctttataaagaggttttttcaaatttctcccatttttctctccacccacataaaatagtatgttcagtgaaatgccactttctatctttaattgttcgtatcatatatgcgaactttttagacatgaacatgacatgttcagctaggcagagttctcatagataattttcaaatattttccttggctgtaatttatgtattcatttatatcctatccgtcttttgagcttcagatctatatactcttttgtactctcatcactccgcactttgctgtttcttacctagactctcttttacacaatatgcacatttttaccattgtggggtccaaatttaagataccttccactcactaataatatgaacttatatttcctgggagtagccaggttaaattttctatactttggtccataatttgatttgatatgattgtttcatttataatttgcccaaatacatggagcacaaaatttagtgaatttataaatctggatttgccttgtgtccttctgagttttcaaaggcaagtattcaacagtccctgtgtgatgactgacagggttatttgcctcatccacatccaccttcggaatacattaacttcctttgtaatttatttgaaagtagtgttaaactcattcagatcattcagttggattttcccaatgaagaggaaaaggaaagtagttattcctagctccatttcttattttccaccaaatttaattgaagggcattaattagatgtcttcaccctgaatttagactttgctctgtgttctcccggtaactgtcagacaaaaagtttattggctctgaggaactgagaaatgttgggaacctggtttctgctgtacacaggaaagatttgtaagtgagctctctctttgaaaacaggacccaggctgggcacagcagctcatgcctgtaatcctagtattataggaggcagaggctcgggaggattgcttgagcccaggagttcaagatcagcctaggcaacatagggagaccctatccctacaaaaaatttctgaaaaattacctgggcattgtggggcacacctgttgtcccagctactctggaggctgagtccggaggaacgtttgagcctgggagtttgagtttgcagcttgcagtgagctgtgattgcaccactgtactccagcttgggcaacagagcaagatcctgtctcaaaaggaaaaagaaaacaggacctaggtgtttggggtacactgccacccagggagtggatcaaaaatatacatagaaagagaatgagcatgtctctataattgtcttctaggaccatattgctgttagaagtcctaaaagaggatgggttgtaatttagcataatattctgaattcattccaagtttaaaatcctgtcattctctggctcttcttttttcacatcaaaatgatgctgttggacttagaggcttccgaactgttttattgagggctactatctgcctccacaattttattaaaaccactccacctttagacaaaggtgacttttgtctgattttacaaatcagattttattcaagctttctaaatatctgtgaagtagaccctagaaaattgtctcgtttattttaaatagaatctatgcttccaccaataaaccatcgggagctaagaaacaacataatgttgacaaatcaggaacctaacagattattttgtctctcattattaatttgaaagagcctctaaacttttgagaaatcaatgtgtcttcttaagaaagttaagcaccctctcttaactttcccctctatttgctctcctttttctttcttcttaagagtatttatattattttgttaagcaaaaatggctaagattgctctaaaatttgcaaaatgaggagtggattgcaaataattgagggatttatttctttaactttataagactttaaaaaaaaaacccaaattctaagcactgacatgaaagttgcctttgagaagcttgttattcattatacaaaaagtatttgcccattcctattctaagatttgcagaatatgtcaccctatctagcttttgagtttgctatctggtttaatgttgtatttataatttaaagtggaaatcagaaactgtttcaagaacctgtattctattccttactgagtgtcccttctttaaatagtgtttgctgaattaagccgatgggggcagtggcgttaagtggtggaaaaaggaaagtatatatgttagagttttgaatgagggataaatagaaagcagaatgaattaatggaaaagaactcggctgttaggccattctctaaattctagtttagccaaaagtttatgtgtggtttggggcttcatttatttatctcatgagtaaaatggaataatacctaacaggcaggctctggaagttggaaatcacatacacacacacacacacacagacacacacacacacgatcaatcatgtagctcatattagatgttcaataaataacagctactacagatgcctatcagttgagtaagtagttcattaaattgagctcccaaaggtctcttctcttcacatccatatccgtttctgcagcaatcaaatagatacatgattgtttttctgtaagaaattactgcaaagagaatctttttctcctactaactgttccttctacctggtataggagataaatgtacgtttcttaattagctgactttttagtatgtcatttctgaaggaaaaataaattaaccttaaagtggcatgtaggtccaattcagttttcctacatgttccaaaattttatttaaattactgtgtccaaaattatgaggacagtgtcattcattcaccatagtttatatttttagttatatatcaaacttccttggcacctaggataagaacatttcttttgaagttatccaatttttttttatttttacttgacttgaaggaaagttggaaaatatggtggaaaaaatcttccgcattaaaagggggaaaaacacaaccatttacgatctcagtcagcagatttactctactcaaggaaaaaaagaaacaatcttattggaagcagatgttgacactgtgtcagttattgaagacggaaggagttcacttgagccattgcagttacaaaggggtattgatggcagtttggattcctgattgatcacctttgcagccaagggaaagacagcagaaactgtatgggatcagaaatgaaatcagcctgccagtttaatggagaggctcctagaaactcattttttttctttcctgtaagataaaagacatctttcagaataagaaaggcttgtttgagagagaaattacagtttattctctgaaaatatttaaaggccaaagtgccctttaaatctattattaaagcattgaaactgttattaaaatcattatagaaaaattaggtaaaaattttagcctaactttcaacatccattcaaaaacgaatgttgaaaacaaacatataacctataaaaaagtgaatggctctggcaagtgggggcatgggtggagtccataaggaaacctcagtctcaataacttcaaaatgttacttttcatggtaacttggtcatggagattggtcacagcacagacatttagaattttttagcaggttttttttttcttttgaatcttgtagtgctctctgggaattgcaccatgtacacttttacaacctacagaaatcgtcattattgttaaagtatctcaacttttctatttcttttattgtctattgtgcttttttgtttaaaaatacttttatagttttaaagtattggtcaaagtagtattctcttgaagttctagtcaatttaatttgatccaataagtttttctgaatctcctttttaagttccaagaaattctattataaataagtgtacttttaccaattccattgtataagcaaacagacaccttttagaaaaggataagtaatcatcaatttgtttttttaaaaaaaaaaacaatttctagactactaaatttggcataagaataattcttttaaaatgcaacatactttaattagtttttttggtatatgcataagatgtgaactttcctattgatatcactttatattaatagagatgtacatttctttctatgccgtggctagagcaaaagttaataatgattatttacacaattgatttaatttcttaggatatgtataatattggatattatatctgatttaaaaatactattccatacattttttttttcaggagataaaacatagggaaaggttttcatgtgaattctttgtatcactttgaagtacatatatttaaagggaagatggatacaatttgtttttattatataaatctaggtaaggtgaaatgcttttgtcaacaaaaatacagtgtagtgaattttatatttgtcacttgattaggtaaactgaaaactaacaatagaaatattattttactgcattgaaataccatgaactttcagacttgttagttctacaagaagttgtgctaccttaattttgtgtttccagaaataaaaattaaccttagttatgctgtcatttttaactaataaaaaaagtataattcataaaacttttggctttataagataattataaaattatatatttttttctgtttttgtggggttgggaaaacattttcttatttctattcactcttcaaatgcaggtctcataatatgtgtcaatgatataagatgatggaagactttgtaataaaaacatatgtcattatcttcaatttgttcaataaataatttaatgtgaattgaatgtttgtattttaacatagcatttggatttggtctgcatttcttgagaatttaaagctctttttgtttcctccttattcaattaagcatcttataaatattttggaaattacaacatcttaggtgttattaattaagaagttaatttctagggccaagaagtctatatgttacagcaaggaatagattataaaatacatgtttataatggaaaagaaaatgaaatggggtatattaattacataacagcaagagtcttgagaattttataatacaatgcttctaaggatattggttgaccaaggtgtattttattgtttttacatttgttgacagggactctgccataagtagtatgaaaaaacaaacaaaaacttttctacgattcattaacattgaaaagagaattccaagaccttgtattctgaagaaagctagagtttctctaagtgggccttcaattttcttattacacgtatctttaatgtgaaagtactaaagtctgaaaatcagcatttaaataatagactttccagcattacagatgaaataatttggcgcaggctttttaactgtctaccatatttagaatgtggtgtcaaaatgagatttttagaactgctgtaaaatattactacattactacaacgataacggcctaaaacaacacaaatttattatcttacagctctgtcagtcagacattcagcaaagatcttagtcttggtgggctacagaatgtaggaggcatttcctggatgcttccaagagagaatcttgctgttccctgcttctagagtcctttgcttagtttccttccatcttcaaatccagcaacctggtcaagaccttctcacatgacatcactgacttcctcttcttcctctcccttacatatttaaggactcatgtgattacaatagctgcatctgtgtaatccagaataatctcttcatctcaaggtttttgttctgttttgtttttttgttttgttttgttttgttttgttttgatggagtcttgctctgtcgtcaggctggagtgcagtggcgcgatctcggctcactccaacctccacctcccgggttcaaaggattcccctgcctcagcctctcgagtagctgggactacagatgcgtgctaccacacaaggctaatattttgtattttagtagagacgggatttcaccatgttggccaggatggtctccgtctcctgacctcgtgatctgcctgccttggcctcccaaagtgttgggattacaggcataagccattgcgccatgctcaaggttcttaattacatctttaaaggccctttttccatgtacagtaacatattcaatggttctggggattaggacttggagccattattctacctacaacaattagtattggacttccatcattttctatcactcttgtaatcgagaaggactatttcactgggagtagcaagtcataatgtttgcgttggcatttgtgtgggggtttatcttcattcattaaataattgcatgtaaagaaaattcctgtcactatttcaaatgtttcatgtagttattatagtgcttcagaatccaaagggttatgtgttacttatgtaagatgagcagtctagggggtggagaacaggtcatctagtgcagattcttcctagctgaagtgtgttttctctggggacaaccaagtaggatttaattgttttgcttccttttttgggaacttagacccatcttgcgatgtcctaagtctccaagcatcttatttgacctgcttatacacatttgactaaatagctaaatatgaccacattgacgtggtaaagctttaacacttttgtccagattgaatcactccatctgctatcagttaagcagtggaaaactgttatggaaaagcaaacatgttttgatagatttaatgtgtaaagaaggtatccatactctggaatgctgctgatcaataaatgagctgcaagactttgttcgaaacaacactcaagcacaactgttttactttccataccaagtttggctgtgactgaatgaagaacatcagcattgatctttgctttgcacttgtacaagagactatttgcagagagccaaatatagcaacagaggatttaatatcttgccaaaaaatacaaaatctgttcccctttaagcatgacactctatcctttcttgtggatcttgctaaaaggaaaatatagctttaaactcccctattccttctgttgaaagcttaagaatctttttcaaatgagctatgtatggttttgtggtattttatgtttccaaaagaaaatggctacatgaaaaatctgtccagtgttatcatttttcttacaaaaaatacttctagttatggttgtattaattaatttgattgtgataatgattacacaatgtttacctatatcaaatcatcatatcgtataccttaaatatatataacttttatgtgtcaattataactcagtaagtctgggaaaatatcgttaagtcaaagattagagtcaacagaaataaagaaaaatcatactttgataacttcaggactaatcaaggatcaatgggtgacatgatatcatgctatgtgccattttgtgttaaacaaattacaccaacaataaaaaaaattggcttc

SEQ ID NO: 12023 - DNA, 261 bp, Homo sapiens
gatttttctattgtataatagcctttttctcccgtttcattcctttctcttcctcaacaaaaacagaaattacttggttgacttaaaatcattttatatcaatagcttttacagaagctttacttttccacttttttttaaaaaaaagaaaccaacaatttaaattatattgatgttatttacttaaaataattattctcagaagccacattgtctattttaagccaaatatattaacagtaataaaatgatctctctgtc

SEQ ID NO: 12024 - DNA, 3517 bp, Homo sapiens
ctaggaggttaccaccattgtgatcaagataaatgtggagtattaaagttatgtgttgattgtgtggttcatttttgtatttatttcatttaaaatcatgtgacgcagaatagttttgcaatgtgtatatagttgcaggcaaaaaaaaaaccacctcactgcaaaacttattgttaattttagtcaccaatggtataaagcaaaacctaggtttagagtgtgctaggatacctgaaacctgatggttatctttaaaattaatggtttttctcctgaaatgtttgtgcatggaagaactgccctgcttttttaccctgttgccatgtatgattattccttgtgagattacttaattacttggattgaagactagcctattgaagctgctgccaggcaacaccacttaacagtaacttaaaggaattattttctttagaggatcctcttcaaaaaggaagggagatagtggaaaactgttcttatatcttcagatccctagcagaaatgactgtttatttcaaactatgttttacttgtatatgatgtagtcaccttaactatctttcaattccatacttcccccgcccccattttaaaggcttattgttgtattttgtagcagcttcaagtgaccaaaagactaaaatctttcaacgtcaatgccaaaagccaaggggaattttgcagtgacaggattttagtctcttactatgaatactaatttcgaaccatagctttcattttaagcatcatcttgaatttctaaacttttttctatgtcttggtgttaaaagatttcaagattggcatttttacttaaacagacattttatggttgagttttctctttattatagagaattagtaatttttttttggctgacagatcagataaaattactttctattcattaatttttctctacaactttatgagtttatttaggtgaatagtctagactagaaacaagtttactttatctgctttgcctctggtggtacaaggtttttaacatggatggtaaacaattgtctagaaattctggcaggttttttgtattggagatctggcagtatcctgcataactttgggtgaggaaattgttctcttaaagatcagccatgttcaggaaatgatctctgtttgaacctcactatcctgtaaggttatccaagtagcttagcccagctaagttctatcagagacccaaattatattttttaaaaatttaacagctggaaacttggactagagctttaataaaaaatcttaaattctttgaaattcaagttaaaaatacttatatatttctattacaaagcagtgacaaatgatgccctgtgtgacttggagttatctttgacttttaccacaaatcttcatttataaaagaaaaagccaaagtgaaaaaaagttagattgtgtatttttcagtaacagctttccatgtcttaagatttttttacagacttaagtttctaattcaggttgtcaaactggccatttgacttcagagatttgttttcattaaaaaataagcctgccgccaaaataaatcacttatcaaaatgtgaactgttttcctcatgttcagttatgttaaagtagtatgataaatgcatgcctagagtagtgctctcgttgatgaagcacatgtatgaggagaccagcagcaaaacataaccatatgtgttttgcgtttacttcctctagaaaagaatttgcaggcaaccatgtttaatttgaactatctaagatggtagattttagaagctaggaataattgagttttatagcactattttcagaatacgaaaagatacacaatcattctgttttttgaaattccatgtgattcaaactgctccctattatttgggtattaatttgcactaatagcaaaatgtaatggcagatcagctttgagagtggtcctaagcagtaaactggatgatgttgcattagaaaaacatcaataattcatatttaagttttagtagttactactgatttgataatcacttaaattttatatatcttaatgtattttttcagactcctaattaattcccacattcactgtaactaggggcatagtccattctgttaggattatatcctctccttagaaatgttttccatcctgttgtggggatttggtattaatgtttcttcattgattatggaacttttgttccctgaagctagttaactgtgtctaaagttaaataaatacagcagaatgattgttttagcctgctcgaactgatacaaatccctgaaaccatgattggcatatgttagataacaaatgaggatgtctaagaggcatatgctgctttggaggtgtagtgaacgtgtgtacagaagttttcaatcttaactatatagtgttagtgtgatgctatactattggaaaaatagcagcttttttctattttataagttgtatgcataaacataagatttgtaatgtttcatttataaactgccttcttcaacacatgttaatagtgttttctcaaagtattgatagtatgtcttccagaatttcacaatatgcttacagtaaatatttcctagcttgttgaaatgttcaattctttgttggctttcttcttgattctgtgggggtgtataacaagcctgaaggacattgtaatcatttcttacaaggtgaaaattaagaaagattgtgtatgagagcctatatagttgttttatccattatcatctttgattaagactttaaaaaaatgctatttccagttaatgcatttggccctattgaattttcagggaccagaaaacattaaaaagttctgcatcttataatggtaaccaattaagcttgagattgttctgaaagtatcaattgctttaaaactgttgtaagtacagttggcaagatctccaagctgaaacttccacgttaaaacttttgcctgtaagaatttgcacatgaatgttaatggaaaacacaaaacttaagatggcccaaaacaaaagccacaaacagttcatcatttggtgcttagtctttgtaagggctctctgtggtttgacttaccccagctaccgttaaatgaggacaaatcaccttaaaacatgttcatttgattcataacaaggaaaattgggtctatgattttttgccaatcttagcctaaaagaaattgctttagcttctggtcagcactgattaaaatgtgaatagtgaagtggctatcctaaactggtttatctccacccacactatcatagatttcttaggtaaatacaattcttatctagtggtattctacttgtattcagaatactgtattaaaattttactatttcatttttgtattctgtgcttattttttttgctcacgcatgtatgcttagtataaatgtgtcacttctaaagttttgtctctgacttttagaaataaatttcagaaaaattgtttcaaaagattttgaaagcacattttgttttgtgagtcaatgacaaatatatttcctgattac

SEQ ID NO: 12025 - DNA, 1132 bp, Homo sapiens
ggcatcttttctctgcttataataccttttccttgtgtgtaattatacttatgtttcaataacagctgaagggttttatttacaatgtgcagtctttgattattttgtggtcctttcctgggatttttaaaaggtcctttgtcaaggaaaaaaattctgttgtgatataaatcacagtaaagaaattcttacttctcttgctatctaagaatagtgaaaaataacaattttaaatttgaatttttttcctacaaatgacagtttcaatttttgtttgtaaaactaaattttaattttatcatcatgaactagtgtctaaatacctatgtttttttcagaaagcaaggaagtaaactcaaacaaaagtgcgtgtaattaaatactattaatcataggcagatactattttgtttatgtttttgtttttttcctgatgaaggcagaagagatggtggtctattaaatatgaattgaatggagggtcctaatgccttatttcaaaacaattcctcagggggaacagctttggcttcatctttctcttgtgtggcttcacatttaaaccagtatctttattgaattagaaaacaagtgggacatattttcctgagagcagcacaggaatcttcttcttggcagctgcagtctgtcaggatgagatatcagattaggttggataggtggggaaatctgaagtgggtacattttttaaattttgctgtgtgggtcacacaaggtctacattacaaaagacagaattcagggatggaaaggagaatgaacaaatgtgggagttcatagttttccttgaatccaacttttaattaccagagtaagttgccaaaatgtgattgttgaagtacaaaaggaactatgaaaaccagaacaaattttaacaaaaggacaaccacagagggatatagtgaatatcgtatcattgtaatcaaagaagtaaggaggtaagattgccacgtgcctgctggtactgtgatgcatttcaagtggcagttttatcacgtttgaatctaccattcatagccagatgtgtatcagatgtttcactgacagtttttaacaataaattcttttcactgtattttatatcacttataataaatcggtgtataatttt

SEQ ID NO: 12026 - DNA, 14 bp, Homo sapiens
agaagctattttaa

SEQ ID NO: 12027 - DNA, 3026 bp, Homo sapiens
tatgaaggtgttttctggtttaagttgttccccctccctctgagaaaagtatgcatttttacattagaaaagggacttttgttgacttcagatctatggataattatttctaagcaacgtgtttttattcctcactaatcttggctatatcagataccatttatgaaacattcttgctataactgtctctccaagaccccgactgagtccccagcacctgctacagtgagctgccattccacacccatcacatgtggcactcttgccactccttgacattgtcaggcttttctaatgttggtagtatttattaaagatgaagatgcacatacccttcagctgagcagtttcactagtaggaaataccaaaagcttcgtacatgtatatccagaggtttgtagacaaatgttgcagccttttttgtaacagtgaaaaactgaaaacaacctggaagtccagtgatgggaaaatgaatatatttctgtcttagattggggaacccaaagcagattccaagactgaaatttaagtgaaagcagtttatttgctaggtcataccagaagtcatcaatcgaagtatggagaaatggaactgagaaggtaaaaaccagttcaaaatcagtgaggaggttctcaatggtaacgagctccatactgctgagatacagggaaacggaggggagaaagctagagtatttaacccccactccttggttgtcagctccctgtcctgtgtgtgggcagaacgtactccacctactcaatagcaagttccaggtgtttgctgaaagaagctgctgtaatgtacgggaacggtgaatgccaaacacttaaagcaattccatgtttaagtatgtaaactcttcatacttttttttttttttctttttaagacagaatttcactcttgttgcccaggcggagtgcaatggaacaaccttggctcacggcaacttcagccttcccaggttcaagcaattctcctgcctcaggctcctgggtggctgggactacaggcgcgtgccaccacgccaggctaattttgtatttttggtggggacattccatgttggtcaggctagtctcgaactcctgacctcaggtgatcctcctgcctcggccttcaggggtgctgggattacaggcatcagccactgcacttggcagatcttcattcttttagtaaaaagtataaagccacacatggtttatttgaaatattttataatttaaaaaagtacagaagcaggaaaaccaattctaggttcaagtgagggatgatggtagtttgaaccaaaggattgcatgtggtaagaaattgtgatttaagatatattttaaagttggaagtagcaggatattctgatggagtttgactttggttttgggcccactgagtttgagatgcctttgagaaatgaaagaagtagagagagaattaaaaactggccaggagtggtggctcacgcctgtggtcccagcactttggggggctgaggtgggtggatcacctgagaccagcttgggcaacatggtggagccctgtctctacagaagatacaaaaattggctgggcattgtggcacacacctgtagtctcgtctactcacggggctgagatggaggattcaattgagcccatgagttcaaggctgcagtgagtcgtgattttgccactgcactcctgcctgggtgacagaagagaccctgtctcaaaaaagaatctgaaaacaacggaaccatgccttcagaattctataaagttattttcaactgataaatctatattcaggcaaagaatcaagggtgaaggtaaaataatacatttttagacaagcaaagactcaggggttacatgtaccctttcttgggaagctatcggagaaaatactccagcaaaatgaaggcgtacacaaaccagagaatgacgtggatccagcaaatagtatccaacacaggcaatattccagctatggagctagctttaaaaagaaacagtaaaaatactaatagattagctgggtgggatggcccatgcttgtagtcccagctactcaggaggctaagcaaaaggatggcttgagcccaagagttcagagcagcctggccaccatagtgagatcccttctcttaaaaataataggttattgccagatttggggcatttggaaagaagtgcattgaagataaagcaaaagtaaaaaaaaaaaaaaacaaaaaaaaacaagggggaagggttggttaggcaataattaattctagggcaggaagaagtacaggataggaagtaagagcatcatacgctgtttttctcaacaatgggcaatatgtacatagtcataatgatgtggtgactgactgcttagcccctaaatctggtaactactttgggacaatatggggggaaaagtgaagatagtgatggtgtaagagctaaatcctcatctgtcatatcaagaaatcactatataatgtataacataatcaagaaatgactaagtagttatgtgaagaaaagaatggaacattgctagaagagttagaagtcattgctccagagaattaggagggatggggcaggggactgttaggatgcattataaactgaagaggcttttaaagattacatgtattaatatatgtattcacttgaaaaactaaaaaaatagtaattttttaaaacccatggaggtaactaccagaaggaaaaactaagagaatgaaaagtgctttcctctggaaagaacaagtcgcaggactgttttcattgtaagacttttggagccatttgattttacttaaccattttcatatatttctttaataaaaataattctatcttaataaaaagttacactcattcattaaaaaaagaattttaagactgtaataagaatcatagtttatttctgttagagaaaggcaatgtgttatacttggaaagaggtcatattaattttatcacatttttgggactcagcatctttatattttctgattttaaataaacaactttgcttatgaa

SEQ ID NO: 12028 - DNA, 3367 bp, Homo sapiens
tgcctttgcagaatcaaatgcctactattttatatgcatatattaaaagaaaagcaaagacctgagccgaggagaggatgaattcaagtttccttacctgcgtatctactaacaaacatgagacctccctgttacaggtggtcagttggccaaatgtactaacgggcacatgaaagaaagaacagcaaattaccaagtgtctcagaaaatgacaaaaccatattttgacaagtttatttaatccagtgtggtagaaaaggcacaattccaatgtatcatttagaattgaatgtcattaacctggctttgttctttggaagaaacaacttctttaaagagcttctttggctctagaaaaatttcaaacaattaaaataagaaaaaattttaaactggttttttataatgaaaatatacatacctttgtgtatagacaagcccatgcccattaaaataaagttatcctgtaacataaattttattaaataatacttccccacagatgagaggcacgcaacacctatggacaaaagggagttacagaggctgcttaaaagatggagaaaagcctgagattgaaggaggaaaaaaacccagtatttaaagtctataaaaaatactcaaaatagtgggtcttcgagtttaaaatagtcattgttattttacattctaaagtgcatgtaggttgatattttttaaaatatcattggagaatttaatctttctttataaaaatagagcatttttctgctttctggcaaaagttggggataaaaggaaaaaaagttgtcaaaatgtaattttcagtccaattcaccaggaaaacatgcttgtgaattgtgcagtaaaaggtggtaatgactactggaagctaagtcaaaggtgatttcctacctgattttacttacttaaataaaagttacttacaatgggagtgaaaaactgaggtttctgttatttagtagagaaatcaactccacgtttacttaaagagatggtaaggtcaaggttcaaatgctactgtgttttaatttggatatttgaaatttctcttgaggcaaaaaaaaaaaaaaattgatgcctctccttaaatctaggatgaagtgtcaacatggagacaggtaaccactgttatagagtcttgtcacctaaagggatgtcttggttaacacgtaacagtgcaagtttggccataggttatttatttgtacttttttagtttgaaggactgaggaaacaatagctacagaaaatacttcttgtgccttattcctaacaaagctgaggtccctgcctggggttagttacaagtataaatacttaacgaggtgcgttcattataaaagcctcagtatagaaaccttaaagtttatctaggaaagtttagtatattttcaggtgttgctaaaaaattactcatctgtttgcaaaagtatgacttgacctatagaaatctgtttctttatgctttgtactcatacaagcatctaggtaggatattaataaataatacaggataatagcatcaccagtgtccaataacgggccatcaggaacaggattcacgtttggtggatatgagagaaaataaacacttcaggaaacttgctcaccacagctggagatcaggaatagaacctttccaagatatcataatattttctttataggaacactgagtaatggcaagaatattttgagcttttccatggttaagagcgatagtctcagaggctggagaaaatgttcattctgctcagtgatccaggagtgtgaggacagtagcttcctttccacgtccacaagacaatgacagatgtgtttccttctttgctctttctagggatctttctagggatgttgattctctcacaatatttcaatgtcccatttctgtgtttcttctccctccaggggctgatttacaattacatgagtcttgtcacaataatttcctcctaaaatagaaattccaaaagaaaagattatttgttcaggcaggtgcttagcaatttcacaattttcacaagcttctgttcagctcaccatttcggtggatgaatgtgtcatttacaaagaagtctgaaatgggaagctgagtttgaacaggcttagccattattcacctcaaattggaccttattatgactcaaattgaaatactaaaaggtataatacatgattgtataagtggcgtgccttaatgtgattctttagaacaaagtgctcttgagagaactctggctgaatgtcaggtactgtgtttttgtttctacaccaacaaaactgtgactaacccaattaaagcaacagccatgaataatattggccctgaccttgctgaattcaaaaacaaggttaattgatacctaccataaattctacctgagggtttttaaggaccatggcaattcctggcaaaaagctagagatgtttctaagaaacagatgacattcatttcatggtttatggtgcttgaaatttagaactgttctgagttcacgtagcaaatgaaagttttacaactgtactaatgaacaaaaaccctaagctttgttgtttggctttttctgctaattgttttgtttgtaaaactgcctatcttaattttcttcaagcataattttaaatgacttaacatttctcttatacataaggatgtcctttacccaaaatgaggagatttggaactgaaactaatatccagggacacaacattgggtatcatcaaaggcccacctttaacatcaaggacaagttgatcactgagataagagctgatagttccatttttattcagtctccacttctgcctgaattgcccatgttcagtccatagagctactttagctccaggtgtgtcccggccaccaatcacatcaagacatgtatcactggcctaaaagggttaagaaatgattaattggcagtagtatgtttgctaaagtaagttgaattaggtcccttttatcttaggtaaacaagtcatagacatgaagtgtgtgtgtgtcttatctaaaaaaatactatatagtataatttcagtaagccttttttaatgtcttctttacggctgtgggtaggagatggtacagaaataaaccaactgaaatagaggtacttgtttttaataggatgtctacatctgacaacagatgttcaataaagatttggtgaattggaattaaatgttaaatccctgtttgcttaaaacgtattatgttgagcttggttttcttatgaaaacattgcatgatgggctaaagatatccagacaataattacttttaaaagtttttcatttttgaagcatgagaaaaagtagataatccattggtgatacaataaaacacagtttgaatgttt

SEQ ID NO: 12029 - DNA, 1185 bp, Homo sapiens
gcaagaaactgcctgctttacaattgccatttttatttttttaaaataatactgatattttccccacctctcaattgtttttaatttttatttgtggatataccattttattatgaaaatctattttatttatacacattcaccactaaatacacacttaataccactaaaatttatgtggtttactttaagcgatgccatctttcaaataaactaatctaggtctagacagaaagaaatggatagagacttgacacaaatttatgaaagaaaattgggagtaggaatgtgaccgaaaacaagttgtgctaatgtctgttagacttttcagtaaaactaaagtaactgtatctgttcaactaaaaactctatattagtttctttgggaaacctctcatcgtcaaaactttatgttcactttgctgttgtagatagccagtcaaccagcagtattagtgctgttttcaaagatttaagctctataaaattgggaaattatctaagatcattttccctaagcattgacacatagcttcatctgaggtgagatatggcagctgtttgtatctgcactgtgtctgtctacaaaaagtgaaaaatacagtgtttacttgaaattttaactttgtaactgcaagaattccagttcagccgggcgaggattagtattatttttaactctccgtaagattttcagtaccaccaaattgttttggattttttttctttcctcttcacataccagggttattaaaagtgtgctttctttttacattatattacagttacaaggtaaaattcctcaactgctatttatttattccagcccagtactataaagaacgtttcaccataatgaccctccagagctgggaaacctaccacaagatctaaagttctggctgtccattaacctccaactatggtctttatttcttgtggtaatatgatgtgcctttccttgcctaaatcccttcctggtgtgtatcaacattatttaatgtcttctaattcagtcatttttttataagtatgtctataaacattgaactttaaaaaacttatttatttattccactactgtagcaattgacagattaaaaaaatgtaacttcataatttcttaccataacctcaatgtcttttttaaaaaataaaattaaaaatgaaaagagactcaattgt

SEQ ID NO: 12030 - DNA, 1235 bp, Homo sapiens
tgcaggcagaatggctgtgcaggggtttggagggcacacgatgtgtgctccccatgccactggtcggcactttgccactgtgtggcagttacccgtgccttagtcttctccactctgcaccctacctcgtgggcagatgataacatgttttggatgctgtcagtgatgaatggtgagatggcagattgtcagagtcaattgattaaacctcatttatacttctagtgtcattttatatgactagtttacaaaataggacattgagtttccaagtattgagataagggaatataaatagtattatatgtatcaggaaatctctcatcttgtttttgtttcatgtattttttaaagttttcatttgtgccacaaaaatctgtcgtggaatatattttattttcattaattcagtgaagttgagacttcatagtaattttagaatgcaacttgaaggtaaaaattttactttgtcaatactgaagtctctgctgtaatccttatatatctttctccagagaacataatattgtcaaatagatacacatttttctaataggtatttagaagcacttgaaataatctctgcatgtgttacaattcagttatttctgtagtttgtaaactctaaagtgacattactattattttagagatgtctaagttgtaattttgatttttgtggaaccattgtttgttaatgttgggattctctgcacttttgaatgtgaaagcttatatccctgaattctgatacttaagagttttctatttcagacatctctgtgtggaagttgagactaagaataatcctagggatgtcatgaatttaggcaatgtttctcatttggaaaatgaaatgagaaataatttccttctttaaagcaagtatatatagtatgagaaacttggaggcatttcatacacacgtttcttaggaaaatggacacattgaaaatgtcctcttttttatattagagattctgcagctctttgctcttaagagcaaatcacaacaggattcttaatgtatgatttctttgttcatatattatgaatgtattattttatttgcttcgtaataaagtttataaggaagagcatctcatacatatcattatcgtggaacacgttgaatgtttgtgattctgtgtggcctttttggggctggaaaatgtatgaattcttcaactgtcttacaagagatctgctaataaattttattattaaataagact

SEQ ID NO: 12031 - DNA, 3401 bp, Homo sapiens
agatgatgctgctttttacaaagcatcgttttaaagcacatggccttttttttttaattattagtggtagtaatatatagaatgtattacataactgtcactgaagtggttggggaaaatgtggtgactgaggtacaggaaactactaatcttgccatcttgctttaaggtgttatggtggcacagttactgctcgcctgttaaatttcaaatgtcctgtttgatactactgtagaacactatttttaatacagaaaaagctccctataatgcacttcagagaaattaaaaatcacagagtatttattaccaatgctgcaggtacattaatgaactcgagatggctctgtaagcctgactggcaataacgcacggtactgttcttgaaatacctaatggcttgaaattctagtctgtttgtgaaagatgggtactatcatgatttcctcttctattcctatattcttttctggattttttttaataattagtgatataagcattgtttttattgcagccatatccacttatccatcttaagatctgtagctgggattttctgacttgtaatgagcagggggattgctttttcactttgtgacactctttagagctttaatgcttcacagtatatggcctggtctcatccttgcgtgttccacttgaggccctttggtgtcttgccccattcttgtgtttataaaatgtttgagtatttctgatgagtgatgcttgccttagtctcatgaattcagatcccttcatgtcctttaagtatgctcctcaatgtgtaaacaggaacaactttatgatttgaaagctttaaaggagattcttctcccacccccaactttatttgcaatgggatttttcctaggagagttatgaaaagttgaaggcttctaagggaatactgtaaacatgacccacttatatttatcacagtgaaaggcaaaattattcactcagaagtaatataaattacctctttaaaaagtaaccagaatttgtcctttttggttttatacattcacaaacatatacatttttcttgagtctcaaggtattttatatttttagtcagaaaaaataatttttcatttcagttttccataaactgttacacaaaatataaacctaacgtgtatttttcaggactgcgtgatcgtgcactttgtgtggtaagaggtttgagtagtcctatatgtcacctagggaacagacattatagcttactagcaaatgaatattcatgccttgtttttgatacctcctggcagcttccatgtcaccacttgttcatacctgcccagagctagttttagacatggcaaaatagaaatcatctgtaatttattagctaacaatgtaaaaccatcttttaaagccttcagactgtcaagacgacatgagcagctcaccatatgataaaaatacataaatttgacattccctcttccataaacctttgtttgtagatttaatgttgaacagtacttttccataaagttctagtcacttctgttggcctgagccaccagattatgatgttgccagaattcactcaatttgaataaagatgaacagtatttgttttcttgtttccatgaattatatcagtattctaaaacatcgcttcagaaagagaactgtttatttctgcaggcttcctgtccttttgtggtatggttttttggccttattttcactggcttttccttctccaaactttgaggcgtgatttcattcattgaagaatcaatacatattttgtttcaaaatgtttgaaacaaaagacatagatggtagacttttattaaaacatatatggatgtggaaagcacatatattaatgcagtcatcccttttcaggtgggaagagagcaaaccagttgattttttaattcatccttagtacacagagaatatacttttcctcaagtaatatacctgtttgaagctttaagagagatgtttttggtaactatttcattttcccaaagaagtttgctattcttgtgttaattgtgtatacctgattgttttttcctggaggtttttgttgttgttgtttagttttgggtttttttttttttaagaggggcaagtgttttctgaaatgatgcatattttaagactcgattcatattgccactgtgctatccttgaactaccaataatttttataaaatatctagtttttactacttttatataaactttactttccagatgaagagctgagcctgattcaaatggtttttctgctttatacttctttttagttcattggtttttatagtagaggttttctattttttttttttttttttttactacatttatatgtctgatacatatacggctttggagacaatcaagtaacaactgaaaatgtgaaagtaaccatatctgacaaaattcccttgaatttttatcctttgcttgcaacatttaagactcaaagtcactggtatattggattaagttttttcctgttaatgcaattatagaaatacatcggagacacaacaaatgtggccattacaggtttcataaaattacactgacttggctgttacttgatcttaggaaacagcacagtttaagatattgtgaattctgacttatactttattaaatgctgtaaatctaaatagatcctgttggatgtgatgggtctagtccagtttatttaagttcatgtttcactgtttgcactttgcattgaacaatgggtttattcgctgatgtaaacggttcgagtgaagaattaatgcagtaagtatgacaacacatacacacttgcctctccccatctccagaagaggggagcagagtccgagcttatctaaatatgaatgtggccacaaagctgtggaaggtgacaaagcttaaacacctttgccctggctctgcattgtcacctagagagcaagaggtctatagaaacatcatgtcacatgaaacgattctctgctttttggttctgaacttgaagtccctaaactgcaaaatctaagagttgggtggttattaaaatgcttttaaagtcaactgtggcaccaattctaatgtaatccaacttgtgactgtttttttttgttttgttttgtttttgtgtgtgtgtgtgtggcactgggaaaagtggaaacaaacatgtattgaaatacatattggaaataaaaatggtttgagcgtcagtgatattctcccagaatgtacttatcttacctcggcatgtactgtagtcactcagtatttgtatatgttgctagaatttagattgtaaaatagtgaaattttaatgtgttcatttgtttttaatgtatatatgtcttgctcagattatttggtttaaataaaacaaccttgaggtttgtagcttttccttatactat

SEQ ID NO: 12032 - DNA, 90 bp, Homo sapiens
actcaacatccttcagacttttaaggcattccaaatcccagtcttcatgttgaactgggttaagcatttattaaaaaatcgttttcttct

SEQ ID NO: 12033 - DNA, 345 bp, Homo sapiens
ccacgctcaccctcatccagtccatactgatatttttgcaaggaactcaatccttttttaatcatccctccatatcccccaagactgactgaactcgtactttgggaaggtttgtgcatgaactatacaagagtatctgaaactaactgttgcctgcatagtcatatcgagtgtgcacttactgtatatcttttcatttacatacttgtatggaaaatatttagtctgcacttgtataaatacatctttatgtatttcattttccataactcactttaatttgactgcaacttgtcttggtgaaatactttaacattataaaacagtaaataatttgttattttt

SEQ ID NO: 12034 - DNA, 2099 bp, Homo sapiens
aacagggggaaagcagactgaccctctttttaaaagtttaccccctcttcaactgaaccctaaagacactgtcatgaactgtgttgaatggtggaaatcagtatttctgtttgtggtgttgttatttgttacatctgtttcatgtctaggtgttgtgggtgtggctgttgaaggaagtttgcagtcttgcagcttttattccctgtgcaacaaaagattagaacatgttaaagggatttttaaataaagttgcaaagagtacaaatgataattggccatgcaaataaaaactgatttgttgattttttttttaaggggggttggcagttgattatgttctggatgattccgtctatatatgtgtgaataatgtaagtattttacagcatgttgatttttaaattaacgtagtaaatgctgtaaaatagatttatattcagttaaccgctttcagttgattttttgaaagaaacaaaggttaaatgggggattaaagtaaaattgagagaccctttaaaccattgtcagcatgcacaatgcctctgattctgcagttttagaaacttggtggcacttattaatcctcttggcccctttccactctaatggatagtgtacattcttcttaaagtccacaacagcagattttcttgcagtaaattatgcagatgcaaaatattctaattgatatatgtgttggaagactgagtattgatgggggagtggaccagacaaagaggtaagatgaaacagtagtgtgtttataattgtctgtgactattttctataataattagtactatttaatggtgagcttttaaaaatgtaggatagagggtacagtggcactgtatatactatttatagtctcagctactagggaggctgaggcaagaggcttgagaccaggagctcgaggctgtaatgtgccatgatgattgcacctgcgaatagccactgcactccagcctgggcaatatagcaagaccccatcctttaaaaaattttagaacttttttaaaatcaaagtgcagattgcttgtatgtaaaacccaaataaaggtagagtaagtgtgatatatgggagtattaaaatagcttaaaatttctcgtgaaggacatgtggctaaagggtcaaaaaggatgtaagacttggagccagagcatagtatttcctgaaataacaagtttagtgctttaactatggctacatgtgcttaaggaattttgagccacttatttttgaagatgctgaggacatgtagagtgctttttgtagtgagctaaccttgatctctaaggactaactacccaggtccaggtcttcactaggggtactgacagtgtttaagctttactccacctccttacttagaaatcactttacgatttatttccattttccacttttatagaccatccttttgcttatatgctagatttttctggtgagggaagggttgtgttcttcaggggtcttttgttttgaaatactcaggatggggagaggtttatttaagaacgaattataattatggtttacactgttgggagtaaaggagcatttttacaccccttaagggtgcttaattctgttgaaaccaaaaagatttgtctacaaatgctatcttttttagaaactattagaaatgactccctttcaaagtcaatctttggaaaatattgaggaggtcactaattagttggtgcagttaatataattcaagatgatttggatgatgggaagtttgagaccgctgcattttgtttttaaattatgcaccttctgataacccccaaatacagaaatgttctacatctctgaatgacctctgactttaaaaaagtttttatttgcatggctgtatttacattaacactgacattttcttctactcttctcccttctttcatcttggggttgggtagagaaacacaaaggaaactgaagcatgtgccattctatactgtcattccaaattctcatggactattgcctgttgtgaaaatgtttgaaactgcactgaaagctgcatctgtctgtatctttcttttgtaaatgacctcacatgtaaattcaccaaataaatattacattc

SEQ ID NO: 12035 - DNA, 1158 bp, Homo sapiens
atgctgcacaaagttaccttctgtttcatcattgcaaacaaaaatcattgaaaatactatgccgcattcatttaaagctattttgtttactatgtataaaagtctacaatctaattaatagcaatactagatgtttattattagaaaagattgctgagagtatttatcaggttttacaaagtcattttaagaaagcaagatactgatgttaacagaataacatttttggggaagctggctccctattcatggtattttaagagatcatttgtatattatttatcacactgttgtaatgatgttttgagatacttttataacaaaattaacatcaaaaaggtatatactttttaaaaaaaatttacttttattgatgtgtactcttcctattgatgagttaattccataaatctctacttagtttaacttattggatcaaattatcttcagcatgtatatctggggaaaaaaggtccgaattttcacatttatatttaaacttcaattttttatatttaaacttcaattttttagcaacagctgaatagctttgcggaggagtttaatagttacacattcatgctaatatacatttcctttaaacatccacaaattcttaaaaagattgaatcagtaaatttcatttcagctaaaaatggagtctaatatattgtttcaaaagatacatttttacccaccataaatgttacaatatctgaatatgctttgtcaaactatccctttatgcaatcgtcttcatattgtttttatgattctaatcaagctgtatgtagagactgaatgtgaagtcaagtctgagcacaaaaagataatgcacgatgagattgcctaccattttataggatatttactatgtatttatacgttaagacctctatgaatgaatgtatcagagaatgtctttgtaactgtttaattcaatctgtaataaaaatctaactaactaactcatttatttctattaaaaaggtattgtcctttaggcggggaatgggaatccttgctgcactgttgcagtcattctgaaaggacctttccctgtacttacctttcaacatgcttcaatcttatcaacgctacattttgtatttttcaaacaagtataaattctgcaataaagagatgtagttttttttt

SEQ ID NO: 12036 - DNA, 525 bp, Homo sapiens
ccaaaactcctgttctgaaactgattagaagcctggagaagatggagattacttgttacttatgtcatataattaacctggattttaaacactgttggaagaagagttttctatgaaaaaattaaatatagggcacactgtttttttttcagcttaagttttcagaatgtagtaagagatgttaccatttttatttctataaagactgaatgctgtgtttaaataaattgaaaactacgtaaactctggaaagtattctataagaaaaagctggacctaggatttagggctgcagttgctgtctgcttctgaatcactgggggtgtctcctaagaactgtgcctcgggtttttcaataggaaaataaggtgagactcttccatggagaagtctggcttagtaagggaatattttggagcatatttgttattgttgggtagaaggggaaacctttgaaatagtcttaatggatagtttataatcaggcattcatctaaataaaattctttcttttttttgatcaaa

SEQ ID NO: 12037 - DNA, 1667 bp, Homo sapiens
ttaatctgtacaaacatgacacagatgttctctaagattactggaaagcctcttaccagcatttgtgttagccagctcacagagaagaaaataacttgcagtagttttataataagtcattggaacattatttaaaatatgtaggacacattattagaattgttgggatctcatagatggaatgggaatgggggtgatatagataaacttactagatataaattaaaattttataaatatttcatatttttctgagtaaatatgattggattatgcaacagcatatgtaatatgggaatgttttgtagataataaaacttacatgatctgtacttccacgtgactgggtgctgaggggagttaaagcctccctggtgccagccccagtgcttgtcaaatttgctgacaggtcacatcatattgtaattctattctttgcagctcaagcatgcagtatgaatactgtgtattttttaaaaaaataatttagtatcaaggcttcagaaaatgccatttacggcatcccttctgtatgtaacaaaaagacattcataatgttaggaagatgataaaaattcgctcttttaaagtgcagcttattattctcaattgctaaatacgattactctgctttttttttttcatttcttttgatgtcatatgtgagtatcttataatttagttcatttgttcagggtaaaatttgaaacaaaaaattttacctgtgcaaaatagttttttaaaaattatacatgtagctcaacttgaggtactgctatataaatattcactcacattatcacggaatttatgtatagtttctctaatatagaagataaaattggtgtcctcataactttaacaaagaaaaccctcagtcctatttattaatgggtagaattaaatatataattttatagctcagtttacccagtattcatctgcaaagccagattgctctcattgcttttatatttttaaattgtagcttttagagacctatgatcctcatggaacttaattttttattaaatattcaggtaacagttctgaattcatgtgataatggtggcattatatatgattaaacacttcagaactttctaatgttatcaggagtattttgagggagatatgattatattgtattttctcagataagaaaaatgttttttaacaatattattttaatctgttttaagcatctcttagatttacattataactacataaagcagtgaagcaaaggcaaattaagataaagctagaaagtctgaacattttatttcaaaatcatacgaatcggggtcagttaagcctcagtattcttagcttttgttgattttggcactatctttatattattaaatatatttgttgtttggatatttcatataaagatggctataattacatatttcattcccaatttgtgtgtgttggggggtacttttaaaggtgactattgttttgtacatctaattttgggaaagcaagtctataagacatcttgtgatttcttaatgtttttgtttgtatgtttttcaaagatatcactgtcctttatcatgttttgaagattgtttaaaattcattttcctaaattaatgtgcaagtaatgttttgaggatatcagtgttttatattaaacatatttccaattcatt

SEQ ID NO: 12038 - DNA, 1719 bp, Homo sapiens
gtatgttaatgaagataaaaagaagtgacatctcttgtacactgaactcacagaacatttgtttacaattctgtgtgactgtctgcttggagtttacatatcaaagttctgggctgtttggtaacgtaacgtttccaaacattttgtctggccaatgggttctatagaaaagtccgtttagtgtagagaaattgaaaacagatctattaggttggtgcaattgcttttgcaccaacctaatatttgatggcagtggtttatcatgatataccttttatgaattaatgtttataaatgactgtactgaatttaaaaccgtacagtttcatttgcattttgacattactttattatacattttgcatttaaaaggctgcaccagttggcttttcttctgttttattctcaaaatatagagattctgtgatttatttgccctgtttatggattaaaaagaaaattctaatataaagcatttcaataggatgcataggtatattacgttttttaaatgctttagatctgtgattcttgacttactatttattttatccccttttaagtcagggatgctttattctattttaaagcacttatgagttacatgttgtaatcaagtttgcacaatatatttatctatatgaggaacccataaatgaatagctaatttttaaaatgccattaaaatgcatgaaatgcttattaaaaccttactatactatttcttcaaggcaagtaaattgaccatgagaaaagaacacagttattaaacactgttgacaggaaaattctccttgataacataggacaattaatggaaaaaaaaattctcattatttgcaaagaatgaacaagttaatgaacaaacaaactagatttggtatgttttcagcttttgtatcatgtttaattgtttaatttggttgaaaaactgcagttgagaaatcagatagcaatatagacattcacagcagctctgtggataccatgtaattgtcaggtaatttcagaatgttgaaaattattcagtgcagccctcatagtatcatacttgaagaaattgattacagttccactaaattgttgaagataaattatttttaaaggttatgaaaactaagttatattaattcatatgtttgatttttaaatcccacctcctcaagctatccaattttctgactttgaaaataaccatgagagatgccacatttctctctgggaaactaccactcaaagaataattgttaaaaattaagcttttaggtattagaagctgttataaagtataaaattaagatataagcagatcacatgtaaatcattcctaaagcacaagaaaagaatgtgccttgatgtacatatattactaagttgcctctcccagtttactttaaaaatggctttaaggataaagaataaatgtgatagctgtgcatgcattatatatttgcatttgcaaatttcccattgttttaacagctgtgtggctgactttcaattttaagacgtgaattgacatacagcccataactttataatggctgctcatttatcttatctttcagttagtggaaaaacatttcaacctgactaaaatttggaattgtgtcttttatgttccatcctctgttgttactagatttagtttaaaaattgtgtatgaccattaatgtatgtcataaacatgtaaataaaagatgttgaatcttgttgaaa

SEQ ID NO: 12039 - DNA, 45 bp, Homo sapiens
actggcagattagatttttaaataaagattggattataactctag

SEQ ID NO: 12040 - DNA, 704 bp, Homo sapiens
cagccagaactgtagacaccaaaatggaaagcaatcgatgtattccaagagtgtggaaataaagagaactgagatggaattcaagagagaagtgtctcctcctcgtgtagcagcttgagaagaggcttgggagtgcagcttctcaaaggagaccgatgcttgctcaggatgtcgacagctgtggcttccttgtttttgctagccatatttttaaatcagggttgaactgacaaaaataatttaaagacgtttacttcccttgaactttgaacctgtgaaatgctttaccttgtttacagtttggcaaagttgcagtttgttcttgtttttagtttagttttgttttggtgttttgatacctgtactgtgttcttcacagaccctttgtagcgtggtcaggtctgctgtaacatttcccaccaactctcttgctgtccacatcaacagctaaatcatttattcatatggatctctaccatccccatgccttgcccaggtccagttccatttctctcattcacaagatgctttgaaggttctgattttcaactgatcaaactaatgcaaaaaaaaaaaagtatgtattcttcactactgagtttcttctttggaaaccatcactattgagagatgggaaaaacctgaatgtataaagcatttatttgtcaataaactgccttttgtaaggggttttcacataacat

SEQ ID NO: 12041 - DNA, 4194 bp, Homo sapiens
ctgaagtgaagtgatggactccgatttggagagtagtaagacgtgaaaggaatacacttgtgtttaagcaccatggccttgatgattcactgttggggagaagaaacaagaaaagtaactggttgtcacctatgagacccttacgtgattgttagttaagtttttattcaaagcagctgtaatttagttaataaaataattatgatctatgttgtttgcccaattgagatccagttttttgttgttatttttaatcaattaggggcaatagtagaatggacaatttccaagaatgatgcctttcaggtcctagggcctctggcctctaggtaaccagtttaaattggttcagggtgataactacttagcactgccctggtgattacccagagatatctatgaaaaccagtggcttccatcaaacctttgccaactcaggttcacagcagctttgggcagttatggcagtatggcattagctgagaggtgtctgccacttctgggtcaatggaataataaattaagtacaggcaggaatttggttgggagcatcttgtatgatctccgtatgatgtgatattgatggagatagtggtcctcattcttgggggttgccattcccacattcccccttcaacaaacagtgtaacaggtccttcccagatttagggtacttttattgatggatatgttttccttttattcacataaccccttgaaaccctgtcttgtcctcctgttacttgcttctgctgtacaagatgtagcaccttttctcctctttgaacatggtctagtgacacggtagcaccagttgcaggaaggagccagacttgttctcagagcactgtgttcacacttttcagcaaaaatagctatggttgtaacatatgtattcccttcctctgatttgaaggcaaaaatctacagtgtttcttcacttcttttctgatctggggcatgaaaaaagcaagattgaaatttgaactatgagtctcctgcatggcaacaaaatgtgtgtcaccatcaggccaacaggccagcccttgaatggggatttattactgttgtatctatgttgcatgataaacattcatcaccttcctcctgtagtcctgcctcgtactccccttcccctatgattgaaaagtaaacaaaacccacatttcctatcctggttagaagaaaattaatgttctgacagttgtgatcgcctggagtacttttagacttttagcattcgttttttacctgtttgtggatgtgtgtttgtatgtgcatacgtatgagataggcacatgcatcttctgtatggacaaaggtggggtacctacaggagagcaaaggttaattttgtgcttttagtaaaaacatttaaatacaaagttctttattgggtggaattatatttgatgcaaatatttgatcacttaaaacttttaaaacttctaggtaatttgccacgctttttgactgctcaccaataccctgtaaaaatacgtaattcttcctgtttgtgtaataagatattcatatttgtagttgcattaataatagttatttcttagtccatcagatgttcccgtgtgcctcttttatgccaaattgattgtcatatttcatgttgggaccaagtagtttgcccatggcaaacctaaatttatgacctgctgaggcctctcagaaaactgagcatactagcaagacagctcttcttgaaaaaaaaaatatgtatacacaaatatatacgtatatctatatatacgtatgtatatacacacatgtatattcttccttgattgtgtagctgtccaaaataataacatatatagagggagctgtattcctttatacaaatctgatggctcctgcagcactttttccttctgaaaatatttacattttgctaacctagtttgttactttaaaaatcagttttgatgaaaggagggaaaagcagatggacttgaaaaagatccaagctcctattagaaaaggtatgaaaatctttatagtaaaattttttataaactaaagttgtaccttttaatatgtagtaaactctcatttatttggggttcgctcttggatctcatccatccattgtgttctctttaatgctgcctgccttttgaggcattcactgccctagacaatgccaccagagatagtgggggaaatgccagatgaaaccaactcttgctctcactagttgtcagcttctctggataagtgaccacagaagcaggagtcctcctgcttgggcatcattgggccagttccttctctttaaatcagatttgtaatggctcccaaattccatcacatcacatttaaattgcagacagtgttttgcacatcatgtatctgttttgtcccataatatgctttttactccctgatcccagtttctgctgttgactcttccattcagttttatttattgtgtgttctcacagtgacaccatttgtccttttctgcaacaacctttccagctacttttgccaaattctatttgtcttctccttcaaaacattctcctttgcagttcctcttcatctgtgtagctgctcttttgtctcttaacttaccattcctatagtactttatgcatctctgcttagttctattagttttttggccttgctcttctccttgattttaaaattccttctatagctagagcttttctttctttcattctctcttcctgcagtgttttgcatacatcagaagctaggtacataagttaaatgattgagagttggctgtatttagatttatcactttttaatagggtgagcttgagagttttctttctttctgttttttttttttgttttttttttttttttttttttttttttttttgactaatttcacatgctctaaaaaccttcaaaggtgattatttttctcctggaaactccaggtccattctgtttaaatccctaagaatgtcagaattaaaataacagggctatcccgtaattggaaatatttcttttttcaggatgctatagtcaatttagtaagtgaccaccaaattgttatttgcactaacaaagctcaaaacacgataagtttactcctccatctcagtaataaaaattaagctgtaatcaaccttctaggtttctcttgtcttaaaatgggtattcaaaaatggggatctgtggtgtatgtatggaaacacatactccttaatttacctgttgttggaaactggagaaatgattgtcgggcaaccgtttattttttattgtattttatttggttgagggatttttttataaacagttttacttgtgtcatattttaaaattactaactgccatcacctgctggggtcctttgttaggtcattttcagtgactaatagggataatccaggtaactttgaagagatgagcagtgagtgaccaggcagtttttctgcctttagctttgacagttcttaattaagatcattgaagaccagctttctcataaatttctctttttgaaaaaaagaaagcatttgtactaagctcctctgtaagacaacatcttaaatcttaaaagtgttgttatcatgactggtgagagaagaaaacattttgtttttattaaatggagcattatttacaaaaagccattgttgagaattagatcccacatcgtataaatatctattaaccattctaaataaagagaactccagtgttgctatgtgcaagatcctctcttggagcttttttgcatagcaattaaaggtgtgctatttgtcagtagccatttttttgcagtgatttgaagaccaaagttgttttacagctgtgttaccgttaaaggtttttttttttatatgtattaaatcaatttatcactgtttaaagctttgaatatctgcaatctttgccaaggtacttttttatttaaaaaaaaacataactttgtaaatattaccctgtaatattatatatacttaataaaacattttaagctattttgttgggctatttctattgctgctacagcagaccacaagcacatttctgaaaaatttaatttattaatgtatttttaagttgcttatattctaggtaacaatgtaaagaatgatttaaaatattaattatgaattttttgagtataatacccaataagcttttaattagagcagagttttaattaaaagttttaaatcagtc

SEQ ID NO: 12042 - DNA, 1664 bp, Homo sapiens
aacatactggttttcatgtttctgattagttgggttttttatatcaaactatatttcatgttgcatagatttcaaaacataattttatgttcaatgggtatttttttacatatacatactcacatattatatcatggtgattatgatggttaaagcctttacactgaatgtaatgtttaataaagaaattacaaattctcactttctaagaagctttcactaatcattacctatgttaaagctcccacctggtggctcatttttcatagcattccttgtgtaagccaaggtatatgacctgcgttttctgcagatgctgctgctgtcacaacatgaactgctgacacagtcctttaccttgctccacctctgcagtgatcataagtgctttgtgcccagaggccactgaagatggtaggcaggattctttccaagaacccaaactgcctttgcctcagctttatggttacctaaaattgccactttttttaggttaaaaaaaacttcagtatcctcattaacatttgaagttggtttcttatgaatatttcgtggctaaaatgattttatagggaatctatcttctaggatctaagccactaaataaaaggataaatgaatgatgataagtcagtcactcatgtttgactctgttcttagaatgaagagaaggtgcatatgcatgtctcaatttctacctttttctgtggtatcggctatactagggaaccattttgtagaagaaggaacgatgacaggtcgcatgaagatcagcctctagtactgatgatctttacttatgcatcttcctgagcaactttctaggctaggatttctaaattggtgaaaaaagcagcattagagtgccagaattagcactggggaaaactggccaggggaacacaaagcaggagacagcctgcgttaattttttttttttaataattttcaaaagcagtggtagaaaatttgataagaatgctttatgtttaggacaacaaaaataattttaaaaagttattttttaccctaatacttttctccactgaatattattatttttttcttagctttttctttctagatgtattccccaacatgctcacatacacagatctttccctttccttactagacctctctttagtttaagataagtttagacaggagaaagtgtatgtaaactacctgaaaggatgacaatcaatacaatgacaaatatgccagtttatttaatttgtttaaaaaaaaaaaggcagaaaacccaccatgggaaaataagcattttttaaaatctgaagttgctcttttcctgtgtggtctttgggaggagtctaatacaaaaactgaaaacctttggtcctgggaatttattttcatggctgttgtcatggctgagtagttttttgatgaattcaatcaatgcagagaacgcttttagataaatcagaactctccttaaaatgcatttcaatcagaagcaaagtacacccattatttatgcagacatgtaaaaaatctaaaaattcttgcaatgagtagtataagccacctatttttacttccttctctgaaatattccagttaactcagcttgggttctgtgctcctcctctcttcctatagaacactgtgcataccttgaataaagagcttattatact

SEQ ID NO: 12043 - DNA, 589 bp, Homo sapiens
acattatggcattttggaatttgtaatctcatgatatttttgatgtatttatctattggagggggggtgggtaggggagttaatttgtgacttcgtaacaataagaagttattatctaatttagtaaagaccctgatctgttgcatgttttttatttgatagtttgaatagaaatttaattttctaagttttactttttgtttctggcttttatggcttaaggttttctttggttcttacattagaaaatcatttttaacctccattatcatttttctaaggttctttcctttttcttagttgctttctattctgttttgcctgtcttatttattctcatttgtgattatttagatcttaagaccaaactttcttggtataacagtcctaaagattacaaaataaaaatatagagagagtaaaagtaaaaagtaaagtaaaaagagagaaggtatgattttactgctagagaagtttgtctctgaagaagcacaaaagaaaatattagtgaatttaaaataatttttatactgctgtagcataatttctaaatttgaaaaaaatgcaatggtaataaaatgtataaaaa

SEQ ID NO: 12044 - DNA, 139 bp, Homo sapiens
cagggaggaggctgagaactcagttttgtgaccatgacagtaatgaaaccagggtcccaaccaagaaatctaactcaaacgtcccacttcatttgttccattcctgattcttgggtaataaagacaaactttgtacctc

SEQ ID NO: 12045 - DNA, 219 bp, Homo sapiens
ctgtgagaatacctgtcccagctatcaatgagcacaacatttcagtagagaagaaatagaatcttccccatgtacatgctgttgatttcaggtctttgttataattcatataggcttgtgaatatagcacttattttaatccagtagagacttgcataaagatcctaaacagatgcattgttgcttttctgtgctgtctctgcagattaaaacataatg

SEQ ID NO: 12046 - DNA, 723 bp, Homo sapiens
gtcagagatggtattaccttttaaaaaatgctaataagaaaattggaagattcttttaaaaatttttcttttttgttgttgttactgtaaagtctattctgtttaacaataagaaataagaaataatttttttcaaataagaaaattgtgtactctagaaatggagaccgatttacaatttatgtattccctaatccaattatctaaatcttccttttctttcagaaatattaataatatctagagttctctaattttcatgtgagctactgaaaaaaatgaaaatgtcactcaagcttaacttttgttattccttaaaagattgttattgtaattttgttattccttaaaaacatttaaaagcagattttttcaaaatcgatatgtgaaggactacagaatcacctcctcttgaagatattgaaaaagaaagacattatgccctttctccactatagccaacactcagtcaagcagaaaatacaaatccccccaaaactttgagacatagcttatataattttattatttagtcatagtaaaagaataaatctcctaagcataatatgtatacatattacacatatgtaaaaattgttgttttacatttacatatacgtaaagaagtatgtttttacacttttcttgataagtgttttttttttgtttagaaatgtctgaaactttagacaaaaacagtaaaacatttaatattcatttgtg

SEQ ID NO: 12047 - DNA, 211 bp, Homo sapiens
gtactaaaggagggatgtactttcagatcatgtaacctattacgaaggagtggaagaggagacaatttgaatgaatcctcatgatctacaaaacaaaatcatagtgactaggactccacagtgaagatggttgactagtgacacagccccatctaaagaatccctttctgtatgtctgaaaacccattaaaataaagtcactgcaattggc

SEQ ID NO: 12048 - DNA, 1847 bp, Homo sapiens
aatatcaggaaaaaggccacatctatggtaattaatggcagaaaagctggagagttggattctgcggtgctgctgacaggtgaactctggtcctctgcacctgtttatgggccatgcagactggtggggtggcagatgttagcctaagacccctagcagtgcctgttgctttgtgagtggagatagagactcttacatttaaaaatggaaaaacatttcacaaattaccataaattgtagttaatatgtagaaaaactcattcatactacttttctaaaatagacatgacttcagcagcagcttttttttgttgtattttgagacagtgtctcactgttgcccaggctggagtgcagtggtgcaatctcagttcagtgcaatctccgcctcctgggttcaaatgattctcctgcctcagcctcctgagtagctaggtacaggcacctgccaccacacccagctaattttttgtatttttagtagagatggggtttcaccatgttggccaggttggtctcaaactcctggactcaagtgatcaccctcctcagcctcccaaaatgctgggactatgggcatgagcccctgcgcctgaccttcaacagctcttttaagtgagttcttcagctaagcattgtgatggacttgagtaaaatggtagttggctcttgtgctcaattttctcttcctctgaacactgactactttaggagctgcttcattccaattgcaatttcataaaacgtaaagtattttaaggcaaagaaaggctgttaattccctccctcccccaaacacatgatttttaatattctaaacaatatttttcaaagttctcttaataacctgagatttctatggtttgactccaggatcaaaacacaagggactttgtattatttcacttataattgttttgtatatttctggagtttaaaatgtttaaggttgcttcccgctcataaatacataatatattgaatttaaaatgtgtttattaaccgattctccataaataaaaataagatgtgtatgtaaaataattcatctgttgtatttagagaaccatattcattgcatgcaaattttattgttagtgttcttaactcaagtaggagtaaaccaaaaagtgtgatttttcttttgtatgactcgtttgttctttattagttggtggtatgggttggatcatttgtttttaaaactacttaggtatgattcacatacaaaaagctgcacatatttaatgtatcctattgtgtaattaatttttaatttttttgtgtacttcctaaacttatagtcctgcgagtctgggaacagatctgtttttcacttatcctgatttaatgacagtttccaacattgttttgttattacaagtaggggatctttttttttgcccgtttaatgaagatactaaaaataatgcactggaaggagtggaagagttggaaaatttgtaaccatcataatacaggtgtaataggtttgggaaagaatcctcaaaaatgttaaagcaagggaggaaagtttgttgagaagcaagatgttcttctctcctgcccgcccccgccgttggttgttggtggtcagaattattgtgtaataaataatagacattttttcttatactatgtgtattgttccttttgtttcctttttaaacttctcccctgctttatttggatgggtcaagtttctgttctgtttccttcctttctattaatttggaaatgtccttggctttacgattctgcttgtagatacttcccctgcttctaacacatttcaataaacttaaatttctctatatacaaaataaattaataattggagtctacca

SEQ ID NO: 12049 - DNA, 644 bp, Homo sapiens
attgggcttggagaatctattctgaaaacattgactctagacttgtagaaaagagccattttagtttcaactcaaatgtaaagcaaagtagtttggtgacattttgcttttatgtgaaatagtgcacagtatgagttaatctgagcaggtctgaattgaccaaatgcttatctacgaggttcctagagctctgctgacccttggccgaaactctaaaatgtacctattaaagataaatgcttctaccaaagtaaaactctgtgagttgtttcagggcagaatgtaccagccagtcagcgttgtttaacaaaataatcagatttttgcctagcactcggttttggtggagctgacgattttgagggctgaggctggttaggtagctggaatgtgcctatgtgaccagctcacttgcagacaccctgccggaagcagagcttaatcttcctaggactgaggtcttagcacatgtactggtggagtttccagaccaccagtatgaataaaagcttgttctgtgtgacccagcaagtggaaggacaaagaactgtgagcctcagatctttggacctttccaatgcgtctctttctcctgttattgctgcaatgtattttcttgcttatattaaagttgtttcatcagt

SEQ ID NO: 12050 - DNA, 2614 bp, Homo sapiens
tgaagtggctggactagcatttgtttagcaccaacaaataaaaggtgggatgggggatctgcctgaagcagggatgggacacaaagtccctccagcttatctcccacaacaaccctttccctgcagagcatggtttgtataccacaagccctcttagcacgcaaaagccaaaatctaaagatcaaccatttatcctgaacaacaccatttgagaaagaggtaaccatctttggttctacatggtttggagagtatagtggtaggaggggctccctgattcccctaaagctatgcacaccacaaggggctctgctcttctgtctgggatcttcttataaagtgttcccatgatcattctctaaagtcacaaggaagctttactcatcatactaagtgtgcccaagggggagttcactcattactgtgaccttccagctcagtccccacccatgggagcctgtgttgctcctctcactccatgtgtctaagtcatgtcttttacatagtgtcctttgacctgttggcccccatggtctggttagttatgtgagttgaatcaagaggctctaggccagatgtttacataattttaacctatatgattttatttttaactttgtatttctccctagaaatcttaataagacaattatgccatcagacaatgttaagaagaacgatccttggagatcccgtaatcccactacccttctttggctcagagaggataatttgcctaatgatacattaaagttagtggcaaaacttaatttggagcctgatttcctactgacttccaatttagtgctcccccagtatgctaaatagaaagccctctgcaatatattaaatgtatactaaatgtatatatttaataatgtcatgtataaaatatgaataaaatgtccacataggaaattaacacatatataccttctctgataagcactcctctatgtgtcctgattatttactttctcttatcttttccttagtgttcctcaaattatatctatcctctaaaccagggatcagcaaactataacccccaggccaaatctagcccactccctgtttttatagataaagatttgttggaacacagccacactcatttgtttacctactatctatgattgttcaaccatgggagagttgagtaattgtgacatggaccataggccctaaagagccaaaataaatatactttggcactttttggaaaaaaagtttgcagacacctgccctaaatgattatagtttgagagaaacttaacagaaatgtgtttggttactgatgcataagagcaagcaccaataaaatggcataaaaatattaaatcacaaatggataagtgagaccaaggcaatttagcaaattctactatttctgtattcacacctgtgtcttccacttgctgttttatttaactcacggctactgtcctaattttagggatgctaaaatagtttgttttaaaagaggtttgtttaagaaagcagtaggtacattatgtttactagacaggcccttggaccagctaagcgacagggaacctggtacattatgtttagttactgttttcttctcaaagttaaccaaagctaaataactttcctatgtaaaatgtgctgactcccaaaagaggagaaatgcaatggcttgagcttgcatgtgtcacaggtttgtggagccttcagccaggtgatggtcttcagctaaagagccagctgcatcttggtatctcttcctctgctaacttcctacttttagcaaaattctttcacttggaactctagctgatccttggccaggatcagatcctcaaaaggaaatattcagttagcagtggatattgtacaagatgtaacatggcttagaggaaagagtgtagacccagcgacagatcatcagtcactcaaatcctggttctctctcttcctccatctgtgactttgaacatgctacttggaggctcagcttcttcaccatcaacaggaggattacatctaatgcaggcaatcatctattacagatgccgaataaatgatatcaaagagcatagagaaacaaaaatcttttatgatgtacggaaaaaaaccatgctgatacagctggctattcagggtcacccagcagtcctccagcaaggtagaaacaccaaatcaatgagtttatgctagaatttttcacatggccactggaccattgtggaagtagactggttgaaatattcttagtatgacatagtaagttatatttgtttgaaccttatcctgtgaaagcattatctgtcccaaacagtatatgccttttatcagggacacattaaatataaatgtttaaccaaagaaagttgttcttataatgtaattataacagggatttataagagggaattataagagggattatgaaagggaattacttttgagcaaggggagccatttgggagtgcttcaagatacccaatatgatatacacaattatgatttgtcagtcaaaaataatattaagaacaaaaaaagagttaaaaaattctgatatgagtgtaatatacttaatatgtaggatgtctcaaatttccagtaaataaattttaatgtcccaaaa

SEQ ID NO: 12051 - DNA, 364 bp, Homo sapiens
gactgttaagaagaccgaagcatgtattaatgctgtggctatgagaggcctcctgctgcagaaacacacttccctacatcaagaaggagtaacttcaggttggatcctgtgtggatgatcttggtgctaagcagaaaagaaatttggaccttgaaaccagcagttcaacatatatactttttgcaaaatttccttgatttaaaatatttgttattttaaatatacaaaacattttagaaaatcttagagtaaattttagtcttaaagccagaaaataagtttatagccatctagatattttgcatattgctcttacagcaataatggtttggttcactttatgaaaaataaaatgtattaaaat

SEQ ID NO: 12052 - DNA, 2142 bp, Homo sapiens
gtctgtttctgactccaacagggaccattgaatgatcagcatgttgacatcattgtctgggctcaacaggatgtcaaataatatttctcaatttgagaatttttactttagaaatgttcatgttagtgcttgggtcttaagggtccataggataaatgattaaaatttctctcagaaacttatttgggagctttttatattatagccttgaataacaaaatctctccaaaactggttgacatcatgagtagcagaatagtagaacgtttaaacttagctacattttacccaatatacaaactcgatcttgcctttgaagctattggaaagacttgtagggaaaagaggtttgtgttacctgcatcagttcactacacactcttgaaaacaaaatgtcccaatttgactaaccaaccataaatacagtaatgattgtatatttcaagtcagtcttccaaaataagaaatttttgctgtgtcagtctaagaatggtgtttcttaaatgcaaaggagaaatcattttaggcttgatgtaagaaaatgaaaataataaatggtgcaataaaaatatagaatataccaattggatatagggtagatgttccacatacctggcaaacaaatgcttatatctactctgttagattgataagcaaatataggtattaatggagcagtcaacgtatagcacatttatgaggaaagtagagactcactgggtcacatagactaatggataggaatgtgacataatgctgctgaattaatatacttatgggcatctgaatagtttaaaagttagtcagaataggtatcactgggcaagtgaagatagcttaaactgcttcatgcttgacttgatagcaagttaaagtgcaattaatggaatggaggaaaacccagaatatttaattggtctgtaggggtcaatttgctttcattcaccacatctgcatcttgctgttcttcttactaaggaatcagggcaaatcatctgtagtgacatattttagtttgctaatcatttattttaaaatactgaggttgcagccacttaagagtatagcaaaagatggattcagatttttggactttccaaagtacttgagttaaactatttcaaaaatagcctataattttattcaacagtttgaggctattcgaattctcaggtgctgctactgaataatgtaatagtcttcatacaaagtggatagcaaaggttaaaatccatttcaacaaatatgtgagctgagctgctgcacaaaggaatgtgatgtgtgtgtgtgtgtgtgtgtgtgtgtgtgttaggtggggtgggtgacaacagaaatggtgcacgagaaactgatcaaattgacattatattttcagtttgcttatgaagctcaaaatactagagtaaatgggtcattaaagaaaataatatgtgaaattatggagtttagaatacaagtggggtatatatacaaaaagacaaaactgaggttttgtggtggagagattttcttaagtaacactggcattaagttttagctccttagatttgggggtgcaaatattcttttgagtcactgttattttgccaattacacctagaatttcaagcaaccaattcgagataggctgttttagccaggctgcatttgtggacaacttatgtaagaaagacatgttagaatagctgcttgtggtattcttaaaaatagaaacaggaaatatggggaggatacatttagctgtcctcttatcagatgaacacacgaaattgaacagttccttcatgattctctcaaacttaaaagcaaaatatttctgtcttatttaaaatatccttagtatgtcttatagtaaagataatgctgataatgatttcatctctaagatgtattaatatatttgtactgtttgccaaaatcacaaatcatttatgtttttattccttttcaaaatggtgtcagagacatacatgcattttcccaaatgactctacttcactattatttacatggcttatttcattagtttatagagggtttgagaaaaagaatatgtagataatttaatggtttttcacaaattttaagcttgtgattgtgctcaatgagaaggtaaagttattaaaacttatttgaaatcaa

SEQ ID NO: 12053 - DNA, 186 bp, Homo sapiens
tgaagagagcataaaatctatcctaattattggttctgatttttaaagaattaacccatagatgtgaccattgaccatattcatcaatatatacagtttctctaataagggacttatatgtttatgcattaaataaaaatatgttccactaccagccttacttgtttaataaaaatcagtgcaaag

SEQ ID NO: 12054 - DNA, 853 bp, Homo sapiens
gcagaaatatgtaaccttagactcagccagtttcctctgcagctgctaaaactacatgtggccagctccattcttccacactgcgtactacatttcctgcctttttctttcagtgtttttctaagactaaataaatagcaaactttcacctattcatgagttattattgaaacctcaaatcataaagacatttaaaagaattgtttttctaactggaggggctctagtgctaaataatagtactgaaaattgatattattttccttttcttatatgaaggaccttatttggcatataaaattttataaaatatgtatttaaagctttttcttattttttgtattaattggtaagtgaaaactctgttaaagatcacaccacaatgttttcaagaaacatctgaaaagataaaacaaagaacaaataacttataatacttacttaaattgacactttttgaaatgccagtctgaaaataattaagatatctctgctttgtatgagtttcttttatgaaacttgataccacgggagtccagtaatattggccacaaaagccagagaaagtaccaagcccagctttgttatcatagccacttcctgccctgcttctgttatttttagtgttttttcagatataaatcggggtccaggaaatcctcaccagaatctggcactgcagccaaaggcgatacttccagagttctagtaggctgctatggaatttctggcatgaaaattcttgacccctcacactttaccccctgtacagcacaggcataccatggagatattacaggatcagttccagaccaccataataaagtggatatcgcaataaagtgagtcacac

SEQ ID NO: 12055 - DNA, 254 bp, Homo sapiens
agaagaaggaagggtcttcttttgcttctcctccttgtctctggactgcaacattggtgagatgagtgatggtccagcagtgaacttgggccatggatgatgttaaggatagaagccactcagtaggatagaagaaaagaaagatggaagaaggatcctgggcttgatgaccatgaagtttccctataaaccctcaaccacctattcattgacttcttttgtgttagagtgaataaaattttgttcatgccagt

SEQ ID NO: 12056 - DNA, 992 bp, Homo sapiens
gttgttggactctagtaccaagaaacaacaacaaacgagatacattataattactgtctgattttcttacagttctagaatgaagacttatattgaaattaggttttccaaggttcttagaagacattttaatggattctcattcatacccttgtataattggaatttttgattcttagctgctaccagctagttctctgaagaactgatgttattacaaagaaaatacatgcccatgaccaaatattcaaattgtgcaggacagtaaataatgaaaaccaaatttcctcaagaaataactgaagaaggagcaagtgtgaacagtttcttgtgtatcctttcagaatattttaatgtacatatgacatgtgtatatgcctatggtatatgtgtcaatttatgtgtccccttacatatacatgcacatatctttgtcaaggcaccagtgggaacaatacactgcattactgttctatacatatgaaaacctaataatataagtcttagagatcattttatatcatgacaagtagagctacctcattctttttaatggttatataaaattccattgtatagttatatcattatttaattaaaaacaaccctaatgatggatatttagattcttttaagttttgtttatttcttttaagttttgtttgtggtataaacaataccacatagaatgtttcttgtgcatatatctctttgtttttgagtatatctgtaggataactttcttgagtggaattgtcaggtcaaagggtttgtgcattttactattgatatatatgttaaattgtgtcaaatatatatgtcaaattccctccaacattgtttaaatgtgcctttccctaaatttctattttaataactgtactattcctgcttctacagttgccactttctctttttaatcaaccagattaaatatgatgtgagattataataagaattatactatttaataaaaatggatttatattttt

SEQ ID NO: 12057 - DNA, 225 bp, Homo sapiens
cggaaacaaatgtctctctgaattccatatgctttatgtgaaaaccgaagcatttttttccctctttcctctctgcagttacacctgaagtgaccctgtttcaaaacaggaatagaactgcagtatgcaaggcagttgcagggaagccagctgcgcatatctcctggatcccagagggcgattgtgccactaagcaagaatactggagcaatggcacagtgactg

SEQ ID NO: 12058 - DNA, 3089 bp, Homo sapiens
atgttcgttcatatgtgagacttttaagtgattaacaaggctagttcagtgttctaagtagaactgctaagatctggaagtaccacctggactcacagaggagctgctttagtgcagcattgcacaggagttcatttcagttcagtctacatttaaagtagcattgtgtcatttcatcaacaagtatttcttttttggcttcaactacatgtcaggtgttaatatgaaaaatctgccacagcctacccttgagaagcagatgtaattccttgagtgaggctagtaagtctctgaaaaactgaataattttatgacttactaggcaatttaataatcgtttgcaaaaaccattgtgtcttgaggtaaatgaggagcgggggtgggagatagcaaggaaacacctgaaaggtcaatttggtcttattggctccattatacataggtccgcctctgaatactaaagtttgtagctcctgacatttatgttttcttgtttatatgttggaattgatcaacaaggtttgccactgcttgtattaccagggactggttacaaccattatttctcttcatttgcttggcttatctcatattaaagtgagtttggagttctccaaaacgttttaattttatttatttgggtaccagtgattgattccaaataaacctttttacaaaaaggcaataaggtggtttatggttacatatgaaatataataggataacaggtagatgagaaagtaaaatgaaaaaatgaggttaggagatacaaagtagacccaggaatgaggctagaacatttataatttggtgttgatgctgtcatctgataggggatgttgctcgtactgttgctctgaggggagtacatcttgagtattttcaaataatgatgtgaagtttgaggtaggtatctttccaatgttctaactttactagaattaggttattaagcttctctagtgcccttaacttttgttacatagagatttaaagaaaaagaaagtagtaccttagtatgtaccgcatccttcttttcctcagccaccctatcataacagaagttatttcccttccattctttatttggctttgttctttccctgtctgccttctccattttctcagttatctctaccagtggttctcaaactttagactttttgagaatcacctggtgggttgctaaaagatgcagattagccctttcccagagactgataaacaggggccagaaacctgcatttttaacatggagcccaagtgattttgatccaggtggcccccaaatccagttatataaacactactttagcttctctcctgaagccttaagtaaactggtttaattcttaatctgtagtcagttttcatattccttttggctttctaccaagtggtagtatccatttagtgccttaaaatacagacaataccaaggagatttcattctagacaagtctagaaatggccattaacttctaagtgtccttgtgttcaatgaatatcctttacctattgggaaatagaaggtaaattagtaagagaactggtgtatagctttgtggaccatagggcttatttgctgagagttgtctatattcatgcacccagtcccctaagtagcctcttttaatacttcatttagctgattcagaaaaaaactccctgggaattaggagatttaaggttcagtcttgcttctcctacttgtggcttcactgagctagtcagtttcctcaggcttaggtttctggatttgaagtggaattttttcaagaatgaaacttttatagctgaaataaactttggagcttatctttcattggaaaaaccagggtggttcagtgagttaaggacaatatagcatggactgggctgccagtctagcatttgtttccaaattcattcatgttcttttggagtatcttcatctcctctcattttcccatcttctgccctttactattctgggaaaatggcaaaaaagcttcacatgtgtccacaaaatgacaatttgtatgtttataaggaattcagtattctgtatcagttactttttccaaataaatccaaatatttaacatttaaaaaaatgcaatctaaagtataccaaactgtaacttacctagtaaatgagattagaaactattgtcagggtcatcgtagtgaattattattattattattttttgagacagagtcttgtgctgttgcccaggctggagcacagtggtatgatctcagttcactgcaccctccacctcctgggctcaagctattctcccacctcagccgcctgagtagctgacactataggcaccaccatgccctggctaattttttaaaaactttgtgtagagatagggtttcaccatgttgcttaggctggtctcaaactcctggactcaagggatccacccactttggtctcccaaagtgctgggattacccacatcctagtaccaactttatcacttctgatggcattaggacacacaggccatttataagagcagtgtttgagacctcctgtgtgtcacttccaatcctcttggccttcatactaaagtcactgctgtggcaaccagtttcaagcagggctgaaccttgcctcttgctctggggatgtctcacttcctgcccctgggcttctcaccagctacaggaactgcctagcacttgggtatgtacaacctggaagaggtgtggggccaccccatcccctcctcaaagaaattcacaggcacagtatgaggctaaagtaacttccatcttggatgctaatctaccatgttgacttctgataaccagttcctggaatgccctctaagatttctacttttatctattaaaagaacacacacacacacacacactgtaaatcctggccttaagcaagttataggctaagttgtaaacagcattcttgcctttccctgaggaggtgacttcagtgtctcacatgttccttcatgtacccccttttctctatggcatataagccctgggtcggggggtaactgtggggatcactgcctgagacatggcttctgtgcataagtccctattaaatgtttctttctgac

SEQ ID NO: 12059 - DNA, 265 bp, Homo sapiens
acttgatttttattttaacatatgctatttctggatagagatgactattttcccaacaagtagaaacacttaaaatcatctttcttttttgtttgtttctttcaaaatttcaatagccatttattttgggcatcttttaatttgtatgtggggtttatcccttttaatcagttaagattcttgttgacacaaattgttttacatcaactgttgttatagaacacatgaaaggaatacatggggaagaaataaagtagaacccaag

SEQ ID NO: 12060 - DNA, 2585 bp, Homo sapiens
gtgaagtcaagtctcactgagtttgttcttaataatttattacttccctttccctgctctgacttttaagtttttatatccttctttcagataaaacctacaaagatcctgtgaattagtactaatgaaacagagaaataaagcaattattttttgactttctcaaataagttttcaacaaccaactgacctacagctccctgtgaatgaaactttgactgtagagaagttaaagttttgtattttaatactttcttaagtattttaagggttttttttattaatacatttttacctttatctttattcagggttttttgaggtttagtatatcttagttgatccatttatttatttattttcctgaagaactaatttgctttgcatgtaacttacaataaaattcctctgtgtgattagagtctggctttcaggaatatgtaacacccacttttctttcttttttcttgggaagtcattgctgttcatcactttttccatcaagtgaaatatacagccttaaaaacaataggcctgggagtgtttgtttatatttgcttaagcaggtaagagtggttgcatttattataaaatcttatgtagtttttaaatgtgaaaatgtcatcaataatggtaatgcaaatcaaataaatatgattctagagctcaaatgcctaaatgtggtaacattgatttaatggtatatttaatgcttcaaacaattaaatagaaaaagttgctattaattttcccagccctgaatttaagcagatctttcagggtagatttctcttttttttttttttttgagacagagtcttgctttattgcccaggctggagtgcagttgtataatctggttcactgccacctcagtctcctgggttcaagcaatcctcttacctcagcctcctgagtagctaggattataggttcatgccaccacgcccagctaatttgtgtattttcagtagagacggggtttcaccatgttggccaggctgatctcgaactcctgacctcaaatgatccacctgccttggtttcccaaagtgccgggattacaggtgtgagccactgcacccggctcaggatagatttttcagggtacccttttggttctgagatgtttatttctattttaaacttgttttttgaatgatctctgctccctggctctatgataggaattctcaacctgagtgaacaattcaaactgagattacttgtgtttagactcatatattttgataacatatgacttctccagtatgccccagaaagctgctaataacttgctcaacctgaaatttacagttttccaaattacaggttggcagagatactggattgataacaacatccacagttatcatataatcattcttatgctgtaaacaaaattattttggttagcagaatttaataattaactgttaactacatactaggcaatattgtagccactttatgtgcttcatgacaccttatgggataggtactattatcctcattttgcagatgaggaaactgaggtacaaggaggtattttctcaaggtcacacaactagggagtggtggcattagaatgggaacataggcagtctttctccaaagcctatgctgtgctgcctcttgttggagagtaaacctgttttacagtgtgtgtagtatggaagcagcataataataagaatagctgttccttattgagccattactgtggcagacaccgtactataagctgtggtatcaccattatctcatttgaatctcatagtagacctatcagttagaggtatgtaaatgcttcctcctctcccagcacctttacagatgaggatgctgagccctagaggtgaagaaagttgtctaatgacagagtgcttgtaagaggtaaagccaagacttgaagctctttcttgcagttactggatttctcctaatttacgggaactaatacagtacagtagctaaggatgcaagtactgaaaccagaaatcttgcctcaaatgccatttctgccacttgagctgtgtactttggacaaattaatctaatctttcccatttgaaagtcagacataatgtcttccctagaggcttgtgaggattaagtgaggcaagtgtatgtaaatgggctgagatcagagcttggctcacaacactcagtaatgatcactgccaattttttttggtatataaataaataaatacactatttcccccatgtttccaatttttaagacattgtatagtgaatttattgtatctttctcagattaacaattgcacacagtgcttgaaatttagaggtatttcacctgaaaagatgtctagagattgaaagaaaacatgctgggcatatgatttgaaaatataaataacatgctatttaaaaataagtttaccctatgttttctatcttttctggcacctagatataccatttaataagtaatagcaaggataatcatttttttaagccctggaaaatcttgattaaagaggacatttcagtattgcaaataaatgcatggtatttgtgtaacattgtggaaactaataaacacaaattgtattata

SEQ ID NO: 12061 - DNA, 6556 bp, Homo sapiens
atactgataaacaaaatgtaaaggtaatgagtgagattacaaatgtatttgtgcgtgcatgtgcacagacatgtacatgaagagaaggattgtgtgtgtgtgtctgtataatcagttttcagttatcttctgaatgtagggaagccatgtcagatgcagatactgggttgtcagaaaacaagttatctttcgttttcaactgcatggtgtacttttttattttccaagtagatttacatttccaagttgatatttcctaaatactaattagctggaaattgggggagatcatcttgtcatgtactgggtagtaggagggagcctagactttaaacttgattgttgataacttatggaatatgtaggtaagttgctactgaaaaatataggcagcttgataaaacacagtggctcataatcaagtgctggctaatgtcagcatctagaacagcttcttacctatgacagatgttgaactgatgttgagtttaatgtccgtagttaaagtcaagcagttagcaaataaataaaagcaatcagcctttattctcaaagtttggtttagatacaggcttctttctaaattataacaatgcataaattatctgaattttatgtcttgttcttcaaattagggagctgtgttaccctttaatgtgccaagattatttaaagcaaaggtcttccttagacaattatttagccgtaaatatagaaagctaaaaagttaagtacatacatattctccgttttgtgcttgcattttgcatcgggtcataagggtaaaagcagttagttgtattgtggagttttgcatgggtgcagttaacaatggatgtttcatcagctgagtttaatttagtattctctcttcattctatttatttggtcttgaaataaattcttttgcattcatttaaatattaggattgatcaggaaatagtgtttgtaatctacacgtttatttgagccttactttaaaaatatttctgaacagagatttaagctctgtcagtattttcatttactgatagcatttatattttaaatatggcattgtatatttcattattatccttcataacagaattataatgagaatatgaatttgttatttttcttgttggtagatgtgaaatggtgcttcaaaaaatatatagtctttctgtatgtctctgtgtgtgtaagtatgtgtgtgtgtgtgtacacatattttaaagtatgaattggtcctttaaaaacaggcctgccatctgaaaatgggaaattgagacctgagacctgctaaagcatagaagaacttgatataggtagggttttttttttttttttttttttaatagatggagtctggctctgttgcccaggctggagtgcagtggcgtgatctcagctcactgcaagctccacctcccgggttcaagtgattctcctgcctcagcctcctgtgtagctgggactacaggcacgtgccaccacacctggctaatttttggtacttttagtagagacggggtttcaccgtgttagccaggatggtcttgatctcctgacctcgtgatccacctgcctcggcctcccaaagtgccaggattacaggcatgagccaccgtgcttggcctaggtacaggtttttaaaagccccacagaagtttataatacgtttaaaaacccatattaaaatttgaaaacttaaaaaaaaaactaagaaaacaatggcatatattccttttcttaaacctgtgaagtccattactttttgttcttgttatattctgccaaaaatgggatggggtgggagagatgcatagaaattgttttatctgccttgttaacaaagtgaactcaaggaccagcttttcttttctttcttcttttcttttttttttgagactctgtcacccaggctggagtgtcgttaggtgcaactaacaccaggaacagcaccttgaatattcctttttcaagttcctcttcctcaggagatattcaaggtcactttgtcacccaggctggagtctacaatggcaggatcttggctcactgcagcctctgcctcctgggttcaagcaaattcttgagcctcagcctcccgagtagctgagattacaggtctgtgccactacacctggctaatttttatatttttagtagagacggggtttcaccatcttggccaggctggtcttgaactcctgatgtcaggtgatccacccacctcggcctcccaaagtactggaattacaggcatgagtcacccctcccaggcccccccctttttttttaatcctaaaaagcttcctaagggttggtcagagcagttaactccagtgaatacctcttctaaagactcagcaaaagggtcatttgtgcctctttaactgttcttaccaaactgtcctgtctcttttctgctgccaactaagcagcttcctagggacaaaaaaatatacaatatttttttttttcttgcttacaaagcaagaacaacctgtattttctttcttcaaaatggtcttggggaagaataggagagcttcatgaataagttactcaagacaacagataaacacagtagtcaaaactttttattgaggaaaaatgtggcatttatgacttgctttttaattctcttaactgaattttaagctgcaacgttcaaatttttctttgtacttgaaaggtccagtgtgccaatttcaagaaggacagttttccatgtgtttggctattcatttccctctctccctctctcatctgtctgtctctcactgcctctgtctctgtctctcatacacatatacacacacacacacacacacacacacacacactctctctctctctctctctctctccagtggctgttaagttctgaaggactggggactgctagacataattgaaagtaaggtaacaggctaaggagaagctcagtttgaacattgcaatgtaaagtcctcaaagcctgtgactttcaagtatttctgttgcattaattgtattttcctgcttagctgtgttcagacatagtatttgcatttcttggagctttcattccaacagtctaacattttgatcttgaaagagtctcaataagccttatttgaccatctgaggaaaaatgtgaccatctgtgaataattggctcctgcttacgtgtagctctcattactttacagatgtatgcatgtgtatgtaagacttcagttcatacatggcttaattctgaaagtgttcagaccatagtacccttatttgatttaaaagcatgaatatatgagatttactagcagtattaagtatttgatagagctacgtgatttttgggaagaaatttgttatatggtatgtagtgttaatttggatataatttttggtaaagggatggcagaaaacatagtcaattttggttataataaacgtaaccttattcttggcctgctccatgtgaaatagggctcagggaagctggtcttttccttagcgggatgattactcctttgccttgaaacatttattgggcccaccatgtatggatcagcatgtggtggtaagtcatactcccaaatcagtgattcccaagtcttggctttgggaaccagtatgcctcgtattctcttaaagagcaacaagaatttcttgaaacaaaattagttcagaattgatttaaattttttaacttctggaaatacacgaagttatgtctgagtcatgagtgacagtcattgattaaatcatttctctgtctcttttttagcattattgatcacagagtccgttataaaaagtggttgattcctttcaacatttaacaataacttctaatgaagggtaaaattccagattctcttcatgcgtaaacatttaatgtgtcaatcatagatgaaaggaatctagtttgatgttgtttctttctttcttttttttggaaaacacaagttgctctgggatggcttatatgttgttttataccggttcaggaaatttatttttgtttttattgtaagaccttttgcggtaccagagatggcaccttttttctaggtaaggtgtaggaattcctcaatggtcttgcttcgtaaaatttaacatatcagaactggggaaagagaaaggagggggttatttttttgcagcattttccagtcacatatcagggttatactgaactgcaacaaagatcaacttttaaaaattagccttcttaaaatacaaaatgatttaagtattttaaagataatttatttgccttgctcttgccttctaacattagccatttcatggagaggctaaaacttatactccaaaaaatgtggaagcacattttaatgggagtaaaattaaaaaattttgagaaagggtaaaatcttatgaatatgcatcttcttagctttatcttccctttgataggtaggcacttatgctcttccatctgctccatgtcaaatagggctcagggaagccagtcatttccttagcgagatgattactcctttgccttgaaacatttattgggcccaccatgtatggatcagtgtgtggtagtgagtcatactcccaaatcagtgattcccaagtcttggctttgggaaccagtatgccttgtattctcttaaaaagcaacaataatttcttgaaacaaaattagttcagaattgatttaaaatatttcagtgtgccatatagctctgtcccttggtttggttggccttgttttttcctgtgaagaatgaaagggcaaaggtgataccaaaatgaaacagctttggagtgatatctttaggagcctggaagccatttttgtaattttgttgtctatataaatgctacctttgcctggaggtagtgcgcctgtggctgtgtacatccagagggcaacagtaatagccaacaaccagacaaactagtgaagttaatctgtgagtgatgattttatgatacttatatgcaaattaaaggcagaagttagtttcttctcaagatgcctttttggctgaacattaccatttttctttccccagggtttgaaagaaaagggccttttttggatttaactatattctgtctgcattctattcttcatgcgtaggtttctactagaacctgtggaggggggacaccaaatttagattgagtcagtccatgctgataagaagcgtgaggaccttgttggacacagagcttctagatctttccacctgtagcctctaccctgttcctgcactttacctgaaactgtgcctctggtctttagaccagctgttggaacatatcactcacccactcctctgttatagcaaagggccagctgggatggtacacgctgtgtaatcagacaccttctcgacaagtacagctgatgtttctcactgttgccttaccattctctgagccatctttgatgttgatttgtaaaaaaaaacaaaaaacaaaaaaaaaacctagtagcaaaactcctgttaaactcagagcttgtatgtggtggtcattcaacatccttatttctagatttacacaaactgtaccaactgtaatctttttctggcacgcgtatgtggtcagatgcttcataaacgtgagccaacttgggttgtaaacattggacataatatacaaattggggaattttggatgactgcataatcctgtcattagagatttcataagacagaagataactgtttatttgtaatttaacacatttttagaaaagatgatctttaatttctttccctcagttgtgtatacagctatacaccatactaacaccgtactatgtcataggaacttaaagttagatgtatctaaatcccttcacttttctaagacttctctgtgctcccacccctgaagtcttcaaatcatttttcatctgtgaagtcactgaggtactgggcttgactatagtggtaacagttaaggggagttgaactattgatcttccaagaagaaagggaccagatagtgttaagatgctgcagttgtgttactgtgaagaaaagattcgcttccactttcagcaggctatataaatatatatacatatatatatatattttcactttggtaaaaaaaagttgaaaaatctgaggagaacataattaccttcacaaattatttatagatacactgggtgagaagcttactgtagggcagtcacccaaaaaaaactaattttagtgctttcaatagtgtaatatttgtatctattaccatggcagcagtgtctgctgcacactgtgtcctattactgtaaatctcctggtttataattcttatggaaactaatttgttttgtaatggaatccagagcagatatgtataatatgatcaggattgtcctacagttgtaaataagaataggtcctgtttattttgacatctttttacaaatgcattgtattagggtgtgaatattctgaaccatcctcttgtttaaagtttggaaatttttattgttaaatgtaacattttaatggttgtaataattatttgtatagatatgaatatagtattttatttaagaaaataaactttgcatttttgcattgt

SEQ ID NO: 12062 - DNA, 2766 bp, Homo sapiens
acaaattacaaatgaactttcttgcacttgcttgtcgccaaataaaagagaggcccattgattcctcccccaccccaacacttttcttttaaagcttttctccctccttgttcttgtttttctttcttcctttccttttctctgagagttttaatactttcaaggactttaaaaaaataatcatgtttgaattgttttctcttatttttgtgaggtggtttgaaggaaggacaaggtagatctgtttagttttgcagttgaagttagatggtcctaaacatttaattgtcaaataatttcaaatttaatgtcctgctttcacattgaagggcagagcctacaaaacattgtatatttcaaaagacaaaaagaagcagcagcagtatcttgttctctaattcatagacaagttgagtgtgtttgtggtactttgggtttttaaacactttgggatactaatccctagacattgccttcactccacctttagtccttctgagcactctctcgggagttggaacattgttatccttgtaagaaatactaagcttatgttgatttttaagtaattatatcttctcttcttgctggtgggtggggcagtttggtttagtgttatactttggtctaagtatttgagttaaactgcttttttgctaatgagtgggctggttgttagcaggtttgtttttcctgctgttgattgttactagtggcattaacttttagaatttgggctggtgagattaattttttttaatatcccagctagagatatggcctttaactgacctaaagaggtgtgttgtgatttaattttttcccgttcctttttcttcagtaaacccaacaatagtctaaccttaaaaattgagttgatgtccttataggtcactacccctaaataaacctgaagcaggtgttttctcttggacatactaaaaaatacctaaaaggaagcttagatgggctgtgacacaaaaaattcaattactgtcatctaatgccagctgttaaaagtgtggccactgagcatttgattttataggaaaaaatagtatttttgagaataacatagctgtgctattgcacatctgttggaggacatcccagatttgcttatactcagtgcctgtgatattgagtttaaggatttgaggcaggggtaattattaaacatattgcttctattcttggaaaaatagaagtgtaaaatgttaataatacaaatgtcactgtgacctcctccactgagaggactggtttatgccagatcattttccggcacacacggagtggctttgacagattgataactttgtaagatgggagacatctgaaatattcatgttttccttttgtagtcccatctccactatttagaaatgttctcagactttaaaataatgcacagggcttgagctttctgtcatttgactttaaaaggaagtttcattcatatttatcctcttatgtaaaattgcggtataaagtctcatttccaaatatgttaaatgacaaaattattttataaaatgtttatgcacactttataaccttaagtttttatttgagaatgtgaaagtacaaagtgcagtagacttcaacaatcttgagtgccaagaataatacagaaaaagaagacagttgatgaatgagtttatagggttctaatcttaagatggtaaaaatgtagaaagaccttgctggttttttgggggtattcgtttcttaaacaatccaaatctaagcttagaagaaaagtttagcgttaagcacctttatcttcatgaataagcttcagcttgctcttggcaagagaagagtgcttgagttacagaaggcataagtagtttgaagaatgcagcagcctttttgtaaacttcccagatatcaaaatagactttgatatataaatggttttctgagatgacactgcctctatttctataaccatttcacctggactatctaatcagtcctatgaatgtatccctaaatgtggttattgaaaacctaatagctgcctcatgacaagtacatgttatttaaggaggaaaaaatattaaattttgaattgagtgtgtaggctccctatcattatatatagagtttctttttccacggtagtcagtgacttaacctgaattgtaaatgtttgtaaagggttaattgtcctacatcaaacttagttaaataattccatccacttatggaggaggaggagaatgtggaagaggtaaaaagctgggcacaagttcatatgcctatgagtcagtaaagactgaagtaatgtcctatgttgagctggttattttgatatatgataataattatctttgaagtagaacaattctgttaactggaaaatcacaggatatatccatcatatttttcaggacagatagtttttactgtggggcaaataggttaaaattacactatgttagttgcatttaggttttaaagcaaagaatctgtagagaaatctatgcaatatatagtttgtccagattagctttcatttggggaatgaagttctgaaatatctaaagcagtttactcatcaattgaaaagtcctccaaaaagagaactattgggaaaccatggtgtggtggtggaaaagaaaagctccctcagttttttggagggaataacttaaaaaaatacttaaatggctaagtttacttggtgcagttaagaattaaacttgtcaattttaacattgctgttacatctgaaataaacttatgtgatgttctggt

SEQ ID NO: 12063 - DNA, 1016 bp, Homo sapiens
gccagattagtgtaatatttaggacaggaagctcgactagtctgtatgtgtgttatctccacccacccacacacatacatacatacacctggtttattctctacgagctacttcttagatcaaaggaattattttgagaatttttattcccttctttgacttttcctggattgctagtcattcactatagcatttatcacagtgggatcatccaaaggaacattctagagatcgtctgttcaaatatatcctatatatttttagcatagtaaactttaaaaaggacaagtgtttgcctgactgagcctgtgaagaaaatgtgtccgtatagcacgacaggagttgctgatgtgaccttaatgaaacagaaataaacaggggtgagtgctcggaaaggaagggcgggccaaggcactcagccttctagtgcagtagcatcagtgacacgcaccccaccagacctcgtccactttcaccacccctgaaggcagaccatgtatgaaaaggttctctacacagctgctgcagaggacagcagcttatcctgatttcagagaaactgaggcaccagagatgcttctcttccgtgcaccttgataagcatgaaggacattccaaaaggtaatagctctatcatgacagtccagcaattcattaaattatctgttcatgctcccacctgcaactgctgaataatacactcagtttgtcttctagtactcagctcagtttgatctagatattgagatacctatcttgaattcaaagaatgttttcatctttaagatgctataaagactgataaaatgctctcttctatgaattgtgttagagaattacctgctagaaaaataatttttcattataaaatacacatttattatataacaaattcaagtagtccataaatgcatatggtaaaatgagaaagtcctgtgcagtcctgagatgattactcttatttggtgtgctgaaaatttgagttgacaaaataaaattctgtggttttttaagtg

SEQ ID NO: 12064 - DNA, 700 bp, Homo sapiens
ggacgagagaatgatggtgaagctgtgttgctttcccaggtgagccttgattatttcctctgtgctttctcagcttctttggccttctgtaagaggggcttctccaagagcatgtcactagttttctagaagttaaacaagagctaagacaaacaaaacaaaacacagcttatctaatctaatgagaaactcagaaaaaaatgttttgatgaatacaatgtattaaaatataaaacatgtagatcctttgacatgttaattcaattctagaaatcctcagaaatgtttttatattatgcagagatgtgcgtgcaaagaataatcgctgcagttttgtttttatgtgtgaaacgttgagaacaatctaaatgtttatcagttggaagtaagttatggtacatctgttctatgaaatactgtgaaacaataaggtatctctgtatgtactgatatcaaaacatctctaagatacagtatttagtaaaagagaaagtttcaggaaataaaactacatctagaagtataagcataaaactgttaatagtggttttctgcaggaaatgggatggaccagggttatatgcaatgttcagtttttacttttatacttaagtattgtttatgtttgaaaaataaaaagcatttattgtttttgcaataaatgtttaaaatatttcaataaagatagcatgttagaata

SEQ ID NO: 12065 - DNA, 329 bp, Homo sapiens
gtagtatctttctctctttcttatgaacaaaacaaaacaacaacaaaaaacaaacaaacaaaaaagctatggcactagaatttaagaaatgttttggtttcatttttactttctgtttttgtttttgtttcgtttcattttgtactacatgaagaactgttttttgcctgctggtacattacatttccggaggcttgggtgaataatagttttcccagtctccctcggatggtggccttaaggcctggtagtgcttcaagaggtccactggttggatctctagctactggcctctaaatacaacccttctttacaaaaaaatcttttaa

SEQ ID NO: 12066 - DNA, 14 bp, Homo sapiens
tagaataaaaattt

SEQ ID NO: 12067 - DNA, 1886 bp, Homo sapiens
gacatgaggaaatgttgtgttcagaaatgaataaatggaatgccctcatacaagggggagggtggggtggggagtgctgggaaagaaacacttccttataattatattagtaaaatgcacaaagaagaaggcagtgctgttacttggccactaagatgtgtaaaatggactgaaatgctccatcatgaagacttgcttccccaccaaagatgtcctgggattctgctggatctcaaagatgtgccaagccaaggaaaaagatacaagagcagaatagtacttaaaatccaaactgccgcccagatgggcttgttcttcatgcctaacttaataatttttaagagattaaagtgccagatggagtttaaatattgaaattattttaaaaggtaggtgtctttaagaaaataacaagcaaccctgtgatatgttccgtctctcccaattccctcgttatatagagggcttaatggtataaatggttaatattggtcccaacagggctgactcttctatcatataatcaaaactttttacatgagcaaaattcagtaagaaatgggggaagacaaaggaaacgtctttgagaagccccttcatatttatttatttatctcttcctgaaccatgaatttcatatgtggaatattgctatattgacagattcttgcctgtctgtgttattctaggatctgttacaggtccatggcaattactgtttattttttcctggaaaaatatttttttataaaaggcttttttttttttttaaatacatgagaggcattgggctaagaaagaaaagactgttgtataataccttgttcaatggttgtatttagtgagctcatagaggtccatcatatcatgaccgagctaggttgtgtgggcaggaaggtagggctaaggggttgtagccttgctgggcagcctctcagagcaaggttgttcagatctcccttgctattacagtaggttactattaatgagggcagcacctgatgccttttgtactgaggtatgtaactttctccttatttgacaagtagaagttaacttacttgtcagggagggcagacgtttttttgttctgtttcgtttttcaaaataatgctttttgcaaaagaggtaagactgagactaaaggtgttatcttctggtgtgctcctggaagtgtctaccctacatttgtgtcagctcagggttgcagtgttgcccagatgcattttacatcactgtaaagagattacttttgtggttactacctggcttggctggccttgcggttcaccagattaatttacaaactcccccactttattttgtgctatgtagatctggccatacttgcattagtgactgtcttgccttaaccacacttaagcaacccacaaatttcttctcagatttgtttcctagattacttatgatactcatcccatgtctcaataagagtgtcttttctttctggatgtgttctcttactccctcttaccaccatactttttgctctcttctcctgcaagcgtagtcttcacagggagtggcttcctgacatttttttcagttatgtgaatgaatggaaaccaacagctgctgcaaacactgtttttccaagaaggctacactcagaacctaaccattgccaaccatttcagtattgataaaaagctgaatttactttagcattacttatttttttttccatttgatggttcttactttgtaaaaatttaaataaatgaatgtctatactttttataaagaaaagtgaaaataccatgacactgaaaagatgatgctatcagatgctgtttagaaagcatttatcttgcatttctttattctttctaattatctaaaattcaataaaattttattcatat

SEQ ID NO: 12068 - DNA, 800 bp, Homo sapiens
ccctgggtcttttggtgatgtttggaagaactgattctttgtttgcaataattttggcctagagacttcaaatagtagcacacattaagaacctgttacagctcattgttgagctgaatttttcctttttgtattttcttagcagagctcctggtgatgtagagtataaaacagttgtaacaagacagctttcttagtcattttgatcatgagggttaaatattgtaatatggatacttgaaggactttatataaaaggatgactcaaaggataaaatgaacgctatttgaggactctggttgaaggagatttatttaaatttgaagtaatatattatgggataaaaggccacaggaaataagactgctgaatgtctgagagaaccagagttgttctcgtccaaggtagaaaggtacgaagatacaatactgttattcatttatcctgtacaatcatctgtgaagtggtggtgtcaggtgagaaggcgtccacaaaagaggggagaaaaggcgacgaatcaggacacagtgaacttgggaatgaagaggtagcaggagggtggagtgtcggctgcaaaggcagcagtagctgagctggttgcagctgctgatagccttcaggggaggacctgcccaggtatgccttccagtgatgcccaccagagaatacattctctattagtttttaaagagtttttgtaaaatgattttgtacaagtaggatatgaattagcagtttacaagtttacatattaactaataataaatatgtctatcaaatacctctgtagtaaaatgtg

SEQ ID NO: 12069 - DNA, 1127 bp, Homo sapiens
gctgcctctcaacaatgagggagaactcagataaaaatattttcatacgttctatttttttcttgtgatttttataaatatttaagatattttatattttgtatactattatgttttgaaagtcgggaagagtaagggatattaaatgtatccgtaaacaaggtgatgtgatctttcatgtgttagtatattcgaataatatacatatgagaggtatgcctgtccagtaaagagattgatttgtttgtatggctctggaataactcattcgtttatgaacacatctcatgtattacttgacacagtacctttggtatgtctgcttttctttcaatcctcattatctttagccctcagctggccagtacttattgctaaagaaagggagatcaatggagttgcctaccagcacccattctcttttagttcagctggctaatagtattggaatacattgggaaaagagtgggttaaagtcctaggtggggttctctttgttgcctaccaggagaaagcagtaggcttcctttctaagatacggactcagctggtctattttaccctgtgacatttaaatatacttttgaataagctactatcctgaggctgagggttttgctgccacttttcctgtgtttccacttctgcttccaaagattttcctcttagttgtttgaaataatactttgccagacaggaagtctttagactgcccacattcatgaagaagatgatgtgtggctggatcagtaggagaagctgagtgcaaatgccatgtgggctagagtatgggaaggttgaaaattccaagtaactgggagagtgggcaagtcctcagctgaacaatcttggatgtagtctagcagcaacccacctacaatggcgttatgtttggagttatgaggggaagtgaaagataagaattacctacagctttgtactcagataatttatatccaaaatttgtgttttaaatttcatactccagaactttcatgtttatgagtattagccttttaagttatgggaggtgatatacttagtccattgatgttgtcacttgtcatctaaacttatgagaccttgtcttagagaatctaaaatatattgtcatatgttttctgtgc

SEQ ID NO: 12070 - DNA, 1455 bp, Homo sapiens
gtcccacctccatttgcaattgacctcttctgggaacttcctcagatggacaagattaccccaccttgccctttacgtatctgctcttaggtgcttcttcacttcagttgctttgcaggaagtgtctagaggaatatggtgggcacagaagtagctctggtgaccttgatcaaggtgttttgaaatgcagaattcttgagttctggaagggactttagagaataccagtgttattaatgacaaaggcactgaggcccagggaggtgacccgaattataaaggccagcgccagaacccagatttcctaactctggtgctctttccctttatcagtttgactgtggcctgttaactggtatatacatatatatgtcaggcaaagtgctgctggaagtagaatttgtccaataacaggtcaacttcagagactatctgatttcctaatgtcagagtagaagattttatgctgctgtttacaaaagcccaatgtaatgcataggaagtatggcatgaacatctttaggagactaatggaaatattattggtgtttacccagtattccatttttttcattgtgttctctattgctgctctctcactcccccatgaggtacagcagaaaggagaactatccaaaactaatttcctctgacatgtaagacgaatgatttaggtacgtcaaagcagtagtcaaggaggaaagggatagtccaaagacttaactggttcatattggactgataatctctttaaatggctttatgctagtttgacctcatttgtaaaatatttatgagaaagttctcatttaaaatgagatcgttgtttacagtgtatgtactaagcagtaagctatcttcaaatgtctaaggtagtaactttccatagggcctccttagatccctaagatggctttttctccttggtatttctgggtctttctgacatcagcagagaactggaaagacatagccaactgctgttcatgttactcatgactcctttctctaaaactgccttccacaattcactagaccagaagtggacgcaacttaagctgggataatcacattatcatctgaaaatctggagttgaacagcaaaagaagacaacatttctcaaatgcacatctcatggcagctaagccacatggctgggatttaaagcctttagagccagcccatggctttagctacctcactatgctgcttcacaaaccttgctcctgtgtaaaactatattctcagtgtagggcagagaggtctaacaccaacataaggtactagcagtgtttcccgtattgacaggaatacttaactcaataattcttttcttttccatttagtaacagttgtgatgactatgtttctattctaagtaattcctgtattctacagcagatactttgtcagcaatactaagggaagaaacaaagttgaaccgtttctttaat

SEQ ID NO: 12071 - DNA, 415 bp, Homo sapiens
ggatcattggactatcttctctgtggccagcgcagctctcttctgtgttcacagaatggccactgataggcatgcctcttttcccacccactggaaggctcacaggcaaggtgagagaggacacagaaggtgccaacactgtcgctacagtaaggacctgaagtgactttgagaaattcaccctcacaaaccttccttcaggagcaggcattggtagtgcagaggcacagattccgtcctttaccagctgcagaatcttgggcaagttacatagcctctgtgagcctcatcggtaaacagtgggggttatgaaacccacctcacagggttgttgtgaggatccaatgagttgatttaggtaagcacctagcacatgccgtggcaccaagtaagcactcaataaatcactcaactc

SEQ ID NO: 12072 - DNA, 141 bp, Homo sapiens
gtggtctgctgtgtgaataaataattcctgaagaatgaagaagattaattttgggagttctttgacgaactttgatatgtggaaaaagtatttataatttattgtaagaagaaagtaaaatattactagtggaagatcttc

SEQ ID NO: 12073 - DNA, 87 bp, Homo sapiens
acagtcccgagcagccagctgcacaggaaaaaccaccagttacttgagtgtcactcagcaacactggtcacgtttggaaagaatatt

SEQ ID NO: 12074 - DNA, 2672 bp, Homo sapiens
tgaggaggcacagaccagtgtctggatcccagcatcttctccacttcagcgctgagttcagtatacacaagtgtctgctacagtcgccaaatcaccagtatttgcttatatagcaatgagttttattttgtttatttgttttgcaataaaggatatgaaggtggctggctaggaagggaagggccacagccttcatttctaggagtgctttaagagaaactgtaaatggtgctctggggctggaggctagtaaggaaactgcatcacgattgaaagaggaacagacccaaatctgaacctcttttgagtttactgcatctgtcagcaggctgcagggagtgcacacgatgccagagagaacttagcagggtgtccccggaggagaggtttgggaagctccacggagaggaacgctctctgcttccagcctctttccattgccgtcagcatgacagacctccagcatccacgcatctcttggtcccaataactgcctctagatacatagccatactgctagttaacccagtgtccctcagacttggatggagtttctgggagggtacacccaaatgatgcagatacttgtatactttgagccccttagcgacctaaccaaattttaaaaatactttttaccaaaggtgctatttctctgtaaaacacttttttttggcaagttgactttattcttcaattattatcattatattattgttttttaatattttattttcttgactaggtattaagcttttgtaattatttttcagtagtcccaccacttcataggtggaaggagtttggggttcttcctggtgcaggggctgaaataacccagatgcccccaccctgccacatactagatgcagcccatagttggcccccctagcttccagcagtccactatctgccagaggagcaagggtgccttagaccgaagccaggggaagaagcatcttcataaaaaactttcaagatccaaacattaatttgtttttatttattctgagaagttgaggcaaatcagtattcccaaggatggcgacaagggcagccaagcagggcttaggatatcccagcctaccaatatgctcattcgactaactaggagggtgagttggccctgtctcttcttttttctggacctcagtttcctcagtgagctggtaagaatgcactaaccttttgatttgataagttataaattctgtggttctgatcattggtccagaggggagataggttcctgtgatttttccttcttctctatagaataaatgaaatcttgttactagaacaagaaatgtcagatggccaaaaacaagatgaccagatttgatctcagcctgatgaccctacaggtcgtgctatgatatggagtcctcatgggtaaagcaggaagagagtgggaaagagaaccaccccactctgtcttcatatttgcatttcatgtttaacctccggctggaaatagaaagcattcccttagagatgaggataaaagaaagtttcagattcaacagggggaagaaaatggagatttaatcctaaaactgtgacttggggaggtcagtcatttacagttagtcctgtgtctttcgacttctgtgattattaaccccactcactaccctgtttcagatgcatttggaataccaaagattaaatccttgacataagatctcatttgcagaaagcagattaaagaccatcagaaggaaattatttaggttgtaatgcacaggcaactgtgagaaactgttgtgccaaaaatagaattccttctagtttttcttgttctcatttgaaaggagaaaattccactttgtttagcatttcaagcttttatgtatccatcccatctaaaaactcttcaaactccacttgttcagtctgaaatgcagctccctgtccaagtgccttggagaactcacagcagcacgccttaatcaaaggttttaccagcccttggacactatgggaggagggcaagagtacaccaatttgttaaaagcaagaaaccacagtgtctcttcactagtcatttagaacatggttatcatccaagactactctaccctgcaacattgaactcccaagagcaaatccacattcctcttgagttctgcagcttctgtgtaaatagggcagctgtcgtctatgccgtagaatcacatgatctgaggaccattcatggaagctgctaaatagcctagtctggggagtcttccataaagttttgcatggagcaaacaaacaggattaaactaggtttggttccttcagccctctaaaagcatagggcttagcctgcaggcttccttgggctttctctgtgtgtgtagttttgtaaacactatagcatctgttaagatccagtgtccatggaaacattcccacatgccgtgactctggactatatcagtttttggaaagcagggttcctctgcctgctaacaagcccacgtggaccagtctgaatgtctttcctttacacctatgtttttaagtagtcaaacttcaagaaacaatctaaacaagtttctgttgcatatgtgtttgtgaacttgtatttgtatttagtaggcttctatattgcatttaacttgtttttgtaactcctgattcttccttttcggatactattgatgaataaagaaattaaagtg

SEQ ID NO: 12075 - DNA, 211 bp, Homo sapiens
gactggaacattgctaccataattaagagtagatttgtgaagatttcttcagaatctcatgctttctggtagtattggaggagggggttggttaaaatgaaaattcacttttcatagtcaagtaactcagaacttttatggaaacgcatttgcaaagttctatggctgtcaccttaattactcaataaacttgctggtgttctgtggacgt

SEQ ID NO: 12076 - DNA, 3140 bp, Homo sapiens
attacactcatcctttggaagagtgagcaagcagtggcagtttttcacagctcatcttgctgtgttcaattattaccatcacagccttttaacaaaatcatcttaaaatgctacccttcagccttaccctttaatggaaaaatgaaaggaagtgacaatacgggaggtccaaactttgtccctgttctctgtgttccttacctttctgtccctgtgtatagattatgtaaaagccttgtgtaaatatgagatgttgtcaaaatgatgcagtaaatgagcaatgacagtgtactgcagagaaaatttactcttgcctagaactggagggtttttatgggtctgtaattttcccacactcattgctgaaagcttaattaagtacttcaaaaacgtatctccattgttttaccttcttgaggggaacggtcttgttaaccagccctgagttgtctaccccaaacaatctctgtcattttcaaagatgcaaaatggtgttatttaattgtctccaccattgtcacacacaggaatgcctaataatagcaacccttgtctccctcttctctcctttgcaaatggctcagtgactggaagaggcggactaatagccagagttaaatataaatacaaattaataatacatagagaacagcaataccagaaaaaaagaattctggtaaaatgatgtgaaaaattgacagctccctcactcttaaggttgctgctatatacagtctaggttttctgtttggaaataggtagggtaaaatctaagacctgcacaagggcagtgagagacatttacagcctcctctctatttgtttttttaaggaaaagtcaactcctgaaatgtcccttagctataatcagaaaactaagaatattattctgtgtcaacaatgtatttatggagagaagtaaaaataagttccacagcaacacatttacatgaattatgaactaggattcttggatttcataatcactccaaagctttttggggatggtgtgtgtgtgtgtgtgtgtccgtaattgttcatcattactttttttaacctatctttttgcttgcttaatcttctctgccccagttcttcctgagtatatgaatttgatttctaaaaacaatttattcaacactctatcacccgtattctctctctggctctgctgcaggtctctgcactcctgattttgctccatacttttaaataacaataataaatatacagttttcatttctcatttaaaaaataggtggaaaacaccaaattcactttctgttccattttaattaggtttcagaagtatcttggaaatcaaggtatgctgcaagaggatattaaaataagaatgttagagagtccttttagaaaggcagtcttgggaatttggaaaaggatttttaaagcagctttcatcagctagactgttctccagcctttctttacttcctctttgaaaggacatagccctggtttctttttgacacaaaggaaagctatgcaaatcatgatctgtatgtagaattggtcacaagtatgttgttgcataggctgtacagttgggaagtagaaaccaaatgctacccagagacctaacccaattaagctctttgtatttctccttcaagaaataaatcttccttccttctttcttcctctttcttttaattttaaaaaaattcatcctgatttttttattttctatcttatttaaaaaataaaaataggccaggcgcggtggctcacacctttaatcccaacactttgggaggcgggtcgatcacttgatatcaggagtttgagaccagcctggccaacatagggaaaccctgtctctactaaaaatacaaaaattagccaggcctggtggcacgcgcctgtaatcccagctacttgggaggctgaggcaggagaatcacttgaacctgggaggtggaggttgcagtgagtcaagatcgtgtcactgcactccagcctaggtgacagagtgagactccaactaaaagaaaataaataaataaatatataaatatataaataaataataaaagtaaactattgctgatgactccagggtcaatctggaaaaattaacagtattcctcaactccattactttctgcagccaagcttgattccttgaattatagttttctaagaaaaaatagtttttaataatctaaggtaaatttgttgcaattattagcagcagcataataaggctttttgcgcaaatgaatgttattagctagagttattcaaaaaagaatgaagcacaatttttgctaggacttcttgagaactattcataaaaatgcttttagataataaacaagtataaatgtcaaaatatttttttaaaagtataattggccaggtgctggctcacgcctataatcccagcactctaggagactgaggcaggaggatcacttgagctcgggagtttgaggctgcagtgattcatgattgcaccactgccttccagcagcctgatgacagagtgggactccatctctttacatatgtatatcttactctcttgatgggacaagttggtagaaataaagattttttttttctgttgtgatttcggtgtctgaccaattttctgactcattgtgaaggtgaccagatatgaaggcatatatatgactactcctctgtcccttaggtgtataagacttagctggaatccaactaaagatttgggctggtctctccatcttaacgttgatgggattcaggacacataaccccaaaatattgcaccctgttatttgagaaaactgcagaagcaaggtttctcataccttccccttaccccttctcccctgaagcaggccataaaccctaagtgactgttccctgaagtagatcataaaaccttcattccataggtaccctttatcctcacagatacagagacaccaagaagaatctggacaaataggacttgctaagttctccacagtttattaccattagattatgtccttttgtcctctgattatacttctgcataagactgtacataaaaatacacaagttttcctatttcttttttgtcttcatttctgaagattcctgtcatgtaaaacttacagtaaataaatgtgtgtgcttttctcaat

SEQ ID NO: 12077 - DNA, 878 bp, Homo sapiens
ctgtgctgttgatgaagtcctcccagggaagcctgtgcagatgcagtcacctggaaagaacagagattaccctttcacctacctcagcaaaacaaactttcaagtcttgatagacttagcctagtaattttatagtgagagtttcaaactatatatcagtgtctatagcatcaaaaacttctgggggcgtgggggaagtagaataccaagtataatagttacattcactttcaaagagcatctatgaatttgccttttgtaacttactgtggctttaaacatattcagaacagatgcttgaaatatgcacttagcactttggttccacatctgtctgggtaaaccatgaagaaaatgaagctgctgcctcaatcgacccagacagcagccataggcagataaagatttggtttcaccctggtggtggtaggcatcgtgtgtgactttttttcctctaatatcaattttacagtacggaaatagtattttaaaatagtattggctaataaattatgaattctataaagtagtaagacttggtatggttggagtgtaggaatgaatattcatgaaatgtttcttattgcttttccttccctaattcatacaatgaatgtatttggaatacttacatattataaaataaactatacctcttcaagaggtatcctgttctgtaagatcagatgtttttattgcaggtcaatataatactgccagagacagaaaatacccccttatcagtcccttagtgcctctttctgtttgtggcatggtgagaaaacccatgctgaaaagattgtactttgtgatcccaatcagagggatggagctaatctttttgctgttgaaataaaatgaatttatgagaaacttta

SEQ ID NO: 12078 - DNA, 446 bp, Homo sapiens
ctagagctcactgtctactgcaactgtgatttcccatgtccaaagtggctctgcctccaccccctccctattcctgctgcaaatgtctaaccagatgaggttctggacagacttccctctcctgcttcattaagggcttggggcagagacagcatggggaaggaggtccccttccccaagagtcctctctatcctggatgagctcatgaacatttctcttgtgttcctgactccttcccaatgaacacctctctgccaccccaagctctgctctcctcctctgtgagctctgggcttcccagtttgtttacccgggaaagtacgtctagattgtgtggtttgcctcattgtgctatttgcccactttccttccctgaagaaatatctgaaccttctttctgttcagtcctaaaattcgaaataaagtgagactatggttcacctgt

SEQ ID NO: 12079 - DNA, 1279 bp, Homo sapiens
acttagttgttactctttggaccactcccctcaaaacttggaattctctcacctctaacatcagaacatcaattccagtggaacagtcttcccatttacaggtcttctctccaactcttcacggaaagtgcctgcaaaaacagaggtggatacgaggacaggttggagctgcagggactggcgagtctgctttcttctactgccctgagcctgaacgcttctgcttaatctgagaatcacatttggtttgttgagcctaatatttgttgagattttgcaggaccctgatcttttgtggtcctgtaaaagatactgaggaatgtctttcagccaagccaagaggatggtttcaataaacctaataatctgaagttcagtatcattttgattgataactttctttgccttgtttgcctgtattttctcctgtttcagggggaaggtggctctgccataaacagagttcagggaaatgaacatgtcacctcataggacatctgatttaggtctcttgcagaatagggtggtgaaagctgaaggaactccctaggggttttagctgttagatcacatgggaggacagcatcttcttccctgccaatttcagatataattggagggagaatttcaggtcttagactataaggatagaatccctttgcttttgcccttgatcacatgtatactaaggtattaagtggcccaagtctttcctttcaccaaagggcagggagaagtgtctatggacagcagggttccaattcttgtcattccaggaatatctgaatattcctggaatgtggaccctgagacagtgctcaggggccactgggagccaatattaggcattgactctcagccaggagtctgactggtctaacaccacactgcaactcctgacctcttgaagtactaagctactttgctgttagtgacagttattacagtttctcagccccattgtctctgccctctgtggcaatggaaggagaatatagagaagacaaaattaaatatagatagacctgagaaggacagccaggatagaattccatttgtgcctattccctgcctcccctcccctcccccatcctaccagttggttattttctcattgcatacgtgatgtgttcactgcctagcctctccctaaagaagagagaagacaagtgggctgactgatctgctctaaatctactgtggtgattaaatcttggttacaacatcctgggaagtttcctgaacaactgtaaaataataaaattattttcagaatgaa

SEQ ID NO: 12080 - DNA, 348 bp, Homo sapiens
tgagtaaccctaagaattgacacaaatctcatattttaggagattatattggttctgcctctggcatgctggtagactagggccatcctaacttattattttccagaggttctcctccagacaagacctgcagtaagcaaagagttatattctacctctctctcaattttctttttcttttctctgtatcctcatcgttagccacacacagatttgtgtggcttttattgtagaactaaacttagcatagtgttctgttgtttacatgaagtgtgtttttctttggtttcttctgttttccaactaaatatttttttctaaataaatattttcaacaattgatttgaa

SEQ ID NO: 12081 - DNA, 1043 bp, Homo sapiens
tcaccaagcacagcacaacttctgtggctacttctcggctcctgtgtgtcatcagcatcacctaggtttccagctgacttgggaactgcaagtctgagtctaacagtttttggcttagattctgagaatcaaatagaagaattttaaatacaagagtttgagattgggtatagtggctcacacctgtaatcacagcactttgggaggctaagaatcacttgagactaggagttcaagatcagcctgggaaacatagtgagaccccgtctctacaaaaaatataaaaattagttaggtgtggtggcatgcacttgtagtcccagctactcaagaggctgaggcagaaggatcccttgagcccaggagtgcaaggctgcaatgagccaggatcccatgatcacacatctgtattccagcctgggcaatagagcaagtccccattactaaaaaacccaaaaggccaaaaaacaaaaaagttagagttcgaggaattaccaactgtagttttagccttggttcatgctctcttgcatatttatataatctctgacttgtaatggaccctgactggaatgtgatccctcaggaacttagtagcctgagtctttcagtagactacactgcccagaaccctggccattctcaaaatgagaacttgggaatgtttaagaagaaatcaaacatgtttcaggaaaaggaaatctatggagtattatagggacattcccatgggaatgtatcttcctccatggcatgtcttgagggtcctttcttgttaggagtttatcctgccagcccataaatggactatttattgtaagtgtagaaaatcacagagaagcagttttgcaccagccttattcctgtgccttgttttcctcttgctctttttttacctgtatatctaatttatattttcatatatattgtgtattgattgaagtcactttaaatccttcttgggaatgacacagtatataaataaggaagaaagaaaacatgccaagctgagcatgctgctccaaataaatatctgctttcct

SEQ ID NO: 12082 - DNA, 279 bp, Homo sapiens
agagagattcttttttttttttttttttttttttttttaaggactgggtcatctcataagagctaagcatgacagatatcaacagggcgggctttctaggatgatttctgagccaacagtccaagaccttttgttgatttcagccccacttagccaagacctcaagtataaataattctgataattatggagaaatcaactgctattttatactgattctgtaaaaaaaaaaaaaaaaaatttttgtaactattaaaataattttctgactcagtgtac

SEQ ID NO: 12083 - DNA, 2683 bp, Homo sapiens
tccctttgaaaatcaagtagtagagccaagttggccaaaaaacttggatatttaaaaagacggtttcttttaattttggcagtttggtattttaaaaattgtctattgttaaattttgagattcatacactacatttacaaaatgagatagttgaaaaagcacatctagaattcagcttctgactaccaatcttttttgagcaactttttgtaatttttatggatttatgtcacttttattacagggatatattgcatagtggtgaaatctgggcttagtataccctcacccaaatagtatacattgtacctagtaaatactttcccatctctcaccccactcccacctttgaaggctctagtgtctatgattctgctctccacgtccaggtgtacacattgtttatctcccacttacgagaacatgtggtttttgactttctgtatcattacttcacttaatggcctccaggtccatccatgttgttgcaaaagataagatttcattatttttttttggctgagtagtattctgtggtgtgtatgtgtgtgtgtgtatgcatatatgtgtatgtgtatgtatataagtatatacaccacattatccagtcatctggatatgtatataagtatatacaccacattttctttatccagtcatctcttgatggacccttaggttggttccataactttgctattacgaatagtgctgcgataaacagcactattatgaatagtgctgcgataaacagtgcaggtgattttaaaatataatttcctttgggtagatacctactagtgggattgctggatcgaatggtagtttttagttggaaaatctccatactgttttccagaggttgtaaaatgtacattcctccccacagtgtataagctgtgcctttactctgcatctttgccatgattctttttgagacagagtctctggtgcccaggctggagtgcagtggcacaatcttggctcactgcaacctctgcctcccgggttcaagcagttctcatgtctcaacatcccaggtagctaggattacaggcgtgccaccatgcctggctaatgtttctatttttagtagagacagggtttcaccatgttcgaggctggtcttgaactcctggcctcaagtgatccacctgcctcggcctcccaaagtgctgggattacaggcatgagccactgtacccagccattttttgactttttaataatagccattctaactggtttaagagagtatctcattgtggttatattttgtattcctctgatgattagtgatgttgagcatttttttgtgtgtgtttgttggccacttgtatgtcttctttgaaaactgacttctaatcttgaggcctattaataatttcatttgtctgtcactggacaatttctcattcctctcagtgactatcctagaggatcagtgtatttgagaaatatttagaagtaaagttgacaggacaggatgattgattaaaagaggggagcaagggaatttgaaataattccagggtttctggtttgggagatcagatgaacaagtgcataagcctgggatgctggtggaggactggagagacatggcagatgctacctgcacacttttggtaatattctgtgtgatgggatatgaaatggtccatagaaaaaaaccggaaaaatacgccaaggttaggttcattctaagagtctaaaaatttcaaaaaccaaaacaacattataaatggtgtttctcaaggacctttcactacctttttagattgtgcttgtgattttcaggcaagctaaatgtctgatgaagactgctcttcttttgttctgtgtctgacctactaattcctgcccatgcttcaaactcagttcagaaatcactgaaggaaccatccactgccggcctgcctgcaaccacagctgacagctgagttagttaggttttcctgtccctattatttaccagtttgtactgaaatgctttcatgggctgtgcttccagattatgagttctgtggaatcaggaagtatgtctctgtattcttgtattctttggcttttttgtgtagtaaagggactcaagtaatgtttgacagtgaaggatacaacttcattccttgcctgctttgataaattttagtaataaattcccaaaactatcatgttgattaaaaataaaaagtaaccgtaacctcacacattaactttattcaaacaaacagcacttacaggaaatgtaaagtagaaaaagatttctgcccactttacctacggagacatgataaacacgcaaaaaaaacctagaaattaagcaaaaaatagcacaataatttaactgaaagcaacaagggcaaaactgtctccttttgtagtttgtggtaccttatagtagtgctcattcagtttcgtttgcttgataaatctgaggactatgagatatcagagttactagtagggtaggagtgctgtaagggtactgggagaagtaggattagttaggggcagatcttgaattctggccaagaaactgatatttaacccataaagagatagtcactatatgttatcaaataggagaataacacaaatgagaaatgactgttaattcctgatgcataataacagttgtgagctttagtttaatgtaatatttgtaataaaaacgtttgg

SEQ ID NO: 12084 - DNA, 5084 bp, Homo sapiens
agcaatactctgctttcacgtacctgtgtcagaccaggctacccagtcgagtcctcttgtggagcccacagtcctcatggagctaacttctcaaatgttttccataatactgtttgcgctcatttgcttgccttgcgcacctgctctcttacacacatctggaaaacctccggctctctgtggtggaatacccttctaataaaagggtaaccagaacggcccactctcttttacggaaaaatccctaggctttggagatccgcacttacattagagttatgggaatatacacatattaatgtggctccctttttcttgtgggggaataaaagaggactcctcctcattccctttaacatgggggaaaaaactgacattaaaagatgagactaaatctttatcttgaattttacacaactacttacgacaagggagatgtttagacctgttgtgtatacttcagagtacttttcatgagttcttccacagtgaacccttggattacctggtggctttttctagccagatttgcattaatccttactgagattggatggttttctttcctctattggcgccattcttcagatattaaagttaaaccatccactccctcaccttcagccttcagtgaatgtgctttctagttgtcaggaatgctgaagaattaacactttgactcctaaatgtgatactggtttgtagattcccttagagcagaaaggagaggggcacatattaatttgtatcgcttttgcttctctttggtcttttgtgtcttagaatttggaagtggttcatttctgttgctggtatgaggatttcgaatacttagtaatcgaaaaccatatcctgtaatttaataaaaaaaactaaggacgaaaaaaccctccaattttcccaaatgcaatcagtgtaactaggggctgtgtttctgcattaaaataaatgtttcaggctttgtggtcctgatcaaggtcctcattaaaaaattggagttcaccctaggtgcttttcccctctgtgactggcagataacacatacttttgaaagtaactttgggatttttttcttaggtgcagctcgattctaatcttttcatgctgcacacgattcctttaatgtagcatccttatctgaaagaaataaccatcttctcaacatgacctgcttaacccaaataagaacagtgatcttataacctcattgtttcctaatcattttatttcatctcctgctagtactgtgccgcttccccctccccccacacaaaataaaaacagtatctgccttctggctcatttaatgatgactgcaatctgtacctgcaaatggcgcttccagtactgtgttcagtgatccacatttgtgcttggactggaatgaaaaaatacgcttaattgccaagacaactgcaaatgagttcaatacgacttctcggtgctagttggccatcttgactcaatgttgggatacactaccagagaagatttttttgttgatgtgctgttcaaagtgaattctgaaggaaaaggttgctcacctctgtttcagagcatacccttttaaacctttttagacttgtcctcttctagaattcattataaccccaaagtgtaaaaactatttggaagttgcccctgacaagctattatacatctctggtaaatcctgctgaatgtaagggatattcagagcttttcatacctcatcatgatgttatttaagcagccaacttatgtgacctgatttaaacttttaaaaaatccacttcattcaaactagaaagagtcaaagacaaaggacatttatcagccaagagtgtgacgcattcttcgcatctagtctgtagtagtgtctgtgctctgggatggataccgtctgatgtctgtttgttattgatggcgcagccactgcaaaactagtcaactcccatctataactgttactttttctagtgctgctttgtgctgagagaacattttagtttactgcacttgacctgtaaaagactgattctttgtaattttagggataaattaggtggttaatttaaagaagaaatttcaatgttgcctttacatcacattaaaatataacttctttcagaaggataatagaagcactgattcatagtaaaaatcttgtttttagctttgacttttttgtggctgttttttaaaattgtaaattactagtaacatgtcatttctataggatgttttaaattatgtaccttccattggatagttaaaataatttcattttataagccaatttgagtgggaaagatacaaagcacacagttgtctccccacattaggaagagtagtgtgcattcagacattcggaatttttgctagtagttggagatgtttcagtgagtgaattaaaacaaagtctatttaactgacgtgatctattttgtgtctaaaacagaggaatttatcttgtcctagaagttcatgaactataagatctaagtttttttttcttttttaacaataaaatgattttttcttaaagtatcaaagttggaattggctaaaagtgaagtagcataactcagatatgttggaacttggtactgaagcaggctttttggtaacagaaatgacattttaaggggtaactgtatatcctgtttttagttctttgcctctcagattctgttaacttagtttaaattcactgaataccctaccactaaggcgttgctcattacaaaagcatgttaatttcaatacaggaaaactcttttgtagttttatatatggattggggaaagtgactttgttttacttttcctttttattcccctccatcctccaaacttccaatctatattatttgtaatgagaactttggtgggggaaaaaaagcattaagagaattttggatgtaaaggcatctggtatctgatggaccagcaggtagatgtggttggattgagaaattttgggtaaggtagatgatagaagaaagagattttaggagacacagttctctgtggaacactttctttcatgttcctgtaactaattgatcaagacccttttaaacgcttatctttgtcagttccgcttttgaaaaaactattgccctaggattgtttcttccatatgacagatgaaggttattggctctgagtcatttttggcattatcgtcacagataaaaagattggcaattaatctcataaaaaatctgaattattccagattgctgccgatttttgcctaagaaacaatatgtaagtatattttataaaccaaactttgtcaaccaattctattgtacgtctacccacaggcaactttgaatttacttctctagtgctaaataaacatttcagcgatttaatcccccaacttgggggatgcattatgaaaaggttttcctggagtcaaggggtttttctttctcgctagttttgtgaaaatttttatatcaataggcaaatcattataactttttaggggttgatggtttttaagtatattggaaattgtggtgtctaaggatgatgttcagtgaagaaaagggatccacttttagaaaccagcattgtttgctttcaactttcatactgtatgctaactcctacgttccaaaatgtgctcatttgcagacacaggtatgcctatatacatggaagtctcaaatctgaatttttatccatctcaatatgaccatttctctctgttgtgagctgaacagattaagtatatatctgccaggttgggaaatattttggtctatcttttcctgtcatcagaacttaatttaaaaaaattatcaaaggtcagatgtgactactacagtaagttggctatcataaagaatattccataaaatgttttatctgccatacaaaattactgggtttatggccggatgtggtggctcatgcctgtaatcccagcagttcaggattacaggttatatacaggttataacaatggataccaggacatcagaatatctgataaagcaaatatttatatgctaatttaaaatatcaaattgctactggacataaaatacatctggaagcttggggtaagaagaaagaaaagaagtgttccgttctgttttcaactaagggtaaacgaagtcccagagtgttttccctgtaggtcaaattaaggtaacatgtctttatttgatcatctattgtacaccagatacctggctaagggctttccttttttctcatgtagtcttccaaatgttctttgataattgtcactatattatagatgacaaagtgaagacttacgagaaattactttgccccaaggttacaacacttagatggctgtccaagggcggggaagagccctgcaaattctgtgtcttgaagaaagcagtggccacgcagtagttccgtgcccaggatctcccagaactagacttggcaaccacagctgggccagccttttttgttagaccattcttcctgactcctgcttaccatcagcacccttaaaatgacgaaatcaggcttaagttgcttttaggttacacagactggagtgtaggccctctcaggccaaacatctttcctcttctgtggtgctaaaattctgtatgaccagacaagtatggtaataggttttttttttttttttttttgtgcaaatgattttgtgtttagtaaaataatggctaaacacatggatccattcaaacgcacaaatgtggaaagtattgacacggaaggaaaggctttgaagaattactgcctcaggaagcagtgccatggatgcgaatttaacacagtctacttcttcctaaaggaatatcatcccaaggaatgtcaaaaattaaaatcaccttttaatgtactggttgttgagtgtttctgctttacctcaagtcattctgaccactctacatcctgcttcaaagtgttctgacacttagatttggaatggctctaatgattctttgtacttgaatgtggtctgtcaggccatgggtgagtgccttgcacatagtagacattcaataaatactaaatgaaggaatatgcatgcatctttgtgatgttagtaaagggtgcttgataaaagaaaat

SEQ ID NO: 12085 - DNA, 438 bp, Homo sapiens
tctctacatcattttaacagctggtatggccttaccttgggtgaactaaccaaataatgaccatcgatggctcaaagagtggcttgaatatatcccatgggttatctgtatggactgactgggttattgaaaggactagccacatactagcatcttagtgcctttatctgtctttatgtcttggggttggggtaggtagataccaaatgaaacactttcaggaccttccttcctcttgcagttgttctttaatctcctttactagaggagataaatattttgcatataatgaagaaatttttctagtatataacgcaggccttttattttctaaaatgatgatagtataaaaatgttaggataacagaatgattttagattttccagagaatattataaagtgctttaggtatgaaaataaatcatctttgtctgatt

SEQ ID NO: 12086 - DNA, 346 bp, Homo sapiens
ttcaagtggaagatgacttttaaaataatattttttaaatatatatttttaagtagtatgactaaaataaagatgaaccagcaaaaggtcagtttgcacatttgtaaatgtatttatccttaccgaattacatgtcagtctgttgccaccttctttcatgcacattcctctttggccaaactggctgctctttgtttgtaagcttttgttcctctctcatcccatacttttagcctgtgtcaaatgtaagtcccaagtatttccagcaggaagtaatgtcttcctcagcctcaaccagggaccaaccggctgcttacttttgcaaataaaattttactagaacacg

SEQ ID NO: 12087 - DNA, 947 bp, Homo sapiens
taccgccgtcctggggacttgggcttcttgccttcataaggcacagagcagatggagatgggacagtggagccagtttggttttctccctctgcactaggccaagaacttgctgccttgcctgtggggggtcccatccggcttcagagagctctggctggcattgaccatgggggaaagggctggtttcaggctgacatatggccgcaggtccagttcagcccaggtctctcatggttatcttccaacccactgtcacgctgacactatgctgccatgcctgggctgtggacctactgggcatttgaggaattggagaatggagatggcaagagggcaggcttttaagtttgggttggagacaacttcctgtggcccccacaagctgagtctggccttctccagctggccccaaaaaaggcctttgctacatcctgattatctctgaaagtaatcaatcaagtggctccagtagctctggattttctgccagggctgggccattgtggtgctgccccagtatgacatgggaccaaggccagcgcaggttatccacctctgcctggaagtctatactctacccagggcatccctctggtcagaggcagtgagtactgggaactggaggctgacctgtgcttagaagtcctttaatctgggctggtacaggcctcagccttgccctcaatgcacgaaaggtggcccaggagagaggatcaatgccataggaggcagaagtctggcctctgtgcctctatggagactatcttccagttgctgctcaacagagttgttggctgagacctgcttgggagtctctgctggcccttcatctgttcaggaacacacacacacacacactcacacacgcacacacaatcacaatttgctacagcaacaaaaaagacattgggctgtggcattattaattaaagatgatatccagtc

SEQ ID NO: 12088 - DNA, 56 bp, Homo sapiens
cagctgttggccaatggtgccaggcagcctggcctccagaggcatggaagcagctt

SEQ ID NO: 12089 - DNA, 3331 bp, Homo sapiens
ttcctgctttctgcacctcccaccaaaacaaacttttcaatgatcaaaaaatgctgcagattttttgagttcccaatacgtttcatagaaaataagtaagaactatttttaaaatattcaaacaaaactaaaacaaaaatccagtgtcacatgggcctgagattttattttagaaaaaggttgttacataaaacaccctggccagttcatttcagcatgctctttcaaccagaagttcttaatatttatgatggcactagaaagggatttggcattttatgtccttctgtgtccttcatgtatctgatcaatgaagacctgtaacactaagtacttgagagttacagtctgaataatgaagtcgtaccagctgaatagcccagcttgcagtatagttatgtttcagtctgcagtgtgtttagcattcccttgtcaaagtgcttgactgcatgctggaaactttgtatttttgaagcggcaaactctgttctctggaatgctctgaagttatggctgggacctatcccctcacatctaatgaatgaattataaaatgtatatgtctatgaagcttcggggtagtgcctgtaatcagaaaacaacttagaacccttttgtttgtttccaattgagtcattactgcctgccactaagaaacgtgcttgaatctaataagtatgtgtgtaccgtaaagaatatatcttatctggagctcagcctcaatcatgtcttaacaaaatgacaggtctcagaaagggggagctcaatagctcaaaagtgacaagtccttttcacagcaccattctcagaacacctctgagtaacgtgtttgccagtagctattctcactgatgcactgatggccctgaagaagcggatccagtcacataggaaaggaggctgtgttagtgaaagcacatggaaggtgttgctttagaaaggtagtcaggaaaaacattcaggaatagatttatacaccattattgttttatttttaaattttcattcactcttctgtttggatacttttgctaattaacttcctatgttaatttccaccaagctataagtccatagtcagtaaaacattccccttgggctgtcatgagctaaaagcagtgtcatctccgcatgttggagcagccaagaaatagtttggtactaccgacattgtctaatccatgtcacatcctcatacaatttaattgctcaaccatgcatttaaaactcctcaagaaaggattggtactgcaactgtaggtaaactgaaaaaaaataagaaagaaagagttggatgaaaatgtgaaagcccaagtttagatgtgcattaagtattaaatagcacagtatcttcttcatggagccttttttcctcccccatcccctgcagctgcctttttttgggggcagggtgggggttgatgttgaactttaagagtttaaaagtttagcttattgagtagttgtcatttaaaatataattgcgaatatcagaaaactcatactggaaaactaaattttttttttctcttgagacggagtctcgctctgttgcccaggctggagtgcagtggcgcgatctcagctcactgcaagctccacctcccgggttcacgccatcctcctgcctcagcctcctgagtagctgggactacaggtgcctgccaccacacccagctaattttttttgtatttttagtagagacggggtttcaccgtgttagccaggatggtcttgatctcctgacctcgtgatccacccgcctcagcctcccaaagtgctgggattgcaggcatgagccactgcacccaacccctggaaaactaaatttttaagtgcttatttttatagaagtttgaaaatttaatgcaggcaggtgtgtaataaattatttttgaattgaacattaaaattctgcttcttaaagtcagcactcaacttggacatgttgaaattagaatctattcttgtatttgatagacaaaatatgtgggaaagattttttgcatgacttttctctcattttattcttccataatgtatttctactataaaatagaatcaacttgggttatatttgtcatttactttgttctgttagattttttcagttgtttttggaaaaattctagaaatcaggatgaaaaatgcagcttttccagggttgctggactgggggttttatttgggcctccttattataatttgtcactacttataaaaaacattctgttgcaaacagtggtgttgcattgaattgaactttggcaatgagaacacagcacacagctcccttttcaaaaagggtctcaaccccagtgtgtatttttgtacatcaacatttagaatacttatggcagataagtaaggcatgtcactgtgtccttcagtaacctctctcagtaactggtttctttatccctaacatgaattcatttctcctttgaagtcatttattattttataaattgagaacaaccacaccaccaaatgtcacaccttcttataaagtgtgaacaaggaaggtcatgtttttgtgggtattttgtcagacttagaggtttcatttcagggcatagtcaaaggcatcatcctcccaactacccacttgattatgtatttcagatccctccgtgggggccttcttctgacagagaattctttgaggtccgcagtagtgcttttgtcagcacagactgctaatctacatcttgctgcgttctgtttgctgaggttgggcttattcatttaacacataccaaccattatccagaggcaccatggagagttagtcatggaataaagcactgtccttgcagatgaaaaaagtctccagagcagacttctgacaggaaaggtttagatgctggagagttgaagaggtgtaagaagagatcgtgccctcatttttcacttatttttttggttattcatttataataaaaggttggcattgatatggtacaacctgcaaattacttgcagttctgagtttcagataaaacattataaaacattaaattcaatacatactgctcctttgaaatttgggtaaaaaattgtacaaccgtatatatagtcatttttgtattttttctatgttgtgaaaaccaaaattgtaattttataagtctttgattcactaaaattatataatttaaatgtattttttgtatatttagaaataaggagtccagagactacgcttaactttctatgcatgcatttgaaagctgtttttacctgataatgtagtaataagttgtattcataaaatactgatctgtgttgcatttcaaaataaactggtgtgtgctctgcctggatttg

SEQ ID NO: 12090 - DNA, 1807 bp, Homo sapiens
aacaaagccagagaaaagcagtttctaagtcatattaaaaggactatttctctaaaactcaaaaaaaaaaaaaaaactcaagatagtaaaagcacctagtgtgatagattatcggttaggtcatttgtgggttgattcttcagaaacagcagttgatacctagcagcgttattgatgggcattaatctatgttagttggcaccttaagatactagtgcagctagatttcatttagggaaatcaccagtaacttgactgaccaattgattttagagagaaagtaaccaaaccaaatatttatctgggcaaagtcataaattctccacttgaatgcgctcatgaaaaataaggccaaaacaagagttctgggccacagctcagcccagagggttcctggggatgggaggcctctctctccccaccccctgactctagagaactgggttttctcccagtactccagcaattcatttctgaaagcagttgagccactttattccaaagtacactgcagatgttcaaactctccatttctctttccccttccacctgccagttttgctgactctcaacttgtcatgagtgtaagcattaaggacattatgcttcttcgattctgaagacaggtccctgctcatggatgactctggcttccttaggaaaatatttttcttccaaaatcagtaggaaatctaaacttatcccctctttgcagatgtctagcagcttcagacatttggttaagaacccatgggaaaaaaaaaatccttgctaatgtggtttcctttgtaaaccaggattcttatttgtgctgttatagaatatcagctctgaacgtgtggtaaagatttttgtgtttgaatataggagaaatcagtttgctgaaaagttagtcttaattatctattggccacgatgaaacagatttcaactgataaagagctggagaactccatgtactttggaatctcctccaagatagccagagtttaatacatcttcattctcaacactctccaaagaacttgacctaccttatgggttccatatttttcttcttaaatgtgcatcaatcatgccttgcccccaacctttaaatatattcttagacctggtaaatgcactcagacttgcgtctttaggaatttttaactttctttcactacattggcacttaaattttttctttataaagctttttgaaggtcataaacaaagaccataattgatgatagacctaatacatttcctctgtgtgtgtgtgtaacattccaaatactttttttttcttttccactgtttgtaaggtgcaacaatttaatatttttaagggactttttaagagttccttaagaaccaatttaaaattacttcagtgcaatcctacacagtatcaacattagaattttgatattagtcttatgttatcttccattctatttttatctgctttttgctgctagtttcaaactgccagtatttttccttttgcttttaaaatagttacaatatttttcatgatagccacagtattgccacagtttattataataaagggtttttatttgatttagcgcattcaaagcttttttctatcacttttgtgttcagaatataacctttgtgtgcgtgtatgttgtgtgtgtgcatgtgtggcgtatatgtgtgttacaggttaatgccttcttggaattgtgttaatgttctcttggtttattatgccatcagaatggtaaatgagaacactacaactgtagtcagctcacaatttttaaataaaggataccacagtgcatgctgtttgttc

SEQ ID NO: 12091 - DNA, 1058 bp, Homo sapiens
attcagaagaaaactcatcaggtgcttctttttaaaactagaacttggctatattgaatgtgtatttttctttagtgaaatgatgttttatgttattatgtgtgaagtaatatattgtacaagtaataaatgtattgttgagatatattgacactgaggagcttataaaaacaagtcatcttaagttcacaattgctacaagaagaaagttgtggataactaggaaattattgtaagtaatgttttatttcagtacttagcaattagagttcttttattaagatgtatctgctggattaagggtacaggttgaaatagttctgtggctgtcctaagaaataatgggaaaagaatctctggatgtaagtttttctgttgaaactagagggttttttttttctgtttacatatacttttttttaatagcaatgtgtttttattaaacatgctgtgtgccacaggccagtgttgttggtgaaatatataaacatttatttaaagagaaaagttaccagtatctacacctcttaaaaaacattgattggtctaaaaaatatatagataacatcctaagttaacatatggcttcttaaaacttgggcacttttatttgtttttatcccaaattcatgttttaaggcctttaaagaatagtcagactgataaagaagtgctaacagataagctatagttggggaaatttgtgggttttttttaaataagaaatgtttatttttgtccttatatttaaacatgatggaatttgtaaatcttggcattgattgtaattctgcctttttggaagaattttttctcccagcatgttagctgagaatattctctattttataaataatatgaagtaggttggtctctctgcttctctataccaggacttcttagctcagtatcatctcccttcatgtaagcagcacgttttaactcttaggaagctgaatgttgtgttatcactaatactttgtacaggtcacctgcctactctaattgtccttagtacttggacaggctttatcattaaagagtgttctcctaatccc

SEQ ID NO: 12092 - DNA, 121 bp, Homo sapiens
aagcacaattttggcaattttaaaggaagatacagagatgattgtacttcagaatgactgaaacccatataccacccaaaatcaattttcttgtacaactggtacacactaataaacaatt

SEQ ID NO: 12093 - DNA, 674 bp, Homo sapiens
tgtttccttctccgaggggctggagcggggatctgatgaaaaggtcagactgaaacgccttgcacggctgctcggcttgatcacagctccctaggtaggcaccacagagaagaccttctagtgagcctgggccaggagcccacagtgcctgtacaggaaggtgcctggccatgtcacctggctgctaggccagagccatgccaggctgcgtccctccgagcttgggataaagcaaggggaccttggcgctctcagctttccctgccacatccagcttgttgtcccaatgaaatactgagatgctgggctgtctctcccttccaggaatgctgggcccccagcctggccagacaagaagactgtcaggaagggtcggagtctgtaaaaccagcatacagtttggcttttttcacattgatcatttttatatgaaataaaaagatcctgcatttatggtgtagttctgagtcctgagacttttctgcgtgatggctatgccttgcacacaggtgttggtgatggggctgttgagatgcctgttgaaggtacatcgtttgcaaatgtcagtttcctctcctgtccgtgtttgtttagtacttttataatgaaaagaaacaagattgtttgggattggaagtaaagattaaaaccaaaagaatttgtgtttgtctgat

SEQ ID NO: 12094 - DNA, 1301 bp, Homo sapiens
aatcataagaatgtggaacccgccatggcccccaaccaatgtacaagctattatttagagtgtttagaaagactgatggagaagtgagcaccagtaaagatctggcctccggggtttttcttccatctgacatctgccagcctctctgaatggaagttgtgaatgtttgcaacgaatccagctcacttgctaaataagaatctatgacattaaatgtagtagatgctattagcgcttgtcagagaggtggttttcttcaatcagtacaaagtactgagacaatggttagggttgttttcttaattcttttcctggtagggcaacaagaaccatttccaatctagaggaaagctccccagcattgcttgctcctgggcaaacattgctcttgagttaagtgacctaattcccctgggagacatacgcatcaactgtggaggtccgaggggatgagaagggatacccaccatctttcaagggtcacaagctcactctctgacaagtcagaatagggacactgcttctatccctccaatggagagattctggcaacctttgaacagcccagagcttgcaacctagcctcacccaagaagactggaaagagacatatctctcagctttttcaggaggcgtgcctgggaatccaggaactttttgatgctaattagaaggcctggactaaaaatgtccactatggggtgcactctacagtttttgaaatgctaggaggcagaaggggcagagagtaaaaaacatgacctggtagaaggaagagaggcaaaggaaactgggtggggaggatcaattagagaggaggcacctgggatccaccttcttccttaggtcccctcctccatcagcaaaggagcacttctctaatcatgccctcccgaagactggctgggagaaggtttaaaaacaaaaaatccaggagtaagagccttaggtcagtttgaaattggagacaaactgtctggcaaagggtgcgagagggagcttgtgctcaggagtccagccgtccagcctcggggtgtaggtttctgaggtgtgccattggggcctcagccttctctggtgacagaggctcagctgtggccaccaacacacaaccacacacacacaaccacacacacaaatgggggcaaccacatccagtacaagcttttacaaatgttattagtgtccttttttatttctaatgccttgtcctcttaaaagttattttatttgttattattatttgttcttgactgttaattgtgaatggtaatgcaataaagtgcctttgttagatggtg

SEQ ID NO: 12095 - DNA, 1254 bp, Homo sapiens
atgcagtgctgggaccttcctcttttggagctgtcccatgtacagtggacccaagctcaggaccttcgtggagctgcttctccaacctgagaaactcaagacccatcctcccgctgtcactttggacaatggaaatctacattttcttttccctttttttttttttttgagacagagtctcgccctgtcacccaggctggagtccagtggcacaatcttggctcactgcaacctctgcttcccgagttcaagcaattctcctgcctcagcctcctgagtagctgggattataggcatgcaccaccacacccagctattttttgtatttttactggagacagggtttcaccatgttggccaggctggtctcgaactcctgacctcgtgatccacccgtctcagcctcccaaagtactgggattacaggcgtgagccaccatgcctggccagaaatctatgttttcttagaacatgtggaagaaggaaaaagacaaaaaaggaaatctggattctgaggaccacgtctcacccagggtgacatcaggaatggtgctagcctctgcaacacgacacccagtctgaagagctctatacaggtactaagactagcaggggacaccaagactctgcacaaccagattgcttgtgcagagggccacaataagtgtatgttttatattttattgtattatttattcaaaaataaataatacactcacatgtttccacacccaaaagatatatagagtgaaaagtctccctccaatccttattctccacctgctcagttcctgtctaccctggcctagaggtaaccactattctcatccgtacatccagcatttctttatggatatacaagcaaatgggaatgtagagtctcacattctctctttatacacaaaagttagcacgttatacacatgttctgcaccttgcttttttcccttaacaatctatcttggagacatttcatatcaattcatatgccatttgttcatttttttcattgtataaatgtgttataatttatttcgccagttccacaatgatgagcatttggattctttccaatcttttgcaatgacaatcagctctgcagtgaataatcttgtacaaatgtgcaagcataaagtgtatctctaggataaattcccaaaagtggaattgcaggatcaaaaggtacatgcatttgtaaactattattgtttagtgagggtctttttaattaaagaattaacatgaattgcctaa

SEQ ID NO: 12096 - DNA, 6672 bp, Homo sapiens
aaaaaaaaaaaaagtgtaaataatactggcactttagaacagattaatcaagagtggggttactctgtgtaaatggagtgctgtacagatttaagagcaatgcgtaataacaagttaagctgatatgaatagcaagataatccaataactgcatttcgtttggttagtcagcattctttgaactgccttacatgttgtcacctttatagaagcaatgcattacttgttttagatcagaaacttgctattccacccacaccaagttaaaaaggaaaaaaaaaagactttcgcacaattgtttcctaactgataacattgtacattcttaggagattagtaattgtgtgaaatttactcatactgtttctaagtttttcagcatagtcattgcacttcagcagggaatctgagtatactttacagacagagtgaacttaaaagtttaatgtcaagagattatggcttaaataaattagtgtgtcctatagggggaaaaaaaccaagaaaccaccttttaaaaagaatgatatgccatatacccttgattttcattttgcattatattgacgtgtttttttgaaggaaaaaaagtaataaaaatctgatagtctaagactccactatttaaaagcctaattactttaaaaatatgcatactttcagaacttttaccaaaacacacaactgttgaagcagtcacttctctatggaagtatgcatattggtgtcagtttctttgtacagttgtacttagatattttttatgatttttcatgtgcaggtatcaaggttttgaagttttagtaaaagaaattctgtagattacattcccaagaacataatgcttacacaaaatgtatattccacgttttaaagcttaattgtattttactttacatatacacttcagttaacatagagcacttagaatctatttggtatttttgatttctcaaagtaaaaaaaaaattagatttttaggtttgatatggttgtgtcataatcatctcgtaattgacaattttaacttttggcaataaaaggaaattgggatatctttggaactgtaaaacctggtttaatctttttctttctagactcttgatagattggataattaaacagtatccagagaaactaaagaaatgggcattttaattgcatattttatcttgagttactttttaatgaacactgctcattacaactttacaaaccaaaagtgtttactaattccagtaactaccatttctttttcagctagatgagtgatcggaaaatttttgttgcatttcaaaatctaaataaactacagactttatccttataccatgaatgtttttttttaatactctgtcttaaaataatacagcatggtacaataaatagtgcttttatgtatatatacacacacacacttttctgaagaatgatggtttgagttatgcgttgggcagttttgatttttggaagttatattagttattgactctttgttacaactttttcatttttacattttaaattttctgccatcgttgtcacaatgcacatcctgatatagcaccagtgaaaatctaaaattaatacccttggaaaatgaaaatattcttaatttccattttgactcttatactggccctatagctctgcagtctttgtttcaatatagaatatgttatccatttaaattattttttcttttatttaatgttatcccaagactgttctcataaagaaagggaagaaataactatccacccttaacatccttcatttattttgaatatattggtgtttttatgataaggaatataaattatatttaatgtggtttcctgtatactttggttattaagttttgcttgaaatagtagttttcccgtttgacagctttctttgctgccaaagttttcaagaatttaagacttctttgaagtaaatatttaagttctgccattattgactcttaagattgtgtgtgttgtgttgtgcattacataattacaaaaaggcttcattcaggtgatacgttaaaaatggaactgtgctcaccctaaataggcattggtatttttctcttttggtgagagtaggcatttatttcttgagttgttttggagcctgatcaaaaattttgttcatggagaacttgatgcaattttgatacagtggagaggtttttttcggttgttttaacatcaccagcatagtttttagaatgtgactcttgctgagcatttagggtgagcttgggaaggaaggcctttgaaaatggtagttatgcaagcagactttcaggtgttgcattcctgttttcaacacatttctttaaatctacataatggcagacttttctaccaggttataagcagtttttagataagtgatactcagccagcataacttattgacttaccatttacgtatagtcatcactctcttactgtgaaattccaaatgcctaccagagttaccttgttctatcataatatgacaaacatctcaacagttttggatttccccactttggttcagaaggttatttaatttctatctgggcattaatggagaaaataagtagccttgtgtgctgcttcagattgaaacatggaggatatgagatattcttctgcaattcatgtttctcatttctcaaagtgagcacattgttctataaaaacatgctggtacacccttaaacttttgatcaatctgagtgaggtgtgcttttcctcttgggacctactcacgtttgaagattggaaacatcacgttaggcgaggcagtatctcttgaacatcttctaaagggttttttaaaaccttattctcacatatttcatttgtcttgaatatttaagtggctcttaaacgttttgggtctacatgcaaatgtggtacttaacaaggtaggaatccatcttcttagctctggctgagggtgccagccatcggtcaggtcatttttatctcaagaggcagaaggcagttatgtcaagaattgtgctcagggcaggatttcgtttccacagaggagagacacttgcagagtgccagctaggttagatcttttgccgcttctttcatttgattaatttgggtttttaaagggctgtttaaaaaaaaaaaaaaaaggccgggaaactttaaaagtaggcattactgtagtactgcatttcttagaacattttaaactagaactcatttttttttcacagtatatttacttgaagaagcactataataatcattgagaagtattttgagtctgaaatttaatttaattttccgtttcaaattgctttatttcagggaaataattttccagttgttttgctatattctgcaaataaaaaccgtgtttccttttttcacttaaactttggtaggaaacaaactaaagcagacaaacatttcttgttatgtttgttgctttctttaatccaatggataaaaaagtaaaaccctgtaaacattattttatttttttatgcaataccatgctgtaaatatggttcatcaaataaggatgtacctatgattgaatctttaattctgcacagttagagtttatatataaacgtgtcttgacaatcaaggacttttatgtgagtcttcctttatgatgtttattaatgttatgcattccatttgttttgaagtgagtaccaatgtgctaatttgtattgtctgaaagtatgtaatgtttttacagcttgtttttaagaatctgtaaatatgtacaaacaaatcacagtactgctttatgttagaaggcatatgatgttgtactgtatgtaagcaataatacatagcagtgctaactttacaagtagcatcaggaaagttctaaaaacatttcagagttattaattatccttatttcatttaataatgattatctttaatcagtttttataagcaaattccattgttcctcctattggaacgtaacactgtttacacagcataattgaagttgcaggggagacaggctaaatctgacttcatctgtactcactttcactaagcattgaatggccttaccactcttctgcaagatggaggaagaccgcaaaacttagtgcccatcacactgaaggaagggatgtggttttttttcctgcttctgtactgctacctaactttgtgatttgctttggattttaatatttgtttctgttttagattcaagcccgtaagttttgaggtgacttcagctccattgtgaaatagatagttctcttcatatttcataactacatttcaataattctaaactttctacattgatttttagatacttatttttcaagcttggtttctcagctgatcagatgaatttattcaacttcaatacaaagaaagacaaacctattatagtttcaagtgagtagatattatactgtacaggacagctatttgaacacacacatcactgctttagaaataaaaccgccaatttataaatgtatatgacctacattttataggaaaaaatgtttttaaatgctagtcatttatataatgtgctttgaaggatttgctagtccacttctgtcactttttagtacactggtatcttttatatgtaatgtatgctttttattattgtagcaaagcatttcagtagaaagaattttgcaacaatatgggggaaatttttcattgttggatttgaattatactggattttatctgtgtagtcttacttgtctttattttaatgctgtctgaagggaacttggtatccaaataaagcaggtaacctcattttacttcaagggcatactgtgtagtgctgaatttaatctgaaaatctgatgattttgaaaagaaaaacaagtttataaacattgtacagaagaaattaaatgtgtgtgatggaaatcctgatggtggagcacgttgaattttctgatatatagtgttattttcctgggatcccctatgccttctttgtatttcaactaataaaggaaaaaccctgtcattaaaactggtaagataataggatattctgattatacagtattactattcctatcccattttctgaccttttctcaatcactgtaaatttttattttctatttcctattgataattaaatatgtacataatatagacactgttgtatagaactaaatgaattgggttgctatgcttgagtgggtagtgaaatggaaatatttgatgaatactgagagttcctaaaatgctagagcaaatttccgagggaaaggggggcatcgtgtgtcttgggaaggttgcagcaggttgtttcttcaactccctaagaaatcattgggaaggactcaactgcaaactcgggatcagatacaaaatgggtctttccttcccctctcccccaaaaaataggagcactaaattttaaaatctactcaggtgacagttgctttgcaatgaaacttatcacattgaaattttcagtgttaaataaaaagagatttgtgatatttttaaatataaacttttacatcagtagtcagcagcctgacaattgaaatttggtaagtcgatatattttaaaatattttgctctccaaatagaattgtttttaaacaattgggaggttttttgtttctttaaatatgttttaattgtcattgtaaaaacaaaatcttgcttgaccctatattatgccatgaatgaattgctgagcctttataatacagtgacagcttgtttcatgcatagtcatggaacatagagatgttctttaaactgacctattgataagaggtttaatgagtttcacggctttcaacactattgtcatatagttatctttgccatttggagtttataaaaccattttatgtattgtgatactaaaggaagttgttttgctttactttaaattgaattattagactaatatttgcaaattctgcattttaaatgtggacactggctgtttgaaaaataaaatatagaatacagttttatggataattttcgagctgaatttttcacaatattctgaaccaaataacgaatggtaaatatgcaaaaatcatggtgcatagatataaccgtaaagagaaaagaatttctgtgtggaattaacagttacacaaattgggtaacaattatcagggcctttattatagctttatgtggaatgttattctaaaatgcaagagtcaaatgttactgtcattgaatattttagacttgaaacgtgtttatcatagagcgaagaaaatatgtgttcttttctttacagataagactctgttaacccactgtcagcatacgtgggatttcttttcttttttctttcattagtggagatttgttttcatccatctaccaccttgccagtaccctagcttgtgaccagcgggatgcattgtaagaaagttgtctgtggttaggagtgcagtctgggtccatggaacaaatttaaactaattggccctcgcaatgatcagtcctaggaccctggccttattattagcatggtgctttaaccaattgtacataataataccactgatagtctactaatgcatttcctagatcccagtttttcttgaatgattaggaatggtggggagaggggaggggagatattctacatgatacttctccaatcttctaaagattataagaaaaaataaaaaattgaagtcacttgaa

SEQ ID NO: 12097 - DNA, 1128 bp, Homo sapiens
tcctgtgaattgaatttctcttcaatcaaagtgccccaaaacagaagcacaagtaaataaaagaaatttaagtcactacctagtatacataaacatatacaataagttaaataaattcagctttctttaacttaattgtggtcgtgttaatgtagcacaaaaaatatattttaatgaagattaaatattataatttgaggttttggggactggtgctgattccaaaaagttaatttaataatatataccaacagattgtttgtcacgcttctgaaccaatgactgaatgtcaagatgttcgttaatttctagatgtttgtttcaagaccagctgtttcagatctattaatgtagggaatttttccctaagattgaattcctatatttacttggtaagatccactaatctgttatagggagttgttttctcttgccttatagttgagctatttggtttgacaaagctcagcagaaacttgatgtgaaaaatctacgattttcttctacattcattgatgccccttgtaatgtttgcatacactagaaaatgccttcaatttgtgttttaccagaattttgatactggtcagaaattttatactgccaacaaagaagactcaacttctcagatctataatgggatacattgtcatcctctagcaactcctatatagaaagttttaactgaatatgttacatataagaattaaattcttctcaaataattcttaacctcagtaatgagcctaaatttactctgcttggctctctacacatggcatttcagggtataagatgtagcatttcaatgtgtaagatatatgtactaaacatatgtgttgctatcttcatcattaacatccttcttttctattgcttggctgtaatttttgtaaagataaattatattgtttttttgtatgtgtgtttgtagtatatgttcagaaggcaagcatcttcattttgctagctttgcagaatcttaaaatgtgtactcgttatttctaatgatgtaaaaaaaaatccctagtcctgtttagcatttgacttttttatatgttttaaatgttgctggatttttgtgctgtttgccaaacttatacaataaataaatgaaatattgtgctg

SEQ ID NO: 12098 - DNA, 1655 bp, Homo sapiens
cacatactatctaaaactcgaccaaatgaggttcttctctgtttaccctaaatcctcccagaatggagtcattgcactgagtgacctgcttcctgattgcgcagactgaaactagctaaacctgaatgtacctactagggcaccataatactgcagcaagaccaaagtggtaaagaaacacagtggaccttttaccaacctgttcatgtgatgtgagcaataccatcttaaaacttgttacctgaatcagtagatgaatcttttatccagttcttgctcctaaagttaagtttgaatcccctatttttgcacaggggcagcagatacacacaacaatgagaactcagtgactttgatttctttgtagtgaaaagtgaagtctccgtttcagagtttgtgtctttctttctgtccataactgaagtattcactactcttgtaaaccaaccaagaggaggagaaagatgacccagaagtggattcagccattgtgcctgaaatcagtgtttaaaaaaaaaaatcaaccaggttgtggtaacaaggcattctatttcttcaaaaagactgtatgcctgtgtctgaggaacttacctattatccacctctgttggaactctcttttaaaaagtacatttatagattgatcagaattataaccatggagaattttttcttctgagcattttaatatacttgaaaacaacattgacttgaaaaatttcagaacatttttcagtacctagttttattaaatattacacttgagagacactttttaaaaatgtgttaatgtcaatatgatgagattttagcctttctccagaactaaggcattaaagaaaatagcaaatattaaaaaataaaactgttacttttttccttctttcttttcacctttaggttaatatccagtattatgtgttatccctttggataagtatgctttattttacctctgttaaaaattaaaataaatgattctattcatatttgtcagtaattcaaaacttatatgtgtaactgaacgcgcatgtaaggtatggttttatttattttttttttttttgaggaaatttaaatgctaaagaaacaacgaaatgaaaaggtatcaggaaaaaaagatcaggaagttgtattcaggtacaaatctttttttaaataagtattttgttgaggttgaagaattgctggcaattaaaagaatagagctaattatggctttcatcattcattcatgtatttattgagcacctacttattatggtgctcaacacttgttactgcaagctaccttaatttcccaagagtggtgccttactctgttttttctgatatggtcttccaatcagtgtgtgtaacatacctgttgtttatcagccattgtaggtggctgtgtctgttgcatcatcataagaagtttaagctttgtgctctgataaattgtgttctgttaaagaggttagtaggatgaaaacagcaaaacaataattttttcaacaaattgtaaattataagaaaaagagttggtttgtgtacaacaattttaatgattcccttgttcatttttgctgtgaaatgcactgaaaaaaatcctcaaaatgagttatagttcctgtgttgggaaaattgacaaataataaaactagagaacaaac

SEQ ID NO: 12099 - DNA, 77 bp, Homo sapiens
gcagcgcctcccagtggccagaagctgaaatgacggcagtggtgccgcctggtgaatgaattggttctgtgacccgg

SEQ ID NO: 12100 - DNA, 659 bp, Homo sapiens
ctgggccccgctggtcccatttgctcattagaatttcctctcacatcagtgggatacagaattcagtttctcccttgccaggtccttgggatggttgacccctgcctctgcagtagccttttgtgagtctgctaaggtagctctcacacacctcggctctggggttgatacctgagcctgcaatagagccctgaaatcaagagcatggcttgagtgtgtgaatatgatgtgtgcacatgcttaatgagcgtgcaagtgtgcacacgtttgtggagaggagggtgttctggcctgagaaggtaaagaagaggcatgtccagtatgctttgcagggtgtgtttgctcttttccatgcccatgcaacccagattggggtggagcaggaaggagctcttttctgttcccaagcctcagaactcttgagctgtggcttacttgctgtcttcaccaggttcaagctccgtgggccacactgctgctgtgccaagaaggtgtacagcctccccaggatggggcctcatacaacccttcatctgcactcaacatttaatcgtgtccttgctgtctttttattttcctttttgtttgttagcaaaaacctctatttagatttcaataatcagagaagtgtaaaataaaacagattatattgtacttga

SEQ ID NO: 12101 - DNA, 226 bp, Homo sapiens
agaaaggtctttgtgagaagaaagtccctgcccctccctcgtggctggggccccctccctcttgagcctgggtgcacagcacctcccacctggggggctagtggaagccctcctgcctgcacaccatgtctgcatcttggacgccctctgtccagtcagaagcagcccttggctgggtgaggtgtgcccctcccagggagaataaagcttctgaagagagaccgtc

SEQ ID NO: 12102 - DNA, 1091 bp, Homo sapiens
aagcgccctgaaccccagcctgtccgtcaccccggatccccaccccatccccatttttttaagcaataatttatttgcctcctccagagggacatggcaatgttaccagcccaccttctgaagcctgggaggtgtgaacccagggcccgccaaccgctgcctttctcgggagtacttagagcctcgaacccgcgtccctgggggctgggccccaggcgcacggggctggaggcaggccttcgtgccttcgtgccttcgtgccttcccgcggtggccaggcctctgctgcagccgctggttgcaggcagagttttggggacctggcccttctcccactgggctcccccatcctgggccaaggccagaactttagtgctaggggaagatgaaatgtgcagttttgaaatgttgggtttccagagagagtcatgctggaggagaaggaagtaggccagaagtccagggctgcactgtggtgtgagggtggctttgtctaagatgcctgctcagcatgatcaccagagggtgtgggcaggtccctggagccgggggggggggggggggggggggggggcaggaccgggccgctgggccctcatgtgggagagaggtgaaaagcgtcccccactagggggctggcagtgcatgtgcttgagttaaatgtgcagggcagacagagccagaagggcctgtacccaggggctcgtcccctcctccggtttcccagacaaatccagacaccagcctttagggtggccttgggaggagagggccaggctgtcctgggtgtgagagaactagatagagcctcccaaccctgatttagaaatgcattccttattttgtctagaaattaataaatgaactagcttgttttgacaggtttatttcacatcctatgaatgtatgtaaataaactgtacataggtccatccacataaaatatcttttaataacatatcaacatttgtgtaaatttgaaatttaaaaaaatctatgaagctggtgtacatatgttacaattacgtatattttctttggtccttcataaaaatatatttactttgccaataaaaagaaaaagaactcac

SEQ ID NO: 12103 - DNA, 774 bp, Homo sapiens
cggcagcctcggcctgggcaggcccaaggccacggtctaggacacaccttccctgagactcatgacatgagcctggggagacctcatttggtttccgttcagaagaccagcgtagcccttttgagacttttgggtacatttatcaaaaatgttttccttttgttttaccaggaatgagttcgggctatactctttgaaactgcctttgtgagcaaagtgctttggcaaggcaagggtctccctcagcagggctaggtgcactacagcctctttccccgtgtcccgttggatctgagctgtgtagcacttgttgcattacaaagaaaaagacttctgcaggaaatagggtagagaacaggctgtctagtcagatgcagcttgatctgtggcaaaaccaagtgtggtctttcagcttcagtgtgttagcatcccagcacctgggatggggtttgtgggcaagttgattttgccacactgtagggcccaggtggtcccattgccaccgtgaagccaaattctagcccaagtctggtagagcagtcgggcagctagttttcgggggaggatgatgtggtgggacagaggacctcagtggcctattacggagccctcttcccagactaaattcatagccgagagctcggggggatggtagagttaaaatttaaaataattttctaaattctgtatttggatattagtgtttaagtggtaatttggcaacagtttataaagtgatgttctgaataccataaattatgtgtaggactgtga

SEQ ID NO: 12104 - DNA, 1064 bp, Homo sapiens
gggagccaggagtcgcggcccctgcctcccttcctccctggcgatcctcacctgcccagccatggcacacacccttcctgcacacccgcactacctgcacttctcgcacatcctcacgtggcccttatggtgccctgtgcagggtgccaccacagcctcattttacagacagccccctgaggcccagagacatgcagctctctgtccacaaccatgccacttgcatgggagccctgaaggctgtcaaagtccatttagggccaagtcccaagcctgcccgggggccctgcggtgaacactggtcaagctctctccggctgggatgatcacaccctctgcttcctggccacctgccagcctccatgcaactctgtctgtctgctgcccatctgctgtctgtgcaagcaacttctggaccctggcaccctgggctgctggcctggaggagttcgggaaggaggatagaccaggaaataaagggtcaacagagctgtgtgctgcactgtgggctggtgggacgggcaggccgggtctgccctaaggataaatgatcacttactggggaagaaatgagagagcaggggcacccccctaggccagcacagcctgaggggtacagcaaaggggaccctttgctggcccctgaggctggagtctggcaccccttccccaatcccatagcccggtaatgactgggtccagagcctcgtgagaggtcaccgggatgggggaagtggcctctgtcagggccagggctcatgaatctcattctcttagctgggcgtgcaacagaccaacagataactcatcctaaacagagaaatgagaaagagtctgtgggtgggcctctgagggccacagaaaaccagacaccccacatgtcggtggattggagaggggcaggccactgccctctccaggaccaagccgggttcttggtccccaccctccctgcactccgcatctcctccccagcagccattctcccctttcccttgtgaacaaaagcctagttttgtgtgggcagcaatatagggtaaataaaaccacctgattctccagcc

SEQ ID NO: 12105 - DNA, 191 bp, Homo sapiens
agactgggctctgtgtgtggccttcttattggccaccttctccttggcaggctctgggcagtagccacagagactttagtaaagggatcagccttcatggccatcatagaccgggagtggtttgtggtccccccaaaaagctacaccaagctaataaactgcgagttcccaccccacttccagctggaatg

SEQ ID NO: 12106 - DNA, 449 bp, Homo sapiens
gggcagctgccagggcctgtggaggacaggccagagaggaggccagcaggcccagagtccccaggggaggaggaccaggtcaagggacgttctgtgggcagtagccctgtgtggccctgttcccaccatgagtctggaggccccacctccctggggctcccaatcccctttgccatctctgctctcactggggaccctcctccccttcccacctgctctcatactgctcagtgacatggcccaggctttccttccagggccatgcttggcaaggttggctgagggcaccctccttctctgcacccttggcacgagggcagggctggctctcccaatgcctccatcccatccccatggtgctttggcctcctcaaagcatccaccatggtggatggactgaagtgtgtatattttcttgatctattttttaataaaaaggaaaaggagca

SEQ ID NO: 12107 - DNA, 3130 bp, Homo sapiens
atgcattggccggtgcccggctcatggtctgggggatgcaggcaggggaagggcagagatggcttctcagatatggcttgccaaaaaaaaaaaaaaaaaaaaatcagaaattggagaaatccttagcacaattttctaaaaaataacagacatttttgttatacattagactatcagacactggacctaccttaatggttagacactttatgcaaaaaaagagaaaggtcccaggtgattttccacaaagaatgtgctaaaatgtccactgaaaacaaagccaagcctctgccctgcctctcccagctcccacaagggttccaggaattcctggtgttcccaggacaccagactgcaataactggaggcgcctccttcctgcccacccttcgctcacgccccagcgccctctctgaccagcctccgcttggtggccttcctctggccgtgtgatgaggtggttgctgtctccataggggccagctccccagggcagactcacgtgcccctctgaggctcagaaaatgcccagcccttcctcaaaatgagcagccacccatgactttgtgggctccttgttagcctgagaccaggctttgcagaggggcggggggtgaggcttagcccagaaggagaactgagcaggaaaccaaggctcttctctgtcccctgcccttcccctcctgccagggggaggctcaggttggtccccgagtgccgcctgtactcacaaaggctgcctttcctctagagtcactaattttacctgatgctatgagagaatcatattgaagatgaaatgtctaatatataatgtatattttaaagcagagactattttggtggataggtgggagggagcaaggggagtttgagggaatcagagcttgatgctactgtacagaactggacaggttgggccggcagtggtggggccagagggctctgtgctctaggagctaagccagcagcccccgagaggggacttggctgggcctttcctatgggcaaggcccagtgctcttcctgcccaccagggaccatggagcagtggcaccctatggggctatgatccctaggcctgggcctgggcctgcctatggcccagagctaccctgggagtgtcagtgctagcagcacagctacctctggtggcaggagaagagaggcccagcacagcagcaggccaggccttcctgtccaggtctgcatggagcactcggtgacccagagcagggactggaggcacccccagccctgccccaggccacagcaggacaggccgggacaggcctcacccaaggccaaggctggcatcagccaatcattcagagctgaggccctgggcctagcctgcccttctcaggtgccaataccaccccagccctgcccttggcctcactttttcccagcaataagtggggttcaccacccgcctcgggaatactttccccttctaaatgggacttgctgttacctcaggaggctccttagtgcaaatatgaccctggtcagggctttgccaccgttgaagccctgcagaaggtgcaatgtaggggttctggggccacagaggagaggccacttcccaccaggacccccaacatgaagtctaggcctcaggggctcccgcccttcttcctccagcagcgggaactgccactgctctcccaggccctgttctggaggctaaccttggttcctggagagtgtgcccctccaccctccctccagcagccctgatcacaccatgagagccaggaacgggtcaccctgctgaagatcactctgtgccctgggggaggagccaagccctcaccccacaaggggcaggtgggggcttggttgctgacccggcccaagtccccacagagcaccttctgtagctccagcttgtctccctggcttctctttgaaggagaaaaatgtaaaatatgcactgagaaagccagccccgcctgcttagtcagccccggcagcagggcagccatgggaactcaggaaaagcaggaaccctttccaaaagcccagagatgccctgggctcagatctgtaattctcccaggagctgtgatagagcaggccacacaaagtccctacgcctccctgctgcctcccccagatgcatgtggtggcatcaccattccccaaattgaatatcagcatgcggcctgaccagggactctttagatgcatgaatttatttatatgaaggctctcacagagacacacacagcacttcagtagcatttgcattcctggttaaagaatcaccaatatttaaaataaaaactttcctgaaattgggactgtcatgttatccagaagggctggtacatccgcccaccatgtccccctgctgggtcaggagccaacacaggaccctgcgtgtgagcgtgcctgacatctcacgcacggccactccagagccggtccctgtccttggaaagctgtgaagccttgcgttgagttccttctcgatactgacggctccgtgctgacattctgagctctggagtcacaccagcgcaggggcgtggaggaactgaggtttggaaggaatgccaggtctcgcacagcttggcctcgagaaggtgagaggaaggcaaaggccagggaggggacccagagaggcctggcacacaaggcccaagcaccaccgtcaacacagcccagtccatacagaaatgggtttcatgcctgaaaagctttttacagaaagatgccgcctgtagccagtgacagccgcaaccctacaggcctcagttccttgcagaggtgaggggtagagagtcagcctccctcccttccagcagcgacccagcttccctccacttccaggtggtgctgggctcaccgagggagcactggtgggtgctctgaaaacccacaggatcccacctccaggcccacctgggtcccatctcactctcttcttctttcaccaattgctaacatagaccttgttgggatcacgatggcttcacaagccagctgttgggtttgctatgtcactgtggctcagtcacatccctgcgtgtatactgtctgcggggcacatatgtatccatttagagctaaaggaatcagtgtacactacagctaatcctaataaatccgatgttttcgg

SEQ ID NO: 12108 - DNA, 290 bp, Homo sapiens
gatggctgaggttttcagcagtaagagactccccaggtgtgcctggcctgggtccagcctgtgggcgcttgcccctgggcttggggctgccgtccccactcaggcgtggtctgcagcgctgtcagttcagtgtggaaagcatttctttttaagttatcgtaactgttcctgtggttgctttgaaagaacccttccttacctggtgtgttttctataaatcttcataggttattttgattctctctctctctctctctaagttttttaaaaataaacttttcagaacagtt

SEQ ID NO: 12109 - DNA, 108 bp, Homo sapiens
gcgctggccacccggccctgccttcccaccaccaccaccgtgcatggggcagcaaacacgtggggccgcagacatagcctgatggttaataaatgtgccaagtgagtt

SEQ ID NO: 12110 - DNA, 1590 bp, Homo sapiens
ggaacagatggacgtcgaggaccgggcactcccgggatgggtggaccaaacccttagcagcccagcatttcccgaaggccgacaccactcctgccagcccggctcggcccagcaccccctctcctggagggcgcccagcagcctgccagcagttactgtgaatgttccccaccgctgagaggctgcctccgcacctgaccgctgcccaggtggggtttcctgcatggacagttgtttggagaacaacaaggacaactttatgtagagaaaaggaggggacgggacagacgaaggcaaccatttttagaaggaaaaaggattaggcaaaaataatttattttgctcttgtttctaacaaggacttggagacttggtggtctgagctgtcccaagtcctccggttcttcctcgggattggcgggtccacttgccagggctctgggggcagatttgtggggacctcagcctgcaccctcttctcctctggcttccctctctgaaatagccgaactccaggctgggctgagccaaagccagagtggccacggcccagggagggtgagctggtgcctgctttgacgggccaggccctggagggcagagacaatcacgggcggtcctgcacagattcccaggccagggctgggtcacaggaaggaaacaacattttcttgaaaggggaaacgtctcccagatcgctcccttggctttgaggccgaagctgctgtgactgtgtccccttactgagcgcaagccacagcctgtcttgtcaggtggaccctgtaaatacatcctttttctgctaacccttcaaccccctcgcctcctactctgagacaaaagaaaaaatattaaaaaaatgcataggcttaactcgctgatgagttaattgttttatttttaaactctttttgggtccagttgattgtacgtagccacaggagccctgctatgaaaggaataaaacctacacacaaggttggagctttgcaattctttttggaaaagagctgggatcccacagccctagtatgaaagctgggggtggggaggggcctttgctgcccttggtttctgggggctggttggcatttgctggcctggcagggggtgaaggcaggagttgggggcaggtcaggaccaggacccagggagaggctgtgtccctgctggggtctcaggtccagctttactgtggctgtctggatccttcccaaggtacagctgtatataaacgtgtcccgagcttagattctgtatgcggtgacggcggggtgtggtggcctgtgaggggcccctggcccaggaggaggattgtgctgatgtagtgaccaagtgcaatatgggcgggcagtcgctgcagggagcaccacggccagaagtaacttattttgtactagtgtccgcataagaaaaagaatcggcagtattttctgtttttatgttttatttggcttgttttattttggattagtgaactaagttattgttaattatgtacaacatttatatattgtctgtaaaaaatgtatgctatcctcttattcctttaaagtgagtactgttaagaataataaaatactttttgtg

SEQ ID NO: 12111 - DNA, 1279 bp, Homo sapiens
cccagtcctgggtaaggcttcatttgaatgaagggttctgctgctaaaaaaaaaaaaaaagtcggaaaaaccacctgatcacaactttctaaggcagctattttgttttgcaatgagatatttgcagtggtttcactaaagcctgatcttcccactggactgtcggcctgtgaggatgaggacgtgtctatcacagtcagtatgccctgaatgaatgggtgtcaccctcctccccctagtgagagataaggacctcaggctcagagaggttatgtggttttctcaaagccacacagcaagatttggcaggtgagccttacttctcttcctgggctagcctgcggtcaggggcaaggcttttggatgataagagtgaggtgcagtcagctctagattgggggtggcagagggaaaaggagggggggttcccaaagcaccattctgctttctgtgagaagggatttcccctcaacaacttctgtcccatttttcagagctaaagtgacaagccacatccacgtccctggttaaaggtgctccccctgcaggaaacacatgtgcacttgggatggagccctctgtgcgggagcggcttgctcacctctcagccagtgccagctgggtgggtctctcccagctctcgaatcctaactgcagccaccatttattcagcacctgttatgcaccaggcactttatgtatcttattgctaaccctcaaaacaagcccttcccaacataagcgcttttgtgccaaacccataggtctgaaactgagacccagagaggctgaatgacatgctcacagtcacacagcaggcagtggcaggcagtagtgaagtcggctctatggattgtatacctgggctcctccaggcctctgcgctgcccggcctgataccctagcaggttgggtattcagaggtgcctggggagcttgttaaaagtgtagattccaggcctccttacccttagagactgtgactcagtatccggggcagggcccaggcatcttcattttgacaggccgtcccggtggctgccatgcgcaggcaggttttaggaacatcatgggtggatgattcctggtctccccagccctcttgacctggccacagagagctgcctttccagcgaggtcagccgagatgacgctgccgggagagcagtcttctctgtagtccccggaggggactcctcggaggaaggatgagtctgagggttccggttgtcttggcctgagaccacccaaggtcttttaacagaaaaaaactttaccc

SEQ ID NO: 12112 - DNA, 441 bp, Homo sapiens
cccctgcccgcatcctccagggggcccagggtgcctgcactttgctgtggcaggcagattgggtggtagtgggaggttgtgcatggaggccagtgaaagctgacatctgtaaaaggccttcaaggaagagaaaccaggccctgcgtcaggcagtgtgagtttgccgtttgtccttaactttctttttttttttttttaaaaaaagaaaactttaaaaaaactcccattaaaaacaaaacatctttgtgttttgaacaaaggaattttcaatatttgattggtattctgttctgaagtctaagatatttttcagcctataaagccccctgttttatgcccttctaattctgatgtttgggtattgtgtgagtgcatgtgtttttttttttttttttaaagcgtgtgtgaacaaatggaaataaagcagggactgtgaacatt

SEQ ID NO: 12113 - DNA, 3521 bp, Homo sapiens
ccaggggccgggccggcagactgggggttccccacctccttgctctccccagcctgccaagcccagccctccagagccagccctcctgggtaccggcaactacagcagccgggtgaagctctggagctctgcatcctgtggcctggctgcgggatggaggctctccttgaggaaggggaagcaggataccctggcgggccaccctgccagccagcagctggccctccaccatcttcacattccaagactggcctgaacccgccggtgtgggccacagtaggaggggccagcagtcctccctgtcccatgcctgctggctctgaccgtttcctctcatgggtttgctttacctgtggcagcaggttgctgctttccagggatgtgtccagtgccctgggttcttcccggtcatcctggggctctgcacagagcagcagagctagagccatgagacccacagacttggtgcctgagcgcagctccagggaagccccagccccttccaggcggggaacctgcttcctgccttcactgcccccgcagcactcacagacatctccctggggtctggctcactgccttatcaggacctctgagttttctgactttctgtgtagcttctcattttcatcagcacagcatggggtcacggcccacagctaggtggggtcacggcccacagctaggtggggactgtctgctggctcagggcccagtgttttgccactcaggttgcaaaattagctaatccttcagtgccagcactcagaagtctggcaggtgggggaatgagatgagaaagtggacatttaaggtccaagtagaagcttgcatccttgaggctcagggatgagagggcaccgcaaggcacccagccttaccccacaagcaggaatcctgccagccgagcgtgggtcccagtctatggaatcgagtctcccagacaaaaaaggagaggccctggcggtccttggcctggcccattttattccctggacccttaactgcctcaccctgagctgggcaccaaggttagaaggcaaaagtggggtagggggatgtgggaagcagcattgtcctctgggcatgtggctcagaggtatcacagtgacaaaagagccagggctagggctggaggggccaggtgatcttccttagccaatcccagtccgtctgtgtcagcccagctctgcctcgcagccccctcagcatgggtgcccccagaagtaagcagctcttggacccacgagcagggctgcgtcggtttgtggtctagctcccaggggcaggccaggcatggctcagtgcagtccctgggccagtgagaggcctcccccatgcctccctgccctctgcactaagcactttccaggcaggcctggccatagggcaagagcaggccttacagcagtgccacggtgacccaagaggcagggttggggcctggacagggtttcctctgctgagactgagacaagcagggcttgatgctggtggtggagccagcatctcacctgccaggcttccttttgggcagggaggctacctgtggaatggctgagcctggttctgcaggggaggaaggctgccaggagctgaggggctagcacctgcattgaggggagtctgggtgcatcagattggggggcgccagaggcgaggctgcctggctccctttctcagcagctttgcttgtggcaggggtgagagtggagctgagtggggtctgggctctgcccctgcgcctccactgcagtgcctgggctccccttgcagggcagacagtgcctggcactgaggggtgcccccagaccccgctgggactggatgtgccgtgggcagtgccttcctccagcctcacaacctttctgctggggctgaagtttctggggtcacatggtcagaaggggctgagctggtctttcactgcaggcccactctgaaagagaaatcccatgaagcctgtccttgcagagcccctctgtttttgggggaacagggagcattcacagggtcttgggaacaaaggcctgggcctccccgtttgaatttcagccccagttccagggcaagtcccagccacccaagcatacttaccagtactgcccaccaccacccactgcccacctctaagaagcccggctctcctactctgcttccaggctggggcctcacaggtggggctgttaccttcctcagggcttagggagggagggaggacatggacagggccttccaccctggctccttcacagggatggtagctgaccggtgatgggttcatttgtcaccttggactgtgagccacttccacttctcgccccccaggcaggagcaccctcactccaagggcttggcctggaaaggcaggctcacctgggactcaacgttccttcccccgccgccactgtgccccccgtccctccaccccagaagccctgacctcatttgggcaccttgctgtcctctgggcttctcctctgcccaggtcaccctgtggcaggcctgggccctcaggatgtttcaaaggctccacagctccaccgctccacctggcttcactccagcaccctgtccctggagcacctctgtcctgtctgggccaacctggtctccctgccccatgccctcccctggctcttagcaacctgcccttttattcatgccatttggggtcacagatgcctagctggacacagctcccagaactggctccaccctggggccttgcccctagtaccccctggcaggagcaacccaccccatggtcgaggttcccctacccctggatcctggactgaagccatttcctacagagaagcgttcccaccccctctcaggcacaaaagccggtgtccagggactcaagacctgtacctggggttgcaggggctcctgccctgctgtatcccaccaggagggggccccactgcccttccggcccttaaaactgggctgggagagaagacggggaagtgtgtgagacaaaacaaagccggcttgtttcctccccttggcaggctaagctctcccggcagcccgggctctggggcggaaggagaacagtgtcatctcttcctttgttgataaattgccaaagagtgggaacaggtggggtcaggggccagagtgcaggggagggggcaatggtggaggtggcggggggaagcagagggaggtgggctgaggcctcggtggggccagtgcgacgctggcttaaggagctggaggggttcctaatacacatttaattcagtttctcttccctaagaggctgccggagttggggcctcctccagcagagaccctcggacccctgcagggcctggacttggggtgaacagggcttcagtcagcgcaagtattccatttgcatttggtaatttttcatgccacctatttatgaatatataaatctttataccaaatctattttttaaaacatggaaaagttgcctttatggaaacttggcagagccagagtgtacacattcctaaaccattaaacagatttctataac

SEQ ID NO: 12114 - DNA, 689 bp, Homo sapiens
gacccagctggggctctccttggagttcttccatcccccagtggtacctcaggacccagggctgcagacacaggctggtgctgcaagggctcctgccccattctcagccttccttccctctccttgtctcatgttgaccggagggtaggggtctgtccctggtcttcctggtaggttttgtacacatattttgctactgtgtggatccatttatttttattgtggagtgtatacaacaggttgcgaactggctgcctgtgtcttattttgacttgcactgccattttgaggggagaagaatcaattagtggcaaacatttaaaaatgcaattttttgcagaccaaagtataattttaaaaaatgcaaattttctaaaagacacatctcttgaaaaatgagatgatgtggccaggcgcagtggctcacgcctgtaaccccagcactttgggaggccgaggcgggcgggtcacgaggtcaagagatggagaccatcctggccaacatggtgaaaccccatgtctactaaaaatacaaaaaaattagctgggcgtactggcatgcacctgtagtcccagctgcttgggaggctgaggcaggagaatcacttgaacccgagaggtggaggttgaagtgagccaagatcgtgccattgcactccagcctggcgacagagtgagactctgtccca

SEQ ID NO: 12115 - DNA, 864 bp, Homo sapiens
ttattttcctttgtcgcccctcctttttctgattgatggttgtattattttctctgaatcctcttcactggccaaaggttggcagatagaggcaactcccaggccagtgagctttacttgccgtgtaaaaggaggaaaggggtggaaaaaaaccgactttctgcatttaactacaaaaaaagtttatgtttagtttggtagaggtgttatgtataatgctttgttaaagaaccccctttccgtgccactggtgaatagggattgatgaatgggaagagttgagtcagaccagtaagcccgtcctgggttccttgaacatgttcccatgtaggaggtaaaaccaattctggaagtgtctatgaacttccataaataactttaattttagtataatgatggtcttggattgtctgacctcagtagctattaaataacatcaagtaacatctgtatcaggccctacatagaacatacagttgagtgggagtaaacaaaaagataaacatgcgtgttaatggctgttcgagagaaatcggaataaaagcctaaacaggaacaacttcatcacagtgttgatgttggacacatagatggtgatggcaaaggtttagaacacattattttcaaagactaaatctaaaacccagagtaaacatcaatgctcagagttagcataatttggagctattcaggaattgcagagaaatgcattttcacagaaatcaagatgttatttttgtatactatatcacttagacaactgtgtttcatttgctgtaatcagtttttaaaagtcagatggaaagagcaactgaagtcctagaaaatagaaatgtaattttaaactattccaataaagctgga

SEQ ID NO: 12116 - DNA, 489 bp, Homo sapiens
gcgtgtcggccggtcagagcggccggcgtgggcttttcggtgtttttgtttttctaccccaagtgacgtagattttgtacggctcacgccggccggggccgcgaggcctggtctgagcctcagggaggggccccgggtcctctcagtctttcccctcccccaacgatgtagcgtttttcgttgtttgctttaggtttttgaaacagccccggcgacgcctctattggctctcggccttggcaacggccgtcgtcatggttactggcccctaggcgccgatggccgaggccgcgcctgcccaccgggcggggtcgctggttggccgggcccaggcgcgcggggacgcggaggccgcgcatcctttcccagctccccaccctccttgcctttgggtgcgcgacaaacaatcgctccgggctcagggctgcgcggctcttcccttcattccatgggcctttttttgggcacaataaagcgtttaaacctttc

SEQ ID NO: 12117 - DNA, 271 bp, Homo sapiens
agctagccaggtgttgccggacccagccttcctgggccaggggccagtgcagccagcggcccagagcccagacacaagaggagtgtcaaagagtcaaactaaagaaatcctttcaaagagggatggaccgggggccagttccctctggactcaaagtgtccagtgtctcagagggtagatgtgtccaaggaatgacgtgcagtttttgactatttccctcccctgacctctgccctttctacataaagcaggttggagtttttctcatttc

SEQ ID NO: 12118 - DNA, 551 bp, Homo sapiens
actctgcagctttcaagctcatctgttatgcatagctttgcacttcaaaaaagcttaattaagtacaaccaaccacctttccagccatagagattttaattagcccaactagaagcctagtgtgtgtgctttcttaatgtgtgtgccaatggtggatctttgctactgaatgtgtttgaacatgttttgagatttttttaaaataaattattatttgacaacaatccaaaaaaaatacggcttttccaatgatgaaatataatcagaagatgaaaaatagttctaaactatcaataatacaaagcaaatttctatcagccttgctaaagctaggggcccactaaatatttttatcggctaggcgtggtggtgcatgcctgtaatctcggaaggctgaggcaggaggatcatttgagctcatgagggcccaggaggtcaaggcttcagtgagccatgatcatgccactgcactccagtctggatgacagagagagaccctgtctcaaaaaatatatatttaaaaaataaaaataaaagctgaccccaaagac

SEQ ID NO: 12119 - DNA, 1137 bp, Homo sapiens
gacacatggagagttggtcaggctgctgctgggagaaatggacgcccactgggcctcaacttgatcttctaccccgtgcctgtgactcagactgggaaatactgagcagagacggctggggcgggggcaggaggaggggctgctctctgagacaggggcgcccccgccttgacccctgggcacctccatcccctcccacctgtccccagatcagtctctgggatggaggccagagagctggtcaggctcccccatctgcccagcacggcctgcactgtgcccacccacttgctccacaacgtccagttggtcctgctgccaagagccccgtgcatccaggcggccaagcacaaactgggggagaggaggccgccagcccggaggctgcagcccagaaactctacctcatccacactggtgcagggagccctccttgaactgacctttgattggtttctgcttcaactaccaaaatgttatctccacttccccctcacccgtagaggatcctggccacagacagtttcaagtagtgtcagatttttgttgcttgggcggctgttggtagagtgggcagtgcccgcgccatggggtgctctgtgggcttctccaggagcagggagggtggaggggagggatggggggcacaggagctgggagccccgtctccaggaaaaggagaggggttaagatgcaccgaggctgtagctgggctacttgatcttgctgaaagtgtttctaaagatagcaccacttttttttttaaagcttttatatattaaaaaacgtatcatgcaccaactgtgaatagctgccgcttgcgcagaggacccggggaggggtcccgagaggctccccatgcaacactggaaatgactgttccagagagcgggcagacctggcagagcgcccctggcgcctgagactaccacccactccgttcctgccagaaacgaccctctgtggccgatgggccatgcgggcccctcgcagccaactcagccagtgttgggactggctcagagcccatgggggctggaggggggcagctgggactctggaatcttctttataataaaagccttacggacaaacctactgtgggctccagcctttgtcctgagatagccaagcggg

SEQ ID NO: 12120 - DNA, 3689 bp, Homo sapiens
tgctggcacagaaggcattgttccctaccctctggcgagtgcatgcagcagagagttagacagcaacttacctactctgaagttttctacaacaaaaaaagagttgagtgaatctgtttacatttagaataatgtttttttcttcaagagacgcaattgcaatagtattttttagattttatccaagaagttttttgggcgaaaatcttggatcatttttatgtagcatgattttccttgggatgcaaatcttaaaacagtcctttaatatgaaccaacaatctggagcacaccgaagggcaatctaaattgtggcttgaaggactgcactaaaacccactaaaaagatgcgaaaacctgatgagggcaaaccagttaaacctaacaccctgccttgtctgggctcatcacctctccctatcccagactaactttactgtgaaatcctaccacattccatgtctgaatttttggattcggggtggattttcgttgtccgtggaagaacacatggatctctctggctttctcacccaagttggccacttacgctaatcctggaagtatgatcacttttgaacctgccccttaaccttgacgaggatacaaaagtgaaagcatcatcccccaaaggatcactgcacagtcctactacagtatttttaagtagccctctaaatacttaattttaagcaaaatcccttggccgcacttttaaggtttttttatatgtgtatagttaccaacctaaaaataaaaaatccgaacagcatacttgaagaatgtaatactcaaactctcagtgcttccttatggtttctaataggattttttattattgttattattattattgggtttttttggacagggttgggagggtcttttatttttcctttgaaataaagaagtgatgtttttaaatgaagaaatgtgtggatatttaagtgtgctgctccctcttgtcttgaaacagtttgagtaagaaagtcttgctgtaaatgctgccctctgccgcctttgttttgagatgcagtttaaactccctctggctgctgctgctgctttttggtgtcccgacatacctacgcccccgttttatgggtttggcttagttgaagaggaaagggttgtgcaaggagagcaggaggctgtttccaaaaaccagtgtagtaggatagggattttttttttttttttttgccccaagaaaacgttcacccagtgatcttgggctggggttgtctttaggaaaagttgagactataagagtcataaataagtccttgtgtttccttaatttattttgttaacacccctaattacaaccaaagtgatgatgtggagtcttctgtcttcattttggccccagcattcttaatttcaaagctttattctgtctgcctaagagaatcaaccaaaggtgattctcctaaagagcagtgaaggaaatgtcaggttagcaggacccaagttttgggtgtgaaatgttgccagcttcctataatgtaaacggacttgttaacctaacctaattatgctcagtggacttctatagatggttttgaaaaatgaactgagctgccttcccccgtcgcataaccagttccatcatcctggtggaacttgaacatttagagtttatctagagagcttggttaatctttccatattatttgtagtattggtcacaaatgctgttccctcttagcctcattctgtgcaaccaagtgcatataagatgccctgaaaagagtaacaaagtatgctttgcctgtttccacttaccaggaaattccttcagaactagattagcattgccctgcctgtctgaaaggacagtttacctaatggtgccagcctccttttgctttggcaagctggatttctcagagccagcatgttgtttccataactactttgatattttaactcaggtactccagtcttcaccccaacctcagctgattgtagtacacctgctagctctgttgccccctcaaaactgcacccagagcagggccacaagggtgctttttttctttaaaaaaaaaaaaattagaaccaattcatgttcatgccaaaaacaaattgtccccaagcctatatgtattaaaatgttaactttgcctaaaaatattgcagtgactttttaggcaggagtgccaaaggacactatgaactttttgaactgacagtttctcctaactttctgctttagcgtaattgctcagagtagagagcccccacaaagttatttaaaagatgccctagcagcaatccaccagtttttctaagctagaacctttgagtcccccaaactgcctgaagacttaagttttgtgggcactggaagtcactttgatagatggattgaaactgttcctatttgccctgggacggtttctatctatcaaaggaaggttttcacctgtagaaagccccctgcctccagccaaatagtcccatgctgactttctatcttcctttctcaaactgtcttaggaaggaccttcagtgcagatcaggtgcagtaatggctttcttgtcccttaattattcaccagacccagaagttgtacgcatttaatgctgtttgtaaccatgcatctgttttcattctttgctgtaccttttgctgcccatcctgttacttttgagtttctttcattgtggttgttcttgggttcttttgtcttgtcagagctcttctataacctcgctctaatggcttaacagttgttctgggtggaaacgtcccctcatttgaatgctcctctaaaaaaaaaagaaaagaaaactgtattcattccctttaaaatgaaacattcctggtttatttgtccatgcctctagcctgggtgagtgaagctggctgtgttggcctgggtgattgttcaggttgtagaatgcgcattttacattgtttatgataattgaagggtacttctgtctgctccaatttccattccttggtatactcagtatgtcctagtaaggaaggctttccactctactggctccttaagaagcaaaagtaggttaaattttatacttcactgactagggtcttctctctcccctgttctgaatggagtaaaagtctgatgccaagacaaatattgggagcgagccttcctcactagccatgtccaaataatgagcgtattttcatgtggtcttcactgcatttggttttgtttctgatttcatgttcctttgaggtacagtcagatgaaaatgctgagttctgagagagttccaatgaggagctgcctttcagctttggaaaatatgcaactaaaacaaaaccaaacattattgtaatctgacacaggcaaaattatggttcccacaccccaaccccaaatgaaacctgggattttgaatgtggctctaagagttaacattgctgtctgtatgtcgtgtatgctaggtgatatcctcagtagggattgactactagactgtgtgttttatcaaagtgtgtaagaataaaaactcacttgcacgaattgaaacgtaaagaaatgacacttgtgaacgtgtgaacgttaacactgtagttgatagatcttaagctgctaattgttgagagagatttaaatttatgttctgtctggtcgctgcagattctcagcagcacttttactgtatatagaaattgaaataaagacctcagctattaa

SEQ ID NO: 12121 - DNA, 380 bp, Homo sapiens
aacctactgatttgtataaattttaatagttataaatataatactataactcgagaaaaggcatttctagagaacagattcatttgcttaattttcaaaattatgtctccatattactgtttcatgactgactgactaaatgacacccaaaatggttaagatgtacttgactagtttacttatgcatctctttgcaagaatcagccagccaacaatgtctgggatttttattgtatatgttatagaggtgagaaatgtaaaatatgaaaatgaatatgtttattttgtattgaaaaagatggttgaaaagatggttgtaagctattatagtataaacacatttttgctattaaaaatgctattcaaagcagttaaactgt

SEQ ID NO: 12122 - DNA, 180 bp, Homo sapiens
aactcagtttgcatcaaactagatgtatttaatataatccttacttaaaattcttccgttaccacccttgaaacaattagctttttctttaggactgacctgttaggggataaacatcacaataatctgaattccaagttattttgtattttgtttttaataaatacaacctgatttaag

SEQ ID NO: 12123 - DNA, 521 bp, Homo sapiens
catctttggacgtggcagaaccttacatattctgtgagcttcgatgagccagagtgatatcataaccaccagaaatcatactctcctttcttagtcacaacaaaatcacacatgtcatctttgtcaagggcataaatatatcattcatacccccattaaattttgttagaaaaattaccacattaaatatatgagttaagtagattggatttgctgaaattggtgttgggcatattagcaaaatattcttaatttgtggactcgattcttttttactacatatttcccaagttatcttaagatgtctgtaaatttaacttttattaaagttttgtcaatctttgtgaaatagtggttgtggaacagtagaaaaccatatggggactatagtgcaacctatttgggtaaagaaaccatttgctaaaatggagaaagtaaatagatttttatttaaattacagaaacatgttaaaggccggacaaaggaaagacaataaaatcataaattatcggtcctgttt

SEQ ID NO: 12124 - DNA, 459 bp, Homo sapiens
actccccacacagttttacagagttctgaaatactattcctgctaatatttcatatttaatacttctactactcctgtactttaaaaaaccaacaacatatacacatttaaaaatagcacgttttggtgatttttaactatctgacaattttttttgcatgtgtagccctgaggcctggatctgttaagcccttgtattgttaactttttacaaagaaacacagataacaataacttactatttacattacagcatgtcgccttgaaataaaatggtatctgtatccattttttatacaggtttgttgaaattttgctaaatttcttatctttacactctaaagcattttgaaacatttactgaatgttgatagacgaaatatacttggttttatctgctataggatgagagactttttaaaatggcagatgcatggactgtattttgcatgtttaaaa

SEQ ID NO: 12125 - DNA, 833 bp, Homo sapiens
ggagggtggcactgccacatcccactggcagaaactctcctttatacaaacttcattggctccaacatttgaatctcatatttttgtagcagtttgagcacagggttaattattcatttgtggtaaagattatagcatctattttgatcagtgggttttattatttcaagggtcacacagggttaagttcagtaagaaatgctgtagctgttgtcattcaatctagtgcctccttgaggccaggagttcaggaccagcctgggcaacatagcgagacccccattgctacaaaaaatttaaaaatgaaacaagtgtggtggcacatgcttgtagtcctagctacttgggaggctgaggcaggaggattgcttgagtctaggagtttgaggttacagtaagctgtgatcgtgacatggcctccagcctgggtgaccgagtgagactgtttctaaaaataaaaacaaaaaataaatttcttcttgaggtggggtggaggtggggagcaagaatttgacctggctctgatccctggtgtgttgtgtgggcctctttaacgtttgccactgagccttaacctcactgtacttcactgtacttcacacgcattggtgttaacattttaatcttagaagaccctgacccactgagggtttgttgtgagaattgctgaagccacgtagaagcaccttgaaatctgtaaaaccacaagaaagtactttataaaaggtatccttatttgaagtggataaatcttgtaactcgaaaagttgtgatttagaagacaggattgtttttgaacattaggaattaaaggctatatctggtccttacaa

SEQ ID NO: 12126 - DNA, 1300 bp, Homo sapiens
tagcagcagttagaattctttgcaaatgtaccttaagacaaaataattaaacatttggaacatttgaatttgaaactttaaaaaaatgttgtacgaaattttactacgtgtgatttaactgctatttgtatgaagttgtattggattacattaagttggaattgtgattatgtctgttttagttgtttaaaagaattttcctattatatggtatccaaggatgtagacacattagaattataagaagacatgaggagcaaatcatgaagagcggattggtctttgttcaacaagagctggcagagtagttaagacaaggagttcaaaaattccatgaatcttggccaggcatggtggctcatgcctgtaatcccaccactttgggagggtgatgcaggaggatcacttgaggccaggagttggagaccagcctggccaacatggtgaaaccctgtctctactaaaaatacaaaaaaaaattagctggacctggtggcgcatgcctgtaatcctagctactcaggaggctgaggcatgagaatcgcttgaactcagcaagtggaggttgctatgagctgagattgtgccagttcattccaccctgggcaacagggtgagactctgtctcaaaaaaaaaaaaaaaaaaaaaaagaattccatgattcttttgagctctcaagagctactttagccttgccattcctcttgcttttcagcagtagtctggcccaattctctacctcaaaggaaagtttcaaggattaaagggttaatgtttatgaacgattcaaattgtcttcagtgaaacacattagtcacaagaatccctgattgctgcactttaaaaaattctttaccttttccttgagcagattggtccagtccctctgctttctgttctgtctacattgtgtattatttattactatatagtatatgtatctgcataatgtctgaagtcattaatgcagtaacaggtcaagctctttagcattctttgacttttcccaaaatatagatatgacattctcctttatcttccttcttagatggcctaaatctgtctcttcatttacctcaaactcaaattagtatgccattttcatactgaaaattaaatatttttatggattttataaatattgcaacattttagatattgttttggaccatttgtgtatttatatataataaaatcatcaatttaatacttgtaagatcctaacatgtattgattgtaaaagtgaaatatgtaatagccacacttcactgttttaaaataaaagtgcaatttcaagtt

SEQ ID NO: 12127 - DNA, 607 bp, Homo sapiens
tcgcatctaccctttagttaccaaacattaaatgtttttaaaaattgaaagcctgaatgtgactgtgatagatttgggtagtaatttaaagatgagtacctgaagaattctgcttcagagtataatgatgacccttcttgagttttgaacacctgaaattgtaatcactgaaatattaactgtttcttaataaaaagttacctgaaataacaacaaaatacaactcctcagctagcttgctgttaaaccacattgaagtctgttaaaagatatttatttttcttgtaaatatctgaagctgtagcttagtggaaattttagcaaggtaatggattttgctttaaaatgtctgccttacaaattcataacaacaagatttgtcagtcagcatttattcatgttttccctgatttttatcttctcaccattttacctcttttaacaggagcctgagcacaaggtttaatgaggaagctggggctataaatatgtgtgtatatatgtatatgtatgtttgtacaaatctccatgatgtttgccaagtttgaatgcgcaaaacttggaaaatgtgacaataaagaataaaagtagtaactcaaattagtat

SEQ ID NO: 12128 - DNA, 4550 bp, Homo sapiens
tgcagagccgacctgtggcttcccatgacactccttgcttgttgtgttgcttcctattggctagcttcctaaggggggagggaaccgagttatcaagatgggaggatttttcttttctctctgtctttaggagtagggtgggatggggagggaggctgggcatcagggatcacatcactcttaacggctgttacttaaacaactattttttggtttggttgtaatatattgtactttattaagattgccaaaaactgttaaaatttaaaaaaaatttaaatcatgtgtatacaattttttgccagataaaaatgtagtcatttttatttgaaagatgtgctttttgtttttgtatatttgtaaacttatagagaaccttttccacacacctcctccttcctgttctctttgaaccattcatcacctctgccttcctcctatccccagcccaataaattaaaacaattaactgagcaaattaattaggcttcagtctggggccatctggccccactctctaggccctactccagttaaatcaaacattggttgaacacatcagcctctgaaaaggtagctctgactcttgtctttccatggccagagtgggtcgtcaacctcgtgtggagctgagaccaaggtctgtgggctctaggcagcccggcagcagcccccagaggaactgctcccacctctccttctctttccctgaaaagccttgaagggggttgagggtacaggcaaccttgtgttctctgtgccctcagggactggcagagcaagaggccatcagaaggacgaggtgctgttggcaattgcagctgcgtggtgcgtggtttatagactggggtgccatgtgtacttctgaaaatattttaaccagcccacccagcagtcagtacacatgcctgggccaagtctaagaaactcagtgtgtgatgttgggcagtgtgccatcctgaagccttcctcctggatgtcagggaagctggaccacctggagttgatcctctgtgatggggaggcgggggggggggggggtgttgtctgcagaaccaccaccttgaaagatccatgttcttagagcctcagctgctaatattgttgagtgctttctggaaaagctgatttgttgctatgttttcaccccagtggcatggcgcagttgaagtctttgtggacatatctttgtggctactgtggctgcgctgtggtcacctgaggatgtggttcaggtggggtctccagaaggctgcttgcccccagagagccatctcttccatttttgattcattcctgagaatggcttagtcctgagaatctgcaaagtctctgaagagaactctctcttcccactaagtgatataacctacttggccagcattccaaatagactcagactcactgccctgagcctgcacagagccaggtgcaatgggcagtgagtctggccaaaatgtaaaccccaccctccctgctgtcattggctctccctccaggctgctgctgggcatgtcatagatgggatgaatgaccatctggggtatggtgggctgaactccacaaggtcgttggaatgaattttgaaacttctcagaaattaatctgaaatggcaggcagtaagtgcagcagaatctggcaggactgatatttgtgcagtgggcctgccacacaccctctgcctaggaggctgtatgccagagctcatctctagcaaggaatttatcttcaggtgaagaagagaggaagcaggatcccactgagcacctcttgcagaaggcaaggaccaatgtttgaacgtgtttcagatgtcatgtgtttagtttttatatgtgtgtacataattatatatagagatagacttgtgtatacaccttccacaaacacatcctcacggagatacatgtgctcaatgtatattcttgtttctcctgctctcaagttggaacttgcattgtgataagttttggaaattcaaaagtactgcaacgtgttgaaataagaaatacttaatattgtcaaataacttgtgattgtcttgccatcaataaaataatgcatagttgtgttaaactacaggcaaacatagcccacgggaatatctccaccatttctctatgtactttatatgcacgggtgtgcatgcctgtgtgggccagtgtccccccaccatgggcacacccccaagtggtgcttgttggaagagtgcttacttacctcgagagaatttacaggagtccacatgacagtgtcctgcctggttggcagcgggggccatcacctgtggcctctgagaccgccccatttacaggaatctgcactgggtctcagtgaatgaacgtatggtagatttttattttcttggcactaaagattagcttttttaaaaaaacatcccataaaacagtagaaactcagttcccttctcaggggcacacacatccaaggcaccgtggactgtgtttccatcctggcctagaggagcagtaaaagatagcatttggtttgacatggccttagtgagtcctgcctttcctagcatgcacacaacatcctctctttgagtttgggttctccccagccccttggcctctgaggctgagggtggcttcctcccatcctcccatctcagtggttccatggcgctcccttcggcacgtgcggtttccgcccctcccttcctggggtgtggaaaggcagccagacctctttttcagaagttgttggttccctgatttttgtcttgagcaggcaccatccctgtccccttgcttgcaggtagaattggcacagagttaaggttccataataaactgttaggtgctcttgaagaagatgtcatggcattgcctcagcaccccagcaagagcattgcatctttgctgaatccagatgggttagcagagggcaaattggaggattcctttgaggaaatgttctcaattgagcaattcagtccctctccccaaagactagacgtgacctggcagattagcaggatcctcttggccttcttttttggggatggtgggagtgaagggggtgaatcttaaaagcttatcaacaaagctcctgttctgcaggcatcaggaaagttgagtgtaagatggaaaaagcaaacagcctatttacaagtggaaacacattggttctgatcactcctaacttgctgggtgatcatacatacatcaacatgaaggtgtgacatcagaatcatgagcaccatggctgcagttgtgtgatccaaggctagttggcttggtagctgttggcagcagtttcccttggtcagaggcctccttgctatctatcgctgctctcttcttgtcatccttaaacattcagtcatgttcccaggtctgaggggagcaatggccagaccagtttcagtatctctggcaacagaaacaaggattgaaatggtggtagttaagagtgcagacacatctggggtgcaacgtctgcatcatcctggtggctagccagtgcggggaggccctgccctgggataccagttgtgacaataaagggatggccctcctggcttcagcatcctgcaggtagagcagcctcattccttcacaagatggaaggcaggtgaggatgtcaggatgagatgggaccaggtagccgaggacagtgaggcatgtctgagccacttgaggggcagctgaacagaaggatgtctgtgtgcatcaaccgagcagattgtgcgcacactcgtttccgaactgcctctccccaaagaatgtgaggcattgtcaccttgttacagctatgtgaagcagagctgtcacaacttttcctgtctacaggcaggaaaaccaggatggagaagggcaacttgcttattaagatcacccagcaagttaggagtgatcagaaccagtgaagtttccatttttcatccattgctgccctgtgtgtgaacaaatgtgactccatatttattacacagcaaggactgctgtgtgtgggtgtgttcctcagaccatctctactctttttggttaggacactaggttcttcccagcatatgagtgagaatattggtggtattttgggctcctctactgcacaagggccagtccccaagtctactctgattgattgtcatgggcacccacacagatcaggacaccctttgaatttttgtttgacatgaactatttaggtgttccaaaaccttgggatctcaatgtgcaaactccttggactccagacccctgtctggttggcactcccagcagtgtgtggtttcatcaggaaatccttgcagcaggggtttagatggttccttcaggaggtgggaagcctccatagcattgaaggccagcctgcatctcgcggtgtgtgtccacttctcccctcactttcccctcacccatccctttaaagtgattggctgtgaggagcacagagggtggcaattccatctgttatgggctcagaagacatagccgccatgttgatttcacattaaactgtgtaaaatgtggaaaagactcagcatgttggtcaaacaataaactgtcctaattctcaaaac

SEQ ID NO: 12129 - DNA, 158 bp, Homo sapiens
aacggcttctactccggcccccagtgtgactaatctccttctcttcgctccacaggtctataaatgggccacagtaggcacccctttttaaatctgtaaaatccccaaatccattaaaagtgacttcagaggtcccagatagggaccaacatttgttt

SEQ ID NO: 12130 - DNA, 2015 bp, Homo sapiens
ccccaccctgggccactgccctgctccagagagtggaccttgactcttccacacctgcctatactcactaatgttaacacgtcatttcctttttgtatttttaaacaagaaagaaaaccccagtcctcatttgccttccctacctcttcctcccagagtcctccccacagttcctaagggccactgtgtacccgggctgtgtgggccagaactggggggctgagtcttccctggccccttggaagaggcccccagatgcccaggctcacttcagtgttgagtcctccattgaggatgcccactgaggcagccaggcccctcaccagccctggggggaatcctaaacagagagagaaaaagggtatctgcccttcttgccaggcagctccactctcccgctgactgcccacaccctgcagagtggcaggggtgaaaggaagaaggaagtggctgagttattaatagccagagccactgggagactggggagactggctgtaacccccttcacacctgggtttggcatcagcacagactacgggaggggctggctccctccccctcagaccctcacttcctgtacctagaggccattctggatgctgccatgttgggaagtacagtctctgcccattacctgcatgcaggcaccagagcagggactgagaaaccccaaggatgggtcatctaagtgctgtccatatgaaccctggactttctgtccttagatcctcacatgttatccctgtctttctggggtacgtttcaaactgaggaagctacaacacagtgaagacccaaggaaggcctatgaaaaggtcctgatgcccaacctcccaccccttcaatgtggggacgagaccccctcatctcagagtaatgggaagaacctcccacatctccctggcagcagatgaggtggcttcacatgcacttccctgtctggacttcagcccgtattccgaggagtagagaggcagaagagatgtcagcaaagcaagtgatgaagcagagtggatgtccactgtcaccaagctggatggcaagctgcggcccacaaaacagccagtcaggttggctttcctggtttcagacatgctcataccattcccattttctcagcctcttctcactgcctccagagaggtgggtgcctgggttgagagacacagctgctacgtgatagatgttgagagacagaagccaacgaaggaggtcattcatcaacaaatatatttattggagaccgactttgtgcaaagcaatgctaatcagggttctccatggagcttccctcagctcttacctcacctccctccatttacattagggccttctcccagggtgtgctcggtgggcagtgtgggactgggggtgtgggagttggtgagagcaggaggagaggtggggacagcaagaagccacagattggcatgaaggatcctgacctgactatccatgccatccatggcccccagactgactctgcacctggccctttgccagacagctctgtctccccatgtcctctggaacagctgggcatgggtcatggccattcatgacccttaagtgccacccttcttggaagaccccctccagaagcatactggaagccacctctggaaaagcctcatatggtgatatgccaaaatatttatgtcaatgtccaaacaaagtccaatgccatgagactgaagtctttgtggaaaccactgttacagacaagcttatttccaaagccacctcatttccaaacatctcactcaggaagggaggctcaatgtaacctcaggggccagttttagcatttgaaatggttctgcttggaaaatgatgccctgcaactaaccctggtctttcccatggcaatttaaccacatttggaaggcactgccttcagctgagtttatgaacaatgaatgccaaccttcaggttctagaagattggttgcactcccaaacctttattctattatattactattaaaatattctaattttgctattgaggt

SEQ ID NO: 12131 - DNA, 1019 bp, Homo sapiens
ctcctctccaatcccacaccatcaggaagaaggtgcctgtcggggctcacttgaagcctgtcagggatgctttgtatctaacacaacgccaacagaagcacatttgtcttccagaacaccgtgccttagaaatgctttagaatctgaactttttaagacagacttaataatgtggcatattttctagatatcacttttattaggttgaactgaaagggtttttgtaaattttttggccaaaattttttaaaacatacttactttggactaggggtacattcttacaaaataaataaacagtttttaaaattgtttagacacagatatttggaattagctatcttagtgccaactgctttttatttttttacttcatcaaggtgatgtaagtgactcacctttaaagtttttttagtgttattttttatcactactctgggaaatggtttgtcttcaagatgcaatacttttcttagtaaaggaaaaacagcataaaaagatacctggtctgccttgtacaagaaaaggcaatattagaggaagaaaatttaaagaaaagctagaggaaaaaaaaatttttttaaaaatacttattagaagcaaactgcccttgcatggaaaactgtttatttttttcagtgaaaaggaattctgctttcgtgtttttgggaaagcaggaactgagttcattacatctttaatttggcagaaattagcctttctgtgaaccagatgtggtttggggcagatctgtagtaaacaatggtgattttatttatttttactctctggaaaaggagataatacaattccagaaagtgaactcatatttctaaggttaagattcccttttattgcacctagaatagtgctatgcacagagcgggtgcttgagttgttgtcgttttttgtttgttttttaaatgtaaactggtaaattttgtgcttatcttcaaggctggcttaagtataaaattgttttttaaacacttgaaaaattaaaggatttgttttatatt

SEQ ID NO: 12132 - DNA, 2357 bp, Homo sapiens
aggaggtggtgcttcaggactctgagccattctctcccctcctctgccctgtgccactctcagccatttcagcagccccgtcaaccgctgctccgtccctttccccagccagacactcattcccattgaccatctggtcccaggagctcaggaggaggaccccaggggagaggagagctgtgagagcaccggcacccccagaagactctgcttcttagcccacattcctccgggccttatggagaatgaggattcagccttgacttcttgcccaaggcctgctactggggtagcaactgacagctcagaaaggagctgagctccctctgccctgccagttgtcagtcaggcagggagggagtggctgtgttggtttggggaactaatttccacggacggctgcccgtggacaccaggtggactggttcactaatcaagtcagccatattgttctctggctaagtttggttccagccaacgtcatctgctcttcagttcctcactgccttcttgggatactaagacttgaattttttggggactattaagggtgttagtcttggagaagacacagcctcaccttctcacttgctgtgggtgaggggccatttaagtggactgggagacagtgcgcagtttgtatataattccctttcttgtggaacagaagactgaggcctgcaggttccgatgtgtctccatgggctgtgctcccctcttcctactgtcagtttctgaaacttctgactggcctcccagttatgcctcctcctcaagttcctggcccgtggatgttaaagctgctcgattcccaggatctcggctgccttttcctctatcttgagccctataaatgcccacgggacccccaccaccagcctcttgaagtggctccacagctcctgtccctggaacatcctgtcagtttggtcataaaccctgagccagatgaaatgagccaccgtgaacagacatctgccatgcccccaggtgggcttcggtggccctacccggtaccagttctttctgagaaactggagatgtcttgttagcataagtgtcttcattcccacctggagggtttgggagaggagcaaagcagttgaaaactagttaatgagctacaagagtcaaatagtcctctgaatggagcccccatcacaaaacagtgcccaggaggctggctcctcaagctacccatgcccagcgccctaaagcagcaccagatgctttggaattggggtgaaacacccacatggcagcctgctagcagcagtgactttgacttctggtcttaaagagtccctcacttcagccccaggagctattggtgggttttagcagttttgtctttaccgtttttagttctccttgattctttgttttcttcctttatcgtttttaggtttggtatgtgttgttttatttccatggttcctcaagtttcctttttaaacatttgcatttgctggacaattgcaattttttttaaaaaattcccctacccctgtttaaagctgaaaaatacatttggttcatgtgcattgtttacaaagcaaaaagaaaaaagaggaaaaaaaggcaaaaaatattgtgaaagaaaaaaaacaacttaatatattttggattaatatttggtatttcttttaaagtattttttgtgctgtgaacattttctgccaaagaccatgatgtgtgtctgtatgtttaagttatcgtaaatatttaaaatgtaaacatggctgttttgttatgccaccctgtaccaggattgctgccgcattccactgggtataacagtattttaattaaaaaaaaataattaaaagtgatgtctttgcacaggtgagactttgcactgagggaagggaaagggtgaggattttggggggccacccaagtcatagtccaatctcttcaaggacccaagatagaatttaggaattttgtgaagctgcattaaggatagagttggaatgaggatgtggctggcatttttcccctttcatagataacatttcttgaaggctgggaggggaaggagggcctggcagatggcagcctcccgaggtagggctgtgttctaatcagctttgttcggccacacgctgtggttatccacagtgggagtgggtgtccaaagatggctttatccttcccccactccttttcccactcccacctagcacataaagttttgtccgaaaccatccagaaggccaggcaccatgcagaggacattcaagaatgtgcatgttcttagccaccgcctccctcctttgctgtgacatcaccactctttcctgatgctcaggaaagcatattgctccaattcaaaattaaagaaagccattctc

SEQ ID NO: 12133 - DNA, 882 bp, Homo sapiens
cgcttggctcctttcttgtggatggattttctcaaagtacacagataaagcatggtttgtttcagtctccaaattcaaacctttgagtaataaatcagcactcaaaaatgtacacccatttagtttgtggtagcaaagtgcaatgcgaaattgaatgagaaactgagatttctcagtaatggtgaatatttcgctctttaaacctaaaactcttcattgagtagcttatatttgaacatgattggttaaacatttgcctctacctctgattttgctttgctgtcaaagtttaacaccttccaactacttatgtgtgtcctgtaacacaggtgattgaacgtatgagagggaaaggcaaagaaaaaggaagccagacactaggagaattattaacttctcatacttccccacattgagaagcattcggagtgtatttagcctgtagatgttgtgatatgcaaatatcccattccctggttactggcattcctaagattcttcatggtattttcaaactttggataaatttacagattagaaagatatctgacagttaatctctgttctccttacaaattccttttgtgctgctggaaaggatctttggctaggtggatgactagttttattcaaagccttttctcaaagccctttcagttacaaccaccccactatggaatcagtatttagttatacatttgtataagaacctgtattttgaaaaacacattcatgtatatttattcctggaattatttgcctgttaaacagtgtctttcatgttctctccccagattgtaaactctgtaagaagctgcttgtatctgtatcccttgttgaaactctgaaaacactgaataactaaaatctcttctcatcctt

SEQ ID NO: 12134 - DNA, 3656 bp, Homo sapiens
gggctgtgccccggtcttaccctcccaaagggccaaggccagacctccccagggagggctcgaaggaagtgcagggagccctggacaccactgagtctgcatgaaatcccttctaggcctctgcctcagtgtcccacctctgccacaggagctgtgatctttgtgttctgaaggcttcactcaggtgtggctgtgactgagggggcagaggcagtggctctttagaaggaaaaggtgctatgtaaatctaaggtattgtaaactgtacacctgcatccagatgccccttctcgtattagtgctgctgctgttgttgttgctgtagggttgatgagggaaagcagggatattgcccaggttgacagcttttcacatgatgcttagagaattctcttccatgcccaaggggacatgatttgcaaggctgggttgtccttgaatcacagagcccctttcaagcaatatcaccgtgcctctcgacagctccgagcccccagggaatcttggactatcttctcctcccagacctgatcatcttctgcatcctgctgcctcttcattagctacttcttgttcttcaagagcccaagaaaaagggtgtggtgaggaagccagctgacccacaactggctggaagctgatcgtctccaacatccctaagtatagtcaggaatgtgacaaccagaaagttgtgaggagactgcaaagcaaagagcagcccatgcccgctgtggctgtgcaggtgggagggacactgtcggcagagctgcagccttggtctgagggtgtaagacctccagctctgctctgagaggagtacacagggcaggtagttcagtctaaggcctggagtgccctccaggccctcacagagcctgggcctcaggcccctgccccacctccacagagagcctccagaggctggccaggcccttggggagtcttgtggatagccctgaataaggacctgggcgcagatcaggtgagtagtgcagtgcggcaatgccgaggagactcacactttaacagggctctgcctgcccccagtgtctctaccagcaaagccagggctgggaagaattccagctgcacgagagcagcttttgtgcctgtctcggagaaaacatcctatcccgtctcctttcctcccttctctgagaagacagccccctccagtctcaccttgcatggggacagctcagggctccttgcttgctcaggcacagactgagaggcctcagctgcccagctggccctcagcagcgcctcaggctgccgttgccatggcaacggaggaaaggctgacttcagcgagggcagataagagggaaaggcgagagaggccccacatggccactgcagaaccatcctggcacacagacatgctccctgctgaactcccggcttctccagctccgtggcccctggctgtctcagtgccccccaacccctgagagccagcactgcctggcacctctccccacagcccctccacaggcctccaggctcaaccacagccagggccagctgggaccctcatagcttcctccgtggcactcaccctcacatccctgtatccaacaaatgctcacagaagtaccagatgcttgggctacagaggtgaaccaagggggcccggcccctgccatccagagtacagggtgaggaaactgccaggcagcagcagccttccctgcccaggcctgactgaagatccaggctccagacacttctgttcattatcccccgggatccctcccctaaaagtccccactgccacccagcacggtggcctagcccagaaccagctcacaagggtgcccatcatccaacaggccggcggcctcgagcaaaaggggtgtctcccctggggggctgaactgtcctgggcaggtcctgcgccctccgcagtctctgccaccgaggccacccagccagcctcgtgtcactcacacctgaaaaatgcacaaaggccccggaggcataacagctatgcaccaccacagggaaacaaagggagttttacaccctgaaaacagccgtcttgcacacttctgattttatgggcttaaagaaatgtgtttgtttcatcaaaacaataagtgccttcgatgacgcatgtcactcactggaccccgcgctggctgcctcgcttagtcctgctggagacccccataccttttcgatatgcaatataattaatcaatacatcctggagcattgcagagaatgccacccagcaaaataggagctgtccccagcaccagagagggaggccccgcccctcaaagcaccgcagggcatcagcaagcccctccctctcgtttaactaggcaccccctttgtaaagacagctgtaggcgcagtcagaaaatcacctgcatttctttccactgaagtaaaaatacatgaaatgaaatctaatcttcatgaatttttacacgcatgctgctcagggtagacattcggagttgcattttgaaggcttttctttaaatccccatctttgtttcccgggcgacgagtcccagtcgccggcggaatggcacgggcgcccccaggtgtccgaagtgcggagctgccggcgctgcacaccgcgaggctgatctatcaccgggctttttcgcagaacttgaaaatgctgtggaaatgtttatgttaaaatcactaggtgctttctcgtggcttctcagcgctaccttatgtgtacacggaggacatctttgtcacgcacaagctgtgagggcatcctgggggacaacctggtgtgttgaaaagacaagggatgtgatgggactgttttgcctggaaataacttcttgaaacagaagcacttgacataggactggatggaacagctgtgactacactcattactataccattgaaggattggaaccgatcaaactcagaaagtatctgcttgcaattctcaggatggcagcccccaggccacagggcagaagggaaccgagggtggaggagtggtgggcagaggcactacaaccacaacttcagtacacttctttccagcttgtttcagaagtgccatagctcagctggactccattttcaatctgattatgatcattgtgagttccccatatgttacattgtcctaccaggacagcctcctcactgcctgctaagattaaaagtaaataaatagactaactgaagcatgaaggatttcggctagacataaagaactatttcctgttgttaagcaggagggacaagttgccaagaaagtttgtgaaatcctcttctcaaaggacttgaaaaggagaaaagttttcccagtggtctgaggttttagatgccatgttcactagaaggagtgggttttctcctctccaaaccaattaattcctgagatatcctggtctgcctgcagcaaacagagggttaacagcatcactacatcatttgctattggcaaaattttcgaagatggtgtgcctctattgcccgcctcagtttatcttaggtctataatttcttttcatttggagtaagtagtcggcaattgaaagaggtgattacttctcataatgtgtgcattgagttgtgtgggccggtggctgttgagtatgctttctccatgttgttgctggtgttgtttttcaataaaatttatattcatttttatccaa

SEQ ID NO: 12135 - DNA, 2229 bp, Homo sapiens
atcagtgggtcttttaaacctactcctggtagggaaatagctacagttttacggcagctatggttctgttggtttaacttgccggagctcctgcatatagatcacttgtatcaagtgttttcattgctaagttatatgtgttagtgtcggggaaatagtttgcagataatggaggagtaaccctacaactatatgtccttagttcttacagaacctcatagtttgagaacaaagctgatgcaactgatttatacaaaatgaactttggcaagaaaaataacattaacctcattgtttatggccatgctttgtgcataatcaaagtttatgattaaatgtaaggaagtggtatctagtcagtccataaagattgtgctaatttttttgtggaaaagtagccattagttcaggaaactcagtgctgccttcagatgtcattgatgtttctcctgttggaaagctgatgtgtccagctcaacctttgtgctgacatcataccatttctgatcatgaaatattggctactggtgtatgtagcagttcttaaatcagcagtattatgaaaaaaaattccccctcattagaatgtttaagaaatctttttaaaaagtaaaattctgtcagactacaaatgtttagctgttactcatttctagggaagaaattctaaatccctccttcactttgagcagtgttctaattggataaatgaaggagagtagttttattctgaaggtaattaaatttagactatgtagtatgtgacagaatttttttaaaattataaaaagattttatttagtaattgggatttacttaaaataattttggaataatgctcccagacttgcccagatttgtgtattgtacttattgccactggccgccactttgacttattttctctaatagtttatttgccacagtctttattttgaatatgctcctagtttttttttagggtgctgttcattatgaaggcttctttatagaggcctaataagaatgcctttttataaagcctgtgcatttaggtaggttgaagctaggaggattttctttagaatgctcttttgcatgtaaagcacaaagtatgtttcagtttaaatgcacttcttccggttaatttttatggggaagacaagtgagtcacaaacattctgttgaagggaaatctagtcagttgcttgaaagagcacagcccaaataaaacaaggactgactaggtgtaatgaaataacctgtgatttaaaagaagagctgcagctttgacagtgcttatttaaagaaaaatactgctggaaaatttccaatttctactacgttcaccatctctagtaagatctgacatatgctgaagttatgttttgatttggcacacagcatgttcaatgatggttactcgcctagtacaagacatggagaagaaacctttggacacagagcagatgacacctccttctgttttgtagtgtatcctggtgtcattttctgtgaatgtggtcaggtagagttgtttttgttgttgttgttgggcttttttttctttttttttttttggtctcttttggtggggtgggggtgggctaaagccataggaagaaaaatgtgatgtatgtgtccagtatgtactattttgtttttgttttgcaagaagagttgaactatttttgataacaagagtaaatggtggaaaatgcttcttagttgtcttgtctttatttgctttccaagatttggaattttatttaattcctttaagtgttagcagtgtcttatgaaacgtgtatttacctaacgtttgtaacagttttgtgttgaacccagatgccctgctatataaagttgtaaatctgttctttattcactaatgatcactgcaaaaatgattagaaatgagattgtacacatggatgaggatatattttgcaaatcgaccaaactttcctaatattatgatcttaaaattcatagagtactttattgcttcccaagtttgataatcttgtgggtttttttttttttttgatgcatgggaggttggcaatatagacaaagtggaaatcattagtatgtgagggccttgattgttatgtaatattgccaatgatgaattcaggttgtttttagcacaagtttctcttttttatgctggtattctcactgccacatttttggaaacctgtattacaccttaaatctatcaataaatgatagttttctaattct

SEQ ID NO: 12136 - DNA, 1097 bp, Homo sapiens
agtctgaagaaaatttacaaatctggaactctattatttagagctagaggcctatatactgtgatagcttgtatggggaaaaacacttttgatgtgatctgatttgttttttaatcaaatgattaaggtcaatccctttttgcagtgacagaagaggagcatgtaaattacccaagggaatgttggtgaatgtcaactcagaaagactgacctgaaaatcatttgtgtcctactattggacttatcccaatacagatgtgtgtgtttttctggagggaggaagaaattttaaatttttaaaacagctgtcaagataaacactgttatacacctgttttatgaaaactcaacattgagtaaaaaaaaacatatttttaactttattttcctgttgtacaatttaaaaaccgttttaacattttgcctttttatgttttaaaagctaaccatttttattaaacctatgagtaagcagctcatcctaattgcgaagagtgttttggagttcactggatttggttgacctttgtggaacacaaataatgaaggagcagaacattgacaagctaagatgaaattctgacatagtacatctctgccaaaaaccacacaccctctgtggatatggatatgaattcccagattttatatactcttgaataaaaggtttatttttatttataagtgggcataaaataagaaatgtccatgcagccatttttccaacagatgctgtacaccgttcattttatatagactagggagattcaaatacagtgcattttctattggtatttgttctgtgcatttttagcaacttctaccagcaaataaagtattctcagtaaaacgaaaatgattctcaagttatcagtttgctgtttttaccacttatttcatgccctgccaaattcaagttacacagacttccattttcttaagataatcaatcatgaagaaatcctttatcaatcattcaaaagtaattttaagtgtaacataactgtgtttacttcccatgcacttaatacccttatgcgctaattttgtgaattaagtttactgattatagaagtatgtgctgcatagaagtctgt

SEQ ID NO: 12137 - DNA, 824 bp, Homo sapiens
ttcaccccagaagctagctggctagagggttagcctggctggggccagctcaggtccacttcaacagaagaggctgctgggcctcttgtcttcacaaacaaccaagagatcatcctcttggagagaagcagtgcagggaatggatatgatctcatccctcctgacctgtgaggggccctgctgtagatggccacaggtgcctgactaggagcccctaggtccccaggcttgagaaagggttaaaatagaacctccaggtagttttcttcctctacctccacatccccccaagactgaaaagagtcactaactctcttttcccaagccttttataaaactgcaggaacactgtggagatggttcctatctggggtccttttggggacatatgcctcagtcagtcattcagtgattgatccaaaattatttactgagtgcctacctactctgcgccaggctctctagcctctcactactgagttagggtgcaggcagaggctggggcagaatgtttacagccagtgccagcacaaggtagtaatctagtgacagagaacagggtgttatggggagcatatgagaggccatctatcccagcctgggtgatcctggagagtttcccagggttgtgatatgtggcaggcctactcatgggtgggaagggaggatggccacttggctggaccttgtatccccaaaggaccacacgtgtaatttttgatattatttccaaaatcaggttttatacatagccattgtatatttttagtgtgaaaaacattaatatattatatgcaaacatttaaatatagtacaatgttttt

SEQ ID NO: 12138 - DNA, 39 bp, Homo sapiens
agctaacactcgtttgctgctgctgcagtgtggaaatgg

SEQ ID NO: 12139 - DNA, 878 bp, Homo sapiens
gatgatttacttgttttgtttttgtgtttgttttgtttttttgagatggagtttcactcttgtcacctagactggagtgcaatggcgtgatctcggctcaccgcaacctccgcctcccaggttcaagcaattctcctgcctcagcctcccaagtaggtgggactacaggtgcccgccaccacacccggctaatttttgcatttttagtaatgacagggtttcaccgtgttggccaggctggtctccaactcctgacctcaggcgatccacctgtcttggccttctaaagtgctgggattacaggcgtgagccactgtgcctggccgacaatttacttgtcttagtattatatgtagatatgtgattttttgagactgtatttttagagctgaatttttgactaaagacttaactttataataatgaagatacattagagaattttagttagatattgactttatctttaggcttttgtatgtttcagatgcaaacatattaaagtttcatatatttacttgactgggtatctttttttttgaagacatacattattcacttccatttttacaataaacacttacttaacatctactctgtgccaagcactctgctataatatgggaccataaagatgagtaagacaaggatttttgcctccaaggacttgttatcactgtaaacattttgatgtatacaatatggctatattatattttgttttataaaatcaagtcattgtatatattatgatgtatgctttcttttcatttattataaatatttttcctgatcagcttttaatatctgtcaaataaaaattgaaattgaagatggtatataagatttcaggaaataaactactctgaatactaaac

SEQ ID NO: 12140 - DNA, 1103 bp, Homo sapiens
aatgagaggattcagaagtctgaccttagaacatgagagagtggaaaacctcaggatgtttcagccaaacaagaagagaagaaaatattgttgaaattaacaatgatcagggaaaatatcatctattaagaacagggaaccacattttagctgtagattaggaatggtaatttttatctggtgttttagtttccaaaacatttacatattgatctactcctcgccctagaccaaacctaattccattcttactgatatgcacaatcactctctgtcctcattgtcacctctagcccctaaattcctccctttctcagtctacctactctttgtgactccctcatatcttttccccctggcatggatgtcctgctcagacactccacttagaagacagtttccctttttcactgtcctcccaccattcattactcctcctccagataccaactgctgatgttgctctagaaaaaccaccaaacatgactgttctttccgtgtaagctatcccacctcagcggcaccctcactgctggtgaccagccttgtaaccccctggagatgcccatgttccttatggtagctacctcttacttcaaattcttctgcctccctcatgctcgcagccactctgtgcccacctcatcttcgtagggaccttgattttggggacacacattgcaacttcccacttctgacgaaaggtctccatgcttttgctgttttctttactcttgtcaaggttgggtacttcaagctcaaagcctatctaccttgatccaaaaactacctttccataatgttctcacatctttactctgtcctacctctcattttcaatcctgtttaaaagacgtttaagtgtccaaactttaacctcttgaagctagtcctctccccactttccatctttaaatgggcatatatacaataaaggctctgtccatctccatctcttatatataacaatactgtgacttaaaaaccaactcagtattggaaattttctaaagttctgtcctagagttctttcctgacctctagctccatacttctgattgcctaataaatatgacatggatgttcagtggaacttcccatct

SEQ ID NO: 12141 - DNA, 668 bp, Homo sapiens
aaacaaatcaaatcatttttactgtgtaaattgtattcttaacattttgtattttgtaggattgatcttattttgagacaagggttgtaaaatgtatttgctctcagaattcatccccttcttagtattaggtcattcttcatctgtataatttttattaactttgagattcttatacagaaaatagttgcaagggtaaggtaattaactttagatcccttcatttctaaagcaattattgagtgcttaaaatttaaggttgttttagagtggagtttgtgagtaaaagaggagcccagggagacagattgcaagtagtaggttgcaatcttttagattcagcttgtaataatctttgagccacaccaaaaggaatgccaagggctctctaaatttagccagtaggaagctactgctctcctggcaaggattaattggcacattctgttaagatatccctcatgacagttgccctttcaaagcaggaggaagaaaaggaagaaagaaaaactgtttcatcatttctgttagggtaggaaatgaatcatagggtaaaatggatgagtagatagaagtctctcatttaaaaagtgtcttttgcaatcttgatgtaatgcactttttataaggacttgagatctcaaataaaatttctgtaaagaatttcc

SEQ ID NO: 12142 - DNA, 1366 bp, Homo sapiens
gagcccaccgcatgccggtgcagacggatgcgaggatgcagggacgcgcgacgccggccccggtcgcagccgacgacgccgccgccagcctgacctcacaccctctgggcccgcctctggagccagcgcccagggtccctctgtgctttttcgctttcctaagctcctgtcgctcctctttgtcccctcagtttatgtcctcctgtgctcacctccctgacctctgtgaccttgcactcccctggcctgaagctgcctctctgcgcgctttctactgggctcgtctctttccggagccccagcgtctcctgcccaaattcaccgcggaaagggcccggggcggaggtgcgaccgggcgtcggcagcgcagacctcttggccttctctcacaggtcggtgcgctcgctctccgcgttccccgcccgactgccgtgcagtccatggctagacgcgccggacaggactgatggcgggaccgcgctgcccgagaaagggacggaccaatacgtgtgtttgctccgcgaaccctcttgaagctgttcagaagccgcttgccgcggggcccactaggcggggcgggggttgggacccagcgggagccggggcagcctggctccacggcctgtactcggtttacaccgcgggcgggcgcggagggaggctgcgtttcctccgctatcagtcccgtcgcttcgggcacctccgggccccggcggctggctaatgttttgtttgaaagatcggtggaactttttaagagagtatttaaaaaaaaaaaaaggaaaaaaaattcaccgggcaaccggggaagtattgtggccttggagtttgctaaatccaaatatgaaaatcaaaagctttagtattcctcatcttctcttctggaagatttgcgttagagtttttgttgggccttcaaaaagctgtgttcagagttaggagaatatatccaataaaagatggtttcgtctaccaattggggaagtttcaccctctccctatctgaagaaaaaaatcaaaaacaaatgtccccggatctttcgatgcaagtcctggaggcagggagatcactgcctgcctggcccacgctgctgggacggctcgtcctccctgctttttgtttttcaaacctcctgcttctcccaccttgggaaggagaaatgtgaaacccggcagcggccgacctaggcggtcttgtggcccggagccggcccggcccgaaaaccatagacctggttgtactgtagcttgttgtttgggggaccaaattttctagagagaactagagcacttttgttgtgtttttttgttttgtttttgttttttgccttgtcgattcccgaataaattttgtgttccttctttt

SEQ ID NO: 12143 - DNA, 833 bp, Homo sapiens
acccccacccccacgtacacacaacaatcctggccgctctgctggaggccctctaggattgcgggaatctctcacattgagtatccaacaacctggaaattgggcaccgcgtgttcggacaattgctttttcgctgcacactaccgatagtaggagatgaagacgtcagcaagaaaaggtatattctagacctcatctttaaatagaaaatctgcgcaaggataccagaaaatgtgtccagatttctgggcttctttacaaggtcatattcagatcccttcattctccctcgttttgcatcagttgtttctctcaaattccagtctttctccagcatcatactgccactcccgtttctccccaaaccaagaaatcaccagatctcttacgttgttagttaccttgcatttttttcccatgaattttggaagacttagccatggcttttcttggggtttttccaactgctctccaaggaaactgccaaatagtatgcttactatacaagactgtatgttgcttcttcctaggaaccccttatcctgctgaagttttcttctagtcttctaattctaaatgaaaatttgtgttgaattttatcagatgttttcagcatgcattgtgttatgtatttttttttaatttgttaatctggtgatttcacccaatggaaagtgtttgcattcctgctattccacattattttataccttttaaaatctaccctgagttttttctcatgtaaaccaaacttctaacttttaaaatgttagtttattactgtagttgcctcatatttttatataggagataaaagattactggtaaagctg

SEQ ID NO: 12144 - DNA, 270 bp, Homo sapiens
ctgtaatgctttccatttacctgactaaacagatcattattatatataggtattgattgctaccctgaccacagtgctttggactatgagaaacttcttagatttttatatgtaaatgctgtggaccactgggagcacaatgcccacatcatcttaagaagagtttatgtgcagcatttaaatcactgtgttttccttgttaactaaaacagacatgggctttgatttttttcatactattagaccatatctcataaaaccttttgaatt

SEQ ID NO: 12145 - DNA, 231 bp, Homo sapiens
tggcgacgtgggaggcctgccaagcacaagctccccactgcccacactgagtggtctactggctttgagaaacagctgtggggaccttcccactcttgacagagccccattaaggcatctgggtgggttttaaacagaatgcctatgtagcagtgatagacatattcccctcctttgaaacctagcattaaatggaaaaacaaaaattactcccatattttgaaacccttt

SEQ ID NO: 12146 - DNA, 189 bp, Homo sapiens
ggcccaggcagacaaccttgtcccaaggaatcagcaggatgtgtgggccaggatccccctctttgcacagcatgaggcaaaaatgtccagccacccccaggcatctgttagcagagtctgtctcttggctttgtcacttttccttttcttaaaacaaagccatgccaataaagtgatctgtgttcaaaa

SEQ ID NO: 12147 - DNA, 815 bp, Homo sapiens
ggaggggggactcagcacccacacctcctccaacaagctcctgctggggagagggctgttaaggtttctgttttactttggtttttgcttctccatttttcatttgctttatttctacagtgattctacttctgaggagtcttctgtcccaggaagagataccttctttacaggagaggaaaggtctaaatcacaaggatagacatttatcaaagaagttaaaatggtgtggcaggtcattaggattaggcagaatctctcagagctgctggacaaggaggtctacttattttgtgtggatggtaattatggcatgcacgctgaatgcagttctgagcatggcagcggcccctgagggtcagatcagaattgcccacaatgtgttttttaactaggaccaggtgcagcatgctagtcttgattggaaagatttgacaggatgctaattactgaacagtgggttttgtcaacgccctggtttcagaatatgaactgaggagtcaaacagttggaaacagcacattgctgatttacactggatcttgccttagaaaccattgtctgcctgcctaaccagcttttcataaaatttaaacaaaactctttctacgtagtgatcctcaagcaatatttttgatacagcaagtgtcaaacttgctatagcataaaagccggggctcctgatttccaggtttctaaaaaggaactgaggtaaaacagatgcctgaccgttttaaaggatcttttttaatgttttatgactgcctgtctgtttgaatactggcaaagggataaataataaattgacatcaaaa

SEQ ID NO: 12148 - DNA, 27 bp, Homo sapiens
agacaagagaaagcctacgtttcaata

SEQ ID NO: 12149 - DNA, 4902 bp, Homo sapiens
atttggctcttagaattaagttaatttcttctctttccatctacctttttataaatacatatctatgtctcataaaaattagaatgtactattttaaaataatatgtgtaaattgaaatttttttcatttttaagttatcaggcacttttcatgctgtttaaaagactgtgtatcaaattgtgcactttaagtatgtgcagtttgttgtatgtcaattatacctcaataaatctgtaataaaaaactaaattaaaccttgcattaaaataatatcacagtatcagtggactaaacattaaaatgtaccactctaatcattggcctcatgattgaagcatcctgaactatgaattagacatcagttagcaataataagcattttttacactatcattgaggaataattacatggagcatgaaatttgggcctccagtataacttactgaatgtggattttatttctctttttaatgatgtaagaaaattgtcaggagaatggctcttatttatgtgtgttttaacttatgctttgttgcctctgagggtctttagacctgctgtgaaaggatcacatttgttgtggtgctgccagttttgctttattctaaattttgtaccaaagcaactttagaataatcagaatatttcatctaactgcttagaactataaatagcattctaaatttgagtaaatacaattttttaggttactcaagaaccagcattagtaatttctagtaaaattgtttcaaaatctacagggtacaatgattacaaattaatcttctaacaaaataaaatatgaaatattagtcatgttaattaataaactgtattattttgtatagctttttatttgcttacctgacattttatgagagcttcatagttggtcggtatgtagtgcttcttgggactgaagaaattctaattgttgtttaagttccaaggtgtgctacaatataggaggcacagtcatcagtttgtgacatacattatttactgcctatttcattctgattctatatttttagctttatgctgaactgttcaatgatgctgggattctctctttgcatgtcatatgtgaatgtgtggttcaagctgtaactgttgaaattattttagaatttatgacgatttctcagcagggcctatgtttatatatatatatatatttattctttagtttttgtgatatgcttatatttttaaggaagtaagttatagcatacttttttaaaagtaggaaccacaatctttatatggagcagcttgttatatctgattttcatgtaactcattggaaactctgccatgactcttaaagtagtcttacttgttttttaaaatgctggtattaaactaaatggactcctttcactaactgctgatttcagagtttaaatgttagcaggatatttgtgtattagcagtgccttcagtataagagagaaatattcattatctgtcatttatcatagtcgtataagtttccatgattttattttctgttattttcataagttcagatgtttatcagttcccaacattgtttctttatctgtagtgggatcttgagtaatgaggctcaagtaaatcctcaatgtgtataattattgcctcataaactctctctttgtttttaaaggaaacatctattatggtaatacaaagaaaagttaaattgtgacagtaatgttatattaacctcttcctactttaaagtgtgaaatgtttcacctcagctgtacaaactccagcattgagaatttgcctcactcattactcctgtgtgacagttatataaatagcatgcagctcacatctgttttagagcatagaagaagcggcacctgccatcttctgaaaactccaaagggaaatttcagtagacatagtgcactaaacccataaggatacttgaccaatatttgagcacagcaagctgacagttctatacagataggcagtgaaagagttttattttccagccaggcgcagtggctcaaatcccagcacttcgggaggctaaggcaggcggatcacttgaggtccggagttccagacaagcctggccaacatgatgaagccctgtctctactaaaaatacaaaaattagccgggcgtgatggcacatgcctttagtcccagctactcgggaggctgaggcatgagaatcatttgaacccgcgaggcagagtctgcagtgagccgagattgcaccactgcactccagcctggagagcagagcaagactctgtctcaaaaaaaagaaaaaagttttattatccttactttttttttaacattattattctaaaggtcaaaactgagaagagattaagataggagagagctccataatggctggatagtggtcaggcattctctattcttttccccctgtagacccattctaaatgtgggcctgaggtcaatgggagatgtgccctccctatggaggatgtaagaagcagaggccatttctgccccatgttgaggaaacaatctgttgatagacctggaatttagagtatatctgaaaagcagttggacttcaagaaatttaaaattctctctttgagatggggtggactaagaccacccccaaagtttaaaaatatgctcattcaacttgaatcttctgaggactttttgtgaaaatggtggactgtttagggcataggacagattccccaaattgctttatgcttccacataactagagcacttcaatctatttaagcctttgtctcctaactgaaacattatttctaaatatttctattcaataagttttttcttttttgagcaacttaagtgaattttgaagattgctccttccagtctcgttccttttcacattttcctgcattacctaataattacctcagcgttagaatttgaatgtattaattgatttaaacatcatgtagactaaagtcttaaacatctaagactcagttgtagttgcagaaaaaaattaaagtcacctctactgaaccttggtttcaatttaagatttttcttgcttttcaaaggggtaactaataaagattgaagggtttttttcccgattggtggaggaatgaagaactattgatgcaagtttttttattgtttctttctatgatcaggtacctgctttcattttagactgctacttccaaactaagctagattcttggttttaatgagaggaggcagagagagggaggcagatggaagaagaaaaacagttaaataagacatacccagtcactgcatttttggactataccgtatctttctagcacaaggaaatagataaactgtaaggtcttttttactcactttttatttatgtgttctatttgtgttagtcataactgtttatagtggttgtctaatttttacttttattatatgagatagagctgtgcagatcttcactcaagttagttctgtcacgcttcttcccattatttagagcacagttttttaaagcaactgtacaatttctcagccttatgagcttgctgtatttcttggtatcatgttgcttccaaattttgtttttactgtagaagacaattaatttattgtagagaagtggctgtgaaagtcgttctctgtctttaaaaatcaattgcagaagttcatttgtcatttttctagagataaattatagtactcaaactggcagtgctcagtatatacattttgtaagctttgtcagtgaaaccatcagttttgcaggagcttcctttcctagtcaagataaagcttaaaattccagaaattaatgtcgttcggactgactttattcatatttccatcaaacttctccaatacagtaagagatagtgttgaaccagcatcaagtctccagaaacatggcagagcagacaggccgttaagtttcacagacatcatagatccttttcttaaagaagaaaaacatgtataaaatagttttagtagtccaaaatgtcaactatctgtagctgcttttgtgtgtgtgtcagtgaacaaataataatgccttgctcaatcaatgcattcagccatctcaagtgcaatttgtgaaggagactatggtttccaaaagatacatttttttacaaagttaaacctgtaaaaagtctttttttttttccctccagccgtacaccaactgcacttggttgtttcagcagttggtatactattaaattgtccaggccaaataggtttctgtagctgttttagtaatttgaagccaaattctcatgctgtttctcattaaaaagaatgagaatttggtccatagttagctttaagttctctcttcctttctttcccttacagttaagggtttggtgggggatggggaggttgttttcgttttttggatttttttgtcttttggctttaagtatcatattttcttttgcctgtatccaactgcttctttgagtattttcatctagtttaatgtgagtaatagatgctgtgctgtcattgaagtgttcaacattttgttcatttaaacaaaagtgtaattcatacatatatagatacatatcttaattgatttctcaactattttataagtaactggaatttttcattagatcttatacagagaagtattttattaaaaattcaaaagggaagacttttatgtgctcattttgtaatttttgattttaaatatctttacattgtctgccaattaaagtgttttaaacttgcattggaatggactccgaatgtatttttgtggtgttacgttatccgtagatttctagcatgaagttagcctcacgatgctgtgcaaaggattttaaaatatgagagtcactgaaagagtttaaacatctgttcatgttaaatgctctatggattttaattaaagacttgagaatgattttat

SEQ ID NO: 12150 - DNA, 191 bp, Homo sapiens
aatgaaattatgtaaaagaatatgttaataatctaaaagtaatgcatttggtatgaatctgtggttgtatctgttcaattctaaagtacaacataaatttacgttctcagcaactgttatttctctctgatcattaattatatgtaaaataatatacattcagttattaagaaataaactgctttcttaat

SEQ ID NO: 12151 - DNA, 465 bp, Homo sapiens
cagtgaactgtgtccatttaagctgtattctgccattgcctttgaaagatctatgttctctcagtagaaaaaaaaatacttataaaattacatattctgaaagaggattccgaaagatgggactggttgactcttcacatgatggaggtatgaggcctccgagatagctgagggaagttctttgcctgctgtcagaggagcagctatctgattggaaacctgccgacttagtgcggtgataggaagctaaaagtgtcaagcgttgacagcttggaagcgtttatttatacatctctgtaaaaggatattttagaattgagttgtgtgaagatgtcaaaaaaagattttagaagtgcaatatttatagtgttatttgtttcaccttcaagcctttgccctgaggtgttacaatcttgtcttgcgttttctaaatcaatgcttaataaaatatttttaaaggattac

SEQ ID NO: 12152 - DNA, 969 bp, Homo sapiens
gcctccgccttggaggagactactggttcgcccatctgtttggagtttctgttgttgctattgttggtttgttttcaaatttcattgtgttttcttctttgctcaaggaaggtgctgcaaaaccatagggaaaaagttcactgctacaaagggatcccaacccactggaggctttgaagtagggaggttggcaggggtggtcaagcgggagggagatagtcacttgttcttgcccctggaaaaaattcaggtgatgtctttgacatccagggatttctcaaaggcagtgagtaaaatcccaaataaagccccaaagagtttgcttttccaatcatctgtgccattggtaataaggagtagcccctgtgaggtcaggtacacagtaaagagggtaaatagaatccttgggaacttctgtttcagtctgaggaatgcttggatttgtcaaaagaatggagctttgtaggaaacaggcacaaagacgcaaacccagggcttaacctgctagaaaatgcatggaatgtgaacacaagttaattatttcaaaatgtttttcagatgttatttaaatagtaatatatacattgatttttcataatttatcaaagcctgtggtacgcactgaattttctttgtcacatagttttgaatttcacagccttctgcattgcatacacttgaactggacatcaggggaagctgcttgagagttctcaattactttcttaaacagtgttttctgaaggcgtgtgtcatgatacaactgtgaattctaccttagggactctggttaaactattggtgaggagctcgagtggtttgtatagaccccagatttttgtttactttaatgtattccacaaaacccatcctggtttttgttagtttgttttgtttttaatctttttttttccttctctacttatttaaattgccactggaataaatgtgccttttgaagcaaagtcc

SEQ ID NO: 12153 - DNA, 1479 bp, Homo sapiens
ttggcatgaagagtacagatgtaatcacaagtaatgcaagactcactgaggaatacaagccaagctgatgaggcagtacaggggagaggctggaaaacatattaagagcataaattggagagaatcaaagccttgtcacatggatcctctggtgcctgaagaaatgagattttattatccctctctattatgcaaatgaatttagttttttgacagcagccattctgattactggattggctggggtggggatggaggtatcaggagtctagctgctggaggatgggacagctgtgctgggtcttcagggcatttctgctgcgaatgcggctctccaggcccttcacttctattctggattttattccctccattaaggagagtttaaaaataaaagaaagcttctgagagtaaacattttgctcctaagctgaagggaatgcccagctatttagtaagtgataagtttcttattttgaggacttgactcccatttgctctcagtgaccccagggcagagcccagagaagtgttccgtacccactgctgatggtttcccagagcccacactgagttgaagaacctattgttcttcttggcatccttcttatgctacttctcccatcgctcaaaggggttgcctatggctgggtgtgccctgccctaaatgcagcaccactttcaagcttagtaggaccattccaagaaaaccaggtttcttctccccataccacgttgtgcctgaagaacaagccttcccgtccttgcctgcatgtgagtcacttcttggctgtgcagcaggtccccccctccccgcgatatgctggagggtaggattctgcagcctgtgttgctctctacctggcagcagactgtgcaggagccccaacctgtcctccaattccagcattcacagctgatgagcagtgcaggagcagggcgagaggaacagagccaatgatgtgtgggttacactgaggagccaaggacagggcctcaggtctcccccttacaaggcgtggctcatggcctgcattccagagaccaacatgatagcttttaattcagctgcatgacctgtgccttttaagccataaagatacctcaagcctagcacctcttgaaatccagatgttcatattagactcgaaaaaataggctccaggcctaggtgcccaggctatgatgagtctgcttttgaaggaggtagggaatgacatcttccttggacccaaagcttaaaagtaatgtatgctttgctgaccactgtttgttaggccttaaacaacattcactgtggtggtatcaggcacactgctatgtgcatcaattatttttttgctttccaaacagaatctctggggcacaagttttacactcaagctaagtataactttgtcatttcaggtaaatatgacaagtggtggagcatgaagttttctaatttgacttaatcctaataaatttttgttacaaagt

SEQ ID NO: 12154 - DNA, 1274 bp, Homo sapiens
gttatttacttttcattgaattgaaatttattttggatgaatgactggcatgaacacgtctttgaagttgtggctgagaagatgagaggaatatttaaataacatcaacagaacaacttcactttgggccaaacatttgaaaaactttttataaaaaattgtttgatatttcttaatgtctgctctgagccttaaaacacagattgaagaagaaaagaaagaaaaaacttaaatatttatttctatgctttgttgcctctgagaataatgacaatttatgaatttgtgtttcaaattgataaaatatttaggtacaaataacaagactaataatattttcttatttaaaaaaagcatgggaagatttttatttatcaaaatatagaggaaatgtagacaaaatggatataaatgaaaattaccatgttgtaaaaccttgaaaatcagattctaactggatttgtatgcaactaagtatttttctgaacacctatgcaggtcttatttacagtagttactaagggaacacacaaagaattacacaacgttttcctcaagaaaatggtacaaaacacaaccgaggagcgtatacagttgaaaacatttttgttttgattggaaggcagattattttatattagtattaaaaatcaaaccctatgtttctttcagatgaatcttccaaagtggattatattaagcaggtattagatttaggaaaacctttccatttcttaaagtattatcaagtgtcaagatcagcaagtgtccttaagtcaaacaggttttttttgttgttgtttttgctttgtttccttttttagaaagttctagaaaataggaaaacgaaaaatttcattgagatgagtagtgcatttaattattttttaaaaaactttttaagtacttgaattttatatcaggaaaacaaagttgttgagccttgcttcttccgttttgccctttgtctcgctccttattctttttttggggggagggttatttgcttttttatcttcctggcataatttccattttattcttctgagtgtctatgttaacttccctctatcccgcttataaaaaaattctccaacaaaaatacttgttgacttgatgttttatcacttctctaagtaaggttgaaatatccttattgtagctactgtttttaatgtaaaggttaaacttgaaaagaaattcttaatcacggtgccaaaattcattttctaacaccatgtgttagaaaattataaaaaataaaataattttag

SEQ ID NO: 12155 - DNA, 2072 bp, Homo sapiens
agagacacagcaagccatcaactatggttaattttgaaaaatggaaaagttggattgggcttacagtcagcactcagttatttgcaagtgtatttctttgctttgtagagtatttttattgggtgttaactttgacagctgagagtgggcttgcaagaacacaatctaaaagtgtgtttcaattgagtatctctctagtagaataggagttcatcctgaaaagctgtgactcattaacccagtaaacatatacaaagtaagcttaaaacactataaacatgagataagggaaaatgaatccagagttctcatattaataggtagtgaaacaataaggctttttagagcagactttgttggcataaaataacctggcttctatccctaaccctttcctacctttcctctccgtcaacatgtcctcatactgaagacaaacttgtttcaatgatagtcttcatttttaaaaacaaaaaggcaggcagacagaaataatgatgttttcttgcactaagaaggtactacttgtacacatatatcaaaacctcattctgcaaagtttttgaaggtttcaatgggaaatttgattttattacaaaataaaacattttttaatgttaaagtttatatattccatgcttgttttctcattcactggcatggatgatcaggagctgcctatatatgaaggcagaatcagactatcaggaaaggagctggccagggccacagccagtcaagatctctgagcaacttagagacattggtgtcattatatgaagcttgcatttaatacatttatacataatacatttgtacatttaattcataacgtctcttggtcacagatgccttatatataaaataagttgccagatctctaagattgcctagtacacctttgtatctcatttgatgtgatacccagaagagatcattgttttttgtttttgtttttgtttttttcaagaagatccttcgtgatcaccatgctgttctcatggtaagaactggagttatgtttttaaatttggaaatatgacattttatgtagcactttataaaaagtgaaagcgacaaattccaccgctgcttaatactgctttgcttctttttattgacatgatagataaatatgtatctacacagagtaataataataaaacacagtaaacattctatttctctatggtctacagcatgccagtaaataatatgtaggaccaataataaattatcaattacacatttttgtgttaactaattaaaagcatagtgtataagtgagtacactctaattaacttgcttctgttgcactttagttttctacctgcatatggactgcattttttttttttaacacagtcagtatgtagaatgggatgtattcttctgctgctgcttattaaataaagaaagcctgagtgttcttagatggggttattctgagatgagggtcttagcctacagttctttttgaaatgaaaggtgctttgttttttaattatattcatcttttcagggtaaatttgtttttctgagtttctcgtaatgctcatttttacatgctgctactagcttttttttttaaaaaaagtaaaagttgctgctttctaaaatattaattgccttatatttgaaagtgccattgcaatcgtaagtagactatgtatttcctataatgatgtctgatatttaaataggaaatcagacaaacaatattcagaaagtttaagcatataaactttttatttttaacttgcctaaatccctgtattccaaaacctgctgcatcataataaatatatctatatatatttagcataagacgtgatatttttaatttcttttttaaaaaattatatttgtctcttagagttaaaattttctttatataatattgtcatatgtcatagttttaatacaattcacatgatttctatgtttcttaatgatattttgttgtgtaaaattgatcggattgattaaaaaacaaattctctggaatttgtgcgttcatgctttttcgtattctttatggcttttaaataaatatacaatggttaatagt

SEQ ID NO: 12156 - DNA, 223 bp, Homo sapiens
gattccggatctttggctaggcaaaatgaaactataactgatctaaacggttccttccttcttctactgtgcaaggaagatgtaaggaaaaactcgcacactatctgtggaactcatttaaattcaaatactagataaacatttcgcattgaatatttacatggagaaaaatcatcaaacatcaacaattatcaagttaattaataaaaatactaggtattgc

SEQ ID NO: 12157 - DNA, 864 bp, Homo sapiens
tggattagtgaaagtctcctcaggaaatctgaagtctgtatattgattgagactatctaaactcatacctgtatgaattaagctgtaaggcctgtagctctggttgtatacttttgcttttcaaattatagtttatcttctgtataactgatttataaaggtttttgtacattttttaatactcattgtcaatttgagaaaaaggacatatgagtttttgcatttattaatgaaacttcctttgaaaaactgctttgaattatgatctctgattcattgtccattttactaccaaatattaactaaggccttattaatttttatataaattatatcttgtcctattaaatctagttacaatttatttcatgcataagagctaatgttattttgcaaatgccatatattcaaaaaagctcaaagataattttctttactattatgttcaaataatattcaatatgcatattatctttaaaaagttaaatgtttttttaatcttcaagaaatcatgctacacttaacttctcctagaagctaatctataccataatattttcatattcacaagatattaaattaccaattttcaaattattgttagtaaagaacaaaatgattctctcccaaagaaagacacattttaaatactccttcactctaaaactctggtattataacttttgaaagttaatatttctacatgaaatgtttagctcttacactctatccttcctagaaaatggtaattgagattactcagatattaattaaatacaatatcatatatatattcacagagtataaacctaaataatgatctattagattcaaatatttgaaataaaaacttgatttttttgt

SEQ ID NO: 12158 - DNA, 2809 bp, Homo sapiens
tgtccaccgcgttgctcgcaaggtaatctcgctccgcgcagctgagcgccccgcatctcgcgcctgctacatcaaagggcccgcgcacaaagcagtgtttcttcgccacggtgcatcttcatggtaagttaggatttctatggcaatgtgcaagtcgcactgaaatcctgaaaggccaagcctggagcccgtccaggcttttcattaaggacataatatttacgtctaacagaccttttttcttgtgtatacaagtatatatttttgtttgacgcggactaaatcattttcatttaatttccggtaaacaaaacccacgcgaatgggcacttgtacccgatcataataaaaatggataataatgtgaaggaagaaaagagccgcttgaatcgccgctcagccccctttgtttctgctttctgcggtgatcagagggcgcgtttgggtttgatggcgagtttctaaaggcgaggaaatggtttgtaagaggggaaagaaaaggagaaaggtctaatcaagctcgggttgttcaaagagtcgggttttggggttgaaagtgtgagtttgacggtgcatcagcatgccgcgttaggctcgccatggaaatacgcgcggggagcggccgcttcaaaggcggcacacttcactacagacactctattaagatacatttgcgctgacctttgctttcacgccatttaatactgtcactgcgctctccagtatatacttcctttctagaacccgacttgcccacgtttaggggttcactctgcaccctgatgtgggaggctttggcgcaggggacactttcaggaaagggaggagcacaaggactctgtgcatcttgactgcaccccaaagaggctccaggatcaggagtgaaagattttaaagcagcctccgaagcttaacaaatgagcattccaagctcagttttgtgcaaatcgcctttctgactcttgagtaggatggaggcttaaatttaatggcgacttggggggaagggagccaccctgggggagtctgaggagttcagactgtgcccttgggaatttccactctggctttccgtgccactcttcttcctttccatcccaaaagtctcttgcggcccctgaaacttgtttctttctaaggcagggtgtgtggtacccttaggcctggactagtcctagatgcaaactcaagagcccaaggccaaggggatgtggggaagatggcaggaaagttagaagtccatgttcccttaattgtcttgttgtttattttatccaagtaccccagtgaataggggaaaaataaacacagtgaaaaaaaaaatcaaacagtggagtcttctttagtgccagtccttgtggttgaataaaaaggatggtccgctttctattgagctgagaaatctttgaagtgggagttattatctgagacattcctgcttgtcgtcctaacaacgctgatgaaacgtaaaaggttctttgtcagcgatttgttctcctctctgtcaaactccctctgccccgttagtttcaaaccgtttctaaagagataaaaatcaaacttcttttaaaacaatatccacacactgcatcaatacataactttaggtctaagtcttgctaagggataaacaaaagcaatgcctagacatcagggtcagggcctggtctggtgaagtatgcagaagttggggggccctcgggacaagctttgggacatgaggaaaagaatgcagagagggtgcaagcagaatacataccctaagtccataattgtgtttctgcttctttctgctctggtttgcattcaatcagcccaagttgggtcacatagatgggtttcctttgggtacccctcaggctcctaatattcttgcccaggatccttggaacttaagaatgcagccaagcaattgttaatatctcctgctccttcaaagccacctctgctaaaaatagacccattgtgtgtttcttctcactagcagcaatcaacaagccctttctgccgttaataagaaggagaatagctgaaggagagagatattttattaatttcctgtttccttcagaatcttggcaattgaagtttagaaggtttggtctacaacacagtgatcgaaaatgcatgtaaatgcccatccttcccttcattcacgtgtgaagttgttcattttatattgtgcccagcaaagaaactttcacccagttcaggtttccccaaaactcctgtggtggttttaaaggtggtttaaataaataaggatgtgctggtccccctactctgtgtgtgctgaataaatggcttgtaaagaagtttttccaagctgtaacccatgctgttattatagttgctgcaaaatgttcttcctgatattgattttatttgttaactgaaggtctccatatgtttgtttatattgctaatttatgagaaaatgtaataattgcaatgaatgtgaattatacagacaggcaaacattttgtaatcataattcacatatacacaaaagcctggctgaaatctttagactatttgtaccctctctacccacactgtttgtgatttatcatctgtctctttagtgtcagttaaattatgaactaacttgaaaataaaagttgtttgactgaaagtgattgttgaatgaacaacaaagttgaaagccatggcttgatcttgtaaatatataaatgtaaatgatattaaatctgtgattccttttccctccaaaggcttttgtgtacatggcgctgcatttggctattttctttggaaataaataatgtgatgtttctcttcctcttt

SEQ ID NO: 12159 - DNA, 2103 bp, Homo sapiens
tttgtgggattttagtaaggtcagtttgattggatacttaagttttagaaatgagaaaaatacagagttttagaaatgagatctagagaacacgtcttctaaaaggggcatattttatattagtgaagaggtattactgacacaatttcttctatatatgaacctatttttaatgaaacttcaaatagcaataagttccgttatatactgtggcctgaaataatttgagaaaaaaggttactttgttattcagcttttcataatatctatgctgagtattttcacgtatcttccaagtactcagctttttcgtatttcaaataaggtcagaccttttatacttttgaccaaatagttattttctatgttggacacttagttatttaccaaagcctccgatttgtgatgcagtgtttgtagtccttgtaaacaatatatacagactatacaagaattaattttattgggctttcaaaaaccatatttgcattccagaaccaaatcttaaatgagaccaaagtccaggttagcacaggtttttatttttcctacagctacattgagatatagttcacataaatgacttggagttttatgttcatgaaaaaattagggattatgttaagagtactattttttccattttagttaagtagtactacactcattgtttaaatgtaacttgctgtgtctgaggtataaatatagtctgtgggagtgagaggcaaaccagtcctacccaatttgatttgaatattttaaattatggaactgctaaatagatatttctataaatagataatttttatttatgtagctttttttggaagtaactttataaatttttataattcagaagactactatatgtgagaggcgtgatatctggatggaagttgggctggatgatctccaaagtcgtttcaactcttaaagacatcttaatcctgaatgtaaacaattgttatgtgtttagaatcagaatttgattttgaacttgagtaattcatccttacagctatctgtagaattagtcatcttttttcttttcttttttttttacttttttgttaataagcaaacttatttgctgcagaatttgggttgactcctgagcatatttaaaacaaagaagctagaaatttagcagtcagattaggtaggtggttttatttcaaagggaaactttaatccaaagaaagattaattactctaacaaacaagagaagcttcatgtttgatgatacagatttaagaatacctgagacttaagagtgttggaagtcatttgatagaaagatgagatcggagacaatgttgtgttatagggcacacattgaaggtatatgccaaatctctcaccagataagtccttttctccctgtgccgttttcttgctcaaagggaacagtgaattagccagctagaatcttcctggtccctttttgaggcagtagcaggtaaggaaagggctgattttcatcaaaaccaagacctttctgcagggatgatagtggaataataatgtgggattagcccgctagcattaggagcagttgggaagttacctggtagatcaagcattacacacaaaaaatcaagttgatcagagtatgggttctccatatagcaatacttcagtgagattaagtataaacagtttttggcaaaaaacaacacagtctactctttctgcttacaaagacaaagccttacaaactcactatgaaggtaaagggaggacagcttgcttctttgcccagacatttacaaagttgtttttaaaacacactcataagtaagtttggcaagttgtttaaaaaatgtctctttgttttgtacagttctgttagatgttgttatattttaaaagtttaatttaaaaaatttaatttgtccttcctaagaaggataaatatataaaaaagccactggaatgaaaacttcctatatgctatgctgttgtcttattattatatagaaaaataactttagaaaaatattgaagacattgtattaccacttgtgattcaaacaattttgtggttaaaactggattttaaatttaaaaatcaataaaaatttcaaatgtttattaccttc

SEQ ID NO: 12160 - DNA, 967 bp, Homo sapiens
atgaaataaattggtgataagtggaaaaaagagaaaaaccaatgattcataacaatgtatgtgaaagtgtaaaatagaatgttactttggaatgactataaacattaaaagaagactggaagcatacaactttgtacatttgtgggggaaaactattaattttttgcaaatggaaagatcaacagactatataatgatacatgactgacacttgtacactaggtaataaaactgattcatacagtctaatgatatcaccgctgttagggttttataaaactgcatttaaaaaaagatctatgaccagatattctcctgggtgctcctcaaaggaacactattaaggttcattgaaatgttttcaatcattgccttcccattgatccttctaacatgctgttgacatcacacctaatattcagagggaatgggcaaggtatgagggaaggaaataaaaaataaaataaataaaatagaatgacacaaatttgagttttgtgaacccctgaacagatggtcttaaggacgttatctggaactggagaaaagcagagttgagagacaattctatagattaaatcctggtaaggacaaacattgccattagaagaaaagcttcaaaatagacctgtggcagatgtcacatgagtagaatttctgcccagccttaactgcattcagaggataatatcaatgaactaaacttgaactaaaaattttttaaacaaaaagttataaatgaagacacatggttgtgaatacaatgatgtatttctttattttcacatacactctagctaaaagagcaagagtacacatcaacaaaaatggaaacaaggctttggctgaaaaaaacatgcatttgacaaatcatgttaatagctagacaagaagaaagttagctttgtaaacttctacttcatttgattcagagaaacagagcatgagttttcttaaaagtaacaag

SEQ ID NO: 12161 - DNA, 410 bp, Homo sapiens
ataaggacaaaatgttttccattatcaagacatggccatctatctaaatattatatcaactgtgtagacttgagggcaatattgaaatgatggtgctttctgcatttggtgtttatttgtaaaaaatttgcagtcctcactgcacatgcaagtataccacccttccatttagtatgttttttaagtaatatgcatcagaaacttcagaaatacttctgccctttgatcaaacaaatccatttccaagaatctgtactagggaagtaaataagaatatgagagaaacctttatgcaaatatgtatattgcaacattatttaatattctggaaaattggaaacaccccaaaattctaaactcagaggaaggattaagtaaagagtggtacatactgtaaatgttttctgata

SEQ ID NO: 12162 - DNA, 848 bp, Homo sapiens
aagaaccaacccaggacagagccacaatcttcctctatttcattgtaatttatatatttcacttgtattcatttgtaaaactttgtattagtgtaacatactccccacagtctacttttacaaacgcctgtaaagactggcatcttcacaggatgtcagtgtttaaatttagtaaacttcttttttgtttgtttatttgtttttgtttttttttaaggaatgaggaaacaaaccaccctctgggggtaatttacagactgagtgacagtactcagtatatctgagataaactctataatgttttggataaaaataacattccaatcactattgtatatatgtgcatgtattttttaaattaaagatgtctagttgctttttataagaccaagaaggagaaaatccgacaacctggaaagatttttgttttcactgcttgtatgatgtttcccattcatacacctataaatctctaacaagaggccctttgaactgccttgtgttctgtgagaaacaaatatttacttagagtggaaggactgattgagaatgttccaatccaaatgaatgcatcacaacttacaatgctgctcattgttgtgagtactatgagattcaaatttttctaacatatggaaagccttttgtcctccaaagatgagtactagggatcatgtgtttaaaaaaagaaaggctacgatgactgggcaagaagaaagatgggaaactgaataaagcagttgatcagcatcattggaacatggggacgagtgacggcaggaggaccacgaggaaataccctcaaaactaacttgtttacaacaaaataaagtattcactaccatgtt

SEQ ID NO: 12163 - DNA, 559 bp, Homo sapiens
tcactaccattgtaacttggatgtagccatgaccttacatttcctgggcctcttggaaaaagtgatggagcagagcaagtctgcaggtgcaccacttcccgcctccatgactcgtgctccctcctttttatgttgccagtttaatcattgcctggttttgattgagagtaacttaagttaaacataaataaatattctattttcattttctgcaagcctgcgttcttgtgacagattatacagaattgtgtctgcaggattgattatgcagaatacttttctctttcttctctgctgccccatggctaagctttatgggtgttaattgaaatttatacaccaattgattttaaaccataaaaagctgaccacaggcagttacttctgagggcatcttggtccaggaaatgtgcacaaaattcgacctgatttacagtttcaaaaactgtattgatgacagtagtaccaaatgctttaaaaactatttaacttgagctttaaaaatcattgtatggatagtaaaattctactgtatggaatacaatgtaattttgaatcc

SEQ ID NO: 12164 - DNA, 776 bp, Homo sapiens
taccagttttaaggttttaattcatttgaatcacttatgaattgatgatatacagcaattacttttcaaaattaattttttattaattcatgatgataaatacatagtattcctcagtatctattccaagatactgaggtcataatcagaagctaagctgggtgcagtggctcatgccagttatcccagcactttgggaggccgaggtgggcaaatcatgaggtcaggagattgagaccttcctggctaacatggtgaaaccccatctctactaaaaatataaaaaattagccaggtgtggtggcacgcatctatcagagtcccagctactcaggaggctgaggcaggagaatcgcttgaacctgggaggtggaggttgcagtgagctgagattgtgccactgcactccagcctgggtgacagagtgagactccatctcaaaaataataataataataataaagtaaaaataaaaataaaaaagtaatcagaagctaaagtaaagttcctttcctggtgctaactgtggtcttcttgacacattaagatgtattttgtattttaagagtctcatgctctaccgttggaactagccagatggccattattttgtattttaaatacataaataggattgaatcaactagaaatgaatctatatgttctgtatatatgaatgactatcttgtttttgctacttcttttgactgcttaattttattattttcatctttattgatcaaatttgaaaataaaattcacaatgtaatactact

SEQ ID NO: 12165 - DNA, 1582 bp, Homo sapiens
ctgctaggcagactgttaagtattaggggaaaattgctcttaaactttcctagctataagcttaagtcttaattctggaaattttattagcaatgcagggtgatggggtatgaacctgtgtctcctttgtatccctctgttggtggggaaaggtgtctttctttctgccctccccccccaaaataattctgttcacttttgttttgtttccttgtgtactccagcattggttatagtcatgggaaaggaaggtgtccacggaggcacacttaacaagaaagcatatgaactcgctttatacctgaggaggtctgatgtgtaagcagcctctccccatctacctagcaactgtcttcatcaacaaccctaattatggtcacaatgctaccaaactgtagatggtagctaatttttctttacctattttctaatgtcatgattcctgtttgcccaatggatcatttgtatgttaaccactgtatgtaaccaacccttatctggcaacataattgcagcacaataatgatttgcatgataccttgaaattggggggagggggcatgccaagttgggcatcactttgtcttagcaattaatgggatattgattactaaaataagttaatattaagcaaggtgccggttgtacaatctctgatcagtgtcttttcagcactttgagcatttacttggctcatttagtcttccttttgtagcgcatggttgggaggaaaaagtgcatgcatcattccttcactcttctctttttcccgccccccctcccttcgcacataggcatttggtttgcttccatctttttttatgcagtgcctgtttttttttaaccaattaaaatcccttttgttgatgagctattgagagctgcagtagtttgcttttagtattgttgttgcacttgagcagagacaaacctttattcatagtgtctacaggacatatgaagagtgcaatggcaaaacaagagcaaaaagcacttcctcccatgaccttacagtaaccatactgattgaatccccagggacattccatcattgcaatagctcagatttttcttcctttttctttgcacaccagctctactctttagtaaaattgtaaaaggctgccattatggacattaggtatcccaacataaccatctggagtgtgtccagtttgttcttcataggaccaatttttatttgcagcttgagtttttatatgaagttgcattattgtggacttggctgtcttgtgatgaatttttttcatatgtattctgtgccatactattgttaaaatgaactgttgctattgtgagatggattttaactgacctattaagggtttctttcgaatggcactactttagggacattctagtatttgcttctattgtttgggccttgtggataatgtacagatttaaaaacaaatcttgttgctgatttgtccatttctttccctgcactttgttacatctgggatacagtctaactcatctgatttaatatgcatttaaaaaaatgccataactattaaacaccttgtttacagacagatgaaataaatttattccaacc

SEQ ID NO: 12166 - DNA, 2464 bp, Homo sapiens
agtgactgaccttaagatgtttccattctcctgtgaattttaacttgaactcattcctgatgtttgataccctggttgaaaacaattcagtaaagcatcctgcctcagaatgactttcctatcatgcttcatgtgtcattccaaggtttcttcatgagtcattccaagttttctagtccataccacagtgccttgcaaaaaacaccacatgaataaagcaataaaatttgattgttaagatacagtagtggaccctacttattcagtcaattaagagtaagtttttttatgtggttattaaaacagtatgaacaattagtctaactctgcatagacagggtctagattttgttaacccaaatgtataactgcagttagcttaaattacaatttgaagtcttgtggtttttatatagctaggcactttattactcttttgaactgaaagcacactcccttataggttcatgtaactgtcctgtaataaggtgcttataaatggaacaactacacagcctagttttgccacaacctttagcatctaaaaagttttaaaagcttctaaatgtctaatataaagggagatgcttatagccacaacatctattttaccaatattgtttccattacactaccttggattttgcatgagtgagtatagtaacccaagatgccataaaaaaaaaacttgatcgttttctgacttaatcagttactgtggtttcactaaaagctaccgtggtggagtgaagtcagtcagggaaggtttgtttatgttacatttatttcaccagaactattttaatatatcaaaggggtttactatgccaaacaaaattctagggaaaaatactgctaaaaatggatgcctcatcagaacatgctgttgagtccaatgtgccataagacattttagcatgttaaatagcacttttaatagcaaaaaaaggcacatcaactgcgaagttatccttagtttgcaaatgctttttctagattaatgatttttcaatcattagggtactagacacatcagcctaaagtggcatctggaattgaatggatttactgataatgatcagtctttagtcttccctttgttatatgactttataggttatgattgatcaaatttacgttttactaatggtaagggtgagggtcatagggcaggttttgggttttctagtactgttgaaaactgcaagtattggctatttgtatacttagccataacttggtgaaaaaaaacctgagcagtgtctatgtattaatgcgttggaaagaaagctgcttgtgtttgctttgttaattgcctcaggatatttcttttaaaataagctgttttaagaggaacagaagggaaatctgctacctagtctatacacagcgtgaacctcacagggggcttctgataccctcaaacatggagaacagtaagggagcagagtggttaaggactttcaggaacttaactattctggaataaggaatgaatcaactgaccttgggccagcaggtttttaactaaattgttacttgcctttctcacccagttaatcagtctctgtacttgtttccctttttgaaacaagtgtcttggttaactaattctgttttatggttgtgctaaattcatagcaggtgccttattctttgcttttagtcaaaccattccatatcagaattttccttggtttactatagatatttggctttaagttgttgtttgtgttttttaatgtacaatgttctgataaatttgactgttaaattgctatagctagcaatcattttacatatgtaaaattgcattccctttgtatttcatgtgtaattcaccaattaagtgcagtttatattcaggttggattatgcatgtttaggtaaacgaaagctgtgtcttacttgatttattctttaaaaataaagttccctgaatatttgatgcttttcttctaaacggaaatgattttacagttatctgagtgtaccttttatagttagtagaaaatgattttaaagaatgtttagtattgtacttaaatggtatgcagaggcacagatgtaaggtttataactggaaataggtggtaagaaaaatatatagaaagcacaatgatttgaatatttttccacttaggatttcctaatctccttgtcatccaattcaagctcaagatgaagcacaattctttgatctccctttgccagttgaattttatagatcatctaatgttgagcacagtatgagaataaatattggggttgtcaacattactcagttactctttgtggtttaactctaacatttcaacaagttgtcaattaattgtatctgttgggttgtatataatgttgctcaaaataattaagtggacttccaaaaataagatttccattgtaacaggatgcattgtgatgggctttgacttacattaaagaaatgtggatagtcaactgc

SEQ ID NO: 12167 - DNA, 1017 bp, Homo sapiens
tgtgactttcgtaaaccttcaaaattatttgggcatagtgctctatgtttaataaaggtttttatagatgttttattccatatgtcttcacaagtcaggacccacaattacccgtgttttgtttgaacagcagtgtcccatctggcttcgacccaacaaagttcattaacctgggatgaatggggttggcctgttggtgatttggatgctgttctgtgatctaaaacaactcttattgaattgtatttactccctaaacaacacttgacaggctgttgcacagggcttctatagatcagtgtgttaggaatgggaggccccttcctgcctgccttcccatattggtcccttgacattgacaaaagcacagtgactgtcagcagattcctttacttttgtttgtgggaggtaggaattgttttaatgcattttaaacagtgtttctgaaattggatggctggctaatagacactgaatcacccggagtgcttatcttaaaattgcagatttagggagcctgccaatttaacagtctcatcaggtgattcttttcaacagtaatgtttgagaattactgggttaaattgtgggaaagggtccagattttaaaggtgctttaaggttgccctctgccgatactgtttgtctttctactgtttcatcccctaacttcccccaaccctcaaattaaaactagaactatagatccacatgaacgcacgcctgagatttggccactcacctatgttttgggtggattgcctaggaaagcaagtcatatggccattgatagttctcatgtaattagttttgctcaccactagtacagatgacccgtttacacgtggcttccctcggaagccctcctcaacagtagctggtgtgaaagactaaatcagtagagttggaaaagctttataaccggtgtgtcatatgcttgctatttaaagctgtgtgttggttttgtttttctgccacattcactagttttttaataaatattttccaaaaatggat

SEQ ID NO: 12168 - DNA, 1772 bp, Homo sapiens
aaggcaaacctttctataattttacaagggagtagacttgctttggtcacttttagatgtggttaattttgcatatccttttagtctgcatatattaaagcatcaggacccttcgtgacaatgtttacaaattacgtactaaggatacaggctggaaagtaagggaagcagaaggaaggctttgaaaagttgttttatctggtgggaaattgcttgacccaggtagtcaaaggcagttgactagaatcgacaaattgttactccatatatatatatgtgtgtgtgtgtgtgtgtgtgtgtgtgtaagatgtcttcctatcaaaaagatatcaaaggcacatggaatatattttaataaaaacaaataatatctctaatatatccacacatttgttgccagatttcagaaaactgagctgcaatcgctttcctaaaacagtagtgtattaaatgaacatctataaaatgtatcaacacacattttaaaaaatttgtttaaagtatactcttaggccaggcgtggtgactcacacctgtaattccagcacttcaggaggccaaggtgggaagatcatttgagttcaggagttcgagttacagcctgggcaataaagtgagaccctgtcactaacaaaattaaaaaataaaataaatataaaatataggctttaaaaaagcatagtcttattaaccatgtctgttggtcaaaatctgcaaactctaaaagaagaaaagaagaaaaaaccaagcttagggtatttttcctcccgtgcctgagtcccaattacattcacgacagtactttcaatgaacataattgttaggaccactgaggaatcatgaaaaatgatctctgcttagtacatttgatgcaaaatgacttattaggggctgtttttctagctatagtgtctcgagtactaatatgcaattatgaaaattatattaaatctgggattatgacggtatcactgtatcatcttggtcttgttctggctgtcaccaagcatgacccaggtcaactttttttttcccctgaattacccatcaaattgatctgcagctgactaaaggccacagctgagcctggaactgacccttccttcatcctcaacctgctgtcctccagaaagcaccaaggaaaaagcagagaatgacagcaaacagatcactaggcctctgaccacaggtgctgagtactcagcagccctcatataataggtttgaaagtactccttaaaataaaacactgtttccctttggaactatttacaaggatgaaacaaccgtatacctgagaaataacttgctctggtgtcaattcgctattcgccagcagacatcagaacacaccgagtttccagatgctggtttttccccttaaatcaggaaatacacctggacaatttctagaagactacaattcagtctagccacaaaggggattttttttttttggtaacaggctagagcccggttctgtaagtctttagctgaaatggtccagtacaaaagcactggaaatgagtgggctaggaggacaaggaccgtctcctgcgtgaggagttggttggaggtccccaaggccaggtaccccctgcactcttattggattcctctctgtcttcttggagttttgaaaaactccttcgaacaccaggcttttttctttagaaaacaagtctccaatcgttctctgttccgtagaaagagaaagaaaacctggagcagctgctgaaaaatctaatgaggaactaagaggcaaacccacc

SEQ ID NO: 12169 - DNA, 595 bp, Homo sapiens
aagacaggattttttgtgctaccaattctggccttactggaccataaagttaattatagctttgaaagataaaaaaaaaaaaaacaaaaaaaaactcagtatgaaaaaatacagttagctagcaaatatggacaggtttacttagaaatcctgtttctaaatgcaagtcaagctttattgttaggcttgctgctactcattaacccaaatatttgtacaaaaaactaaagagtctcattgaacgaatgtaaaatcctgcaatatccttgaaatccaaaagaggtccatgacatagacccaaaggtattcatgagttattcatttaaatgcctggaactgacttcttgataaaaatataaaaaataatttccatgtaagttaccagaaagcccaccagcaacataattttaaagcctttcagattacttttaaaaaatgcagcttacatataacaacttgtgcctattttatttctaatctatcacttcaaaagatggtaatctttcaactcattattcctccaatttttaatgtcgaatttttttctaacacaataaccaaaagcttttatttataaaaaggcttgaaaaatata

SEQ ID NO: 12170 - DNA, 1183 bp, Homo sapiens
gttcctaccctcttccaaagaaagaccacgtgtgcatgttgtcatcttcaattacataacagaaatcaataagatatgtgccctcatcataaatatcatctctagcactgccatccaatttagttcaataaaattcaaatataagtttccatgcttttttgtaacatcaaagaaaacatacccatcagtaatttctctaatactgacctttctattctctattaataaaaaattaatacatacaattattcaattctattatattaaaataagttaaagtttataaccactagtctggtcagttaatgtagaaatttaaatagtaaataaaacacaacataatcaaagacaactcactcaggcatcttctttctctaaataccagaatctagtatgtaattgttttcaacactgtccttaaagactaacttgaaagcaggcacagtttgatgaagggctagagagctgtttgcaataaaaagtcaggtttttttcctgatttgaagaagcaggaaaagctgacacccagacaatcacttaagaaaccccttattgatgtatttcatggcactgcaaaggaagaggaatattaattgtatacttagcaagaaaattttttttttctgatagcactttgaggatattagatacatgctaaatatgttttctacaaagacttacgtcatttaatgagcctggggttctggtgttagaatatttttaagtaggctttactgagagaaactaaatattggcatacgttatcagcaacttcccctgttcaatagtatgggaaaaataagatgactgggaaaaagacacacccacaccgtagaacatatattaatctactggcgaatgggaaaggagaccattttcttagaaagcaaataaacttgatttttttaaatctaaaatttacattaatgagtgcaaaataacacataaaatgaaaattcacacatcacatttttctggaaaacagacggattttacttctggagacatggcatacggttactgacttatgagctaccaaaactaaattctttctctgctattaactggctagaagacattcatctatttttcaaatgttctttcaaaacatttttataagtaatgtttgtatctatttcatgctttactgtctatatactaataaagaaatgttttaatactg

SEQ ID NO: 12171 - DNA, 60 bp, Homo sapiens
gccttttattgtttgttggaatcgatatgtacaaagtgtaaataaatgtttcttttcatt

SEQ ID NO: 12172 - DNA, 1683 bp, Homo sapiens
caactgtacatagggttaacttctatttattgatgagacttccgtagataatgtggaaatcaaatttaaccaagaaaaaaagattggaacaaatgctctcttacattttattatcctcgtgtacagaaaagattatataaaatttaaatccacatagatctattcataagctgaatgaaccattactaagagaatgcaacaggatacaaatggccactagaggtcattatttctttctttctttttttttttttttaatttcaagagcatttcactttaacattttggaaaagactaaggagaaacgtatatccctacaaacctcccctccaaacaccttctcacattcttttccacaattcacataacactactgcttttgtgccccttaaatgtagatatgtgctgaaagaaaaaaaaaacgcccaactcttgaagtccattgctgaaaactgcagccaggggttgaaagggatgcagacttgaagagtctgaggaactgaagtgggtcagcaagacctctgaaatcctgggtaaaggattttctccttacaattacaaacagcctctttcacattacaataatataccataggaggcacaagcaccattattaagccactttgcttacaccttaagtgtgtacaattcaagtgtgagaatgctgtgttaactattctttggaattctccttctgtccagcaaatactctaatgatggttaaacatggcacctactcagcaatgccttcctggaccacaacccctatccccctgccccaccctcctcattaaaaacaaatacttctactgtttgggtgtgtgatagggttctcaatgcagatctcccttttctagttagctatattcttgactgcatccgctaaaaatgttaaagcttcttgagagacagacatgccagattttcttggtatctcccataatacgacctacagtccatggtctacagatgttttaaatagaattgctattctcgatacatacaaagacgtaattgctgacccacaatcagtaacatccatattgagagatttttcaaaggatggtgaccctgcttgtatttatttaccttggtattttttcttgcatccttctgtgattcaaaaaagtaaaatgtggctttctgaaatgatggataagagtctacatcttctagaaaaaatacataaaggagtagttaagctctgtaaatgtgccacgagctccaacacgaccatcgtagggtgaagcccacgttttcttccatggcctcaaaggccctagaacttgcctacctttctggccttacctcctagctacttatccatctcttgaactttatactcttgtataaatttctaactttcagaaaatgccatactctgttttggcaccacacatgtatatttccccctggtacacttggaagactcttatccatctgtgaaaccctatgttgtcatcacttggtccatgaaatattacctggccaatatcccaccatcacctcaaacccaatcaccccctcctctgtatgctgtcacacctatattattaaacttatcacattgcattgtaattacttcctgacctttgtatctactcttttagtaactgatgtatatatctgaaaggagagattgtttcattgtgcaatcaataaatgtttgataaaataaagccc

SEQ ID NO: 12173 - DNA, 229 bp, Homo sapiens
acaaattaactaaggaaatatttcaatctctttgtgttcagaactcgttaaagcaaagcgctaagtaaaaatattaactgacgaagaagcaactaagttaataataatgactctaaagaaacagaagattacaaaagcaattttcatttacctttccagtatgaaaagctatcttaaaatatagaaaactaatctaaactgtagctgtattagcagcaaaacaaacgac

SEQ ID NO: 12174 - DNA, 502 bp, Homo sapiens
cagcttttcaggggtggtctgaaaagccagtttgacagccattcttcatcattgtttaaattttggctggatgccaaaccctgggacatgaacaattttcatgtgtaaggtagaagccttcagtaggtagtaaagacttaatgtgcatgacttgatgttatatgtagagatatatatatatatatatatataccataaaagcaatatgttctctgatcatatactctgctgtggtcatgcccactctttgggagtatattccctttatatatattgagtattgtaccacttgagaaattcctttgttctgttatacaaaattaatctttctgctcataatgattgatgataccaccagtaaaaataggatgtttaccccaaaacaagtgtcaattaagaatttgaacacaaccacattttttaaaatgaaacttctatcggaagtaaattaatttgttgtaataaagtccagtatttaataaaatgtacaatgttaaatctc

SEQ ID NO: 12175 - DNA, 1086 bp, Homo sapiens
attatttaaaactgcattcttaaggttttcaaggtattctgtagaatgtcagagttttcagtaaataagttccttggctttggaatgattttcaaatgtatttttaaacttgtatttgggtctccctttgacttcatgtgttctccctgttaatgcgtttgtatatagatttggtgacatttcccatgtacctattatgatctttctcccttgagttgttgtaaactgtatcagtatgaaatatgtgcatgccctagatgtgaaactcctcagcagctcgggttataatgtgtgtgtgtttcaccaagatgtcctttactgtgtcctcagattgcagtcacaaatgtagtcatttttactctctaactgttgagttgattaagagactttgcaaacgacaaagggatgaattccttactttaatctgttatcatttttcctatgtttccctctttgttcagaagcccagatgcatttttataactcagttttaaaaactttaaaatagttaccttgccttttaggatgttcttatcccacccataatgagagttgaaaggggatggatagctgctccccatgcccttcccactttttggaataggccgtgagggtgtgaggaagaaggctgtcttttgtacataaggacaaaattgtttgttttacataaattttgttacatatttttgctaatggctttgtatgtaacaagaagcgagttgccaaactacctgttgtacttttgaattttctgattgaattacagactgcgaacaacggctttcagaatgagggacttccatcagactctaatgataatagtagcacaaattgaaaacttccccaaagctttcacagaatattttctcataataaaatccaagtgaacagataattagaagaaacccttttccttcagggaaccaagcaactctattttagtactgacatgcattattttcactgtgaattcacttttttattgcatgttcagatgtccctctttgttttttttttttgtaacattaactgcaatgatgttcttcctggaattcatgaaaatataattaaaacacatttttaaac

SEQ ID NO: 12176 - DNA, 905 bp, Homo sapiens
aacggtcaagaaatctagaggtaaccttctccaaagagtgaaatatgtaaatatatggacgtttttcattgaatcaaaatggaagttttgccaaatgatcaaagtgttagtccaatggtatttaaatattaaaaagagatgattattataagcataatgtcagaattaatttaaacaaattataattaatgtaatatgattttaggaaggatgaaacactttatgagaagttaccaggctgaatgatttacatatatagtgctaatgtgtgaagagaaagtttaactcttcacccactatgttgtttttagttattttgggctgccatattgaattttttgtttgtttgttttgagaaggcgtttcgctcttgttgcccaggctggagtgcaatggcgtgatcttggctcactgcaacctcctgcttcctgggttcaagcgattctcctgcctcagcctcctgagtagctgggattacaggcatgcaccaccatgcccggctaattttgcatttttagtagagacggggtttctccatgttggtcaggctggtctcaaactcttgacttcagatgatctacccaccttggcatcctaaagtgctgggattacaggcgtgagctaccaagcccggctttttttgttttgacatggagtttcgctcttgtcacccaggcaggagtgcagtggcgttatcttggttcactgcaacctccgcctcctggattcaagtgattctcctgcctgagcctcccaagtacctgggattacaggagctcccaccaagcctggctaagttttgtattgccatattgaatttttgtttagaaaagatatgtgtttatgtttccagttttattacctttcactatttataataaaggaattctttatgctttatgtcc

SEQ ID NO: 12177 - DNA, 628 bp, Homo sapiens
tatatatgctactggacattctagcaaggtaattgtagtttagttttaattcggagagcaatgataatcagtgcacaggagtataaaatattattttaaacagcgaaattaataatataaaatgccaaatggttgaaaaaatagaaacctttctgtatatttgatcatattttttttttgccttgtcaatgtatttaaagtttacttaaggtcaggaaattctaaaacaacttttctggccttgttatttgatgtatatcttttaaatttactgaccaaagcatgttttaagctgcaatgcagtagtcacgggtggtaaccatgtagtcaggtattgttattagtacctatcactgctgagctgtatttaaaattttggtacaatatataaaatggagaagagcttgatattcaggtactaaccacaactagtctgacattgttggcagttaaaatcttattttgaattgtaaattagttaaattttatgtggaatttgctgagaaaagaatatagactactgaaatgtcattttagttatttttcttatgaccacattgtacaaatgaatctgtgttaaaaagactattttaaatgtatttcctgcttttgtaagcattaaagattt

SEQ ID NO: 12178 - DNA, 2447 bp, Homo sapiens
accatgtcagcttcaccccctggctttgtgtctatgggtggcctgtggtatatggaaaagtagcagggtggtcagggtgggagacacaagatgtttttatagtctagagcctttaaaaaacccagcagaatgtaattcagtatttgtttattggctgttttttgacagattgttgaaattaaatgaattgaaagggaaactcagagtactaggacgtttattaaaaggaaaaaaatgtcttgcaatgtgctgtaatcacaagaggagaaaataacttgtttccttgatctgtcagaggtcacagtaacctgggccgagctgttattatttattatataatagtagtaggaagttaataactggttctctgtgttccaagcacaatattacaacttcttttgaaccgtaaatatcagaatgaatcctcttcccaggggattgaacagaagcttaatgtttacaagtgtttgaatttgtgatctgaaataacacaaaattaaaaacatgatttctctaattttccaactagaggaagagaaacttgtggaaaagttctttttttttcttttttttttcttaaagaagggcagccaaggtagtaacctaaaaatagtgcccaggcatatgagagttgtcctacgaggttaaagaacacactgttccactgtatggctttggccctgagtggccagggaggtcaacttgaccctgccatgttggtttgacttactaagacacaggaatcactgttttccttgaccagggtctcacaccctggaggaatgttaagtaagagaaagaacctctttcctgaatattgacatgtaaaagaccaaagtaatttttctgaacttctgcaattctgagaactctccaaggaatttacagtgattttagtgcttgtcagcatttttccatgaggactttcatacatttgactctttagttcacaggttcccattgattgtgagcaagatatttatctctttagcccttggggatccagctgagagcaatctcttgcatttttttacccgtgtatgtacagatatcatttcttgtgtatgccatgacttgaaaaagtttgggaagctctttagcaatatcagctaaaaggatatgaaatcacaggtgatagcagttgtcattcagtaatttcctacaagcagcaccccaaaggaaatatagtcctaatctttactatccacttctaaatttaatgtgaatttcatacatgttattagttgttttctttataattttataaaaattattcatcgggagtttaacttccacttccatgctatcggatgtgttgggctccatgcaagaacttggaagaaaaacaggcaggaatgcatttgcataatgacccagatcatcattttctgcaactgagaattatatttcatcattgcttctagaagtctgcaattctttacttttctttggtgcattattatctaggtgccatcactggataatgtggagtgactagagaagtcacatatcactgtaaggtacagttagggtaacactttagaggtttattatttttaaaaaacttttcttgaactcctggccaacatggtgaaaccccgtctctactaaaaataccaaaattagccaggcgtgatggtgggcgcctgtaatctcagctacttgggaggctgaagcaggagaactgcctgaacccaggaggcagaggttgcggtgagtcgagatcgtgctactactgcctgggtggcaagggtgagactccatctcaaaaaagaaacaaaaaaacccaaaaagttttctttactgttggttaaaaaaaaaagccagaccatagtttgactggtggcatggaatttgtgtatcaaataaatgcatttgcttatttgacaaaccatcagtgtccactatttgttaccagagttgggccactatcttttaaaattgctggtgaaaacttgccactagatggcagtgcctgtatagatggggaaaaaattgccaccattcttggtataatacagtgtagcttagatgaggtggtgaaataggggtatcagccgaatattcctaatatagtttctcttgaattaataaactgaagatttgtaggaaaatgagtgagcaaaatttgtttactgttgtgaatttttcctacagcactgtttttaatcttgatgttttccaactttctgtactaatagatacatttctgtgcataagattataaagcatatactcacagttcagtagttttcgttaaggatttactgtgtgagtactttactgtgaggaattgcagaaccttttcccctctactcttgtctaaaagttctgtgtggcacacagagatgcgacctactcaatctgacttagtaaaaccatgctgtagaatttttgtcttaaaaagaccacatacccagcacccatgaaataaaagattcatctgt

SEQ ID NO: 12179 - DNA, 442 bp, Homo sapiens
ctttctcttcctttgagcctgcatcagttcttggttttgcctatctacagtgtgatgtatggactcaatcaaaaacattaaacgcaaactgattaggatttgatttcttgaaaccctctaggtctctagaacactgaggacagtttcttttgaaaagaactatgttaatttttttgcacattaaaatgccctagcagtatctaattaaaaaccatggtcaggttcaattgtactttattatagttgtgtattgtttattgctataagaactggagcgtgaattctgtaaaaatgtatcttatttttatacagataaaattgcagacactgttctatttaagtggttatttgtttaaatgatggtgaatactttcttaacactggtttgtctgcatgtgtaaagatttttacaaggaaataaaatacaaatcttgttttttct

SEQ ID NO: 12180 - DNA, 225 bp, Homo sapiens
ggatttataagtcagccatgacaattatacaccacaggcattgtattatcattgccaatgtcaagaaaaagagctaaatttaccaagccatgttgttttttactaaataccaatggaattgttgtcctttaagaagaagggcctaaaatggcaggattcttagtaaatgtcatactctaacagctttagtattgacttcagaatatatctgatgcccacaaaaat

SEQ ID NO: 12181 - DNA, 2015 bp, Homo sapiens
cgccaacgccagcaccaatgtcgcgcctgtcccgcggcactcagcctgcacgccctccgcgccccgctgcttctccgttacccctttgagacctcgggagccggccctcttcccgcctcactgaccatccctcgtcccctatcgcatcttggactcggaaagccagactccacgcaggaccagggatctcacgaggcacgcaggctccgtggctcctgcccgttttcctactcgagggcctagaattgggttttgtaggagcgggtttgggggagtctggagagagactggacaggggagtgctggaaccgcggagtttggctcaccgcaaagctgcaacgatggactcttgcatagaaaaaaaaatcttgttaacaatgaaaaaatgagcaaacaaaaaaatcgaaagacaaacgggagagaaaaagaggaagggaacttatttcttaactgctatttggcagaagctgaaattggagaaccaaggagcaaaaacaaattttaaaattaaagtattttatacatttaaaaatatggaaaaacaacccagacgattctcgagagactggggggagttaccaacttaaatgtgtgtttttaaaaatgcgctaagaaggcaaagcagaaagaagaggtatacttatttaaaaaactaagatgaaaaaagtgcgcagctgggaagttcacaggttttgaaactgacctttttctgcgaagttcacgttaacacgagaaatttgatgagagaggcgggcctccttttacgttgaatcagatgctttgagtttaaacccaccatgtatggaagagcaagaaaagagaaaatattaaaacgaggagagagaaaaataatattaacacaaaaaaatgccacagacaatgatttctctgagaaattattatggcaaaactgtctggactgctgacagtaaattccggtttgcatgttacttgtattccattgatggtgtgtctcctcccacccccttatctcccatgcactcactccattttcatcttcactatgaaaaacaataccaaaagtatctggaaattgatatatatatatccatatatatatatcatatatttgccatatatatatatatatatatatatatatatatatatatatatttgccctgtctttgatcctggggaacaaaagaaaaaagtcagaaagggaaaaaattacactcattgtcctaagaagacagaggtgggcagaatatgtggggaaaggaaaaagaaaacaagaccaccaaatgaaataatgaaggtacagcgcctcgctgtgccagacacagtaggcgctcaatcagtattagttcccaccattccccttttcttgtgttccttcttgttggtttcctgaagtcctatttgaagacagtggtttatttccccctctctatcccgtcaaattcaccttaaataacacccagctagatacaggcactaggtttgtgtaagatatgttgatacacacgaacaaagtttattttgactataatgtgtggactgactttcaacatttgcattttatctcacaaaggtgtatctattcaagtaaccttttttttttgtttgtttgtttcttttttgtttttttttttcttttggttgtttgtttcaattcatgtagctatttaaactgggataccttggactaagccagtctgtatcccaattcgctagcaagcctaagtttgtggggttttgtttttgtttttgttttaccttctaatttacaagaaagaggaaaagctcttctaactgaactttggtatgcggttgagctttgtaactatttgttctccatgaaaacaaaattatttatatttgacatatttttttctagtgtattaagttattttaaacaaaagatgttatctcatgacgtgttgtcagtacaaaatgtgtcgcctccaattctgttaaaccttttaaataagtgccaagttattaattgaagacactttgcgatcaattgaatgaaaatatcgtttcatttg

SEQ ID NO: 12182 - DNA, 229 bp, Homo sapiens
acaaaaaccctaacactggaagtgtaaacatgtctattgatgtgtatgccaatttcactggcatctagcttatgaggccaaataatcccaaagtgtcactttatataaatgtcttgattacagtatagaactttatagagtccataatacaaagtatcactacataaaaatgtctttaaaacagtaatagtggtatgtatatccaaaataaaaagcttcaatttcagcc

SEQ ID NO: 12183 - DNA, 568 bp, Homo sapiens
aaagaaaaaatgatctttttccgacttctaaacaagtgactatactagcataaatcattcttctagtaaaacagctaaggtatagacattctaataatttgggaaaacctatgattacaagtaaaaactcagaaatgcaaagatgttggttttttgtttctcagtctgctttagcttttaactctggaagcgcatgcacactgaactctgctcagtgctaaacagtcaccagcaggttcctcagggtttcagccctaaaatgtaaaacctggataatcagtgtatgttgcaccagaatcagcattttttttttaactgcaaaaaatgatggtctcatctctgaatttatatttctcattcttttgaacatactatagctaatatattttatgttgctaaattgcttctatctagcatgttaaacaaagataatatactttcgatgaaagtaaattataggaaaaaaattaactgttttaaaaagaacttgattatgttttatgatttcaggcaagtattcatttttaacttgctacctacttttaaataaatgtttacatttctaaat

SEQ ID NO: 12184 - DNA, 123 bp, Homo sapiens
aaattaacttgtgccacaagagttacaatcaaagtggtctccttagactgaattcatgcgaacttctaatttcatatcaagagttgtaatcacatttatttcaataaatatgtgagttcctgc

SEQ ID NO: 12185 - DNA, 1525 bp, Homo sapiens
atgccatgcgtatctttaagaaattttatcttttgaaacacgttctgattaaccaagggtaagcatgttttggttgctaaagaaaaaagcataatctttaaccgagtataagtacttgctgtgtatttagtgtaaaagtacatgcagaaagatgaaacacaaagtaattgatgtatttctatcttttatattttttagtccaataattagcaaaatattactatgtacttaagagatacctgtgtagtgtcgattatatgtcagttttttgcccattacttcatccctaaatcttcagcatgaacaaatattaatgtcgataataaaacattggactctttgaaatgtatgttaccattaatttctatttgacctctaaattgtaaaatgcctccaaaagtttatttatagaacaaaaatacatgaggatggatttgtacaaatgtataaaatgccactatttatacaccaagttcatagcagcattactggaatagcaaaagatggaaacagctcaagtgtctatcatgaatggataaacaaatgtgctataatacatacaatggaatattatttagctttaaaaaggaatgaaattctgataaatactacctcaggataaaccttgaaaacactatgctaagtgaaataagccagacacaaaaggccaaatatgatgccacttttatgaggtaccagcataggcaagttcacagaaacagaaaggagaatagtggttgccagggactgcagggaggaggaaatggggggtggggttattgtttaacgagtacatagtttctgtttgggatgaacaaattctggaaatggatagcgatgatggttgctcaacattttgaatgttaatgccactaaattgtacccataaaaatggttaaaatggtaaattttgttatgtatattttatcataatttaaaaaatatatctagaatgggcaagaaggattctcctcattcctctcttgacttgagaatgatcagtcaataggccctgaagtctgaatttgtgaaaatttccttgggtgacaaacttgtttgattactctatttagtgtatcccaaagttattaccacataatcttttaaacaataaaacaaataccccttagaaagtcttctgcaaacccatttctgaaaatggtacattatagggtgggtatagatgcatagatatgggattatgtatgatatatatatatatacacacacacacaaagggatagagagattacctctcttaacccccattttaattactatgtctaggttttttaaataaaaatcttttctttttaacatgtttcttttcttttccggaatattggaatattctgttcttgatccagatgaaatctgattgagcagtgtacttacaagttgtactgtgtatgtgtttcctatattgttatatttcaataagaagcttaaaatgtttaaaaataaatggttaaaaggttttatgttatgtatattttaccacaataaatgcaaaaaataaaaagtc

SEQ ID NO: 12186 - DNA, 2468 bp, Homo sapiens
aaatgtcaacctgaattgtttaaatgggcttattctgtacattgctaaacaaaaaatggggtagcatggataaagagcaaactaagctttattagtgctgcaactaatataaacaaatgtttatatttgttgcttcttttggttagcaatgatatgtcaaagttatatctgaaatagtcaaatctttgggaaacagaatctagtaacaatttgaaaagtaatacactatcccatttttattggctttatgatggttgacataatgttgctgtgacatttaaacattcttgtaccaatattgtcttttaccattattatatactgcagttaattggctttacagttctttatatatatagcaaaatcctgaaagaacatatacctttattttgatgtggcttgaagcttttgaatgggtgaataaggatgatagaaaggtttcaaaatcaagcaacaaagtcttaaagtgataaggcatggcttaaagatcttttgatcaaacatacctgtgtttgagatagatttaagagccctaaatgcttatcaccattcactccaaataaaactattgcttttggataactgttagagtaaagtggctttttaaaagaaatttttgagactgggtctcaccttgttgcccaggctggagtgtagttgtctggtcatgactcactgcagtttcgaccacccaggctcaatcgatcctcccgcctctgcctctggagcagctgggacaaggcacacacccccatgcctggctaattaaaaaaattgttttttgtagaaacgaggttttgccatattgcccaggttggtctcaaacttctgggctcaagagatctgcccaccttggcctcccaaagtgctgggattacagacgttagccacactgtgcctgggggccagcattttctaatacttgtcatattctatagtttgtgcaaatttaagattgtttttttttctgctcgtcagtcaaatcagttcttggattaaaaactcattcttattagaacagaatcatgttggtaacttggtctgcaacaggttttgatggcatcatgtggactttattcatcttaactcatttaaattttctaccacattcccttaagctaatgcaaaagtaccaacaacttaatcttttttttttttttttttttttttttttgagacggagtcttgctctgtcgcccaggctggagtgcagtggcgtgatctcggctcattgcaagccccgcctcccgggttcacaccattctcctgcctcagcctcccgagtagctgggactacaggcatctgctaccacgcccagctaattttctgtatttttagtagagatggggtttcactgtgttagccaggatggtctctatctcctgacctcatgatccactcgcctcagcctcccaaaatgctgggattataggcgtgagccgccacgcccggcccaacaacttaatcttttattagctttgcttaagagggccaattaaatcaaagccctttagttccctttaacagggactggagttatgatgcatgtgttacgacttttggcccactgtccatgcaactctaagtgcaggttgatttgctttccagaaatcccaaaggggctgctcttggatcaccgaagagccttacctatatcaaatcaaaaagacattctgggtcagattagactatgctcctggccctacagattgcacataaactatcataaatacagctttttcagggaactagttctaaaactcttacctgctgagaataagtcttaacactaagatgactgtattatatcaatttattattagaatcagacttatacctagcacaattaactattgtgtgggcaaagaacatttaaagggcatagtagaggtaaggagagacacatactcagctagagataaaaatactaagttgcactgattacttaaaatactagtcacaccataaaagtgccctgtagtttcaaaaacacgtaagcaatgaaatgttagccattatgtgttaaactacttaatctcatttctgtgatgtgaatatttttaaccccctttttgtagatgagggaactgacaagtgacttgtccaaggccatatagctgtgagaaaacccatgcattctcttttcagagttcatgctatcactcaactttaaagtaggccaagattaatgttggtaagggtttgtaatctgtaagaatgctaaaaacgtaagtatatatatcattttagatttgacattttgtatcttgccagtttttaggagaacttttcattttgttaagtatgcatgaatatagttgagtatatgagtaactggttcttatgctgctgttttgtatttttaccagcaggaagattgcaaaagttgatgtatgtaaatcttgaaatatttctaagttttatgtataacaaaatatgtattttaataaacttcttttgatatttt

SEQ ID NO: 12187 - DNA, 1930 bp, Homo sapiens
aaagatgttgtggaagttaggtacaatgcagcactgagatatatatatatatatgtgtgtgtgtatatatatatatatatacatatatataaaaaggtttgatccatcaagcttggctcatgggatctgctgctgcattaaatcgggaaagaaaatgtgaagatttcatttggaatcacagaaaatgcccaaatgaggtcaagatggcgagtgggtgcgagtgagaatgagtggcaaaatgtaatgaaaactttacatgaatgcttatttaggttgttcaaagtaaaaagggctacaggtcacagatcgtcagtgcctgagaaagaacattgacttactctatatcaattgaggggaaagtgcagtaccgtcatcttcaagccttgtaagcataaaagagaataggctgcccatataagtcaaaggaaaatgagcccaggccttgctatgaagcagtgtgtgaatggacaatgttgaatgaatgtctggctcagtgatggagagccaggttcatctttgaaatctagggctcttcactcatgaagcagactcctagtcctggagtgactgtgtacgagagcgtggttgtggtgctgtatgtgaacgcatgcaagcttgattcaccttcagggggctgataacctagtaaatcatcaaaatgagatcataagtgttaatgtacactggacatgaaaacaaagactggtttagcagcagacattggtttactctgcagcctgtgttttctgtttccccctttcccacctccttccccccacccaatccttttttttttcttttttgcttttcttttctttttttttagtttttatttactttacctagtatgcctttttttagttgcttctcaagtcagaaaacttttcaggaaggtttccctgtgcatttgcaccagatgaatgtttgatgctatgaaaagctttccatatcatcaaaactaatttgtgtagatttttgcatgaaaaaaatcataaatttccctcaaaatagactgtgttgcagtacacaagttgccataatagtataaaacagtaaaatgtgcttaaaaggccatccttttcattttcagagataacataaagatctttgcatgaggtaaatctacagcatagttcatttttagattttgttgagtcctgtaaagaagaagaagaaaaaagtttcagttgtggtagaataccgtgctgtgtttaaatgttacttgttttcaaactttgttttctatgaaaatgatatggaaacttctaaaatggaatttggtgcatatgtactgctgaataaagaccgatgaagaggtttgagtagatgtacaaatcaagtaatggtttgaacacctttaataatatgcctaatctgttcaattgttttagaatctttttatcttagatgtaggcagccatgaacaatctattttgagccactttagggagaaaactttgtatttttaaaacttgcataaaagttatgcaagtggtttttataaattggaataatacctcagttttgaggttatgcacactaaattaaatgtgacataaattaatttgtacaaaaagaactctttataaggtggctcattgtaggaaatcctgtgccttcccctttgagcacaagtgttgcatgaacaacagtttgctataagaaacataccagattagccaccattagcatctatatctactttgtgtttaaaaatcaactggtaattctgaaacactgtagaatggataaaaattattttgtgatcataactctttgttgaactagagtatttttgcagcattccttgtcatcagaaacatggttaaagtttaaaactagaagcagcagaaaactagcttgtaaaatttatccaagtagagtgcaggctaggctgtcttggggaaataaacattaaaacttaaagcaa

SEQ ID NO: 12188 - DNA, 1874 bp, Homo sapiens
cttcacattctacaaaaagcctagaaggacaggatactttgtggaaagtgttaaataaagtaggtactgtggaaaattcatggggaggtcagtgtgctggcttacactgaactgaaactcatgaaaaacccagactggagactggagggttacacttgtgatttattagtcaggcccttcaaagatgatatgtggaggaattaaatataaaggaattggaggtttttgctaaagaaattaataggaccaaacaatttggacatgtcattctgtagactagaatttcttaaaagggtgttactgagttataagctcactaggctgtaaaaacaaaacaatgtagagttttatttattgaacaatgtagtcacttgaaggttttgtgtatatcttatgtggattaccaatttaaaaatatatgtagttctgtgtcaaaaaacttcttcactgaagttatactgaacaaaattttacctgtttttggtcatttataaagtacttcaagatgttgcagtatttcacagttattattatttaaaattacttcaactttgtgtttttaaatgttttgacgatttcaatacaagataaaaaggatagtgaatcattctttacatgcaaacattttccagttacttaactgatcagtttattattgatacatcactccattaatgtaaagtcataggtcattattgcatatcagtaatctcttggactttgttaaatattttactgtggtaatatagagaagaattaaagcaagaaaatctgaagtattgtcttgtttttaaaaaatacagttcctagtgtttttagaagtcacttaatttgtctcatttttccacctggaaattaggaataatgtagaatgcaaggcagtaatttccttttggaaaggactctgaaggcagaaaagaagggagagaacctcatgggcagaatattataaaaagagtgtcatattccagcatttgaattggaaagagaagagtgaagatccaagttgcattattaatctgccctgtgttttttccttttaacaatcagtttgagctgctgctgttatgagtttctcatcaagatgaaagccctaatatgtaaagtcaaatccgatttaaattttgtgcttttatagaaagaaatttcttcatagacgtggtgatatatcatttgttggacctgctaatagtaggtcaaaggggagcactccttgccccctgttcctgggtttatgcagttttctttttagagtttatatagggcaagtggttctttttctctgaattacaggatggaaaaaggtcatatcctttgtcaggaaatataaacttgaaagtatgtagtcagctcttgtaatactcatatttatgattgtcctatatgaaaaacaacttcagttaaaactataatgtgtgattctgtataacaaggtgatgtctgtttcccagggctcagacctaatccagttataataaaatcaattaaatgaaatattctatagaatcgatctatgcccttgttaatctccatccatataggagtcacgttctttaagacagatggtggtagttatttttgtggcatggttagatttgactggttttgcagaagattacagttatgtactgcataatgacatatacaatagtggtcccataaaattataatggagcagaaaatctattgcctcatgatgttttagccgttttaatgtcatagcctagtgcattactcacgtgtctgtggagatgctggtgtaaacaaacctactacactgccagttgtataaaagtacagcacattcagttatgtacagtatgtaatactgataatgacaataaatgacaccggtttgtgtatttactttttat

SEQ ID NO: 12189 - DNA, 463 bp, Homo sapiens
agatcaccatcaattttagttgtcaatgggaaaaaacaccaggatttaagtttcacagcacttacaattttccctcttcacttggttcttgtactctacaaaatatagctttcataacatcgaaaagttattttgtagcgtacatcaatgataatgctaattttattatagtaatgtgacttggattcaattttaaggcatatttaacaaaatttgaatagccctatttatccttgttaagtatcagctacaattgtaaactagttactaaacatgtatgtaaatagctaagatataatttaaacgtgatttttaaattaaataaaatttttatgtaattatatatactatatttttctcaatgtttagcagatttaagatatgtaacaacaattatttgaagatttaattacttcttagtatgtgcatttaattagaaaaagagaataaaaaatgtaagtgt

SEQ ID NO: 12190 - DNA, 1167 bp, Homo sapiens
cagagagaagaaaatatattagtgctttttttttttcaaaagaaaaggaaaataaaagaaatatatcccttgctccctttacacttgtcccagtaactccatcctcacgatctttcctaccctgaacaaaactaaaaccgcatgataactagagaatacagatgtatgctctcccctctcagatgcgatttggaggaagggccatactcagatcattaatcaatgaaagtgccttcgcagacttttgccagcaaatgttatcattatttttttatactgaaacttgagactttgactgtgccatgtataagatatactggggatcattgtatggatcctaattaagtaaaattcaatgtgtctttttattttcagtaactattttttttatagttgtagttttgatttaaagggggggaaacaagttgacatttgtcatttgtggctttctttcttatcatcatggcacagattctgtacatgtattaacaatgcagtttgctgcatgcctggaaactgcaagatggggagggagggggcgggtcttgctcgaatgttctcactcactatcttgtctctcatacacatatccatctgcagaccatggtccctaaacctgcagtttcttcctgctggtgcaggtacacacacacacacacacacacacacacacacacacacacactccataccatttccattcaactcaatctgcttagttcgggtttgatccatttttctcctctccatagttctaccacccttcactgctagtgtacagctcacagcatctctcctaccaccctgggaaaagtcacattctaggctggattctactgaagtagaggcctggtggtttaacagccgaagacacacgcctagggatgagcaccctctttgtgacacttcatcctgatgccaagattttttggagaacatctgcactttcttatatatatatataatattaaaaaaagcaactgggtatatatcactaacagctttgtaggaagcacttttaatgttttctctctcacacacaaagattcaaaagaaatgtgcatatatttattctgtaatttcagtgattataaattgtaaaggtaatgtttaatcattgtatagtgattatgcctctggtatagctttcctaataaaaagtttttg

SEQ ID NO: 12191 - DNA, 478 bp, Homo sapiens
ttaatagatttaccctttatagaacatattttcctttagatcaaggcaaaaatatcaggagcttttttacacacctactaaaaaagttattatgtagctgaaacaaaaatgccagaaggataatattgattcctcacatctttaacttagtattttacctagcatttcaaaacccaaatggctagaacgtgtttaattaaatttcacaatataaagttctacagttaattatgtgcatattaaaacaatggcctggttcaatttctttctttccttaataaatttaagtttttccccccaaaattatcagtgctctgcttttagtcacgtgtattttcattaccactcgtaaaaaggtatcttttttaaatgaattaaatattgaaacactgtacaccatagtttacaatattatgtttcctaattaaaataagaattgaatgtcaatatgagatattaaaataagcacagaaaatca

SEQ ID NO: 12192 - DNA, 501 bp, Homo sapiens
agattatttgttcattactgtttccattttgtacccagagtaaagcaaacaactgagaaaagtaaccaagtgattacctatccaagtgctggagattttgattactaatgtctttgatgtttcaaggctacaaactaataaaagtaaaattataagttcaagggcttattcttccaatgatatattatatgtcaaccactaatctatattgcagattatgttagtaaaatatggtgaatttgaagaaataactgttacaactgtgtctataaaacctactatagggcagaacatgattatacttaaagaaatatttcatcgtccaattatattttaaataattatgtcatcaacaagagtgtgcatttgacagccaagtcacactagttagtatcatcaattgaacctataattacactgtttattttctggtttttaacatttatagaagttctggtatcttcaaaaatttgcaataaaagaaaaaaagaggaccaaaaa

SEQ ID NO: 12193 - DNA, 174 bp, Homo sapiens
atgaaaagcacagcctcagaataaaagatgatttctcaaaaatagctgattggcaaaatatcgtcatcttgacaatatttgctctatatcttatgtcttttctgttttaaactgtgcctgtagtaatagatatctgtcttgatgaataagtaaaattaggtatgcatttgtttc

SEQ ID NO: 12194 - DNA, 194 bp, Homo sapiens
ttacaacagaaaaaccttcactgttacataaggtacagatataaaatgcagaaaaagcatcaagaattctgccttttattttattttatatttaaacttcaggaagttttctcttcatgggataatttagtactgcttttatctatcatctgtcaatttctctgtattcttaataaaataaatattgaactaaa

SEQ ID NO: 12195 - DNA, 399 bp, Homo sapiens
aagttgtatatgttaagagatgtacttctcagtggcagtattgaactgcctttatctgtaaattttaaagtttgactgtataaattatcagtccctcctgaagggatctaatccaggatgttgaatgggattattgccatcttacaccatatttttgtaaaatgtagcttaatcataatctcacactgaagattttgcatcacttttgctattatcattcttttaagaattataagccaaaagaatttacgccttaatgtgtcattatataacattccttaaaagaattgtaaatattggtgtttgtttctgacattttaacttgaaagcgatatgctgcaagataatgtatttaacaatatttggtggcaaatattcaataaatagtttacatctgtt

SEQ ID NO: 12196 - DNA, 403 bp, Homo sapiens
cggcacccaatttctagacaacgctcagccaacggattcttttcaagctgctcaaacataaatctgcctactgaactctaggatatttaattacaaaaattaagaacttagacttttttaaaacttttgtattagaaatgcgcatacatttatatgaatatattttgataacgtaggtctagagcttcttttatattcaagctaaacatgaaaaagaagaaaaacaataaagtaaacctgagcccccacgtcccaatttttttaatagattatgtgatgttggaaagctcattgattttgtatatgtttcagcgtgttacctttctggcttccagttcccaggtgttctttgtttgcctttgataaaatacaggatttaagaacagagagtactgcaaaatgc

SEQ ID NO: 12197 - DNA, 147 bp, Homo sapiens
cgttatcaaggttgaccagagtgggaccaagtccaacagtagcatggctctttcatataggactatttacaagactgctgagcagaatgccttataaacctgcagggtcactcatctaaagtctagtgaccttaaactgaatgattt

SEQ ID NO: 12198 - DNA, 523 bp, Homo sapiens
ctcggaaggacgcggaacggcgggcgaggcggaaggcagagctgtgttgccggcgcctggcgggcagaggcgggttcacctgggtggctggagccgccggcgctgcgctttatttcggagcgcaatgccatctaccggcgtcctgccgtacctgcaagtatccagaccttgaaagtcgctccgcctccccccacccgaagccaatataggggaaaaaactcggaggccctttccacgaaatcctaatttagccaggacctgccaatgattccagacgaccttttgttttcctaccgacgtttcctcgttttgaaagcagttttgtaaagggcaaggaggtgggggccgcagggttggggcgctgagctcccagaccccctgatcaggccgcactgtctgaagcaatcggttccccagattacttgtatttaatacacaatgcatcataaaacaaatccctcatcctgacaggaagaaaatagaacagctcatagctcgagccggtccaatttatggctaaatt

SEQ ID NO: 12199 - DNA, 507 bp, Homo sapiens
aatacagataaaatggttggaagaaaatgttttgagtatatgtgacagaaaactttggatattatatgtttctgggagaagagaaaatacttcacctattgggatgccaatatttctgttgtatttctataatgggtttgggggataataatggtgaagctcaagaacagatgtctattgagtagaaccaagttaaaataatgtttcccatagtgtttcttctataacttgacgttggtgagcttatatttcccttggaagagagcatttgtggtacaatatgctatgtgccaaatgagtgataagatttaagcttattgaagtttagggaaagaaggttgctgtggtgaggaacgagactccatagcagaggtatgccatcatggaaggggtggcattgggatggagcgcagatatccaggcaagcatactaaaatgaacaagttgctaaagatgagaatgaacaaagcatattcagggcatgtttaatagactgattttgttttt

SEQ ID NO: 12200 - DNA, 159 bp, Homo sapiens
aaaagtagctgtaaaataattttcatacacttgtcttattgtttcacagagattaatattctatagcctattttcttttataaattaaaacaagttacttttttcaaatgtgtaaaagataatgactgtattaaactttgtataactgtctattgtgaa

SEQ ID NO: 12201 - DNA, 739 bp, Homo sapiens
actgatttcccatgtcctactaagctacaaaccattctccaaaggaaaagaacatgaacgaattccagagtcatgaactgaatttcaacttctgggccatttaatgggacttatattacaagagctttgtaaatatatatatatattacatatatatatgtaatatacatatatacacatatatataatatacatatataatacacatatatatgtaaatatatatataatatctaatatgagcatgccattattctctgtctatgaaacaaaaatggcatttttcaatggatttgttttggatatataattagttcatttgctgtttagaagccttgccaaaagtgtttagattttggtactgcaactgctttcctcttgcccagaaatgttttgcctcttcttttcctacaagttaaatgttctaaatataaaggggtatgtgtgtgtgtgtgtaattctaatgtgaaaggcactagctgtctaatagtttcatgtatcattactattactatatgtatcttaatgtagtctatgtaggtttttatcagaaagtgtacctttctatggtttattattttatattctggtgccttttatctcagatataaaccatgaacagtaatgatagtcactgacatataaatcttagtaaaaagtgattaaaaatctaaaactcagtatgaaaaacatatcttgttagaataaattaaaaccttttattgtttaaaaaattgtt

SEQ ID NO: 12202 - DNA, 9650 bp, Homo sapiens
caggaacatgaagccttgataaaacagcagttttacttttctcacaaaaacttgtaaggtaaaggcctaacttggtctagaatatgacacttattgtggtggatagccaagcacattgggatctccacatcaaatactgacatttcttctacaggtataataattcatcatgcattttcataattaataaacattggtaaaattaattttacaggttacatgaaacattgaaagacttgttacagagggccatgatatttttcaaagaaatgtgttatactagataatttttttaaaggtgatgtttatcattaatataaagaatccttttaaaagtaatttaatgatttacatttctcctcttttgattcaattttcttatacattttttctaccctattagttttctaaaggttgtcatgagaggtatattatggaataatttagtagtccagtgacagaatcgtatgaaatcagtgtacattttaaaaaacatgtcttttagacatatgctttatctataaaaaaggaattgtgttctagtatgaacaatactgatctggaagtgagaagagttagtttctattccaaacttgaccaagaatttggtttgactgagaacgttttcctctcagtttttgtacatttatttagagcagtggttctcagtggaggtcagttttgatcgccaggggacatctggcaatgttgagacattttggttgtcacagcttgggggtgggttcaggggagggttgctactggtgtctagtagttagaagccagagatgtttctaaacatcttataatgcacaggacagcacccctccactgtaaagaattattggttcaaaaatatcggtactgccaaggttgagaaactctgatatagaaggagtgataaatattgttttcacccaaaggaatacttttaaaggatgaagcttactaaacatatatgatggaagtattattcagataacattaatattctgctgaataattttttctagtttaatcatactagaaaaagaaaaaaaatctacaaattgtcctataaaataaggacaaacatgcaaataatttaactctcagaaagtactaattcattctgattatctttcatacctctgtgctcctctgcactgacgaagacataatatgattatacctatgaactagtgcacagccttttctggcaagaaaatagtttgtagcagatacgtggttgctctttggatttttttctattgttgaacatgctgggactagctagaatgcacattcctacttcctttaccaaacgtttgcatgcttcctgcaaagcacttaccaagtgatttctcttgaaccatcggatataattttgtatgtacatgtttgaggaaaaaaatgtaaagcaaaaccttttactgaacagtgttctatagaattatgacactaaaacaaaattgtttgtggaagccctgaaagctttatagtcctggacatcaaaaattttatttgagatgatgaatgttttgttttcatcttttcttatattaccacaattgagatattttagtaattgaaggaacatacacagatatttggcagaagtcgagtaaggaggggaaaaaaagagtccgtgagtttcagtcattttcactgctcttttcaaaaagattgtgttgagctggtagaagactaaagatgtcactgaagacatcacagatactatatttatcttttggctttgtgtacattagagaatgttgattatttttatacaaaaatacagcgggtaatttttttaatctttagatgcctcttgtttgaatgtatgctttgtggaattctttgtgtagtaatgttttaaaaaaagatgtttactgatagttacatgtaggattagaatatgtaatataatataaggctcatgttccagacctacgatagcttgtagtctatgttacgtatttctttatatcacatttttaatcattggattaaagtatcaaggaaagctaggtactctataatgagttttcatttattagcagttaatcatcatgacagaattgtcatatgcttgacttttccctcttcttggaatttcagaacacaaatacaggctaagcattagtaagagatggcccacagtatgagagagagaggtgcaacggaaaatctcgcctggaattaaaacttttcatagattatccacggttaatacaaaatttattatatggggatagactgctccagcaataatgattacatcctataactgtattacctatggcctttaaggtatcaattttgaactgtgttgtaggctctccttttatttgttctctttcctaatagcagccattctgtacttattgaaagcccctgtgcctactgctgtcttaagtattcaggaggggcttacaagagggttttctattggagaataccgtataatcttaaatctagtccagatctctgttgtccccactcaaaacatacacaaaatatgcacttgcttttttcaagtgagtttttatttaaaaatggcttgtttgctatcacattggtgcagctgtttctttcaagatgagttaatcatcttaatttcaaagcttcagctatatataatggatatatagacaacactgagcatccacctctctcctgagctttaaagcagagtttcagtatgatataggtggggagagtaaattgttttcatatcctttcatactactactaatagttttaggattttgactggggagagataatgacaaacagaaagggaacatggaggttcttcctacttttgctacctaagtttgcattttctgacttccttgcagtgttgcactctttgtcccattgggataaaaagcataagtttgaaattttgctttaagccttgtgttcctggggaagttaaacaactaagagagctgatttgtaaaaattattttttatatgacattaatattcatcaagccttgtgtaggcatgtgtaagacacagctatgcagctttgagtagtcaatatagtatgagatagagtgttgtcccaaatcctcctgtcactttttaagtagcatattatttccctgatggtcctgttactttgctgttgaatgctctaaacagaactttttaaaaggtgtgttttaagagcagtcacctaggagtagacaaggtggaatgggaggagagaaatggtaatgcaaaagcttgagcatgggaagagtcagaggaggaggccatcatccttgttagcttagcctacttcaacactgagcacatttctgcacttttgaagtgaaattcatgttttacttagaagaaataattttctttcattagggatcccagttgatttttgtttcctggtgtatcaaaatacttagaactatgaaacaagtattattgtgatcatgcctttgaataatttttgacgtagcttatcttcatgtatcaagtataaaattataatgagacatctattcacaaatacaagtcttagattgaattgaaatgtgttatagtgccctgtctcccactgacttgttcagttaaatgtcttaaagtacattatgtacatcttcaggcttttggtaccacaatggcacaagtatggtagggaggcaatatagtcttaggctatatgcctatattaagtgtgtataaacaatttttgaaagaatacactattatagatgtatgtgagtgatgctgacctgacagccatatccagtggatgaaactgactggacacactgttaaaatgttttaaagatgtattttcagccagaacagcctggttatagtttgtggttttcaccttggtggattgcaggaacacatgcagcctactggcattgagcattagctaatggcatgaaagggcctcatctcactacctctctaaggcctctagctccaagaaaaccatgaaaacttctttcttggagagatctttgtctcagaatccttagagaggatttcgtatgggggctaactttaggaagggaggcagctggggcaggactttctgatacctgacagtcatgttccagagcaacctttgggcagtggaaactggcgcatctatgcaaaatgattgctcaatctctatcttgtgtactacatatgtaactagctgggccctaaggaaggttttctagggggaaggatagggaagtagaggaggagacaagtaggaggaacaaagcattctagacccaagaggatagaagatatttaggatagatatggctttcatccatagttcaaaataatgcgttttgttagatgccagttatagcagtaaataggttatagtttttatatgtcaagatttacctgtaatcagactcattctttcactctctatacccactgtctccatgcttgggagcatggatattaatagttccagtgatgtagaagttagtgatttttgatttctgaaaaaggtgagaaccttttattacagttggagaatatttgtcaaaaattcaaaggttgttgtaattgagttgccagaattacagagtttccattttcagatatcacagttgaatcacctctgtagattgttataaagagaggcattttaagatagtattttatttgctaggttgtgtctcagtctaagaattgggaaaagaagagctataggtttctctttcctagtctggatttcagtaaacacaagcctacctctgcttctttggttcacagcagtgtggatcatgaaatgaactgtttacccacattcatcaatattggtattttacaaatctacttggagcatttaatttcatctcaaagattgtgatccactttagataagcacaaatacagtattaggaaaagtaaatatgcaatcttactaaaatttcaacttgttaagctgtatatcttaaaagaaattatttggggctgggcatggtggctcacacctgtaatcccagcactttgggaggctgaggtgggtagatcacctgaggtcaggagttcgagaccagcctgaccaatatggtgaaaccctatctctactaaaaacacaaaaattagctgggtgtggtggcatgcacctgtaattccagctacttgggaggctgagacaggagaattgcttgaacccaggtggtggaggttgcagtgagccaagatcacacccctgcactccagcctgggtgacagagcgagactccatctcaaaaaaacaaaacaaaaaattatttgggaagatacgtcctcttttattagaagttcataaaatgtatcatatagttttgttcacagtagttatataagctttcttcaaataaatttaaaattagattaccttctttggaaaaagaatttcctaaatttttaagaattttcaaagttttacatattagtttttagaacctaatccgttttaaaattgtactatgagaaagcttttttttgaaagttgtaaagcattaatacaaataatacaaatataattattaccatcacattccagagaatatggctttttctaaactttcaatttagaaaacatacattaagggagaatctctgccctccttttcagctctgaagatcagcttttctactcagacacatgcacacaccccttccaagtgtcatgtttatgggaacatttgggaaatgttttccagatgttttattttttcccttttatagtttgttgacatttaattttacttaaagatgacaattttaatcggaaatgttagaggtacaacatagtgaggttctagctagctttatacttttgaaaaatatttttgtttctactgctttttacaagtactagtcctctcagtgatactggtggtgttcagtatgaatccatagaaagaaaacaaaatttgttgtttaaaaaaagcagagtaatgaatgaatttcagttttgaaaacaacataatttgaaaacactgttatactaacatggcaaggtgttaattaaatataagagtaaggtagtaagttcttttagagcacctgtttaaatttactccagtaatcatcttaaggattgatagtcaccatcacttattggcttaaaagttatatttcatggaatattatcagtgttaaatccaagctttgtggagctttaagtgatggtggtgaaaaagttggtgtttatgagagagtggtggggtgtctagtcattagtgaagttaaacatcaacctgttttagaaagaattttttagtcttgcctaaagtaaaccagaagtgtctagtgtttaaatctttatttagaatgcttctcttaaaagtattttttgttttgggtagtattaaataatcagtaaataatctatttcagtagtaaataatgaattaagatgatgatgaatgaggattaacacactggtctggagactggggttttatttcagtgggttagctgtgtgtgacatgttgggcaattactcagctgttttaacagcttccagatatgcagtatggtgcctgtactactcaaaagttgattttggtttaattcatctttaaggtacctcccagctctaaaactatgattctaggctgtgtaatggggttattcctactttattctctttccttttttaagggttcattttatacttaataagcatccatttcttgggtcacctacagtctttgttctcctaaggattaaaatagaaaattcatacataacaagcaaatgatgacattttcctaaatgctccttattggttaaccactgaatatatgaacacatatgaatattgtcattcatgtacttaaattcatttagcaaactatttgaacacttacatgtgcagtgtttggtgaacatgacatgaggaactagtagtaagtaaaatcttccccccaaaattcattgtggcttaaataaatatgaacataatcattactacttaatatactgagagggaatcttaataaacttggaactgggagggaatatttgtatacattgggtaaagggttaggctagatgacatctaaggggtctgagtgaatcatatcataatttttataacacatttcacatactaaacatcagttggccccatacctgattaagttacaaaatttaggagacttaacattaaggacttacaggttgagacagcccgtatttcacaacattattttgacacttgactctattccagagttgttgctatacaaggcatgtggcagaacaaaaaaaaagctggtgttgatataagagctttttacccagtattgacagtgagcaactttctttctttttttttttttttcttttttttttttttgagatgggttcgctctgttgcccaggctggtgtgcagtggtgcgatctcagctcactgcaacctccacctcccgggttgaagcgattgtcttgcctcagccttccaagtagctggaattacaggtgcccgccgccacacctggctaatttttgtatttttagtagagacggggcttcaccatgttggccaggctagtctcgaactcttgacctcaagtgatccacctgccttggcctccctaagtgctgggattacaggcatgagccaccacacctgtccgacagtgtagcaactttctaaaactgaaaaatctcaaaggagatcattggaactgacttgttcatttattttttgtttttaaattaagaaagattacacaaaataagtgttactgtactttaagctattacaaatatccaacttttaaagatatgtaagaatcagtaatattctagaaagcacatatatagtaaaagggcatcctttaaatgtagaacgggtaaacatgaaacagttccatgcttgaattgttaagtatctagggggtaaacattgaatgggagaatcatttattgggttaaggtcccttccttgtcattctgggatctgtgaatcacattgtaattcctgttgacaaagctttacttgttaacatcagttgatactgacattctccataaagatatagaatgaaaatatctattaaaaatagtttatcattgttttagcttttttgttttgtttgttttgagacagagtctcactgtcacccaggcttgagtgcagcggtgtgatcttggctcaatgcaacctccacctcccaggttcaatagattctcccaccttggcctcccaagtagctgggattactggcatgcaccactatgcctggccagttttttgtatttttagtagagatggggtttcaccatgttggccaggctggactcgaactcctgacctcaagtgatccgcccacctcagcctcccaaagtgccgggattataggcatgagccactgcgcctagcctgttgcagctttttaaagcaggaaaatatccatataaactgttgggttagaatctatattagaatctttcaaactaattgaaaacaggaagactatcatctaagtagccagataatctgggtttcaaaaagttattccatggtactggtttaaaaaatacttttcaagtgttttaatttttaaagtgtaactaattcttcaaatatgttatgctgttaaaatatgtattccataagtactttttgtatatgtattcttaaattttaaaaagtcaactgaatgcgcaaagatgatataattttggatgtagacatttaaactagattcccagtcctctccttcaaaagcttggtctttgtttttcctatagggaaaaaagtcaaaataagttccaaaaactatcctcaaagtagtattgtgcttgtagtaaatgaaggttggatggatggatactgacaatggtggcaggcatttcaagccttttaaattagtactttttgtcgtcttgcttattaaaattttgttaattttagcaaagaccaattgttgtgataaactggtgttttttggatgcttcaagcacacgttaaccaattttttaattccccttttggttcctcccattgttctaaaataggactttcatattattaaaacctcaaaagatgatccacccaggatgaacaaagatcaccaaggggaaagaaaacattttttatctttacagaaaacatgttaagattatatatagatgtattctttacattggatattgtattagagtcctccttacaagaaatgaaatagtttttagcactcttagcattagagttcctagattggtgttgatagctacagttttaaaatgtataacctgaaaatgaaggttaattttgcattgtaagagcacatttgatctatgtaaaaagtgtccatttggtgtatttttttaaaaaagagaaagcactttcatattaagtagcatgtgtatgaatttagattttcatatttgttgtgtctgtattcagtgaagtaaattgagcatttaaatgtttgttgatggcaacattaactattaaattaaagcaccttatactctgctgcttaacttgcttgtaattgcacctttgttacctgcacattttcatatagaatattgttgtaacattgcttcatgtgggtctggatggaagattagtgggcctacaggatcatttatttatattgtttatattacaataatatattgtagatcagttgtaagttcatttctttacaaataaaagcctcttccatttgactgg

SEQ ID NO: 12203 - DNA, 282 bp, Homo sapiens
gagaaacacacaagtgggtagaaatggtgatgactgattttcagtaacttaacctgtgggctagaaggtgaaaacttttttggctctcatttcacaaatccagccttccccaaattcaatccctagtcatagcctgtcatttgctacttttgctcttcaggatagttctgttgaagggcttaacctgggtcccctaactggtcgccttgttaaataaaataaataaataaacaagaggctatatgaaattccatcttaggtgcaaccaccagagctgatggt

SEQ ID NO: 12204 - DNA, 4944 bp, Homo sapiens
acggaaacatcaggcatgaacactgtttatgtctgaatcaactgcagatctaatttggttctaagttgtcaccaaagctatagccttcataagcaacctcatttctttttttaattgttttcagattgtgctgggttagttttgcaagcaattgataatttttaaaaaattatcaatatgtataattttttttgaattttgtagatatgtttcctataatattcctgtggttttcagtatgtcagtccaagaaacaaacaagatagcttcagcagatgtgatttgtctgagcaaatcattcctgtgttttagttagatgataaaccagggttttaaatcaaacaatgtagcataaagtggtattgaagtaccatatttaagttgaactgctctgcattaattacagatttaatataaaatgaactgattatatattggaattgttgcactttcagcctgtgtagggcaaacacaaatccttaaacaaaaatcatgttatcaaaaactgtcagttattttggtggccacatgcaaccatgtgattactttggtcatactatttaccaaattgttggcaaacttgatgtaaccttatatggtggttttagtcccttcttatggttggcagaagggcactgaactgttgggtgaaagttagttagcaagtaagattataaggaagacacaaaagacagtggcaaagagggttgattaaatctataagtttttatgtgaggactttgtaagtcagcataaaaatgaaaagttgtttctcagttgtttttgcttttaactttgcccccaacgtttaaagggagtgatctgctttacatgatactatgcaatgcttgttttccaactatgttgaataaatagtaatatttatcagtaaatactcctttccaacttccttttttttttttttttttttgagactgagtctcactccatcagccaggctggagtgcagtggtgcaatctcggctcactgcaacctctgcctcccgagttcaagcaattctcctgcctcagcctcccaagtagctgggactacaggtgcatgccaccacgcccagctacttttttgtgtattttagtagagatggggtttcaccatgttgtctaggctggtcttgaactcctgacctcaggtgatccacctgcctcagcctcccaaagtgctgggattacaggcatgagccaccacacccagcccctttccaaccatttctaagtagattttttgacattaatgtatttattaaacaaaaactgagaattccttaaattgatttggaatttttgttaattttatgtcctttttttcctaaagtgaattaaagtgaatcatggaagcagcattactttatatgaatattattatttaagttaagttattttaagtatatgcattttttctgattgttgtgtgacttaattcagttgctggtgtgaactataactagcaaataattctataaactgaattattttaaaaggtattttaggtgacaccactgcatttctatttcatcttttgagtcatatgtatattatttccagaattttagacattattacagggtttgtgaggacctttgactcagtgacaatcatcatattggagcaaaacatagaacaaaatcactatctcagaaataccttaattctctaagactggctcttagacctctcccatcatgccttgacctctaaaaagccctttgttcctatcttctaaaggaaagtatatcatatatgatgatgtaactgatctaatcagtgactggaaatagcattagtaacagaagatcccaagttttagttgcttaatttgtacacacttttaaatattgtcttagcctcggcaaaccaatttggggaagaagcaagatactttaagagaaatacaaaggaaatttctaaagcacaagaaatagtgaggtagtagttagtcgtctttcctacaacattttagcttttgcccatctaaagcacaattaaaattaggctacattctttccagtattctatttaagtacctactacatactgctctagtttcttagtactctgtaatgtgtatcttaattgctactggttggcattgtaactcataggaattccagaaaattattaatccgtgctgcttgcagttcattcatatggcccctcttaaccatgctggtgttatgattcagtattaactctcaattagcatgcccctgttcttcctaacttgtaaaatttcacataaatatattttcaattgtgtacaaattaagggtgtacaaattataataatgcatctctatcttcatactttgaatggcaaacgctatttatgcataaatattttcattttaagtaatatatgaagtgtaaatactcgatatataagtatagattttaaagatatgggactttattttcacataagtcaatagatgtttctctagaacaaaatatttagtaaagctttataaattatattaaaaggaagcggggaacatgtattttttaacatagaacagaagtgacttcattctttttagacatcagaaatgttaaagttgattcccaatatttgttgtacttttttgtagcaaatgttaaaaatcacgagttaccatgtatagaatgtggactgtcatgttgatatcattgtacagtgataagccatttttatctgtatacatttcaccaatttattaacaggttgaatatttgtttctttttagaacattttatttatactgtgaagactttgttataccttatttgctacaacatagatcatatcattgctactttgacttagcatttgcatcataaacataattatgatgtttttttcatgctcccttccaggggctcagtcacttgaagaaactgttgctaaccaagctcttgactctgtttcccttaatgatacaagtctctgtaccagcgctttatgttaattaccaaaactctcctgcatcagagcatgatatctataataggagatactgcaataaaatgattaggctgtaaaatttggagacacaatttttcattacaatgcaatttgcatgtgcacatgtgcgcacataactttatatgttagttcttttttccaaactcccaactcttaaaagtattgtagtctgttggtgcctcaactgttggtaactttttttttttaaatttacaactttccacaacttgtttttgtactttaaggtttctcaattagaatatttctagttgagctgtaatttgaatgcattgttctcagggctatttgtgctaaaagctgaaatttcattattttaaagctaattgcctgaaaatatattggcagaattttcccaaattgtaataactgtgatacatgcatataaaaaaatccttaatgtcaacacacttaaactacatgctaaatagtcaagaaaaaaatggaaacagtagcatccatactggaatcttgccatatttttttcattttagaatagattttggcagtctcatcttagaatcctatccttaggatacatctgaaagcattcctttggcatggaccccagagatagttttggagccaggcattgatgtagaggttcaccaaacatatttagggataatagataaattcataatgcttttttgggtacactgaaatgtttacatactgaattctgtaatatgaactaggaacgcatttactatgagaaaatatggctcttaagcagtgtaagagtgaaaatataagcatatttccattaacagtatattgtactgatcagcagctctcattttaacatcagttaggcataatatttcatagttttcaagccttttttttctgctaacattcagacaagtaacaggcaacaaagatttaagaaaaatttatggtggaaaaccttaaaaattgagacaattcaatctatttaatctattaaattttttctctgaattgggtatatggcatcattatttgattttagcagggaacatttggatttagcttatgaaacacagatgttctatgggaacatggcttgaagccaatatgtaatttaatgtttttccattaaacaaacatctgaacaccaacttagctaccaagtgaggtcaagtgcctgaaaagtactgtatacatctaataagcatgttttccttatgtaaaagatgcactttatggcaatgcataccaggctttcacctgctagaaacatacttgttgccaactttgccatctaccactattctcctccttagaacaggtagaaacctattttacaaaaaaaaaaaaaaaaaaaaaaagacaggttattgtatttatatgaagtccctaaaactgtttcttggtattgatagacttaagtttatcttagttcaagattgcactttttaaaaaactctggactattttcagcaatgaccgaacagcttgtcacacatcatagttgtgatcttttttgaggagttatttattgtggttaatatctactataaataagcattcttgtgcttgttacaaagcataatgcaaattactagttctatactagtataatgaaaatgactagttctatactgttatgtacttttgtcttcctccccaaaaaggaaacagtttagcattgtctaaattcagtggcacttttttagtaatacatttttttttcttagatacaggagaactattgcttttacctgcagaaactcaaatgttttcgctaaaactttaaaattctaaaatacgtagtatgggtattactaattgtacattttacatttcaaaaatagttaaaattcaaatgttaagtctttgacttaaaaaacctttaaatatagataataccttaacaattataactttgtgatattattaaaatatatttgtctgttaacttcatcagttgtattaaataaaaatagttaacagcttgcact

SEQ ID NO: 12205 - DNA, 1555 bp, Homo sapiens
aaaaaaaaccctgctttttgacatgaacagaaacaataagggaaccgtctgtttttaaatgatgattccttgagcattttatatccacatctttaagtattgttttatttttatgtgctctcatcagaaatgtcatcaaatattaccaaaaaagtatttttttaagttagagaatatatttttgatggtaagactgtaattaagtaaaccaaaaaggctagtttattttgttacactaaagggcaggtggttctaatatttttagctctgttctttataacaaggttcttctaaaattgaagagatttcaacatatcatttttttaacacataactagaaacctgaggatgcaacaaatatttatatatttgaatatcattaaattggaattttcttacccatatatcttatgttaaaggagatatggctagtggcaataagttccatgttaaaatagacaactcttccatttattgcactcagcttttttcttgagtactagaatttgtattttgcttaaaattttacttttgttctgtattttcatgtggaatggattatagagtatactaaaaaatgtctatagagaaaaactttcatttttggtaggcttatcaaaatctttcagcactcagaaaagaaaaccattttagttcctttatttaatggccaaatggtttttgcaagatttaacactaaaaaggtttcacctgatcatatagcgtgggttatcagttaacattaacatctattataaaaccatgttgattcccttctggtacaatcctttgagttatagtttgctttgctttttaattgaggacagcctggttttcacatacactcaaacaatcatgagtcagacatttggtatattacctcaaattcctaataagtttgatcaaatctaatgtaagaaaatttgaagtaaaggattgatcactttgttaaaaatattttctgaattattatgtctcaaaataagttgaaaaggtagggtttgaggattcctgagtgtgggcttctgaaacttcataaatgttcagcttcagacttttatcaaaatccctatttaattttcctggaaagactgattgttttatggtgtgttcctaacataaaataatcgtctcctttgacatttccttctttgtcttagctgtatacagattctagccaaactattctatggccattactaacacgcattgtacactatctatctgcctttacctacataggcaaattggaaatacacagatgattaaacagactttagcttacagtcaattttacaattatggaaatatagttctgatgggtcccaaaagcttagcagggtgctaacgtatctctaggctgttttctccaccaactggagcactgatcaatccttcttatgtttgctttaatgtgtattgaagaaaagcactttttaaaaagtactctttaagagtgaaataattaaaaaccactgaacatttgctttgttttctaaagttgttcacatatatgtaatttagcagtccaaagaacaagaaattgtttcttttc

SEQ ID NO: 12206 - DNA, 2217 bp, Homo sapiens
gagatattcattggcagctcaaagacttccaccctggagaccacactgcacacagtgacttcctggggatgtcatagccaaagccaggcctgacgcattctcgtatccaacccaaggaccttttggaatgactggggagggctgcagtcacattgatgtaaggactgtaaacatcagcaagactttataattccttctgcctaacttgtaaaaagggggctgcattcttgttggtagcatgtactctgttgagtaaaacacatattcaaattccgtataccaaaatccatttcctttgtaacaagaatttaccagtaactgtgatctaggttgccaaaagttgtctgaatctccttattcttctctgatcttcatttatgcagccaatgtctagctggacctgccctcatcttgcagttcatacaggcactgtttgagagattgtttattattagatgttgtaatgctgcttcaagattcttcatggttacatgggatgcccctgctcatctggtcctgaagtagtaacattcacccaaatgaggatatagtcattattccttttcagtcactgtacgaacacggcagactttagcctacacagtagactgtgttaggcacttctggtaacattgacactgtatcttgacaccactaagcaacaggaaggaataaattccaatattgagacagagatttatttcattttgctcccaaaggcactgacaacatgagtccttgtgattaggcccacctgatcaaatgtaaaaacatgcatgggatatttgattacgtaacaaccagctaaaactgagagcacacagccttcggaaacccccaaggtgtcgaggaggatcagatccagataagagaagatgattccttctagtcctgtaaaatttcctgtcatccttagctgctgggttgattgaaatttgatctctacatttcaaaatcaaactagtgaatacagtttgtctttcaagagaatcagaggcatcgtaactcctaccaagttagtaagtatgagtctaaccttgtttgacattcaggtcttctgctacattatcttctttgagaaaaattaattgattataaaatatgtgctacttcacttacattattaaatatgtattaacgcctctcaccagggcttccagtgaagttacaatgccctagtctgtgaattagtctggaaacgtgtttttccttttcggatgttagagtaccctttgataaactaaattttactaagctgaacaactctgacagtctaaagagctaatgtgggttaccaaaaggcctgtacctgtaaaacaaaatgcaggtgtaatgattatacatgtctatggattacctggacatactctcatttgggttgttcttcaaagaagcaagcagccgatccctgttttcataaagctaatacttcagttggaaaaattaaacaggagcacaaagtcagggataggggttagcagaagagagaaatagtgtcacatcaagggcaggatctcatagctagggaacatttcacaaataaggtgagattttgtaaccaataataaaaatgaatgtttttataagtaaataacttatttttcatatggctaaagatggtaaaatgacttcattctatagccattgtaaataagaatttgctattgatgaaagaagttcagattggcatttgaagtattgagtgtatgggatctctaaggatttcttagattttatatttaaatattttttaaaccttagaggagtcaacaaactggctcttgattttcagcaccctactctcatgaaaaaagcctgaaaggaccctttcccttataagtaatttaatccaatttctccccattttatagatgaggaaactgaggctcagatcagatgagaactcacttaaatccactcaatgtgtagatggtagagctgggactagcaacattgctgcagcccattgttggcctctctcttcactttatcattgcccaagaatgaggatatgcagtaaacagaattcaggcaagatacctctaagctgttttgaaccctctgatattttgtatttatgtgtttgtctgtctccccctactagaatgtaagctccatggggcagggacttcactgtattttgttcatagtgtatccccagagcctggaccagtgcttggcacataggagatggcaataaatgcttgtagaattaat

SEQ ID NO: 12207 - DNA, 817 bp, Homo sapiens
ctgacctggaaagaaaaagcaataacctcaaagtgactattcagttttcaggatgatacactatgaagatgtttcaaaaaatctgaccaaaacaaacaaacagaaaacagaaaacaaaaaaacctctatgcaatctgagtagagcagccacaaccaaaaaattctacaacacacactgttctgaaagtgactcacttatcccaagagaatgaaattgctgaaagatctttcaggactctacctcatatcagtttgctagcagaaatctagaagactgtcagcttccaaacattaatgcaatggttaacatcttctgtctttataatctactccttgtaaagactgtagaagaaagagcaacaatccatctctcaagtagtgtatcacagtagtagcctccaggtttccttaagggacaacatccttaagtcaaaagagagaagaggcaccactaaaagatcgcagtttgcctggtgcagtggctcacacctgtaatcccaacattttgggaacccaaggtgggtagatcacgagatcaagagatcaagaccatagtgaccaacatagtgaaaccccatctctactgaaagtacaaaaattagctgggtgtgttggcacatgcctgtagtcccagctacttgagaggctgaggcaagagaattgtttgaacccgggaggcagaggttgcagtgtggtgagatcatgccactacactccagcctggcgacagagcgagacttggtttcaaaaaaaaaaaaaaaaaaaacttcagtaagtacgtgttatttttttcaataaaattctattacagtatgtc

SEQ ID NO: 12208 - DNA, 2829 bp, Homo sapiens
aggagcaaaacttccagaagcctcgagcccctcttgacctcctacacctgctttggaaagacatgcactttttagttgactaattcttcctcccattcccctctacttgcgagttatggaatttctattccataactgaagtctttatgataacctaatttttaaaaatgaatttgactaacttaagtgcaaaacatgtaaatttggttcccagagtgggccaatctctctgttcttgttatcttagccaactatactgatacctacagctacagaaagcaggactaggaactggaaataactttgggtcctgccttcattaggacgttctttttagaagcagttcttccagctctggatcatagagtgacctttaataagttaaaaaaacgaggactccttaattctgctagagttaaccttgagttcagagcagtattaaatgcgtgcactttcaggtcagtactggggaccaagtaccctctggtcttttgtgaatggatggttttgtttcctatgggaattttggcaaaggttttctggaaagaacaagtttctcaaaggactttcttcctctagaatgttcattttatgagatcgctatctgtaagtccagttggattacaggaatacttgaaagttactttctaccactattagaaaatatgaagtcgcatgcactggatatctatatatcattaggtttttgttgtgtttttggttatgctgtcccccttctccttggggagatatttgggagcaaacttatttagatttagagtaaacttttcattatagagcaagtaaaaacagacaaatgaaacaacctagtgtttcacataaaaatacttctgacataaagtaccaagagcagtgtgaatatacttggcatagtcaaaaaagaaaatacatttaatattagttcaaaattgttaaaaatacctttagaaggtctagtctattattgaaaactcaattttttcacttatatggctttaaaatggagctattttgctacaatataatgtattgtttatttttttaagttatttaatgttaatatacatagctagacttaaggtttttcagaaagatgtccataataaatattaaaaacaatggtattttttaaaaaactgccttagggttttaaaaccttccctacagttataaccacgtgtaattttgtggaaatgatataacagctattaatactactataacataggcataaatattttcgtgtttatatgcatatacaagttaaaataattagaaactatgactgcgcctagtaaagtcatctaggtttatagttcagtagcttaggcaaggcacacactgctcatctccgctttttagggtcagaggaacacaagctcatgttctgagtgaagggcgtacactggcacctggtgttgcctagatcccccatctcctccttccagccaggtctggaagtttcaacagcccaagcttaacttcatgtaaagtcttcactgccagtgggaacatctttgacacaacaagacactccaattgtgatttgagttgaggatctctgcctgccttcctgccgtccttccttcttccccgatccatgctacttttaggggctgcggagagcagcagcagagctgagtaatgatacagggcaccacggagagaaagtagaaccatttcactcctgggaagatggggtatttcccacttccagcaacgaaataacaaatgaaaagttgcatacttattgatgtattgtatgagccagtagcattttatgtacaaaacagaagtcaatgcaacagtatgtatgtgtgcctgtgtgtgtataaaaataaccattgaagctaacttgctaatgtacttaggcaagccacttcccatctctgggcctcgtctttcctccctctaaaatcaaagagctgaattatgtgatccttgaggtctcttccacttataataccaactgtcttgtcagactggcaaattatattggcctctccttatgtggtggtttttttggtaggtcatagttccttatacacagacacctgcatcatcgaaggtctttttttcctaaaaaaaaaaaatgggattttagttcttattctgtgataactatcctcctcatataatactattctttttgacaccatttgaaggaaccaatatttggaccttattttgaggttgtctgtctcgaagaaaaagaaaataaaatgtataggcagggttccttcaattggcattttccccagaattgtgagccaaagcctatagtaattgcagacagcaaatgattccggatctctaaaaggctctctcagatgaaaagggagtaaaggaaaaaagaggtcaaccactgtttctgataatgtacttgagtttcattgttcttttagtttgtattcttataaaaaatgtttacactctgcagattgattttttttttttagtactgtggctttcttttcctattttatgaaaaaaatgataatctttttgtaaaattgtctgtgaaatataaacattaatatataaagaaaaaccttgaagtgctgtatagtgaagtataaattaatgttttattgatttgtgaagaatttaagactattatataattatcttggtggatctattttatgcatgaccttttaacctttgactttgcttatttcccactacgaaggggaaggtagattttatgaatgattttaatagcaaatatattttataaagtgaaaatccagtgtggaggtagcaaagcatctatctattctgaatcatgtttggaaataaaattgctccatctgggaatgtgctttc

SEQ ID NO: 12209 - DNA, 210 bp, Homo sapiens
tcattagggagcaggcactaccactaagatatcccagaagaagaggcaagggcatccactccaatgcccacctagtactgtgaagctggataacaaaagcttgtcaccaaaagaaagaggtggtattcccctcagttcatctttaccaaagacactctatgtttcattaatctcaactggcagcaataaatattctcagcaagtttgact

SEQ ID NO: 12210 - DNA, 4112 bp, Homo sapiens
cgctactagttggaagccatggaccgactatgaatgtgtacatagccaaaatgactgtccctgacccatgtactgctatagtcccacttgaaccatggccagtccactacagccaaatctaaaagaaatatatacatacagtgtatataaacaaaattgcaccctgaagatgacagagttttgtcacagcttgtgaattctgttcaccaagtgctggaatctaatctgctgtgcccctaaaatagcatttagaagttttggatatgaaaaacagaagagagaaaaatatacattataaaagcagaacatacatgtaccagtttttggatactaaatgacagccttgtttctcccctttgaatcagcagacaccatggattatattctttttttcccttcagtagtgagcagtttgtatgtacagagaaaatggacttacaaaaacttgcagcagtagtttgttcttgctttaaaatttcgtttttggtttagattatggatgcatgaagtaagggagtgaatcagtttcttgtttatatttttttcaccttttaaacaaaaaattctttaaaatattttaatgcattcttttgaagaggtagatgtttggtacattttatggctcccagagcatatattcagttggtgcatgttgtggaagggggaattggaaattaaatgaaaacctatgactttggtcatgtcaatctgtaagacacatcagtaaaagggtattatgctctgttggttttgtttttttgttttgctttttttttttttttttcttttttgttttttggtgatgtggcttaaatgcaatagtttcttttttgggacatatttctgccaattaaagactagaagggcacaactttttttttaattaccatagagaagatacattaaaaaaaatcttctgatgttttgtagccataactaaattatggtaaaaatgtgcactattgtgaaaaggagcaacgtagttttgggttttttgttgtttgtttgttttgctttgttttttaagagattaaaatgtttctggataaggattagcttctcgaagtgtccatcattctgtgtagaagcttaaatatgtaatgtaaccaaactccagtattaaaaatctctcatgttgttttctttatacaaagcaagataacggcatataacactgccattacatggcaaaatgtttgctaccttagtttaaaaaacaatctcaaacaaaagacttgcttcaaggtgtttttaaatagcagtgattcagaattttttttaatgaaagtataattgcactaaccttcttcctgctgctctgattctgcatttgtggtacttgtgactacgttttttcaaatatagatagatttaagctgctaatttttttttttttagtaatcactactatatcatgtcttttactctgtttataatatcaagtattttcttaaagatatagatattaaaccttgtgctcatgcaacttagagtaacatatacagacaaatgattgcatgaggccatgtttatatgtgtgactaataaggcttgtcatgattaacataatccaggtatgtcatttctgaagagaatagtcatcaaatttatatctcgaagattttaattaaggaattgcttattgttgagcttagcaaattaataacactatttctgtcactaattattttgaggccttttagtactaaaattttaacctgtgttctaagtagaaactgatttaacccaagtaatgcagctttgattgatttcagcattcgttgctttgctatttttacaaaacagcattgattgaagcaagtcttggttttactaaggtagggtagcatttgctattggtaaagagaataaatacacttaatttcacaatacattgttatatgtaccccagttgttgttagtggggactatgatactgtaataatatttttaaaaatttacatcaagagaggcagtcattcacgatggttttgtgccagctctttttagggttttggatcacattagagatatttagaacatattaccctgtgacttacgtaggaaacctaatatgctgagtatctggcacttgaattcctgcttttattgctggaggtccacatctgtggttgacctctgttattgtttaaaaaaaataaataaaaattaaaaaaatctgtgcaataattttaaaatgtgctcccaggaatagacacaaatgttttgagtatcttttaagctgcattttcctttagtgatgcatttgtcaattgcactgaatttaaatctgaaagtcagaggtgattattgatagtacttttgtattttgatatggacagtttattcatttgcatacagttattgactttttcccagctgattaaaagatagtcaagaaattctgcaatatagctgccaaaatagacagctacatttttatgatattgtcatcttttctgttttttttttcttttttttctttagctattttacttaagcataatagccacaataggacatataaaagattataaatacagagctttattatcctgacgtcttgggtcttttaagtatatacttttctgaaaggtatccattttgtaggcttgggttcttcatgagcatacgattgtttatttttgctgctgttctcaacatcatcattgcctgctgatgtgccacgatgctgctccaatagacagcaataagattgtctctaatttgagcagtaacatgattgcaagagaccaagtttcacagcttgtaaagttctgtatttgggattcttgcttatttttccgcctgtgtttttctgagaacttattcctgatgatcaattgaatccagtagtttttctatgctatttgttgttgtataagctactgtaagaaacttatcataaggaaaaatagaaaggaaaacttgaatcaatactcattgattaaaatggaataaagaaagagcagctgccacttttaaacaacataaaggaatatctttttttgtctccgtgtaggaaatcccataagttcttatatttgttccagttcccatttcctgccattgaccagataacatcattgactttcaaatgacttttagaagtgataactcttaatttcctaatagatactagattgtattgaattctgttttaattattctctaggtaagtatgttttaggattaaataccttttacagatactgaaagtgcctccttttgtggtgtaaaaaacaaattatggtgcaaaaagtaatcactagattgaaatacatgaaggttttttgctttttgacatacgaaaatgtcaagagaaaggccaaagatttgtactttttcacttacaaagcactcctttttcccttaaacttctttctgtcaaattagatttaatgagagagtactatttttaaggagctatctgtttatgtagaatgattttgttaagagtaatgtaaactattattgagtagaggcctaaagaggactgtgcatttttgctatttaaaggaatcacaaatgatcatacttaagtgagcaaaaatgacaagttttactagctaagtagagaaataaatctcaaatgcagcgctacaattttcattatcttaagtacattgtacatttctacagaacctgtgattattctcgcatgataaggatggtacttgcatatggtgaattactactgttgacagtttccgcagaaatcctatttcagtggaccaacattgtggcatggcagcaaatgccaacattttgtggaatagcagcaaatctacaagagaccctggttggtttttcgttttgttttctttgttttttcccccttctcctgaatcagcagggatggaaggagggtagggaagttatgaattactccttccagtagtagctctgaagtgtcacatttaatatcagttttttttaaacatgattctagttaaatgtagaagagagaagaaagaggaagtgttcacttttttaatacactgatttagaaatttgatgtcttatatcagtagttctgaggtattgatagcttgctttatttctgcctttacgttgacagtgttgaagcagggtgaataactagggcatat

SEQ ID NO: 12211 - DNA, 1278 bp, Homo sapiens
tgattatcatattaagatagagcagcttttcctgcctgttgtttgccttttgtcaacttgccctgctttgtggtctttttgatatgagtacattcctctgcttaatgttaatacatgtaacccacagtggtaccatgagatgtcaaaacctgggggcccgggggcggggcggggggaggtgggtgtgaagaacgtgcttcttaggtcataacgcttttgcagggtcaatggtgttgagccgctcatagcatgtgacctacctaccccatcagaaataactttttatcttgctcaagttctggtcaactagtagcctgacggcttagaactttgactatttaaaagtttcattttcttttgcaattttagttttatgtactgttaaagaattgtactgaattctttttagatcacagtaaaaataggttggcagagatttcagtttcccagggcttaaccagaaccgccacctcaatgcattgtcagtagaatacattattagaaactgttaaggtctttcccgggacatttttttctgccattttcttttgcaattgtagttttatgtactgttaaagaattgtattgaattctttttagatcaaagtaaaaataggtcagcagagatttcagtttcccagggcttaaccagaaccgccacctcaatgcattgtcagtaggatacattattagaaactgttagggtctttcccaggacatttttttttctgtatcatgtctccccatcattgaagcgcaaattttcttgaattcaaatactcccaatgagcttgtatacttccaaacagctaaacttgatttccagttgtggatttcacacatataattgccgccttcttccctcctcttttttcccccctagttgaatcagcttgtctaacaagcccattttcatgccccagctgtgctgtgggttttccaagcctcatatttgaatattcaatgagtttaagatggatatgatttcaaaaaatagggccgggcgcggtggctcacgcctgtaatcccagcactttgggaggccgaagcaggcggatcacgaggtcaggaggtcgagatcatcctggctaacacagtgaaaccccatctctactaaaaatacaaaacattagccgggcgtggtggtgggtgcctgtagtcccagctactctggaggctgaggcaggagaatggcgtgaacccgggaggcggagcttgcagtgagccgagatcgcgccactgcactccagcctgggtgacagagcgagactccgtctc

SEQ ID NO: 12212 - DNA, 136 bp, Homo sapiens
gacggtggccaaattaaagtgctggccttcagatgtctgtgatttctgcaactgaggacctaattatgcctgtctgcaaactaataatgtaaaaggtaataattaaagtatcatattttcatgtgggaaaaaattt

SEQ ID NO: 12213 - DNA, 5125 bp, Homo sapiens
cagtgtcatacatatttgttctccattgatatatctggagaaatcaatgctacagcctatagctgtgaaaaaattctaccttatatttgcaggtgaagatttttctattagattatctacaaaaacaagctttcagtaaactaccaaaaaaaaagtgggggtggaggaaaaaaggcaaaggcgccttctgagatcaaaaggaccagtgtattaatttgaggggttgggttattttaaccttggtgaattgttgtgtgtactcagagtgtattttctttgtgtagaacagaatgtacacattatagcagctcgccattgtgtttgcattttttaagaagtacatttttaactttgtatacacaagaaatgtcatatttttgagttttgtaatggaagaaccaggcacagaaacagacagaaatgatactgtatgtgtgtgtatttatgtctgaagaaagtccccttgaattctgatatctctttgaatctaagagatcctgatagcttcatgtttaagagcattgacaggtggggcacctctgaggggagttcattgtttctcatgcatcatttgccatatactattaatcaaagtgcttgctttcagtcctttgaggggacagataatctgaaggccagagattagagatttcactgatattttggacatacataagaaacatcattataattaataaaaagtaggtaatagcatataaatggttcttgacattttaaaagcctggttatgatcagttgacactttgagtacccccctaaatagctggactttccttttcatttcatatttggaactaagtttgtagcgtatactcatctttcagaagtttggtaaacattgggattgtccctgcatctgaacatctttcccagtgctatcagtatacatctagagaggaaatgcaatgtgacagtgttacatttggagagaagtgtgaaatctaaccaatcgctagcacatatttgttgtaatacggtggtttatttcatgtttgcatactataaaatctgaattgatgtgaaatatctgtgcctttaaatttcttaaacctttaagctttttgttctgttttgcaacattttgtagtatttcttcccttccttagcacaaaatactggtttctaagtggttttgcttcaaaggatgtctagatgtaagtgattccacttaaagccaaaataaaaattcctaaagcagttcttaaaggagttagagagctatattaaacagtttttctgtggtataataatgtgtctcttactagaagtcccccacgaccaagttaaagatacttttcctgttggattctcttttacaaataagtctaaatgactgataatagaagattgttagtcttgcttgatggtaaagtcttggattattctgatatatagacgtgcattgttttgtaacttagttacttttcagataggtctgtgttaacttttgaacatgtgtaacttaacctaaatactcccaaactttacctctaaatttttgtttttatgttgtgaatgtgctaatatgtgcatcaactgtaaagatgtatcagttttattaaaatcagttgacaattagaataataaagtggataaaggcaaattaagatataggaccaaaacagaatattgtagatggcagttatgaatgtatatttatattttgattaagatttctattaactttttggctgggcagagtggcttacacctataatcccagcaatttgggaggccaaggtgggcagatcacttgaggtcaggagttcgcgaccagcctacccaacatggtgaaaccccatctcttctaaaaatacaaacattagccgggcgtggtggcacattcctgtaatcccagctactcgggaggctgaggcaggagattcgcctgaacccgggaggcagaggttgcagtgagccgagattgtgccactgcactccagcctaggcgacagagtgagactccatctcaaattggaaaaaaaaaaaattatatgaacttttgctattaatgtttatttgtaggctatttatatcacttcataaagaacagttctttgagaaaagaataaaggaatgtattcatttccagaaaaagagggttggggaaagtttgccatgtaggttagtcagaagaaagcaattctattatgcataaaaataaccttaaatatgtaagagagtatctcctctacttaaaagttattatagtagtcacaggcatacagaccacaggaattctatggtcttaacatattttaaaattacatttattttaatgttcttaaagtttatgaagaggagtttaaagcaattcccataattaaatatttactcggcaactaaaaactatttaacacttgtggttaattatacacataaacaaatggcgacagagtagcctcactaccacaattacttcatggttacacctttgctttctaataataggggctccagttgctaaatatatttgtttacttacagtttaagttgagctgattgttgaattctgttattgttcctgaattcaatgagtatataatttgtagagatgttgaatagtttggatcttagtttttaaggctgaaaaatctggctggatttagtttttaaaaatttgcatcatcaagaatattgcagttaatgttcctttttttttttttttaaagacagagtctcactctgtcacccaggctggagtgtacagtggtgtgattttggctcattgcaacctcaacctctgcctcctgggttcaagcaattcttgtgcctcagcctcccaagtagctgggactataggcatgtgccaccatgcccggctaatttttgtatttttagtagagatggggtttcaccatcttggccagtctgatctcgtactcctggcctcaagtgatccaccagcctcagcctcccaaagtgctgggattacagacgtgagccaccgtgcccagccaggtttccttctttaccttctaagaaacatttaaacataatgtgcctgagaaggttaatttgttgactctgtagcatgtcaagaagagtagttttttgagatctggcaagaatattttagagatacatattcttttctaagtatgttatcaccctgtggtgttgagcatatcgtcccaaaaacctgcttcagcaagcagttcttggccaggcatggtggctcacacctgtaatcccagcactttgggaggccgaggcaggtggatcacgaggtcaggagttcaagaccagcctggccaagatggtgaaaccccatctctactaaaaatacaaaaattagccgggcgtggaggtgggcgcctgtcagctactcgtgaggctgaggcagagaattacttgaactcaggaggtggaggttttggtgagctgagatggcgccactgcactccaacccgagcgacagagcaagattccgtcccaaaaagaaaaagcagtttttgccatcagcaaggatatctcctccactttaatggacaggcctcatttttggcagctatgctgtttgagatgtagactgaatatccaaggttcctccctagctcaagtttttacttgtgattacacacaccacattgaattccgtcttcagaggcaaagatttgggcttcatatctcaacagcaaaagggcctgttcagcaattcccttcattttagactcatatgacctcagcgattgcatgatagtagtaaactagtctcctggaaataatggatgtaggtgcttctagaatatgttacagaatttcagacttaacctattaatagataaatggatcttgacttaaggtgacaaaatgaaacttttattattgcttaaaaatgctgtgccaatattgtataactagctcctctaatacttttggtattttggatttaataataagaccttaagcattttaaatgtgaacatgttcagggaagtatgctttgatgtaaatgtctcagatctaagttgtaacacaattgaatacttgtggcttattcttggtttaacttaggaaaactggttaaacaatcccccatttgggcctgtcatcattttaatagtgacgatgttctttctgaaatcttcagggtcggagtcaggctgaatttttttaaaaattaaatattatgttcaaattctttcctttttgccattgtgaaaaagcaaaattttaaatgatttctcctgttagaatttttaaaaatacccacaggttggaccatctttcttatgggttgcacaatgaatttatattttaaattagattaagtagaatgtgaagtacatttcagatttactagttttctttccattgttcattttgggttgcctcagattcagtgtatattttaaaatattggttacataataggtactcaatgaaatggtttatagtagaatatctaagctagcactttattttaaaaagtaacttattaattaatcacacattgatggtacaccttgtatttagcaaatgtttgcatgttgataaaatctcctatgtcttctttcttaaatccagttgctgattttgtaaaatacagttgtgataaagcagcattacgggggggaaaaagctatattccaactggtgttaaatgtattcaacaaaatcttacatcatacagtatttatttcttaattaatagaacttcagtgatatacttggtagatatctcaagccttttgtcttttacacaatggtgctctatcctattgttttcttttcaaagaagcatctgaacacttgcatttctattttcctatccaaaggcatccacatctaagtgtgtttttaaagttgattaaaattatttttctgttaaagcattctgaaagtgtttgtctttacctagaatgatttgtacacactcgtggtcaactgaacatgaatgtcagtagtagtctaattatgggaagggtaaacgtgttagattaaggctcttaaagctctaaaccatataaactatggacttgtatcatgatttaactgttcttagatctttcttacacagtgattcattcctctatttgtacagtggctttatgaaatgttgtgaattgatactgtaatcaataaagtgcttttaaccaga

SEQ ID NO: 12214 - DNA, 403 bp, Homo sapiens
gatgtctgaactattaaatttaccattttgtttttcttgaatagtctgtgtacaggagtaaatatgttaagtggtttataaagaaattctgtttttagtcaagtgactttactaatcagttgttctaagtgtgaatatggcatgctaattagctaatttggtagaagctaatttgcttctaaaaatcaggtataaagttcagatgagattcccactttataaattctgacatttaagcaggctttaaatgtcacctgctaccttagagtgtgaaggtgatggtaactgccacagcaaaggcaataccgtagtttttgaatttgaataatagttttacctctgttgttaataggctatgaagaggatgtgggtattgctgttaataaacggaggactttgattc

SEQ ID NO: 12215 - DNA, 1566 bp, Homo sapiens
agaaagaataataccagtactaataatccctgatctgtgtgattgtactgaaaaatcaaaaactattttattatgaatttcaaaaggataaatcaaatattcaaaaggccatggtcatatagcccaaggaaattaattcctgtggacaatgcccagtctctgttcagatccaaaagcacaaaatgttgtatatagagtcaaagtcaggctcaaaagaagaattaagagactcaagacaaaccaagataaagtaactgtgtgttgaatactctttccacaagttgcaagcatattgcaacacatgttctttgggttttttgtctccccttgcagctgatgacacatctgaggaacttgttcatgggaaacatggaaaaagcactgcctcagattgggaaattctgactgtttctgaactgtcttcttttgcaagactgaacatagtttgggccattggtgcatgcacatatattaacttgtgactaaagacagacattgcttaaacctgttccaattttaacttttactgtagccctttgattccagagagggagctttgctggcaaaagcagtttttgcactagaaatttttgctgttcccaatctaaacttttctggtattgtatatatgcactttaatatcttatttatgccttgctggagttttgttttgttgctccaatttttaacttgggggtgaaagatttaagaactcagcctcactagatcaacggaccaaataaacaattcctgaagacagtttttcatagtgtaggattttgaagaagtgtttttcttaaagcagatacgatgacataaggcgtaaatatggcaaacagatcttttcattcacgtgctttctgggtctgtatgaacataagtaagacacaaggtactgtctcttcatgcattctctgcaggaagaaagtttgatggtatcgtgatttctattgagttcaaattaacttgcttaagtgtcatactttactggctttgccctgcacaccaatattccttttaaaccataaatattttaaataatatttcttaagagtgataaataacattttttcctaaaaattatgttttcttagtttcataataatctgcactgttcatccccttgcattctaagtgatagaagagcaacactttcaaaccaaatctcactgaatgccagtgatttcatatgaaagatgcatgcctctttggctctttgaacatttagcaagtattgggaattttctattagcagtggtgttttaattggttgaattccacttagttctccacagtgttttgtatgtgtttggggcttggtgattattttgaaagatacattttttaaagaattaggaacattttttgcaaaatgctaatcagaatataattttcccaatgtcaggtatagaagttatcccattcttctttacctggtctccttccttcgtctagaaccttccccacagtagctaatcctaacaactttttatttatgttctttgataataatagctcatcccgctcatgattatagctacccacaaaaaataaaacaacaacaac

SEQ ID NO: 12216 - DNA, 922 bp, Homo sapiens
agtaaatgtatgatgaattttaagttcgtattagtttatgtatatgagtactaagtttttataataaaatgcctcagagctacaattttaaaaaatgatttagcacaagctaaatctcaaagccttggtataattttcttgtttaaatttggggattttaaatcagattatagtttagaatatttgcgtattaattatgggcaagcacacaccttctgaatagaaatattgttcattactcatttagcagataatttgggacctatgtctacttttcaaggcaaagtgaagatgacagtccttgctctcagggagcccccactttaatgggagactgataaactggtaattagactgtgataaatagtatgatggaaattagcttaagctgtttaagtagggactcttcttattcggtggaaaggctgttccaggtacaggcaactggcctggcaacttggatacttggaaccttgtatttaaaagtgaatttaaccacaactgagacctaagaaattgacctaggggtgtgtgtgtgtgtgtattctatgtacatataaaccatttttatttcatgcattaaaaatagtatgataaagatttcagagtacaggtctggtacaatcacagttcattgcagcctcaacctcctgggtttaagcagtcctcccgcctcagcctcccaaagtactgggattacaggcatgagtatttacattgtattcagctagccccttaaaggtaatgaccatttataaattattccttcagttggctatttcttgacataatcaaacttctgcaattgttatgattaagcttaaaccctgttagcaaaactgaaaactgaaatgttctcaatatcaacatatttaatttggactctttagaatttatacactaataaatttaaatgatgttt

SEQ ID NO: 12217 - DNA, 2322 bp, Homo sapiens
cactaaaggaaccttctagaatgtacatagtctgtacaataaatacaacagaaaattgcacagtcaatttctgctggctggactgaactgaagatcaatcctcacaattcagactgagggttgagacaaaactttaaggatacatcttggaccatatcgtatttcattcttctaatggtggtttgggcttgtcttctagtctgggccgctctaaacatttataattccaacattgtggatttcatcttatatctgtggaccatcctagtttattctcccataagtcttagaagctttatggtgattattttgaggttttcattctcgcataaagcacaatgctgtcttcatcagaaaacagttggcataagaattaaacatatgaacatcacaaaacaatttataaaaacttcttaaatatacgctttgggctagttgcaaagactatgctaatagcacttccagtgagagtgatatatttaagtgtactggatctggaatggtgttttggtttggggggaattttttttttttcctggcaaatcacatgtgttgttgatgtgagtatctgatgaaaaaacaatgtcagaataaccgacatgaaaattttttaggataacttggtgcctacctgaaaaatgtattgtgttttagactcttgatttcaaaaggttccacagaactagtctgcgcttaccttacccatgtttatatatagctgtcctacagggagcttttatttagaaaatgtctgcataatgttagattcttctcctgtctacattatgcactacataattggacttcattatgcttttgaaatgcttatctgcctgtcacataagttaaactatttaatttgttttgaatgttttggattgctacacaatacaatattctaaatttaggcatgagggtttttttgttttgtttttactttttttttgtcatcgcactatggaacacaaatggaattctcttaatttataagaagatagttgcagttaaattttgaaaatggttgtaatgagccatgaagttcaatctttataatataggtactgctctttcagacaaatagtccattttcgatgacttattattttgttgaaattgctttaactgctaatcactgtggttgccaaatatttacttcaggagcaaagattttcaaacaagcatacacgatgcaaaataccaatctggcttctagtctctttactgttttcgtttcactcagattagctcagttttctcatcaaagcagaatgctatcttgtatgtatttttttcattacaagccccatgagctgcttttatgctgaaaatggtcatttccctgttcacttactgacatgtgaagaagggtttcttgctttcttaaacatttccgtaaggcaggctagaaatgtaatacttcaaatgtttgatgattatggtcttttgataggaatagattctgcttgggatatatatccaggcactctctaaggtctagggttgatattaacaaaggaatgtacttagaatagcagtacattttatgcaaatatggaaattattttaagaaacaatgacatatcaaaactgctttttacatgattttgaaatagactagaaagctttccctatagacatattaatattccaatcataactttaattcaagaatgcagttttaccaaaagaaaaatttgaaaatttctattcaggctactggaattggttattaaaagaaaaaggaaaaagaagaatcttgctgctttcagtatttcctgatttttttgtaaatataaagaggaacttcaattatgaaaaatttttaaaagatatatatatctatatatctatatatatgtactgttttgtttcctgtcttgaagattttgagttatggttattggtttcagattgattaattcacatatgctgtgttttgaaatgagatcccattagcttttttttttttttttttttttcaatataaagtgttttctttaaaagtcatattggttcgtggcctagtgccttggattttacatatttttctttttaaatgcaaaaccttttcaacaaaatagtgtttgtcatcaggttggtactaaacatttataattactgtgtaattataaacaaaaatacataaagctttgaatataattatgtagcataaaagttaaggttgttcactatgatggcatcttagaattaaacaaaacttttactagggctgaaaagagaagactgatttaatgtggtgtgattattctgaagataaatgtctggctacagggaatattttgtactaaaaaatgattacac

SEQ ID NO: 12218 - DNA, 218 bp, Homo sapiens
actccagcaaggaaatggccagttaagtagtgtcttctctctccaccaaaaagaggaagtgcctccagcttttctgggggtctcataaagagcagttttactaaatgattgtatgcttatgctgaacacctttcatattggagaatcatgcatttgggtcactaattatctcaaaatatttcatactaataaagttgaattattttttattggaagcc

SEQ ID NO: 12219 - DNA, 1865 bp, Homo sapiens
ttgttgcccggggggaatgaaaataatggaatttagagaactctttcatcccttccaggatggatgttgggaaattccctcagagtgtgggtccttcaaacaatgtaaaccaccatcttctattcaaatgaagtgagtcatgtgtgatttaagttcaggcagcacatcaatttctaaatactttttgtttattttatgaaagatatagtgagctgtttattttctagtttcctttagaatattttagccactcaaagtcaacatttgagatatgttgaattaacataatatatgtaaagtagaataagccttcaaattataaaccaagggtcaattgtaactaatactactgtgtgtgcattgaagattttattttacccttgatcttaacaaagcctttgctttgttatcaaatggactttcagtgcttttactatctgtgttttatggtttcatgtaacatacatattcctggtgtagcacttaactccttttccactttaaatttgtttttgttttttgagacggagtttcactcttgtcacccaggctggagtacagtggcacgatctcggcttatggcaacctccgcctcccgggttcaagtgattctcctgcttcagcttcccgagtagctgggattacaggcacacactaccacgcctggctaatttttgtatttttattatagacggggtttcaccatgttggccagactggtcttgaactcttgacctcaggtgatccacccacctcagcctcccaaagtgctgggattacaggcatgagccattgcgcccggccttaaatgttttttttaatcatcaaaaagaacaacatatctcaggttgtctaagtgtttttatgtaaaaccaacaaaaagaacaaatcagcttatattttttatcttgatgactcctgctccagaatcgctagactaagaattaggtggctacagatggtagaactaaacaataagcaagagacaataataatggcccttaattattaacaaagtgccagagtctaggctaagcactttatctatatctcatttcattctcacaacttataggtgaatgagtaaactgagacttaagggaactgaatcacttaaatgtcacctggctaactgatggcagagccagagcttgaattcatgttggtctgacatcaaggtctttggtcttctccctacaccaagttacctacaagaacaatgacaccacactctgcctgaaggctcacacctcataccagcatacgctcaccttacagggaaatgggtttatccaggatcatgagacattagggtagatgaaaggagagctttgcagataacaaaatagcctatccttaataaatcctccactctctggaaggagactgaggggctttgtaaaacattagtcagttgctcatttttatgggattgcttagctgggctgtaaagatgaaggcatcaaataaactcaaagtatttttaaatttttttgataatagagaaacttcgctaaccaactgttctttcttgagtgtatagccccatcttgtggtaacttgctgcttctgcacttcatatccatatttcctattgttcactttattctgtagagcagcctgccaagaattttatttctgctgttttttttgctgctaaagaaaggaactaagtcaggatgttaacagaaaagtccacataaccctagaattcttagtcaaggaataattcaagtcagcctagagaccatgttgactttcctcatgtgtttccttatgactcagtaagttggcaaggtcctgactttagtcttaataaaacattgaattgtagtaaaggtttttgtaataaaaacttactttgg

SEQ ID NO: 12220 - DNA, 1337 bp, Homo sapiens
cctccctgcggacgcccccgctcctcggctccagagcgcccgcattcccgggagaggcggtgtgggggcccgggccctgcccagctacgcagaaagcagccggagcctcggcggcggcagaaaggggacaaccagggcctcctccgaggagcccgaggggtgtcctgggtgcgcgcctagctccgcacgggggacctcggagctgctctaaggcgcctgcagaggcgagcagagcccgcagcccacgccttctcgaccgcgcacttcgatattcggagccgggcaattctttgctgcgtgggcttctctgtgctcccacggtaggatgtttagtagcacccctggcctctacccactaggtgccaggaatgcgccaccccatcctccaccccgcccccaaatcgtgacaatcaaaaatgcctgcagacacgcccgcatttctccagggcggggtgggaatcggttgagagccgcttagcccgagccttggaggagccggagccgctccaacccggcgggggccgcagactgggagctcccggtccgcctcccagcatccctgcgagcgttcatggggtgttcgtgttagtgccaagattgcttcgttgtagagagagttcgttccaagttactttctgaggtattttatgtatcgatttattagtttttaaatgagttttgttagtttcagttgtattttatttttagttttattagttgattttcatttctttgtagctttctggttatttaattttatagtttcagttactggtttatagttactttattttcaaagttatttagttgttcattttcagttatttatatgtagttgttttgttttaggagttacagatgttcaaattaatttgcttggaatttatttatttatttatttatttatttttcgagacggagtctcgctctgtcgcccaggctggagtgcagtggtgtgatctcggctcactgcaaaccgcctcccgggttcacgccattctcctgcctcagcctcctgagtagctgggactacaggcgcccgccaccacgcccggctaattttttatttggatttttagtagagacggggtttccccgtgttagccaggatggtctcgatctcctgacctcgtgatccccctgcctcggcctcccaaagtgctgggattacaggcgtgagccaccgcgcccagccggaatttatttttaattatctttacaattattatctgagttatttaccttcatagttatttcactttatcttattggagtttttgagttatttatttttacagtaacttatttgactattaaacactcactggaagttcatg

SEQ ID NO: 12221 - DNA, 4394 bp, Homo sapiens
cggcaggatggggagctggagagcccccccgaccctcagcgtacccgcctcacctctcaccctcctccagtcccacttcaggcagcaggctcgagtttgaggccatacatcaggggatccccttgactcactttgggggaaccttggaagtcacagtttggggtcacttgagaccggccaggaatgtttgcatgacctacctcaggaggggaggcgaggaagagtaatatttagcattcaggacccacccaccctatgccggcttctgtgccaggcacttccttttatcggttcatttaacctggtgactggctcttatcacttctagtttacaggtgagggaaccaagtttcacagaggctaagtggcgtgcccctgatcactcagatagcaagtagctaccccaggagtctaaaatccaggtctttcatctccgaagtcaatgctctttccaccatgctgcctatctcagagcaggaaaaacaaacaaaaaacaacaacaaaacctggctcttgctgggcgtggcggctcacgcctgtaatcccagccctatgggaggctgaggcgggcggatgacctgaggtcaggagttcaagaccagcctggccaacatggtgagaccgccccgtctctactaaaaatacaaaaattagccgcgtgcagtggcaggcgcctgtaattccagctactcaggaggctgaggcaggaggatcacttgaacttgggaggtggaggttgcagtgagccgagatcgccacactgcactgcagcccgggaaacaaaagtgaagctctgtcttcaaaacaaaaacaaaaacaaaaacaaaaacaaagaaacctggctcatttcttgtttcggcaagtctgctaaaagattcactcagcacagcagggaaataaaggtgtttcctgctttctttccttttctttcttattctgcatcctccctcgtccccgccctttaccaatatttaaaccaaggagtcatttgggctccttgccaagaacatctcataggttcttccacttgaaaggtctgggggatgggcttgggaaggcctgtttgctttgaaagagatgaaatacttgtgttctgtcctcctcccattgaaaccctcttttttttttttttgagatgaagtcgcccaggctggagtgcagtggcatgatctcggctcactgcaacctctgtcaccctggttcaagtgattttcctgcctcagcctcctgagtagctgggattacaggcacctgccaccgcgcctggctaatttttgtagttttagtagagacggggtttcaccatcttggccaggctggtcttgaacgcctgaccttgtgatctgcccgcctcggcctcccgaagtgctgggattacaggtgtgagccactgggcccggtctttttttttttaaatgatcataagatggcccattttggaccggaactgtcattgccagacagaattgtacctttagcacattctggtgccctggcctcttagtgttcaccagttgtactgcaatatagacaagatgtctctagagactcaaactactgttttattaaaaaagtaaacacctgagcacagctggcctacacaggagcgacagattctccttgatggtacactttctagtttttacacagtgatttaggtccacgttcctgataccccatcctcctgaagccttcgttttcaagacttttaaaaagcacttctacttggttttttgatcagtgtagctcaattgtgacttaaagaacagaatctgtccttcactgtaagagctacagctttcaaatgagctcactggaaattcattctaatccccaagctggagaaacaggttaagagatcctgtttcatatgctgtatttaaaaagcaacaatgataacaacatagtaactgcgttacccaatggactttattttcatcatatgatttcaattctctttatagagttttatttcatatccggtgtggcttgttcttttcagcagtttgggaagttagttattagagttgatagtgaattgaattttcattaaacagtcacggttagaagaagctaatatttgaaacagattttaaaaacttgaaaaattacaggtgagatttctgtttatgccagattattgaagataaatataaatgtatgttggtgtgtgaaatgctctgtgccttagaagcgtgacagttcagctctctgctgtggaaagtaacacagggcaatagaaacatatttgtggaattttagaacaaactattgctgactcatgagcactataataaccatcaggaagctcccaactgaagcaatgtaacagtgtaatctagttcaattcagcaaacattcatggagttcttcatgtctgtcaagccttgaggacacccacgaatggcaaatctccacgctagacactcaatacaggtaaataggccaccagttaatattcttgtttttattttcttcaagttagctaaaaatgagatgcgtatgaagtgaggaggctggatccaagtcttgattgcctttcagggggtcaaggtggtaagctgtgcagtgaagtcaaccagtggccatggcttacatgtttgtctctttgagatcgccaccagaaccatttgtgaactgatttgtgaaggaaaagtcagtcttactccaaagactattgcagggaggaacttccagagaggaaatccaatgacaatggtactggcatacacagggagcctcccttcaaaaagacagcgcccctagtcagggaggggatggcggtcctttgataagacccataggcaaacttcgagcccatcagcaggtcaaccctatgctgggaaagtgaggatttgggatttctgtgctataaacctgattctaaatgtaggacccaagtttctggactacttcagaatacctaaatgaatcatggaaacactctttatgattttttacaacaccagatatgcaggtgaattgtggaaaatgtcatgtagctgacactcaagaaatagggattcctaataatggcatgggtagggaacagatacacctggttagaaggtctagggttctgtatatgaagctgccagtctgtagctcttcgagaaagaaagttcaagtcatttgggggaaacttaagaatagtcatcagggttttagcttctaggcaccagccaaggatgagaacttctaaaatctaaaatccatttcaagaaataaagacgaacacatttgcaggaaggtaactgttataacccacaccatcagcagggggaaagccaagctgagaataaacccagagacaaagaaccctcggactcaggcaggacatggcaggatgttctggcacagcagactggagactgaggcagggcctgtgagtggacagagcacccctggctgggaagaagaagatggggtaggaggaggtcaggttccaaggatgcaggtctggaaaatgatatcggaggccctggagtttgtgagcttggctctagtcccaagaagggtgagggagaataagggtaagggagtattctaggcaaggaactaaggaaggaatccccttcttagagcagaggcacaagttagagcaggcccagcatttgggccaacttactgtggggcctctgagctgctcagctgggtctcctgtcctagagggaaggtggcccagagtctttggtggagcggaatctgtagatgaggttaagggactccagttgccaaggttgatctgaaacaggcagggagctaagctcatcagaacaccaacagattcatgttctcgtcttagctttcatctattctggtctcaatggcttcgggaaacacacatatacacatacaccatgcccttgaactcaaagcaaactacgctctcagggaaatacaaatatcacgttcttatagctgtaaagtatagcttagctatttatagaagactatgaggtactgttgtgagttatttgcttatcctgttttattctgaaaaatgaaagtgctcaatagaatttttaacgttggcaacaccataaggatttcttatgttaagtcccaacttggggttgcaaaatcattttttcccttaatacctgggtgttgtattagatctcataatttgacaagttaaccttttagaaatccacatatatctcaaatctggctactgcaaaaccagttttgacaggtcagattttcatatgtataggtataaatagccaacactcagtgaacaaaatcctttaagcattttggttacataaagttgtatgttttaagtgatcaaactaagaatattgtttataggttttaaaaaccaaaccaataaaatttttatttattcaataaaatatgcacagaacagatgcaaatgtgttatatac

SEQ ID NO: 12222 - DNA, 1474 bp, Homo sapiens
ctgcctgcaccgtgacaccatggctgccgacaggacagggctggggagcggcctcaggacccactgccgcggggctgggcgagagcatggcatgggcccctgcgggagggcacagcccctctcaaagctgtcaccagggccaaagtgctggtgtggagcagatgcaccgatggacttggcacacccagctcagcctcaagcatcctcttgagaagcctgtggaaggctcctgcgttcgttaactgccatctggccgtctctcagttttgaaatctctgaggagcctgaggatcaagtcagttgggaaccgaattggtccatggaagctgaggaatgtggacacatccggcccttgaaagaaccagttatgtccacttttggtggatttcccaggatgcgtgagcacttgattaatttcataacctacagtgagacccttggctcttcctacaaatggcccctgcagttgaagctgttggaatcttgggccgtcacctgcatgactcatggtgatgctgagtatccaggaggaaatttccagaagaaacagaccgtcagtcacgggcttccacttcacagacctccttatggccaagatgagcctcatgttttaacaaaacagttcttgggattgaatgactcacatttaccttgtgctaggttctaaagattgaatccacattttgttactaatgattttcccgctaacataaggatgatgagcagggcactatcatacacactggctgagaactggaactgtttttgggaaggtggcatttgtctcattccctgaaataccttaaaatgtcctctacaccaacccttccgtctaccctgctcacatgtacagtgacggggaactcaccaccttttgaagaggcagttcattttctttgcaaagctctctcctaacttcctccgtaaattccagccagcatggccacatgggtcacgcctggtgccttcacacgtttgaggggtcttcgtctctttttaaagcttagaggtacaagctcaggacagtcttcagtaaggaaatttgtggatttccctttggatctttcttcctctccagcccacaagtggctctagtgagacgagcatttaagctgcaggtggtggcactcgggtctcagagccaccagacgtgcaggtgggacagtggttccagctccgactgcctgtcagcgtccctcccaggtgctagccctggcaggcacagccctcccctcatgccagcaaaggaaatgctcttgatgagaggctcgctttaaagaagcccaaagcgtgtgcttatccaaggggttcagctattcctgacttcacggcttgcatgtttgatttttctaagagaaaagaggctgcctgctgggtgtctgtggaaatgagattaaaaactgtacaatctcagattttactaaaatgcaaaaatgtagtttcagtttcttaaattataagcacgagtcttctc

SEQ ID NO: 12223 - DNA, 212 bp, Homo sapiens
aactgggattggacagtagtggtgcatctggtccttgccgcctgagagccccaggagacatcggctagagtgaccatggctatgctcccgtctggaagatgccagcatctggcctcccactgttttcagctgtgtcccccagtccgtgtctttttagaatgtgaatgatgataaagttgtgaaataaaggtttctatctagtttgtaagcag

SEQ ID NO: 12224 - DNA, 1362 bp, Homo sapiens
ctcctccctgttgacgaagtctcttttctttagagcattgccattccctgcctggggcgggcccctcatcgcgtcctcctaccgaaaccttgcctttctcgattttatctttcgcacagcagttccggattggcttgtgtgtttcacttttagggagagtcatattttgattattgtatttattccatattcatgtaaacaaaatttagtttttgttcttaattgcactctaaaaggttcagggaaccgttattataattgtatcagaggcctataatgaagctttatacgtgtagctatatctatatataattctgtacatagcctatatttacagtgaaaatgtaagctgtttattttatattaaaataagcactgtgctaataacagtgcatattcctttctatcatttttgtacagtttgctgtactagagatctggttttgctattagactgtaggaagagtagcatttcattcttctctagctggtggtttcacggtgccaggttttctgggtgtccaaaggaagacgtgtggcaatagtgggccctccgacagccccctctgccgcctccccacggccgctccaggggtggctggagacgggtgggcggctggagaccatgcagagcgccgtgagttctcagggctcctgccttctgtcctggtgtcacttactgtttctgtcaggagagcagcggggcgaagcccaggccccttttcactccctccatcaagaatggggatcacagagacattcctccgagccggggagtttctttcctgccttcttctttttgctgttgtttctaaacaagaatcagtctatccacagagagtcccactgcctcaggttcctatggctggccactgcacagagctctccagctccaagacctgttggttccaagccctggagccaactgctgctttttgaggtggcactttttcatttgcctattcccacacctccacagttcagtggcagggctcaggatttcgtgggtctgttttcctttctcaccgcagtcgtcgcacagtctctctctctctctcccctcaaagtctgcaactttaagcagctcttgctaatcagtgtctcacactggcgtagaagtttttgtactgtaaagagacctacctcaggttgctggttgctgtgtggtttggtgtgttcccgcaaaccccctttgtgctgtggggctggtagctcaggtgggcgtggtcactgctgtcatcaattgaatggtcagcgttgcatgtcgtgaccaactagacattctgtcgccttagcatgtttgctgaacaccttgtggaagcaaaaatctgaaaatgtgaataaaattattttggattttgt

SEQ ID NO: 12225 - DNA, 1141 bp, Homo sapiens
ccttcctttggagactgctccatcagtgccgaggtgtgtgggaacaggcttcactgcaccgccatcttactgagttgcttcacgtgaggaaaagggggctttggccctgtgactcagttccacattttggattgcatactggaaaagaagccaatcttcttgctagtaaaccagcaacccggctgtatacagtggtgacccaagcaatggatataaacctaaaaatctgagggaggggagaggtggaatacagtagttcttggaatctgaagtctcctatttgatcaggttatttcctgggacttggcaaaaatctgattggtggggatctcctaggacctagtggacatctggtattaatttaatctcaggaaaaacaagaaattaacccagagagagtctgggttttggaattcagcgtagctacctccagaccgtggtgtctggcctccatttttgtctgtcattcagctctgacttacagctgcagtcacctttgctataaggcacctgggtagaagggtggatgggcttcacatcaatttttttcttcctttagggtgggggattggtttggctttcttttgttgtggttttttgttttatttttgtcaagattgatttttagatgcaaggacttgaaaagacccagaaggatgccaccagtttttccttgaggcctaggattttttattctgtcccgagcagaggtaattcctcacaacttagtgcaccagtagcaccagccattttgagcagagtacctctttggggagcttttcgttttgttttgtttttaattctctttccttagcagcaaggtcttttttcctagagaatctactccgttgcagaatcattgcaacctcaggagccctcactgattgagtgctgtcagcctgatatactactttggactctggaaacagatatgggttctattctctatttctactgtgtgtcgttaaacaaccgtcggagaccagatgacctgttagatggctagtcctgtataactcgactctgtatgtttcaatgtatgttactgcaatgcttcacctgctgtacagtgtttgtgagatgctctttgaagatggtacttttatattttttcattttcaataaaagtacattccttccc

SEQ ID NO: 12226 - DNA, 185 bp, Homo sapiens
agtccacccctttccctcaggacctgagtctaccctcaggacctggggttggttggactctgcccttccaaataaaccttgctaagtccaactctgtgcaacctacatggaggtgggggcagccgatgcctggtccaggctgtgagggacacgtatggagcagataaagaattcactcaagcagt

SEQ ID NO: 12227 - DNA, 942 bp, Homo sapiens
acgcgccggctcgggcggcgggctccgggcccagcctcgcagcggccaggagcgcgggccggcgatgcggctgccggcgcccccccgccccggcccaggcgcccgcgggcgggggctgcagggccgtgccgccgccgccgccaggcactccggagctgtccgcttcagcaccacggcggccgcggtagcggcggcgcggacccgcccggaacccgccgccgcgctcatgcactttaaaacctcgggccgcagccccaccccgcacaccggaacggacacggagacccgcggcccccagcccccggcccgccccctcccgcacggctcccctgccccgcccccctccggccagtctggtctgcagaccgggcggccgccggtgtcggaccgcgcgcggccagggatgtttggctgcgtacttgcatgagctttccacccacttgagcccagtcctccgggccgttcctcgcccccacccctgtctggcgtgaccccagcctcagcctctttctaagggacttcctcagcacatttgtatttttatatccgactctttgtttactggctctgctcatggttcctgccctcccctcagtctcggccacgctcttctgcgcctggcagataggatgggtgttgaggctgggatgagacaagcccccgacacggttaccaaccacatggccagtctgcccaggcctgaccccaggaggctttctggcagaccccttctccccaaggtatcatcaccttccaagggcccagatccgattttaccttggacccctgcgtcttgcccctgggaacccaaatggggactgctctgaacctttggatgacatctgtggccccggagatgttctcaacccaggggtgcccttcgtaaatgttcctccatcctcactgtaccaggagtgtgtgaataaacacagaccccctctg

SEQ ID NO: 12228 - DNA, 54 bp, Homo sapiens
gcccctcgtgggtggcctaggatggtgctagccatgcccgtcagcccagaatgt

SEQ ID NO: 12229 - DNA, 528 bp, Homo sapiens
ggttctcagacactgccgacatcagcattgtctcgtgtacagctcccttccctgcagggcgcccctgggagacaactggacaagatttcctactttctcctgaaacccaaagccctggtaaaagggatacacaggactgaaaagggaatcatttttcactgtacattataaaccttcagaagctatttttttaagctatcagcaatactcatcagagcagctagctctttggtctattttctgcagaaatttgcaactcactgattctctacatgctctttttctgtgataactctgcaaaggcctgggctggcctggcagttgaacagagggagagactaaccttgagtcagaaaacagagaaagggtaatttcctttgcttcaaattcaaggccttccaacgcccccatcccctttactatcattctcagtgggactctgatcccatattcttaacagatctttactcttgagaaatgaataagctttctctcagaaatgctgtccctatacactagacaaaactg

SEQ ID NO: 12230 - DNA, 530 bp, Homo sapiens
gggttggtgaaaagttggccagtgggtccccgtgaggacgaactactgtcctgagtcataagtaatatgggtggggcgagggtcttatttctgtagaaatcgtgtgactttaaggatttagattttgtatcttatgttttgtaacatttaataattactgttaaaatgctgtttgtaaatgagattggtctactttttcctgtaggattttattgtagagttttgctggttttgtaaaatggatggaagaactttgtatttatactgtgattttgaacagattatgcaacattggaaggaaggctgtactttgatggtttgaaggaactcagcagtatgatgatctggttccaggggaaaaaaatagctggttggtgtctagccccccaacacttttgtctgttgtgtataaaagaagaaagactggcatgtaccttcatttgcttagctatttgagtatctagagaaaaattaaaatgcaatgagttagcagtataccctggcacacttaataaattaaacatttgtgg

SEQ ID NO: 12231 - DNA, 4955 bp, Homo sapiens
gagtccagacaggaagccacagcctcggacccacgccgagcttttgtacctttgtctggtggatccttttttccaatgctgttgatattttctacccaccccgccccgctccaaccaacaaccgtagcagttcagtggtatgctgattagcttctctccgtcttacaactaagacattctttttattataaacagttttcttttgtatcctgacttactttctatgtagcatctggtgtcatgaattgtgaccccgccttaatttcactgggagatttgaaggcggtgaagtgatggtcgcagagaatcttggatcagattgaggaggtaccgaaagggaaggagccggtgttttctcggtagccagtccttcacagagactcttgccattccctttggcatgttcacaggcactcccgtcctgtcctgcttgtcctacgcaagtagcactccctactgagtgtgcactggtagatgccgtttcttcccttccccttctccccacacctgcactgggtctggatcagagctgcctcggcttacttctgggaggtcactggaggccagctcagcccatggtttgtggccagtgtctgtacaaggctccgtgactggggctgagctaaacattcacatgagaagagatgacctcatctgtctcatgctcaatccagccttagctgagcacctgtcccctgcagggggctgtggggacacagcatgaataagacctgattcccaccatgaaggggcccacagtcctatatatgacacattcaactcatggcacccaaaaagctctgggaacccaggggaaggatgaggtttacttggctggggctagctggggaatgtgtttcagcatttgagctggcttcttggtgggttccccaacatttttctgcttttaattgttcttcaagtctgggaaaaactcttaggaagttatataggtatcacatttaggtggcagccacatctgacatcttaaggaaaaaaaataaattaatagttttagttagcatggaaatgctacagacagaagccctttagggattaggactgaatctaataggtttgattaattctgcttcatttggttgtatgaagcattcgtatggtttaagtgaggaatggattagaattcagtgtgatgcatggatttttatgcagctgcaaaagcagttgaaatagtttgctgctaagtcaggagaaaatatccagtgtaatagccattcactttcccacacagtctgtctgttgtatgtgttctctcccctcacatgcacaaaatagtgactaattctttcttatttagctctcttcagaattctacttctactctccatttataccaggtattcttgtgagtcagttaactgctatttctccaaaccttctatccatgaggcatagtttcaaatcctggaaattttaagtatggcctaatgagaacatcagagttggagacagaacagtacttccatcctaactatccagaagcgcactctcaggccattgtgctctgagattcccttgtgctctggcaccattatggtacatctctacgtcacattaatttttttttttttgagatggagtttccctcttgctgcccaggctggagtgcagcggcgtgatcttggctctctacaacctctgcctcctggggtcaagcgattctcctgcctcagcctcctgagtagctgggactatgggcacgtgccaccacacctggctaattttttgtatttttagtagagacgggctttcaccatgttagccaggatggtctcgatctgaccttgtgatccacccacctcggcctccccaagtgctgggattacaagcatgagccaccacgcccggccggatttgtaagaaaaagttgtgttctcccctgaagcctccatttggcatcattcacaaactactcaaggaagaatttgctttcccagttgtatgtataatttaagtcgtttactagatagaacttttttttaggtttagatggccaagacatctatatggtttagaaggcagagtatacattttcctttgcaaacagtatgagttaaaactttctatgctaaatgagaatgcggcataaagtctccacttactgaaatttaaagattcaacaagacaaaccgagaagggggtcagaggagctctaggaaaggcccaggagagggcagttggaggcaggtgtgagcatgaggagcttccccctgccagggcatggctcaggtggcacagggacatctgatgaaccctgcccgaggttctcggtgcctcccgtgcatgagtggctcactgaaggcaggtgtggaagccaaatgcctgcaagccgtgtgtcaggccacagcagtgcagtcatgcatcacgcactcaggtttgtaacagcaacaccagggccctgtctagattcaccctgtgggtgagcccgttctccagatgggcgtataaaggggctttctcctctacaccgttcctgtcaatgttccgtacaggcccacattcccaccactaagccaatggagtcaaccagatttctaaagccatggatatacgtggtcacggggccacatttctgcagctggctcagtggcaggcttgggccgtctctcagtaccatctaagacttctgtctaggttcctgtttttttagactcctgaactgccattctgattagacacaattttaatggaatttttggatttaataatagttgataatcaccttatgtatttgcacaatctctttataattaaaaactcgctaagcttcacttgctactatctactatatagaattagagacattccattggattctaagcatcagacactcctggatctcaaaatgaccttttctaaataagcacaagatttatttttgtcctagcactgttgataacactctgaaatatgttattgaactggaattgtttctttatgcttgcattccaaaaccaactgaaacagattgtagtttcactttaaattctaggcctgttctatattatgtgaaggaattctctgtaacgctgatactatgttgctaatttgtgtacttacagacactttagaaaatgtttagactgcaacatgcactataacattgaactcagtcacatgaagtggttaacacttgcacactgactgacagatatgaaagctgtatactttggacccagtaatatgctcattggagcaagggttgggctgtgtggatggataaactgctttcttgggtttacatggaaacctggtaccactcctacttttggaaagttggtataaaagctattaggtagaagcttaattccactaaatgtagaatttagttttcttctctaaccaagattttagaagtttcaagtttcaaatatgcttataacttttccaagaaatgatgattacagtgcttttgtggttacaactgtttggtatattaaaaaataagggtttactatcacatctaggtcttttttactatgtcatttttaagatatgaaataagaatctgaggacagccctgaagaacagtcctttcctgggaggggaagacttgtaattcaaggtcatacaatacaaaataaaacaaaaacaaaagcaccaagagcagaacaaaacaacgtagttgctttcctgaaatactttttggatttgattctatcttgggagtggtggctttacttttttttttttttttttttttttgagacagagtctcgctccttcacccaggctggagtgcagtggcgcgatctcggctcactgccagctctgcctcccaggttcatgccattctcctgcctcagcctcctgagtagctgggactataggtgcccgccaccatgcctcgctaattttttgtatttttagtagaaacggggtttcaccgtgttagccaggatggtcttgatctcatgacctcgtgatccaccctcctcggcttcccaaagtgctgggattgcaggcgtgaaccaccacgcccggccggctttacttctaatcctccacttcttggtctatttgaaccatcacaagtattttgggaccgataacaaaccccttttatgctaatttaattcttgacttgggtaataggtgcacctggataatttataaagctgtccatagatctaagtttagtggtacagatactactgggcaggagaaaaagcacaagttaaaatatttctacagtcagctcttaatattcccacatcttgtttgcaaaattttatggtcacgttctggcttttttacatgaggaaaacaaagttttaacagttttctcttctgtccccttctccagaggaggtgtgaaccagaactgaggaggccagttatattttaggcttttcagtagtacgattttgtcctctcccactgaggaggagggaagaagggggaagccagtgggagttccacacacgtggtcagtgctgtaagttcccggatatcagtgtctctcacatcaacacagaaatagggcacttctcaacattaattttggaattattcaccatttaaaaattgtcactgctctttttcattactgtagataactgagagttagctgttctaggaaaaggccatgtttcagttagtgctatgacttcttttttcgattaaggttgaagcagtgttctcttagtagcctgaacacttctcaaagcgacttatcactagcggctttaatattgagcttctatatcgttgtgtccacctcactttttaaggctgttcatacctggcaatattcacttactctgctatttttaaaaactattttaaagttttaagcacaatgttgactcttctgtaatttcctaaaattatattgttttcctacagacagctcaactttccttgatatgtaacactttaggaaaataactgccttgtaaaataaacgtgattttttttttcttttataccag

SEQ ID NO: 12232 - DNA, 1600 bp, Homo sapiens
ttcagtcttccagattatgcctcacatgctagcatcaggtaatgctgactgaatttcagtgaaattaaatcaaaaatccaaagtaagattgttctgaaatacaaagcaaaataaataatcattagaatcttctgtgtaacgactctaatggtcaaatctttaggaatgtgcttcctatgcctctgaatctgtccttatcagataaattcaatgcatgaacttgtgtgaatataataccataatagctaatgaaagaggctcaggcataagttgagattctcaaatgcttttatcattggataaatgtgtcatcaattaataaatgataaatgcagctaagtcatacattcattttgactcctttcaatgtcacacacatagtattgatcagaaatcttatgaatcatacatacactcaacaaacattaaagttgtaggaaaaagacagttggaaattggtaagggaactgagtacttcaaaccagcacagggaacttaggttagtgtggcaagcctttcctcttctggtctttcctcttctgtttatggagaaataatagaaagtagtaagtcgttaacttagtgtaagaagggtcttagagaacatctaaccttctaggatttcccaattctgtgatagagtaatgacaccagttttcctgtcatgacaagcctctgtgatgttacatatggaaatggttgaatcttgaaaaatctaaaattgttgcaaaacatattttgtatgattttgttgtaagagttcttctctttttactttttgccttgtgtagttaaaaattaaggggctggtcaatacaaaaacttgtacacaaatatttatagcagaattattcataatggccaaaagctgaatacaacccaaatgtctatgaactaatgaatagataaaccaaatctggtatatccatacaatggactatattattcagccataaaaagaaataaagggccaggcacagtggctcacacctgtaatcccagcactttgggaggctgaggcaggaggattgtttgaggccagaaatttgagaccagcctgggcaacatagcaaaaccctgtctctacaaaaaatactttccgtacattagtggttgcctaaggctagaattgggggtgatgaatggggagtacaggattcatctaatgggtacaggatttctttatggttcatgaaaatggtctaaacttattgtggtaatggtcacataacaatatattaaaaaccattgagttgtatattttaagtgggtgaattatatggtatgtgaattatatctcaataaagttgttagtaaataaatggggctgaagatgttatccttcattgtggtgtaaatgaactttcacaatattttcacctgtgaacccaaataaaatgattaaagttctgatggaaaaatcttgaatggagtataagttttccgttgttaaaaagcaaacaaaaaaccaacaaaaaatccaagtgtgccttgaattgtacagagcacaattattatgtttgaaatgtgtactacttaattttatataatttggtttgtgaaattaaagacatcaataaaaatgattcctgaaagtagt

SEQ ID NO: 12233 - DNA, 529 bp, Homo sapiens
tctggattttctgtttgccacatccctggactcagttgcttatttgtgtaatggatgtggtcctctaaagcccctcattgtttttgattgccttctataggtgatgtggacactgtgcatcaatgtgcagtgtcttttcagaaaggacactctgctcttgaaggtgtattacatcaggttttcaaaccagccctggtgtagcagacactgcaacagatgcctcctagaaaatgctgtttgtggccgggcgcggtggctcacgcctgtaatcccagcactttgggaggccgaggccggtgattcacaaggtcaggagttcaagaccagcctggccaagatggtgaaatcctgtctctaataaaaatacaaaaattagccaggcgtggtggcaggcacctgtaatcccagctactcgggaggctgaggcaggagaattgcttgaaccaaggtggcagaggttgcagtaagccaagatcacaccactgcactccagcctgggtgatagagtgagacactgtcttgacaaaaa

SEQ ID NO: 12234 - DNA, 1007 bp, Homo sapiens
ctgttgccaggacacatggccataaataatagaaagaaagctacaaccacaggctgtttgaaagcttcacctcacctttctgcaaggcagaaaaagtatgaaaaaaaccaaggcttttttcagtagcgtcctatggatgtcacattgtacatcaaacaaccttgtgattataaaacgatcctgggaaggagcccctaactagggcaagtcagaaatagccaggctcgcagcagcgcagcgctgtgtctgctgtgtcctggggcctcccttgttccgacctgtcaattctgctgcctgtcacgcgggtggttctgcccatcgcggctgcgggtcaagcatcttcaagggaaggacggactggaggcctcaccgtggactcaactctgcattctccgtgccacattcctccagttcccacacgtagaagggaacgaaactgacgtctacctcatggggctgctgtgtgggtttgggaggcaaaaatctatgaagggttttttgaaatcccataggtgccacatctatgagatgtttgataaatgtgaatatgcttttacatttgggcttatctaatttgcaataagagagcctctctctatcaacaccagcttctctctcgggctgtttgctcagggaaggcaagaaagccacgtgctggccctctgccttctctaaagtgctgttggagcatggaggagctggaggagatggggatggactgacagctaagagggcggctgctgggactagatagtggatgaagaaagaaggacgaggaagccgtggggcagcctcttcacatggggacaggggatggagcatgaggcaagggaaggaaaagcagagcttatttttcacctaaggtggagaaggatcactttacaggcaacgctcattttaagcaacccttaagaaatgtttatgtttctttattaccaatgtaatctatgattattgaaggaaatttagaaaatgcgtagatacaaaattaaaaaaaaatactgtcc

SEQ ID NO: 12235 - DNA, 1791 bp, Homo sapiens
ggctcccacaggcaccagcaaaacaacggatgaatgtagcccttccaacacctgacagaatgagaccaaacgcagccagccagatcgggagcaaaccaaagaccatctgaggaatgagaagtctgcggaggcggccagggactctgccgaggccctgagaaccccaggggccgaggaggggcggggaaggtcagccaggtttgccagaaccaccgagccccgcctcccgccccccagggcttctgcaggcttcagccatccacttcaccatccactcggatctctcctgaactcccacgacgctatcccttttagttgaactaacataggtgaacgtgttcaaagccaagcaaaatgcacaccctttttctgtggcaaatcgtctctgtacatgtgtgtacatattagaaagggaagatgttaagatatgtggcctgtgggttacacagggtgcctgcagcggtaatatattttagaaataatatatcaaataactcaactaactccaatttttaatcaattattaatttttttttctttttaaagagaaagcaggcttttctagactttaaagaataaagtctttgggaggtctcacggtgtagagaggagctttgaggccacccgcacaaaattcacccagagggaaatctcgtcggaaggacactcacggcagttctggatcacctgtgtatgtcaacagaagggataccgtctccttgaagaggaaactctgtcactcctcatgcctgtctagctcatacacccatttctctttgcttcacaggttttaaactggttttttgcatactgctatataattctctgtctctctctgtttatctctcccctccctcccctccccttcttctccatctccattcttttgaatttcctcatccctccatctcaatcccgtatctacgcacccccccccccccaggcaaagcagtgctctgagtatcacatcacacaaaaggaacaaaagcgaaacacacaaaccagcctcaacttacacttggttactcaaaagaacaagagtcaatggtacttgtcctagcgttttggaagaggaaaacaggaacccaccaaaccaaccaatcaaccaaacaaagaaaaaattccacaatgaaagaatgtattttgtctttttgcattttggtgtataagccatcaatattcagcaaaatgattcctttctttaaaaaaaaaaaatgtggaggaaagtagaaatttaccaaggttgttggcccagggcgttaaattcacagatttttttaacgagaaaaacacacagaagaagctacctcaggtgtttttacctcagcaccttgctcttgtgtttcccttagagattttgtaaagctgatagttggagcatttttttatttttttaataaaaatgagttggaaaaaaaataagatatcaactgccagcctggagaaggtgacagtccaagtgtgcaacagctgttctgaattgtcttccgctagccaagaacctatatggccttcttttggacaaaccttgaaaatgtttatttaaaaaaaaaaaagatgacaaagaaaaacagagagagagaatattggagatgtcctgaattttaatagggtacgcgccattagggctttttgcgctaaaggatgaacatgtactggtttatgtggacaagccattataccaccagactgcaatgccagtttcctctactgcaaacagtgttctgtgacaaaaaaaaaaaaaaaaaaaagaaaaaaaaagaaaaaacagaaatatatccagctaacaag

SEQ ID NO: 12236 - DNA, 963 bp, Homo sapiens
agcatgaagactttctgaaacctgccctagagctgggatattgtttgtgggcaatattttttattgtctcttgtttaaaaagtgaacagtgcctagtgaagttaggtgacttttacaccttttacgatgactacttttggtggagttgaaatgctgttttcattctgcatttgtgtagtttggtgctttgttccaagttaagtgttttcagaaaagtatgttttgcatgtatttttttacagtctaaattttgactgctgagaagtttctattgtacaaaacttcatttaaaaggtttttctactgaatccagggtattctgaagatcgaagcctgtgtaaaatgctaccaaatggcaaaaagcaacaataaacagtttgatttttacttttctttctaacatatcaatgcttagcagaactattcagattgtcagtagtaaatttaaagacaaatgcccgttttcctccagtccatgaaacataccatacttatatacctgcaactaagtgtttaaaattatgctctgtaactctgtactgctagtattagaactaaaaatcttaaaatacagccagtgcttaatgcttatatcaatgtggatttgtcggcttttatgtaatctgtaatatgtatagcaggaaatacgaagagttacacagtgtatgccttaaaaggctgtttcttaaaggtgttacaaggggataatggtatttcaactagttatcagcaagtgacaatacattccaccacaaatacactcttgttcttctagcttttagactatatgaaaaaaccgggtgcttcaaagtacatgataagggaacactatacctgtcatggatgaactgaagactttgcctgttcattttttaaatattattttcaggtcctttgcttaccaaaggaggcccaatttcactcaaatgttttgagaactgtgtttaaataaacgcaaatgaa

SEQ ID NO: 12237 - DNA, 2317 bp, Homo sapiens
gtttctgagtggcggagtggccaaaccctagagctagcagttcccattcaggcaaacaagggcagtggttttgtttgtgtttttggttgttcctaaagcttgccctttgagtattatctggagaacccaagctgtctctggattggcacccttaaagacagatacattggctggggagtgggaacagggaggggcagaaaaccaccaaaaggccagtgcctcaactcttgattctgatgaggtttctgggaagagatcaaaatggagtctccttaccatggacaatacatgcaaagcaatatcttgttcaggttagtacccgcaaaacgggacatagtatgtgacaatctgcatcgatcatggactactaaatgcctttacatagaagggctctgatttgcacaatttgttgaaaaatcacaaacccatagaaaagtaagtaggctaagttggggaggctcaaaccattaagggttaaaaatacatcttaaacattggaaagctcttctagctgaatctgaaatattaccccttgtctagaaaaaggggggcagtcagaacagctgttccccactccgtggttctcaaaatcataaaccatggctactcttgggaaccacccggccatgtggtcgccaagtagagcaagccccctttctcttcccaatcacgtggctgagtgtggatgacttttattttaggagaagggcgattaacacttttgacagtattttgttttgccctgatttgggggattgttttgttttggtggttgttttggaaaaacagtttataaactgatttttgtagttttggtatttaaagcaaaaaaacgaaaaacaaaaaacaaaaacaaaccttttggtaactgtgcactgtgtcctttagccagggccgtgccaacttatgaagacactgcagcttgagaggggctttgctgaggcttccccttggccatgtgaaagcccgccttgttgcctgctttgtgctttctgcaccagacaacctgatggaacatttgcacctgagttgtacatttttgaagtgtgcagggcagcctggacacaagcttagattctctatgtatagttccccgtgttcactaacatgccctctctggaaagcatatgtatataacatgtgtcatgtcctttggaaacctggtcacctggtgaaaacccttgggattcttccctgggcatgactgatgacaatttccatttcatcagtttgttttgttttcctttttctttaaatcttggactttaaaccctacctgtgtgattcagtagggtttgagacttacgtgtgatactgacaggtaagcaacagtgctagcattctagattcctgcctttttttaaaaagaaattattctcattgctgtattatattggaaaagttttaaacaaccaagctaaagctatgtgaaagttgagctcaaagtagaggaaaagttactggtggtaccttgctgcctgctctgctggtagaattctgtgctccccgtgacacttagtacattaagaatgactacactgttcctcgtatgtgaaggaggcagtgctgactccgtgagtgtgagacacgtgctttgaactgcttttctattcatggagcactccatagtctcaaactgtcccccttatgaccaacagcacatttgtgaagaggttcgcagggataaggggtgcactttatagctatggaaacatgagattctcctctattggaagctaattagcccacaaaggtggtaaacctgtagattgggccttaattagcattgtactctaatcaaaggactctttctaaaccatatttatagctttcttaacctacacatagtctatacatagatgcatattttacccccagctggctagagatttatttgttgtaaatgctgtatagatttggttttcctttctttacttaccctggtttggattttttttttttttcttttgaatggatttatgctgtcttagcaatatgacaataatcctctgtagcttgagctacccctcccctgctgtaacttacgtgacctgtgctgtcactgggcataggacagcggcatcacggttgcattcccattggactcatgcacctcccggatggtttttgtttttttcgggggttctttggggtttgtttgtttgcttcttttccagagtgtggaaagtctacagtgcagaaaggcttgaacctgccagctgatttgaaatactttcccctgcgcagggccgtatgcatcctgccaagctgcgttatattctgtactgtgtacaataaagaagtttgcttttcgttt

SEQ ID NO: 12238 - DNA, 2889 bp, Homo sapiens
acagtgtgccaaacaccagctaaaccaagagagaaagcaagaaactataatgcacactcacacacaatttatgtgcacactcacacatgcacacacacacacacatacacactcttctctaaccagtggaagcaaagccacccttcgggaagaaaacgtcaccttgccatacattctgtttcaacagtgggtacacccctaacagagccagtgccaacaaaacattttgaatggacttagggcccatgaggttgtggctggcttaggcagcaacctccacattcccacaggccttgagcagaattttctgagactgaagggaaatccccctttctttctaccagccctgcaagtttcctcatggacgctcgcgaggagcaggctgcaggtttcctgcctatggtgagatcagatgtggccaagggaaggagctctggttccagagaatttgcacaaagttccctctgtacagagacaaaacggcctccggctctcagagcataatccttggcagggctcagcaggcgcacgttggtttcttggtcgtcctttgagtgacaacttctccgtgaacctgctgaagaggcagaaaggctgtggaaagctgtatttccattcttgggtttctgcgccgtcggtgggcacttgttattttccaggaaccttctcctggtgtctacatgtttgcttagaggcggctccaagagcccccagagctgcctgcatagcacaccttagatgtggtatttattttcttagttctgtgaacacctgggagggagagcggagaaactgggatttatttttcaaattggtgtcataatattgtgtaaaaagggaaggaaaaaaaaaaccacccccagcttctttctttttcaagccaaagcgtgtttcctgtttgagttccaagccctggtggcagactattcctgaaggcagaaaagatgggaaggaaggaactttgctggggaaaccaggagacggttccctcctgcttctttgcactcaccactcccagagtatgacctgaaggaccttctgatggtcttaacgtgtgtgcgcgcgtgtgtgtgtgtgtgtgcgtgtatatatatatatttagcctatatatttatatatatatatatataaatatttatttactgatggacttttcctcattggaaaaaaaaaacataggtagtatgagacagaaagtggtaaggaaaaagaaggttctcactcccccactccaccgtttcattgtcaggacgcatctccctgtggtgatcacaagggttaaggggaatgaaagtagctccctattatgaacgaagagaccgagaactcctattctggatcctcaaaacaagcatgaaagacctgctgggctggatttactctcccatttgtcagataagaaaattgagtctcagaaaagttcagagacttttccatggtgtcttggctaatgcagcttgagagtaggtgccgttacaaagatatttaatggagaaaagaacccacacatctcagagtagggtcatttctggtcactgaaaagtgagtccacttggatccaggttgccagggaggaacaaacgtacagcacatgcgtggatgggatatccccacacaagaaaacgagcgcctcatgctgcttcccagaggttctctctgacctgaatggaaaagaagttggtctgagatcgaaggtactaaacagatcatcagactgaactctccacatgtcacctcatcatggtcatcatagtctcttagtttggaaacaaccttggctgcagggatgacctcagtggagagtcacaagaaggactgaggcgtcttctgcaagatactgccagccaggacagaggggtctcagcagagctcagtgggcttcattcagcaagtgccagcattaccatcctttcccaagggcaaggccatgcagagcttcattgggcctccatccctctctgagatttatcagtggaaacttggacccacttgatatcgttccactgagctgcctctaatcttgcattggacaggagctttggacaaagaagggaatattaagattgtgtgtacaaatggcacttaactgtgaaggaccacctaggagcaagatcttggaccattctgctcaacctaacagtgcagaatgctaagtaaggggaaaaccaggccacctgaagaatatctttaatgatggtattcttggtgatgggaccaacaagctccagaattactacaggtactatcttggaagccacttgtttctgaaactgaggcaggttcaggtttggggtcactgattctaagacatttacagaagttcgtgcatgtgtttcagccatgatccccaagattgaggctattgagacatggcactatcaacaggtgaaattgattctcagagactcacaggtctcatgaaggggcagtgcagaaaatggcccttacctgctgcaccctagtgcacaggacttgcaatgttgcttgagagacatatcccaagtccttcttagaggcatggagtataacaacttcagtggaattgcacttccagtttggtaaccttagtaaatcttgtgttgttgtttaatcgtgccttgcaaatcatcctttaaacactatgactgtggtttcttgtggtggagtccctcatcatagtgaccctcatagcaacctctgaggttagcagagaaggtattattatctcgatctcaatgaggagaacaaggcttaatgaggtttagtgacttctcaaagccacatggttagtcaggggagaacctaatcccttatttcttatcttattctgattctggccatgctacaaacatgttctcacctgccccccatgcttctaccccaacagcaataaaaactgtaaagcaggaa

SEQ ID NO: 12239 - DNA, 252 bp, Homo sapiens
tgacatgaatggggccatattcttcctggggcccaaatgctggctggccttgtggtccaaataggcatcatcaataaaacagttggcatgcatcccactgctgactataatgcctctccttaaatgcttctagggaccagcaatacagtgctcgccacagtgggcagtcacacaaagctacccatctgccagatcaccaatctagatctttgtgccaaacaaaatgagatctcattaaaaggttagaaagtc

SEQ ID NO: 12240 - DNA, 615 bp, Homo sapiens
ggccctggaaatacaaggataaatggaggatggtgctcatcttgaaacttgaaactaaattgggaaggtgctattgctgcttaagagacattgggacttttctgtctttttttttttttttttttgaggcagagtcttgttctgtcgcccaggctggagtgcagtggcgcgatctcggctcactgcaagctctgcctcccgggttcacgccattctcctgcctcagcctcctgagtagctgggactacaggcgcccgccaccacgcccggccaattttttttgtatttttagtagagacggggtttcaccgtgttagtcaggatggtctcgatttcctgacctcgtgatccgcccatctcggcctcccaaagtgctgggattacaggcgtgagccaccgtgcccagccttctgttctatttaagaactttgatttccattccattttcatttattactgtttaggccgaattttcgctaaacttctgactttcatataaacatattgcttatagaacatcagaagactcgtctttgtgatgcccaaatgaaaaagttggtgaaggtagtaccattgtatgtatgttaatattaaagcaactgagtgtagatttgc

SEQ ID NO: 12241 - DNA, 74 bp, Homo sapiens
cgtgaatatatctggatggggggttttgtaaataatgaagttgtaataaaaataaaatgaccaaaagcaccttt

SEQ ID NO: 12242 - DNA, 192 bp, Homo sapiens
ggaattgcacatgagatggcacacatatttatgctgtatcaagttcacgatcatcttacgatatcaagctgaaaatgtcaccactacctggacagttgcacatgttttactgggaatatttttttctgtttttctgtatgctctgtgctagtagggtggattcagtaataaatatgtgaaagcttttgtttc

SEQ ID NO: 12243 - DNA, 1921 bp, Homo sapiens
atttggctcctcagccccagcaccaccagctgtgggcagtcagtagcagaggacgatcctccgatgaaagcagccatttctcctttccttcctcccatcccccctccttcggcctatccattactgggcaatagagcaggtatcttcacccccttttcactctctttaaagagatggagcaagagagtggtcagaacacaggccgaatccaggctctatcacttactagtttgcagtgctgggcaggtgacttcatctcttcgaacttcagtttcttcataagatggaaatgctataccttacctacctcgtaaaagtctgatgaggaaaagattaactaatagatgcatagcacttaacagagtgcatagcatacactgttttcaataaatgcaccttagcagaaggtcgatgtgtctaccaggcagacgaagctctcttacaaacccctgcctgggtcttagcattgatcagtgacacacctctcccctcaaccttgaccatctccatctgcccttaaatgctgtatgcttttttgccaccgtgcaacttgcccaacatcaatcttcaccctcatccctaaaaaagtaaaacagacaaggttctgagtcctgtggtatgtcccctagcaaatgtaactaggaacatgcactagatgacagattgcgggagggcctgagagaagcagggacaggagggagcctggggattgtggtttgggaaggcagacacctggttctagaactagctctgcccttagccccctgtatgaccctatgcaagtcctcctccctcatctcaaagggtcctcaaagctctgacgatctaagatacaatgaagccattttccccctgataagatgaggtaaagccaatgtaaccaaaaggcaaaaattacaatcggttcaaaggaactttgatgcagacaaaatgctgctgctgctgctcctgaaatacccacccctttccactacgggtgggttcccaaggacatgggacaggcaaagtgtgagccaaaggatccttccttattcctaagcagagcatctgctctgggccctggcctccttcccttcttgggaaactgggctgcatgaggtgggccctggtagtttgtaccccaggcccctatactcttccttcctatgtccacagctgaccccaagcagccgttccccgactcctcacccctgagcctcaccctgaactccctcatcttgcaaggccataagtgttttccaagcaaaatgcctctcccatcctctctcaggaagcttctagagactttatgccctccagagctccaagatataagccctccaagggatcagaagctccaagttcctgtcttctgttttatagaaattgatcttccctgggggactttaactcttgacctgtatgcagctgttggagtaattccaggtctcttgaaaaaaaagaggaagataatggagaatgagaacatatatatatatatattaagccccaggctgaatactcagggacagcaattcacagcctgcctctggttctataaacaagtcattctacctctttgtgccctgctgtttattctgtaaggggaaggtggcaatgggacccagctccatcagacacttgtcaagctagcagaaactccattttcaatgccaaagaagaactgtaatgctgttttggaatcatcccaaggcatcccaagacaccatatcttcccatttcaagcactgcctgggcacaccccaacatcccaggctgtggtggctcctgtgggaactacctagatgaagagagtatcatttataccttctaggagctcctattgggagacatgaaacatatgtaattgactaccatgtaatagaacaaaccctgccaagtgctgctttggaaagtcatggaggtaaaagaaagaccattc

SEQ ID NO: 12244 - DNA, 1598 bp, Homo sapiens
gctgacttacttcctcggggcctgcctcccctgagcgaagctacaccgcacttccgacagcacactccacattacttatcagaccatatggaatggaacacactgacctagcggtggcttctcctaccgagacagcccccaggaccctgagaggcagagtgtggtatagggaaaaggctccaggcaggagacctgtgttcctgagcttgtccaagtctctttccctgtctgggcctcactctaccgagtaatacaatgcaggagctcaaccaaggcctctgtgccaatcccagcactcctttccaggccatgcttcttaccccagtggcctttattcactcctgaccacttatcaaacccatcggtcctactgttggtataactgagcttggacctgactattagaaaatggtttctaacattgaactgaatgccgcatctgtatattttcctgctctgccttctgggactagccttggcctaatccttcctctaggagaagagcattcaggttttgggagatggctcatagccaagcccctctctcttagtgtgatcccttggagcaccttcatgcctggggtttctctcccaaaagcttcttgcagtctaagccttatcccttatgttccccattaaaggaatttcaaaagacatggagaaagttgggaaggtttgtgctgactgctgggagcagaatagccgtgggaggcccaccaagcccttaaattcccattgtcaactcagaacacatttgggcccatatgccaccctggaacaccagctgacaccatgggcgtccacacctgctgctccagacaagcacaaagcaatctttcagccttgaaatgtattatctgaaaggctacctgaagcccaggcccgaatatggggacttagtcgattacctggaaaaagaaaagacccacactgtgtcctgctgtgcttttgggcaggaaaatggaagaaagagtggggtgggcacattagaagtcacccaaatcctgccaggctgcctggcatccctggggcatgagctgggcggagaatccaccccgcaggatgttcagagggacccactccttcatttttcagagtcaaaggaatcagaggctcacccatggcaggcagtgaaaagagccaggagtcctgggttctagtccctgctctgcccccaactggctgtataacctttgaaaaatcattttctttgtctgagtctctggttctccgtcagcaacaggctggcataaggtcccctgcaggttccttctagctggagcactcagagcttccctgactgctagcagcctctctggccctcacagggctgattgttctccttctccctggagctctctctcctgaaaatctccatcagagcaaggcagccagagaagcccctgagagggaatgattgggaagtgtccactttctcaaccggctcatcaaacacactcctttgtctatgaatggcacatgtaaatgatgttatattttgtatcttttatatcatatgcttcaccattctgtaaagggcctctgcattgttgctcccatcaggggtctcaagtggaaataaaccctcgtggataacc

SEQ ID NO: 12245 - DNA, 513 bp, Homo sapiens
atgacgggaccccacacaatgcagacatccagaaatggatcactcccaagacccctggggcccagagctgcaccacccctccccacccacaacacccccgtgcccctttccatgtggattagaatgggtgctgaacaacatgatctcagcagttgaagctgctacgtgtgtgaaagcaaattctccacttgagggtttgcccatcattcaaacactattccagaaaataatgaaaaaaaaatgtgggatttattttagcacctctgagtggactgtacttttctcaacggaaaaaaaaaatgcccttggtccttgagacaaaagatttaatatacaaccatgtggcctcaggctgaccagatcaaagtggtttctaatccattctacatgtcaagtttaaatgaaccagactgcctgtgactttatgaatctgaaggtattacctgttgctgctttcttaaccaccatgagtaggtaaagcaaataataactcacagagtgtggatttttgag

SEQ ID NO: 12246 - DNA, 157 bp, Homo sapiens
ctttcttaactagtattgtccatatcagacctctgatccctcgcccccacaccccatctctcttccctaatcctccaagtcttcagcgagacccttgcattagaaactgaaaactgtaaatacaaaataaaattatggtgaaattatgaaaaatgtg

SEQ ID NO: 12247 - DNA, 239 bp, Homo sapiens
tggagctggttaagggtgggagagggcacatgggcttgagagtggggaggacacagtctggacttgatcctgctacagattcaacatatgactggacaatccggtcacctctctgggcctcagttaatgcatctgcggaatgagaggattgcattagaagataggcaatgattctttcactggatgtgacaataattgggggaaggggaaaagggtgtaataaaggttttagagcttgc

SEQ ID NO: 12248 - DNA, 1081 bp, Homo sapiens
agcatggagtgttgatgctttcgtctccagccccttctcagaatctacccaaaggatactgtaacactttacaatgttcatcccatgatgtagtgcctctttcatccactagtgcaaatcatagctgggggttgggggtggtgggggtcggggcctgggggactgggagccgcagcagctccccctcccccactgccataaaacattaagaaaatcatattgcttcttctcctatgtgtaaggtgaaccatgtcagcaaaaagcaaaatcattttatatgtcaaagcaggggagtatgcaaaagttctgacttgactttagtctgcaaaatgaggaatgtatatgttttgtgggaacagatgtttcttttgtatgtaaatgtgcattcttttaaaagacaagacttcagtatgttgtcaaagagagggctttaatttttttaaccaaaggtgaaggaatatatggcagagttgtaaatatataaatatatatatatataaaataaatatatataaacctaaaaaagatatattaaaaatataaaactgcgttaaaggctcgattttgtatctgcaggcagacacggatctgagaatctttattgagaaagagcacttaagagaatattttaagtattgcatctgtataagtaagaaaatattttgtctaaaatgcctcagtgtatttgtatttttttgcaagtgaaggtttacaatttacaaagtgtgtattaaaaaaaacaaaaagaacaaaaaaatctgcagaaggaaaaatgtgtaattttgttctagttttcagtttgtatatacccgtacaacgtgtcctcacggtgccttttttcacggaagttttcaatgatgggcgagcgtgcaccatccctttttgaagtgtaggcagacacagggacttgaagttgttactaactaaactctctttgggaatgtttgtctcatcccattctgcgtcatgcttgtgttataactactccggagacagggtttggctgtgtctaaactgcattaccgcgttgtaaaatatagctgtacaaatataagaataaaatgttgaaaagtcaaactgg

SEQ ID NO: 12249 - DNA, 1079 bp, Homo sapiens
aaatgagaaagaatgttctatcaaatatttatttaaattgttaatcttatgagaacctttttatttttgtacagagccatggtataaattaacaggttaatgtcagtcatcagatcttccttctcttcctaaggatgcttgtgttgcctcaatctatcaatctatctttcttgttttgggttgttttctctctctctctctctctctctcttcttagagacatggtctaaccatgttgtctaggatatagggcagtggctattcacagatgtgatgatagcacactggagcctcaaactcttaggctcaggcgatccttcaagcctcccggggagctgggaccacaggcacgtgccaccacacccagctctctttcttggtttttcatcatttcatgtatctatcaaagcccagttcacctcctcccccaaacacacacacacacacacacacacacacacacacacacaattaagttgctgcaaattcaaaagcttagagagaataagcttcttggtggtgaaactacaactctcacgtgtgctccagttctaaaattaacctgtgcctggtctctgaagccctttcttgctctgtgcctttcagccacatccttaggtgctaacggccatgagctccgactctccaaagtgagctccactttgggtctgaggagcccctggcagagtccacgctgcctcaggtatcatgggcgtaatgatcacccaggctccgggagatctcatggatgattactgtatgagacagaggggacttcagtctttccagggccttggtggaatttttggctctggtgttttcgccagacaataaacttacactggaagctttgattcaccctccacagtactccagaaaggactgtcctataagttgtacactttaaaaggtcatgtagaggttgtagtagaatggcttttcaccctggtgactttggaagaaactcttgaatactgcctgcatccgggcaccatggccaggttgcctaggagtggggtccactgatgaaaagaggtgttttgtacttacataagaaaaataaatttctgattgatttt

SEQ ID NO: 12250 - DNA, 2563 bp, Homo sapiens
cacagaggcaaaaggagaaaatcatgttgaaacaaaccgaaaatggacattgagatactatcattaacattaggaccttagaattttgggtattgtaatctgaagtatggtattacaaaacaaacaaacaaacaaaaaacccatgtgttaaaatactcagtgctaaacatggcttaatcttattttatcttctttcctcaatataggagggaagatttttccatttgtattactgcttcccattgagtaatcatactcaactgggggaaggggtgctccttaaatatatatagatatgtatatatacatgtttttctattaaaaatagacagtaaaatactattctcattatgttgatactagcatacttaaaatatctctaaaataggtaaatgtatttaattccatattgatgaagatgtttattggtatattttctttttcgtctatatatacatatgtaacagtcaaatatcatttactcttcttcattagctttgggtgcctttgccacaagacctagcctaatttaccaaggatgaattctttcaattcttcatgcgtgcccttttcatatacttattttattttttaccataatcttatagcacttgcatcgttattaagcccttatttgttttgtgtttcattggtctctatctcctgaatctaacacatttcatagcctacattttagtttctaaagccaagaagaatttattacaaatcagaactttggaggcaaatctttctgcatgaccaaagtgataaattcctgttgaccttcccacacaatccctgtactctgacccatagcactcttgtttgctttgaaaatatttgtccaattgagtagctgcatgctgttcccccaggtgttgtaacacaactttattgattgaatttttaagctacttattcatagttttatatccccctaaactacctttttgttccccattccttaattgtattgttttcccaagtgtaattatcatgcgttttatatcttcctaataaggtgtggtctgtttgtctgaacaaagtgctagactttctggagtgataatctggtgacaaatattctctctgtagctgtaagcaagtcacttaatctttctacctcttttttctatctgccaaattgagataatgatacttaaccagttagaagaggtagtgtgaatattaattagtttatattactctcattctttgaacatgaactatgcctatgtagtgtctttatttgctcagctggctgagacactgaagaagtcactgaacaaaacctacacacgtaccttcatgtgattcactgccttcctctctctaccagtctatttccactgaacaaaacctacacacataccttcatgtggttcagtgccttcctctctctaccagtctatttccactgaacaaaacctacgcacataccttcatgtggctcagtgccttcctctctctaccagtctatttccattctttcagctgtgtctgacatgtttgtgctctgttccattttaacaactgctcttacttttccagtctgtacagaatgctatttcacttgagcaagatgatgtaatggaaagggtgttggcattggtgtctggagacctggatttgagtcttggtgctatcaatcaccgtctgtgtttgagcaaggcatttggctgctgtaagcttattgcttcatctgtaagcggtggtttgtaattcctgatcttcccacctcacagtgatgttgtggggatccagtgagatagaatacatgtaagtgtggttttgtaatttaaaaagtgctatactaagggaaagaattgaggaattaactgcatacgttttggtgttgcttttcaaatgtttgaaaacaaaaaaaatgttaagaaatgggtttcttgccttaaccagtctctcaagtgatgagacagtgaagtaaaattgagtgcactaaacaaataagattctgaggaagtcttatcttctgcagtgagtatggcccgatgctttctgtggctaaacagatgtaatgggaagaaataaaagcctacgtgttggtaaatccaacagcaagggagatttttgaatcataataactcataaggtgctatctgttcagtgatgccctcagagctcttgctgttagctggcagctgacgctgctaggatagttagtttggaaatggtacttcataataaactacacaaggaaagtcagccactgtgtcttatgaggaattggacctaataaattttagtgtgccttccaaacctgagaatatatgcttttggaagttaaaatttaaatggcttttgccacatacatagatcttcatgatgtgtgagtgtaattccatgtggatatcagttaccaaacattacaaaaaaattttatggcccaaaatgaccaacgaaattgttacaatagaatttatccaattttgatctttttatattcttctaccacacctggaaacagaccaatagacattttggggttttataataggaatttgtataaagcattactctttttcaataaattgttttttaattt

SEQ ID NO: 12251 - DNA, 936 bp, Homo sapiens
ttttaggtgtggattatcaatttaaagtattaacgacatctgtaattccaaaacatcaaatttaggaatagttatttcagttgttggaaatgtccagagatctattcatatagtctgaggaaggacaattcgacaaaagaatggatgttggaaaaaattttggtcatggagatgtttaaatagtaaagtagcaggcttttgatgtgtcactgctgtatcatacttttatgctacacaaccaaattaatgcttctccactagtatccaaacaggcaacaattaggtgctggaagtagtttccatcacatttaggactccactgcagtatacagcacaccattttctgctttaaactctttcctagcatggggtccataaaaattattataatttaacaatagcccaagccgagaatccaacatgtccagaaccagaaccagaaagatagtatttgaatgaaggtgaggggagagagtaggaaaaagaaaagtttggagttgaagggtaaaggataaatgaagaggaaaaggaaaagattacaagtctcagcaaaaacaagaggttttatgccccaacctgaagaggaagaaattgtagatagaaggtgaaggagattgctgaagatatagagcacatataatgccaacacggggagaaaagaaaagttccccttttacagtaatgaatgtggcctccatagtccatagtgtttctctggagcctcagggcttggcatttattgcagcatcatgctaagaaccttcggcataggtatctgttcccatgaggactgcagaagtagcaatgagacatcttcaagtggcattttggcagtggccatcagcagggggacagacaaaaacatccatcacagatgacatatgatcttcagctgacaaatttgttgaacaaaacaataaacatcaatagatatct

SEQ ID NO: 12252 - DNA, 854 bp, Homo sapiens
agctttttctctggatgcaaaaaaagataagaatatcaggaaaatatatgtatctactcactctgctgtaggcagaccccctgaaactattgctgtggaataaaagatgaaatgctcctgattattgtaaatacaaaattgcatgcgggattgtgtaaagacaatgccaggttggactgccagaatgagccaacagcacttgcttccccctgtagagagcctatgaatggacgtgcagtcagggaggtttcatatcaccaagattcctatcccagaaaagcagatgttcatagctctgggaatggaatgcgcccctcgtggagagcctataaacggatgcatggaaggcgcctgtccatatggataagatagggttgtaaacgtcctcatcttgccatggctcttctaggcctctttagggttaaggcatatttccttctgagaatttctggtctaagcggttgtctagcttcatgtcctgtttccatggattgtttgtaaccagcttttgttacaattgttactgctgattaatatcttgctaatcataggttatggaaagattgtgtttctgttttaaggctctgttagaaattacacacacagtatattgtaaattcttatctctgtatactgtacttctacatacaaatgtactgtacttctacatacaaatgttatgttaaagaattacttcatccccatgtgaccatctcacctcataatcaaatgaccctaaatccctcattaacctacccctgcccttgctaaacttaataataaatgctggtatatccagtgcattgttggcaccatgggaccagaaggtggtgacccccctggacccagctttc

SEQ ID NO: 12253 - DNA, 2072 bp, Homo sapiens
ctgagaactctccccttcttccctctctcatcccttccccttcccttccttcccatttacccatttccttccagtaaatccacccaaggagaggaaaataaaatgacaacgcaagacctagtggctaagattctgcactcaaaatcttcctttgtgtaggacaagaaaattgaaccaaagcttgcttgttgcaatgtggtagaaaattcacgtgcacaaagattagcacacttaaaagcaaaggaaaaaataaatcagaactccataaatattaaattaaactgtattgttattagtagaaggctaattgtaatgaagacattaataaagatgaaataaacttattactttaaaggaaaggatttggagaattgaactcacaaactgatgttatatactcaatagcttaaactcatgataatgctgcgatgtgtggttttgcttgattttgtattttatttgggcatctggaattgacacaccattacattctgtttgcaggattttttttgtaaccatgaaattgaacatttccaaattataaactatgttaatacctataaaatatatagccaggaaccatttatcatcaagaaaagtgtaagaaattatttttgagatgtaatttaagattgttttatgtaaaaggaaaatcttgtatggcatcgaatagccttaatgagtttaattctttcacaaaaatgatttcaaattatcctagagtataacatttttatcaaagatattatttccggagttcttctttctttcttttttttttttttttagtaatttagcaaaaacattactgttctaatgctgaagtgacttttgccagtgccatgtccaggtggtgaggtataagttacttgctcttagcatttggtctgatttttttgctttgtggacacctttgagagtatccacaaagcaatgtctcaggtgtggacacctgagagcatgttttagaaagctttgtaccctgtcttgtggcaggaaagaaagaacaggggttttacataaggaaataagtcctaggaaattagtcaacgcaaattgcatttgcgtttgtaccttaccacagtcttatattgttttttaaactctgccatgaaatttggagacatgactgtgaaattcctaacttactatcttacaaagccagtagctaatttgttgctctatgtatgatcctgttacaagtccagtttgcaattcatttgtttcctagaacacagaagggtaccagtaatacactaaattttcaaggtgtgtagagaaataatatggaattagcagctatgactccaacagacaggattgtgtgagcagctgaaaggagcaaaaaagaactcagtgtaagagaaggcacatacatagttaagaatactaaagtatttttaaaaatcaaggaagaaataaatgttacacaatttgcattggaataaatagatctatttagtcctacaaatcaggagtggtgtagagacatccaaatttaaagaaaaaaaaacacaaaacagaatgttaaaaaatgtatgcagatttatggatattatcaatgagaagacatagcatgtaacttctcctatatctctactgtccagcatgtattgttccaaatatgactccctaaaatatatacactttgcagaagctctaggccctcacctcaaaccttgccattggttgccgtatttcaaggtcaatatagtttccctcactttacacaatcattattcttcaatagtggaccatatccttcaccaggtatcctatttctgttatctagaggttagcagaaaatgaaatgaaggaatttccctaagcagttgggaagaacaaattgtatgcatgtaggcaaagattttgaagatacatttgcaagagatatttgtttaaccaaaatatttggaaagtaacaaataaagacatttaaattttctaaaaatggacttgctcttctaggaaaagaatacccctggggcaaaaatataactctagctgtatttcttcttgtcactcttgattcaacttgattataaatacacctgtcactaccagaaccaaaa

SEQ ID NO: 12254 - DNA, 1566 bp, Homo sapiens
gtgttagctgacttttttttttcctgattcttaaactctgataatgtgtcgtgtggtttgtgatgctatctttctgttttttacatatccagcctagattggatttgttaagaacaaattttaagtttcctggttctgcaggatggtgcaggctctgaaacagtatattactatttcatattctgcctctgatttcgttgtttactttttgtagttattgtcatgctctttagtttgttggagttttttttctttttaaggagatcttaagccatagatgaaaatgcccatgaatcctcttgcttttttctgtttcatacttggtgcaaatttgttcatgggtatggggaaacaaatctctttctgatgcttaacgattctatcctattatttttattattttgtttttgtcttttttcttatgagctttcaccactactgatatttgagaatcatatgaacctgggaactacttggcatgttagctggatttatttattttggccagtgaccagagtagtttccccccttttccaccaaacaatgtaaactttgaaagtgataatactacaaattgtgttttggagcaacttcattgaatgtaattgtcctcaaatcagagaacactgggtggtttgaagggtgtctttgacagttttccaagcagaattaaggtttccaaatgttaattttagcatatgtaattatttgaagccttatttaaatcctattaaagaacataccattataattattatttgcactaatctttgccattgtcagaattgcaaagtgtgtttcaatataaattaacaaccactctcgaaattctatcattttttcattttgcccatttctatcagtgaaatgattctttgcatttgcttagttctccttcagttgtggggtcctgctttgccctctttgatattcctggttcctgtcttactgagagaagttgttaaagctttatacatgttgaccccatctaaagctggggaaaatatacacttgatgaagtaggtgtctttgtatttatttcttttggggtcatagaggtaagcttttttgtaaaatctctactcttcctgagagttttgagaaaaactggcaggaagaacttataatccccaaatagaagataccacgtctgttcaaaagcaggtattgctatagagcagcacccaggaaatatctgtgggtggcagccttggtatagaggtgtcctgtcttcatgagtgaagttacttgcctgattaggtgctggaaggtattggctccctgttttggtgtggactcatggcaagctggtgtttaagaggtcaggaggcctgctgatctttcaaaggacacccatgatgtctactcatagaaagggcaagtaacgtgttcattttggtcttgaatgtccaaactcaagggttggattttggccaattgaaatcagacatatgcgatcttgggtttttgcatggaaattaatgtaatgcttataaatgaaaaatgaaaacatttcaaccatctaagtcaaacacaaaaataataaaaaaagaaacatactggcct

SEQ ID NO: 12255 - DNA, 574 bp, Homo sapiens
aggacatgtgatatccaagttgatattacagagaaacaatgacaaaagggaccagtttcattgattttaagaaatgagactcttgtaacatcagctggagttttggggctacctatcaaatcatggtgacaaactaaagtctgtttgataaaatactgtctacagagaagaacattgacccagaagagtgctttcctcttggcttctgaaggtattagaggcattcagtgaaggcaagaatgggccaagaatttctatgggccaagagacaagcaggctaaaggggaaaaatatgtgatctttcctcttaggacaggacaatactttcctttttataaaaatgagttgaggggaagtagtactgtgtatactcacggagttgtaatttttgaatttttacttcatcgatggaaaaactaatgcgtgggaaacattacaccaatctttactgtctgggttccttttctctgtagtacttttcagatttgaggctttttcttctgtttctggccttacccaacatattgttaaggataagcttagcctatgctgcaataaaaaacaactctcagat

SEQ ID NO: 12256 - DNA, 4048 bp, Homo sapiens
agaggcaggctggagcagggctggggaatgatgggactggaggacctgggaatttcatctttctgcctccacccctgggtccatggagctttcccgtgattgctctttctggccctagataaaggtgtgcctacctcttcctgacttgcctgattctcccgtagagaagcaggtcgtgccggaccttcctacaatcaggaagatagatccaactggccatggcaaaagccctggggatttccgattcatacccctgggcttccttcgagagggctcttcctccaaatcctccccacctgtcctccaagaacagccttccctgcgcccaggccccctccgggcctctgtagactcagttagtccacagcctgctcacttcgtgggaatagttctccgctgagatagcccctctcgcctaagtattatgtaagttgatttcccttcttttgtttctcttgtttgtgctatggcttgacccagcatgtcccctcaaatgaaagttctccccttgattttctgctcctgaaggcagggtgagttctctcctcaaagaagacttcaaaccatttaactggtttcttaagagccgtcaatcagcctggttttggggatgctatgaaagagagaaggaaaatcatgccgctcagttcctggagacagaagagccgtcatcagtgtctcacttgtgatttttatctggaaaaggaagaaacaccccagcacagcaagctcagccttttagagaaggatatttccaaactgcaaactttgctttgaaaagtttagccctttaaggaatgaaatcatgtagaattttggacttctaaaaacattaaaatcagcttattaatacgggatagagaaagaaatctggtgcctgggggtccctgtgttcacccctagagtttgttttaaaatttttaattgaagcatgtgaagtgtacctgcagaaaagtgggaacatgatagtgtatggcttggtggattttcacaaactgaacatacctgtgtaatcagcatctagacccagacccagagcgtcacaaatatcccccatcctgggcttttcccagaggagatgggggcttctgaagatggacttacctgggacctgccccccatgagccaggacggtccccccacagtcagcctgtgcaaaggccccgtggccaggggtggaggagaatatgtgggtgtggacaggatgggagactgtggcctgaacaggagattttattatatctggagaccctgagagaccctgagacctggggcaccctggctggccaggtcagaagcatcctgactgcagaggtccgtgcagccacaccctcttccctgccagcaagctgtctgcggctcatcggaggcccctccgcctggagccttctatggacgtgatatgcctgtatctgtttttaattttcattcttcacttaggggaagtgaaatcgctcagagatgagatcctttaattgaaaacgaagtgtaacggaatctagtgtctttctaatgtggtaaaattctccatcaacatcacagtcagctggcagctgaacttcagaatctcacttacagcaggcgacacgggggtacaccgatgggtcacactgggtctgggggctccctggagctcctcctgcgtgtggtctggttaggagttgagttgtttgctccagggttattctcctcctcgagtcacagtcacacgaatacctgccttctctggctttcctgctatacacatattcacatggcgctcaagaagttaggctcatggcaacgtgtgtctttctctggacaactggcccagtttacagtgaaatggagaatttcaggtctccacgtctgcccaggaaagaacttcagctgactccacggggatctggaaatccacgaccaatcccgatcggctcttattagctccccgctccacaagacacctgtgctttggaaatccaccaccaatcccgatcggctcttattagctccccgctccacaagacacctgtgatctggaaatctaccaccaatcccgatcggctcttattagctccccgctccacaagacacctgtgacatcctccagggccacaggagcacgtgctgaccagttttcccttccagttcctgcacaaaaagtgtccagagggctgtttgcaaacactagtgcactttgtagcttttcaccctctgtcccagggaatctaggagagatgaggcccgtcagagtcaagagatgtcatccccccagggtctccaaggcatttccacactattggtggcacctggaggacatgcaccaaggcttgccagagccaacaggaagtgagcccagagcatggcacatgagcatcacccgctgatggtggcctgctgtgcctggtgccaacaggggcatcccggcccatacccctccagacaggaagcatgggtttgcccacagacctgtcgggtgctcctgtgagtggcctccagatgtctttgtgcataggcacaagtgggccagggctggagggaggtgggaaacctcatcatccggtgggccctgccaatcttaacccagaacccttaggtattcctggcagtagccatgacattggagcaccttcctctccagccagaggctgacctgagggccactgtcctcagatgacaccacccaggagcaccctaggtgaggggtgagggcccccttatgtgaacctcttgcctcttcctttctcccatcagagtggttggatggagccattggcctccttttcttcagcgggcccttcaacctctctgcaccatgttgtctggctgaggagctactagaaaagctgagtggagtctcctttccaacaggatgatgcatttgctcaattctcagggctggaatgagccggctggtcccccagaaagctggagtggggtacagagttcagttttcctctctgtttacagctccttgacagtcccacgcccatctggagtgggagctgggagtcagtgttggagaagaaacaacaaaagccaattagaaccactatttttaaaaagtgcttactgtgcacagatactcttcaagcactggacgtggattctctctctagccctcagcacccctgcggtaggagtgccgcctctacccacttgtgatggggtacagaggcacttgctcttctgcatggtgttcaataggctgggagttttatttatctcttcaaactttgtacaagagctcatggcttgtcttgggctttcgtcattaaaccaaaggaaatggaagccattcccctgttgctctccttagtcttggtcatcagaacctcacttggtaccatatagatcaaaagctttgtaaccacaggaaaaaataaactcttccatcccttaaagaatagaatagtttgtccctctcatgggaattgggctgtatgtatattgttcttcctccttagaatttagagatacaagagttctacttagaacttttcatggacacaatttccacaacctttcagatgctgatgtagagctattgggaaagaacttccaaactcaggaagtttgcagagagcagacagctagagataactcgggacccagagttggtcgacagatgttagatgtatcctagcttttagctataaaccactcaaagattcagcccccagatcccacagtcagaactgaatctgcgttgttgggaagccagcagtggccttgggaaggaagccatggctgtggttcagagagggtgggctggcaagccacttccggggaaaactccttccgccccaggtttcttcttctcttaaggagagattattctcaccaacccgctgccttcatgctgccttcaaagctagatcatgtttgccttgcttagagaattactgcaaatcagccccagtgcttggcgatgcatttacagatttctaggccctcagggttttgtagagtgtgagccctggtgggcagggttggggggtctgtcttctgctggatgctgcttgtaatccatttggtgtacagaatcaacaataaataatatacatgt

SEQ ID NO: 12257 - DNA, 1779 bp, Homo sapiens
accaatgggaaaatcttctaattacttagaacctgaccagatgtggctcggaggggaatccagacccgctgctgtcttgctctccctcccctccccactcctcctctcttcttcctcttctctctcactgccacgccttcctttccctcctcctccccctctccgctctgtgctcttcattctcacaggcccgcaacccctcctctctgtgtcccccgcccgttcctggaaactgagcttgacgtttgtaaactgtggttgcctgccttccccagctcccacgcgggtgtgcgctgacactgccgggggcgctggactgtgttggacccatccgtgctccgctgtgcctggcttggcgtctggtggagagaggggcctcttcagtgtctactgagtaaggggacagctccaggccggggcctgtctcctgcacagagtaagccggtaaatgtttgtgaaatcaatgcgtggataaaggaacacatgccatccaagtgatgatggcttttcctggagggaaaggataggctgttgctctatctaattttttgtttttgtttttggacagtctagctctgtggcccaggctggcgtgcagtgggccgtctcagttcactgcagcctccgcctcccaggttcaagtgattctcatgcctcagcgttctgagtagctgggattagaggcgtgtgccactacacccggctaatttttgtactttttaaagtagagacggggctttgccatattggcctggctgatctcaaactcctggtcttgaactcctggccacaagtgatctgcccgccttggcctcccaaagtgctgggattacaggcgtaagccactacacctggccctcttcatcgaattttatttgagaagtagagctcttgccattttttcccttgctccatttttctcactttatgtctctctgacctatgggctacttgggagagcactggactccattcatgcatgagcattttcaggataagcgacttctgtgaggctgagagaggaagaaaacacggagccttccctccaggtgcccagtgtaggtccagcgtgtttcctgagcctcctgtgagtttccacttgctttacatccatgcaacatgtcattttgaaactggattgatttgcatttcctggaactctgccacctcatttcacaagcatttatggagcagttaacatgtgactggtattcatgaatataatgataagcttgattctagttcagctgctgtcacagtctcatttgttcttccaactgaaagccgtaaaacctttgttgctttaattgaatgtctgtgcttatgagaggcagtggttaaaacaggggctggcgagttgacaactgtgggttcaaatcccagctctaccacttactaactgcatgggactttgggtaagacacctgcttacattctctaagccttggtttcctgaaccttaaaacaggataacatagtacctgcttcgtagagtttttgtgagaattaaaggcaataaagcatataatgacttagcccagcggcctgcaggcaatacatgttaatgaatgttagctattattactaaaggatgagcaattattattggcatcatgatttctaaagaagagctttgagttggtatttttctctgtgtataagggtaagtccgaactttctcagactggaggttacattcacatcagtctgtcttcccctgcggatggcctcagccctgggtggccagactctgtgctcacaatccagagcaatggatcc

SEQ ID NO: 12258 - DNA, 855 bp, Homo sapiens
caccttctggagccagctcatcagctcagagcccagggtcaggagttcgttcagtaacgcagcgggaatcaatctgcactgacaccgcggcaggaactgaagctgccctggcaagtgaggaaccaggagccgtcactgagtgtggctgggctacatcatagctcatcacggagctacgactttgggtactgcggacagacctggataggcccagcattcgttctgaagatcacagttcacagaagcttttgcttcgtaaagataatccaaaggatctcagacccgctcttccttttcccttcattcccttgagagtcagccatgaacggaatacctgctaggttccaggaatgagctcacctaacagatagcaaatgtgtctggttagatctcagcagagcccattctgcaagacctggctgagccagatgagagggtgggccctgtgctggggggccttgggtcacacacaggaaccgagacctggcttccaccccccagtcacccacttgggttatctgctggaagttatcgataggactgtgtggccaaccaagtgcttgtgagatcactgacactgcaaaaacaaagcaaactgctccgggtaccaggacttcctccaacctggcaagggtgtgcgctgaggcggggcttgcaggtgagggggctgtatgcttcaggaactaactaaatgcatgcagaaggtaagaggcatgatgggaggtgttcaagcacagcaatcccatttgggagttattttgatactgcgatgagtaagggtaagggcgcatggaatggggctaaggtgggagtgaacactggggtgaataaattttaaatcaattcaagtatctc

SEQ ID NO: 12259 - DNA, 1277 bp, Homo sapiens
ggttgggctgcaacagaaatgtcatctgcattgtgcagatggaaaagagcagaagctgcctgttgcctgtggaaccgtcccaagacactagcactgtagaacgggccctgctcttgcagagcacggctgcacccaacagtctccatgtcaagaccaagggcctcctggaaacaccaactctgacaaaaaggagtcatctgggagcccgagaatcctactcctggccgggcacagtggctcacgcaccaacatggagaaaccccgtctctactaaaaatacaaaaaaattagccaggcgtggtggcgcgcacctgtaatcccagctactcgggaggctgaggcaggagaatcacttgaaccagggaggcagagtttgcagtgaatggagattgcgccgctgcactccagcctgggcgacagagtgagactgcatcacaagaaaaaaaatttgcaagggatggttcacgagacacatttgggacgaaggtgaaagagaaattccccattctgagtgtcctagttgggttcctccgactctaaacaagggacttgggttcagttagtgtacagcgggggctcacgtccactaaggaacatgtagaatgtaaccaccgggtgacagggaagctgcggtatttactacctagcccccatcttcactggttattccacttatttaaaatgtccagaataagcaaatctccatatagaggaagtagattagtggttgcttcgggatgggaggaatgggaagattgaggtctttcttttgcagtgataaaaatgtcctaaaattgactgtagcgatggtcacacaactctgaatatgcttaagaccattgaattacacactttacgttggtgaattgtatggtatgtaaattatagttcaataacatagttacaaaagataatcaaaagcatgaaagcactgttgatgtggtttggatctgtgtcctcaccgagtctcatgttgaaatgtaagccccctggtgggaggcgatgggattatggggcagagtcctcacgaacggtttagcaccacccgctcagtgctgttctcctgatattgagtcctcatcacatctggttgcttcaaagtgtgtggtgcctcccctctgtctccctcctgctctggccatataagatgtgcctgcttctccttcgccttctaacatgattgtaagtttcctgaggcctccctagaagcaaaagctgctgtgcttcctgtaccatctacaggaccgtgagccaattaaacctcttttctttataaa

SEQ ID NO: 12260 - DNA, 1429 bp, Homo sapiens
gcgctccccgtgccttgcccccggggcctccagatctgggggaaggacagggttccttgggacagacccaagggcagtgtctgacccgctagagagacaccgcagggaagtcctgtgattaaggtgctgagacctcctgccgggcaggtcactgtgctgaggccacccgccaaggactggcctgtgcactgctggtgcttgggaccttattcctccagggagcaggcgacacaaaggacacgcatgtccagtgggctgggaagcaagcacttgaagagaaggaaggggagaaagggtcccccttgctgtctgcctctgaggaatggaaatcctttagacccggccttttttggaccaatataaatttaatttaaattgacagccttccatttttcgagaaagtacaaacagaactgctttagcacccatcgagccccaaacgggtaaggtaagccaaggttttaatgaccagcccagtatctaagcttccaaacgaatgccagcccatcacatactcaccctgggaggctgctgcacgcgcattctcctgatgctcacgtcacttggtgtaggtttcaggatcgcctctttgaggaaggacttcaggaccaactggggcctgcataagaaaacttatctcattattagagtactcacagcttgtatctcccagctacatcctagaaccccattgtcctttattccaccaaaccagctccaggtgaccagactctactcagaaagcaaattcgtcatcaaagaacagagactggccaccacaaggacatgcaggagaactgtcgggaccaggaagactcattccaaaaagcccaggccgggcacagtcgtcaagcctgtaatcccaacactttgggagaccgaggtgggggtatcgattgagcctcggaggtcgagatcagcctgggaaacacagggaggcccccatcgctacaaaatattttaaaaattagccaggtgtggtggcttgtgcttgttgtcccggctacttgggaggctgaagtgggagggtggcttgagtccaggagttcactgcactgagctgtgatcacaccactgcactccagcctggacgacagagtgagacgtccatctcaaaaaaaaaaaaaaaaccaaaaaggaacccagcaattcccaagtgtgaccatgtgggcttggaagacatgtcactcatgggctagtaagcattctagtttctttgtttaaaaaatccccttatcataccacgttagaccgtagaccttagcagaaattaaagcgtcatttcttttgatggggcctcctgtacgtaggctgcagacgtgaaagccccaggggtccatttgtatcaattttcatcttgttttgttttgatttcatttacgtttttctttttcccatgagtgaggatagccaataaatcatctttgag

SEQ ID NO: 12261 - DNA, 4578 bp, Homo sapiens
atttttttaaaaatgggaaaatatgaaatctggtgaccccctaatgtatacagctaaaaaatcacaatttttttactgctttaattctacttaattttggtagatattgaatggcttggaaaagaggtacccattcatatatttataaattaaaacatagttatctagtagtaggagaggaacctagtttaggacctcttttattaaaaaagcctatttaaagggctatttctgtagacagaagttcagtctagatttaggccatctctaggttacaagatgataggaggttagacaaaagtgattcttttgccaatgggtggtggcattgatttttttcctccatgcatcttgcccaggatcactcagtcaagcatgtcttcatcaagtggaagccaactgtcctgcctgcctcaagaatatgtgttttctttagcttccctgaggctttttggtggttcagaaataggtgtgtgtgttgatgtgtttttggtaacctagctttcatacacataatatatgatttattagaactagagaatgtgttttccccgtttgttcataaatgcggtcggttatacttcttaggtgacaggttattgtccagtactttaatgtatgtatgtataatggctgtacaggtagaccataattcagtcctttagatttattttatgcagcaaaaagaagctcttttttttttttaatcacaaaaaaaaaccccagttcaaaatgtgtagttcttcattgttgggttgattccccaaaaccttgacagatgtatcgatggaataaaagtatgttttaaaggttacttgaatgtcacaaaattatgccttcatcaaaactttaaaggaaaaatcaatttataaaatcatgtaggccatttttatatttgaaatttgtccttttaaagatagttttgctgttgctcctagtgaaagaaaaatctctgtacaaaggagaaaaagaaccccacttattcttagttaatactaaaatatatagcaataaattgctgtttattttttctacatctattttgtgtacttgtacacagtgtacattcttttaaattatatcgtgtatatagctttagtattcggttacatgattcacagacccctgaattccaaaatattatggataaacattaccatttatatgctacaaattagtctgattccatctttgaaaatgtcttaaagtataaaataattaatttgctttttttttttttttttcccgagatggcgtcttgctgtgtcacccaggctggagtgcagtggcacgatctcagctcactgcagcctcctcctcttgggttcaagcaattctcctgcctcagcctcccgagtagctgggactacaggcacccgccaccattccgagctaatttctatatttttagtaaagacgggtttcaccattttggccaggttggtctcgaactcctgacctcaggtgatcagcctgctttagcctcccagagtgctgggattacaggcgtgagccaccgcacccagcctaatttgccttttgattccttcccattgttgtcaacaattaagtctattcttcttttagaaattatatgtaaatgatattattgatactctttctaaataagaggttttaaaatatataaaaactttatgatccaattatagataaattttctaacatttcccagtcactagggttttataagttgattaaacatcaaatcagaatctagccaagcaggaattatattgaaataagttcacattacagaaaaggttccataatttggccaaactgcatgcatgtaatgcttatttagtaatggtcactgtatgttagataaggataaaaatatatttgtgaattacttctgaggaaatgctaacttccacagcattgtatttaattataacaataacaggaacattaaatctttatctttgctgtttcacctcaaagtcatagatcatctggctttttaggcaccttcactaaaggcaaaaatctgatttgtagtttttattagcatgtaccttgaaattatttgaccaagaagctcaaagaaaagaagtacgttaaagaaaaagaaaaaacctcacttttcctttatagtgtcccttcctgttttaattcctaaagatcctgacttttatctgaggaagtctaggtagttttccttttggatctggccattggtgcgtgtttcattcagatcacctctggaatctctgtggttgtgaaggcaattccttatgagactcttgcctcctgtggcttacgtgatgaattgttaatatggcagtaattaattagtatctacttaaatttagtggtcagaaatgtatttgaagtgccttaaagatgatcatggttcagaatatcttcagagaaagcaaaatctttaatattgcagggagcctagcaatacaagtacacatttctgtggcttgatttcttgaatatgctgagacccaatttggactacatttggcagaaatgatggagtaaacagcaaggctttaaattaaattaatagttacaaggtaggttggctcttaggtgaatttagccatgtcaactaatagcttttatatggtatgtaacaaatctgaattatgttatgctgtgaattattcagtgcattataagaaatcttagttaatcatgcttttgggcttcattagtcaatgtgattggccttttattttctttccataacttatctgctattattagtttcttattccttattattaatctgttagctcattatcattagcttactaacttgaaagttagattaatatcaaaataagaatagcagcactatgaagagttaataaaatgcaatttcatgttagagctagaataaaagtaattgagcagtcatttgcaaatgcttcattataacatttatgtgcttaagatttctaaggttttaaaaagttacctttaatacaatccttagaaactcagaaatttcctgatattcattagattatggtgtttgcctaatttataccggttttcactgtatattttaatgaactttgattggttacttttccagacatacagatttaatttggaatatgaactttggttcttcatgagtgcattttgaaaaagaaaaaaagtacacattcagaatctggccaatttaagtttgtattttaaaaatattttatgcatgttaagtatggtcgcagtaaatgaaattgtgtttaagactaaatttactaccgttttgaacagacattcccagatcattcttatattgtcagataacacttgtgtataatatcactttggatcatggacatgagctggaaaaatgatgtatttttgtagattgtatgtccagaatgactttagaaccgcatgatacggtggaaggagcactggactagtcgtcactaccctttttggattcagggctcctcacaattaaaatgagtgtaatgaaacaaggtgaaaatatagaagcatccctttgtatactgttttgctacttacagtgtacttggcattgctttatctcactggattctcatggtaggatttctgagatcttaatctaagctccaaagttgtctacttttttgatcctagggtgctccttttgttttacagagcagggtcacttgatttgctagctggtggcagaattggcaccattacccaggtctgactgaccaccagtcagaggcactttatttgtatcatgaaatgatttgaaatcattgtaaagcagcgaagtctgataatgaatgccagctttccttgtgctttgataacaaagactccaaatattctggagaacctggataaaagtttgaagggctagattgggatttgaagacaaaattgtaggaaatcttacatttttgcaataacaaacattaatgaaagcaaaacattataaaagtaattttaattcaccacatacttatcaatttcttgatgcttccaaatgacatctacagatatggttttgtggacatctttttctgtttacataaatttatccacttaaaatgtgataatgtggagacaaagcaagatttgattacataaacttttctctgcattggtcttttcactatcttatttgctaacttttcttatttttcttcaacctccccaccctccattttttggatattaaacagggaaagcttgctacattataaagattgttggcaccatttattttacacaaaggctaaaggttaacttttggaaatgatgagctacttttatatatgtgtttactcatgctttgtgatatttctggatcattccagtcataaagacttattacatgtactatttcttgctacctgtgaaaaggtatattttaaagaatgtataaccaacagtccatttactttttattagtatgtagaggatttgtatctaattcatgaatgtagttttacagtagtttgtcattgtaaatggagcaaagtacattatcttctaaaatgtacattatgtaagaattgtaaatatacttaagtaatttgtatgccaaaaaattacaataagtcaataaagatctcacctctg

SEQ ID NO: 12262 - DNA, 2469 bp, Homo sapiens
acgagatttgttcaacactgcaattgtttgttagatgtaaaccctgtgactatagtacgttgcttcttgttcttcacaattcatgacttaagtaccaaaatgcataccagttattatatattgccaagaattaaatgataaacttagagactgattagactgaaaatgcctaatcgatatatatattcttgtgcctagtactttaccacaaatacagtgtaatatcatcagtccaaaactgcattacttttgtaaaaacactggttaatttgtataagatattatagagctttttatgctttagaagttaaacaatatctttgggggggaactaatttattttcatcacttgaaatgtggtagctcttacaaagtttattgatttgatttttttaaaaatcaaaagccaattgaacaacaggatatatagactgataaatatttaggctgaatagtattttaacacttgtcttcaacttgatttgtctgtttaattgaaaagaattataagagttactgttgcattttctgacctactatttttaaaattcctgttgagtttctttgtgtttacaaggaaaggactgaactttttctcatcaaaactagcttttttccccacaaataaattatcaggttaaactttcaccaatgtctgctctgttttttgtttttggggggttttttgtttgtttttgttttttaatgtttttggtacactgggcagacttcagagcagttttttaaaaaaataaatattctaatgtagctatctcgccattccctttaaatacctgtcttaacctcctgcttttctttcctactcctttccacacatacgcacacaatcttctaccttttaaaggatcattaagactgtcaccacattaggagctctttctctcactcttctgtcatttgctgctatgttgaaattcttattttgaccatcaatgcctatgaattcttctaatacgtgaagaaaatagtttgagtagcagcagtgctataggtgggaaatacagtttagctgctgaatttctatacctctctgatttacagattgctaattaaatggctattattagtttggattaattagacttaagaaaacaactaactgagggttttttttgtttgttttttgagggttttctttgcatgagagttgtatgtaaccagtgatatgattattcctgaatgtacagacagaagtaagcctggacattgttaaatagtccctgctttaagggactacgataatgtgtactatgacaaacgtgctttattcttctaacgcagtaagaattaggtggaattttttccttcaaccaagtgcaggaaagccctgtgtgtcttggtttagttatggtttcatttctagccatacaattgatgaattgtgtacaacttttgttagtaccaaaataatctgttatatgaacagacttctaaaataacgtctgtatattttatatatagatacatatatgaaagaaggcttttattgaacagcttatcttccacttgcaggtttatggaaacagcagtatttgaaaataaataaaaagtgggagaattccttgctgttagaagaatgtggccattattttgattttttgaatgagatatataatcaaagtactgctgaactgtgagtgcagtattctaaacatttcagctaggaataccactgatttagaaacaaaactgtttgtctctggtttctgaatttaaaatgttgggattacctgtttaaatctgtcttgggggatgtagagattaagtctgtacatgtgcgtgcacatatattcatgcaccctctgattttggttttcttgtttctgagttcttagaaagtacccacatactcttttttttttttttgtagaagtagctgtcatagagtgaagaaaaggataagactttaaacagttgattctttttgtgttttctacaaactattttttgaaatttaaatcacaaactcattttctggtttttagaaagtagatgatgatttcagaggagtaaggcatgccaagcagcatgctcagtggggttttaggctgtcacatgcagctgagaaaaggtatgttcaagtcataagtaggtaattgatagggtatgaactagtcaaaatatgaaccattatgattcaagttagattttcctctggagagacagatctgaatgttcagttctagccaaggtagattttactttcaactttttaatcagtatcactttctgtgcttaactatttggtgttaccttgtctgttttcatttgtctaaaattctgcagagatgactaaaatttgacataatggtgtaaatggattgttaaggtaactttcagttgaagattaaagcaagatgccattttccccatgactttggttttgtttacatttttccctttcagttagtatacactacacgtactgtaataaaatacaataatatg

SEQ ID NO: 12263 - DNA, 410 bp, Homo sapiens
aggggcagctgtggcctaggctacctcaagactcacctcatccttaccgcacatttaaggcgccattgcttttgggagactggaaaagggaaggtgactgaaggctgtcaggattcttcaaggagaatgaatactgggaatcaagacaagactataccttatccataggcgcaggtgcacagggggaggccataaagatcaaacatgcatggatgggtcctcacgcagacacacccacagaaggacactagcctgtgcacgcgcgcgtgcacacacacacacacacacacgagttcataatgtggtgatggccctaagttaagcaaaatgcttctgcacacaaaactctctggtttacttcaaattaactctatttaaataaagtctctctgactttttgtgtctccaaa

SEQ ID NO: 12264 - DNA, 816 bp, Homo sapiens
gatgcgtctggagagccagagggcctgcctgaaggaatcacctgagcctgtccgtccaccaggagtggggagatgcccccatccagtcctggaggacccgctgctcctgctgctcccggggatggagcaaggccaaggctgcgggaggctgggagccctgccctgcccatccctcctgcaccagcgctgtccctgcacactttggttcagtcccggtgcccctgccaagatgtggaaggggccgggtgaagacaggcttgagggctgccccagcaggctctgggtatgacctgcctctggccctggtcctgggcggggcctgtgggtggagtagtacccccaggccctgccctgggtgacagactgggaggaaaccaggctggacctgggcaggcgggatgtgttggccacagggagaggcggaccggcacccggtgggacctcctaggactgggccttcttccagggggcccctggcagcagctggggtgtcgggcagaatgtgacttgtggccttaccatggacttgaatgggacttggctggcctcaggatcttgtgcctggaaatagcctgaggtggctcaggaagcggagaaagggtgccagaccattctctggcggggaccagggcccaaggccccagggctggaaggagaccaaggggcagccgccctggagggacatcagtgcttcctcttccacccaattcccccacgcggttccatgttttcccaccagcctgttggcgaagttgctgctccggcattcagtacctgcttcttccagagaaataaagttagtttctattttatgtt

SEQ ID NO: 12265 - DNA, 2463 bp, Homo sapiens
atgtgatacccatagcttccatgagaacagcagggtagtctggtttctagacttgtgctgatcgtgctaaattttcagtagggctacaaaacctgatgttaaaattccatcccatcatcttggtactactagatgtctttaggcagcagcttttaatacagggtagataacctgtacttcaagttaaagtgaataaccacttaaaaaatgtccatgatggaatattcccctatctctagaattttaagtgctttgtaatgggaactgcctctttcctgttgttgttaatgaaaatgtcagaaaccagttatgtgaatgatctctctgaatcctaagggctggtctctgctgaaggttgtaagtggtcgcttactttgagtgatcctccaacttcatttgatgctaaataggagataccaggttgaaagaccttctccaaatgagatctaagcctttccataaggaatgtagctggtttcctcattcctgaaagaaacagttaactttcagaagagatgggcttgttttcttgccaatgaggtctgaaatggaggtccttctgctggataaaatgaggttcaactgttgattgcaggaataaggccttaatatgttaacctcagtgtcatttatgaaaagaggggaccagaagccaaagacttagtatattttcttttcctctgtcccttcccccataagcctccatttagttctttgttatttttgtttcttccaaagcacattgaaagagaaccagtttcaggtgtttagttgcagactcagtttgtcagactttaaagaataatatgctgccaaattttggccaaagtgttaatcttaggggagagctttctgtccttttggcactgagatatttattgtttatttatcagtgacagagttcactataaatggtgtttttttaatagaatataattatcggaagcagtgccttccataattatgacagttatactgtcggttttttttaaataaaagcagcatctgctaataaaacccaacagatactggaagttttgcatttatggtcaacacttaagggttttagaaaacagccgtcagccaaatgtaattgaataaagttgaagctaagatttagagatgaattaaatttaattaggggttgctaagaagcgagcactgaccagataagaatgctggttttcctaaatgcagtgaattgtgaccaagttataaatcaatgtcacttaaaggctgtggtagtactcctgcaaaattttatagctcagtttatccaaggtgtaactctaattcccattttgcaaaatttccagtacctttgtcacaatcctaacacattatcgggagcagtgtcttccataatgtataaagaacaaggtagtttttacctaccacagtgtctgtatcggagacagtgatctccatatgttacactaagggtgtaagtaattatcgggaacagtgtttcccataattttcttcatgcaatgacatcttcaaagcttgaagatcgttagtatctaacatgtatcccaactcctataattccctatcttttagttttagttgcagaaacattttgtggtcattaagcattgggtgggtaaattcaaccactgtaaaatgaaattactacaaaatttgaaatttagcttgggtttttgttacctttatggtttctccaggtcctctacttaatgagatagtagcatacatttataatgtttgctattgacaagtcattttaactttatcacattatttgcatgttacctcctataaacttagtgcggacaagttttaatccagaattgaccttttgacttaaagcagagggactttgtatagaaggtttgggggctgtggggaaggagagtcccctgaaggtctgacacgtctgcctacccattcgtggtgatcaattaaatgtaggtatgaataagttcgaagctccgtgagtgaaccatcattataaacgtgatgatcagctgtttgtcatagggcagttggaaacggcctcctagggaaaagttcatagggtctcttcaggttcttagtgtcacttacctagatttacagcctcacttgaatgtgtcactactcacagtctctttaatcttcagttttatctttaatctcctcttttatcttggactgacatttagcgtagctaagtgaaaaggtcatagctgagattcctggttcgggtgttacgcacacgtacttaaatgaaagcatgtggcatgttcatcgtataacacaatatgaatacagggcatgcattttgcagcagtgagtctcttcagaaaacccttttctacagttagggttgagttacttcctatcaagccagtacgtgctaacaggctcaatattcctgaatgaaatatcagactagtgacaagctcctggtcttgagatgtcttctcgttaaggagatgggccttttggaggtaaagg

SEQ ID NO: 12266 - DNA, 301 bp, Homo sapiens
tgtttcctccctcctttcctgtcctccctttctgtcccattaccttcagaagctctctgttgaattccaaattgtgaccccaacactaaacctaaggacagctacaaaggaaagacaactggggaaagaagacctaggactgggggaacccaaacagcctgtcctgcaagtgacatcactcacccacacgaaggagggggactgcaccttagaagcctgctctgcatccatttacccccccccaagggctttgtttcactgtttatgttcacgtgatctcaacagggaaattgtcattttc

SEQ ID NO: 12267 - DNA, 99 bp, Homo sapiens
atgaatctttgaaaagctggtaaaagacatgaccatgaagaaatctgaactttttaatattgttaaatatcttgacaaaataaagatgttagtagtttg

SEQ ID NO: 12268 - DNA, 269 bp, Homo sapiens
caggcagaaccttcacttgcaagcatgggtgttttcatcatcggctgtcttgaatcctttctacaaggagtgggtacgaattataaacaaacttcccctttaggtatccctggagtaataatgacaacaaaattcactgcaggtcggtggaatgatagaatgcattttaaatcacattgtaaacttccaggtgatccatggataggataaataactaagttattataattgtttaggaatttatagtccataaaatatcctccagccag

SEQ ID NO: 12269 - DNA, 61 bp, Homo sapiens
ggcctggtaaagggagtgctttgtgatctagtaaagctggaatgtgaagctctttcctatc

SEQ ID NO: 12270 - DNA, 21 bp, Homo sapiens
atccaataaaaacatttgaag

SEQ ID NO: 12271 - DNA, 501 bp, Homo sapiens
taccaaacactcaaaacatgcattgggctagcagaatatccatgtttattaccagactggttctggaagaagctgtaaagaatactaaatatgttgggttataggggattgaccatgttacttttcaaaaccaggacatttaaagcatctactatgtaggtgcatgaggagtatgggaaaaacagaataaaggaatctgcctttaaggagcttacaatcatgccgggtgcggtggctcacgcctgtaatcccagcactttgggaggctgaggcgggtggatcacctaaggtcaggagttcgagaccagcctagccaacatggtgaaacctcgcctctactaaaaatacaaaaattagccaggcgtggtggcgggtgcctgtaatcccggctactcaggaggctgaggcaggagattcgcttgaacctgggaggctgaggttgcagtgagccgagatcgcgccattgtactccagcctgggcgatgagcaaaactccatctc

SEQ ID NO: 12272 - DNA, 1609 bp, Homo sapiens
gtggtgagagctctgtcagtgacaaacactcctttggcctgttgaatttgctgaagaacatcacctaaagtctgcacacgagcccatttttaccaagatttgatcagtgtctttactgagctggaagcctctgaaagttattaaaggacagaatccaaaagaatgcctttaattcttgtctgagaatcttggccatgtgtcagattatcagaacaattttgttaccaggtcagaaattgtgttctttgacaacagattggatctgtaatgttgattagtctttagccataaccactacacttttagaaagacagaaaaatgtaagaatttgtttttaccataatgagtcttaagtaggttcatgatctacattggggcctgggattatttttttaattttaagtttgcatgagatagcctaataaatggaggtggggccaggcatggtggctcacacgtgtaatcccaacactttgggaggctgaggaggaaggatagcttgaggccaggagtttgagactagactgggcaacatagcaagaccccgtctctacaaagcacaacgaaaaacaacaaatggagttgtgctatgttgtattgctttgcacaaaattaggaacaggtgtttgacaattgaatttgttttctgtgaattctaacctctaaaggcatgcttagaggtcaaggaccttcctgtgtagttggtgcaaaagcaatctccacaggacagcactgcttccatgcttcatacatcaggaaatgaggccagaacttgagtatttactaacacgtttttcaaaagatgtcagtgttatacctaaagctaaaaaaaagcaagggtttgtcatagagggaacctctaaataatttcaggggtaggggagatgttgtcaataggaaatgggataaaatatcaagagacaatgaaaacactgccttgacatgaggaccagcaagtttattcttttcattttcagtgatgttgggaatggactgggttttaaaagggagcttgaagagggaatgtttgacagtcacagaaggttcctgcagcagatgcctcttttagccatttctcatttttttcctcaaattttacctactgaggctcaagccttcacagtgagctgatggtctctacagggaggggagtctagggaatttatttggtatttgtaaggcaagaggtgatttctctctaatatatctgagttattgctcatttaaaactgttaagtccagtataattttccctgatatgaaaaaatgtgcatttttttcacttagcaacaaagtaccttctaatttccaatagtccgtgaaagttggggctgaagtacctaagtgtgaatgtctctcccgttaaactgagtgtagaaatctgaatttttaaaagagctgtaactagttgtaagtgcttaggaagaaactttgcaaacatttaatgaggatacactgttcatttttaaaattccttcacactgtaatttaatgtgttttatattcttttgtagtaaaacaacataactcagatttctacaggagacagtggttttattcggattgtcttctgtaataggtttcaataaagctggatgaacttatcgtt

SEQ ID NO: 12273 - DNA, 813 bp, Homo sapiens
caatatgacagagcacccactgcccaagactcagccatagaagatgccgccccaccttctacttgggtagctgggctgggacgctgggacaggaccccgtcctccttcatgactcccactgctgcctctcctgggcatggctgttagctgttctgccttctgggtgagctggcactcttctccctgagaccaaagatttgacctgtcggtcttgatgtcaaggtccccaaagaccaggttaagtgacgacacctgtctgttcctgccctgttgcttccagccactgtgatgtttgaaatatgtgatagtacctggttgtgaaaaaagacaatgaactgctagtgacattcctcaatgacctctcccaaacctcccatgatgccttacccttgctgtcatgacaaccctctggcttcctaagacccatctgcctatcgaaatatgtgcaagtcagtgagacgaagtatagagaacaggtggcccagatccaggggacccaacttctggccccttggtctgtcacctcctcgctgtgtgatcttgagaaagctccttccactcacccaccccacttcccagtctgttgggatcagaggaactttgaggtgtctgccggctaacattgtgtcattcctggagtccacagtacacgtcccctgcctcaacaggcacagctctcacaaagctcttcaagcatggaagtgggagttgtgttgtacttcatggcactctgatgcctgctgtctcagtgtttggttattatgcaaacaagtaatgtttgaaatatataatagcactggagattttctccct

SEQ ID NO: 12274 - DNA, 652 bp, Homo sapiens
gaatcagctctttcaaacttggggttttttttgagatgggggtctcaccatgttgcccaggctggtctcaaacccccagcctcaactgatcctcgcatctcagcctcctgagtagctgggatgacaggcgtgcacctggcagctttttcaaagtgttgatggtaatctgaggcaatctaagggagtcattttttaagtgactttatacagaaagattggtaagagccaaggggtagaagtggcataaatgtctaaagcagggaagtgacaggactttcattgttcttggctgaggagaagcgggagtggctgatggaagcacctaaatgatgcctttgtctgtgggaaggcaaatgatgccccagagctctaaccaaaggttttgcagccgccgaaaaacaggaaagttgggaagcgggggtaggactacactgaatcattaacagtgctgtaaactaccatgtggccattaacaatgacctttagggagttttcctaaacgatcactctggtgcgggtgtttggttttgttttaaaatagctttgcagtgaaagctttcatgaccatacaaattatcttttttcttcctatttccttgtagaggtttttttcctccttgtcttaaggtcataaaaatattgttatgtggga

SEQ ID NO: 12275 - DNA, 87 bp, Homo sapiens
gcccggccgccccgccccagagctccgatgcccgcccggggagtttccgcggcggcttcgcgctggaatccagaaggaagctcgcga

SEQ ID NO: 12276 - DNA, 2063 bp, Homo sapiens
aaactcatgtttctctgtttctcttttccacaattccattttctttggcatctctttgccctttcctctggagtctttcttgagtactgatttcatgttgaattgtatcccacacatcatggtctgcagcttctttttcacatgtagtgtctccttcaagttacatcgtgtgtattatttaatgtcactattggttagtggccatttttcagaactgaagatggaatggcctgaccagctattaagaacgtggggagacgcagaaattgtggtaaaattccttaatgtttaagggaaagtaactttaagagatttttggaaaagctttatatacattcttttcaaatttcagtacaaatgaaaaagtggttttaatcagtgatttagtagactttgagcaactgtgcacgcttcagtttaatagcatggtttggccagtgtattactctcaagtccttttctcaatcaacttctatcatcaaagcaattgtttcattatagataaataaggacattttttaatttaaaaattcatgtctgagttgactttcataagggatttcattttttcctcaacattcttaaagccttttagtatttgacggttcttttttcccaggacatttgctaggaataacaacgtttcaatgtttttaatctacttgagcaacactatcgtgtcttacaaaagttgttcatatgtaaatgatcatcacatttcgtgaattgaggccatgttcaggtgctaaggaagttcgccttttacacagaagattgagaaaatttcctagatataaatacagataaatcagacgttacagtggtgacgtagtaaccatcatggcaatggaaaggagtccaattcatagcctaaaacttcaaatgtattcttaggagtcagattttactgaatattttacccacaatagctgcctattttgttataataaaatatatataaatatatatataaaactttctttaaactgtaactatgggaattattttctttacatagttgcgcacacacacaaacatatatatatatttaaaatatattttgtttcttttgccacctactcctaactttttgtttggtttttaaattaaatattaattgaatagacttatcttccttaatcatgtgaactgaaaatgggggcatggtggtcatgaggaggaaacatttagggaaattagattataagtaaaagtgtgggcatattctcctcttttctacaaaggttttcaaatggttcctgaggttttttgttgttgtccgtgttgttactgttgttcttgtcatcaggtttgattttggtccttgccctttccttctagttctccttttattaataggaaggcaggcaaaagccccatttatgtgtgtgttttcccctcagacagctttcatccactgctctgcactagaattgcacaaatcttcatggtgagcaattttaagaaatgttagtgaaaggtagaaattatttcacaaatcagtttctctggtccttcatattaataataatatttggcttcccattgctctttggagttgtttattaaatatgtgtttttgacaacctcctcattagtttcttaaatgagtactggtttgtaaagaattatcaacattatccattccatttatgaagaagaggagaacagctaataaactgtattgtaaaatccatatgttaagtgtgtcttgaattttgaaagaaaaaatatattttgcaagctaacattttcttgaaacaatttgaggcatcatgtaacttataaccgaatccaagagccgttaggcagcagagtgtgttaccacattgaaatacacagtgctgctgttagactaaatgtcgtaggttgttaaccacatagaaacacactagtatgaagaaaactgttgtaaaatctcaagagcttcagaaactgccttacaagaccgcagcataagctattttgaagtatttaccaaatagtcacatgttgtaaaatatcaagtggttataaaaggatgccatttatatattaaaatttacataacattgttttctgga

SEQ ID NO: 12277 - DNA, 2111 bp, Homo sapiens
agagtctcgctgtggcctctgtcagggatccctggtggaaggggaggggagggaggaacccatatagtcaactcttgattatccacgtgtggattatccaccatgccaggaagacccataactggttttaacactaactagagggaatgacttctttgcatagtgagtgacttgggccttcacaaacagggtgtggagtggcaggcagaggcctctaaatctcagggcaaacatggtgaatctatctctccggagataatttcatacagagattttaagaaaacatctttatattaaaaacagatctcatttgatccttaagccagtctcatgaatgaaaaggacaggtttttttcttttgtaaatgaagcatttgcagcttaaagaggatgcatgaaataacccttttatcgcttataaatagtgccagttatgtgttcctgccacggctgtggaaatacttcacatttgcattccaggactgttttggatccatttgcccgagaatcttctgactaactctgtgtcctcatctgggcagcacacaccaagtgcccactggtacctctgcatgtccatggtgctgtgtgactggccagccagcagccagtgactcagagctggctgtatggagggggtgggaatgtttctggagatttttgtttttccagacacagtcttgctcagtcccctaggctggagtgcaatggcaccatctccgctcactgcaacctccgcctccctggttcaagcggttctcctgcctcagccttccaagtagctggggttataggcacccaccaccatgccgggctaatttttgtatttttagtagagatggggtttcaccatgttggctaggctggtcccgaactcccgacttcaagtgatccgcctgccttggcctcccaaagtgctgggattacaggcatgagatttttacttgagatttttccatcctcttttaggactcaggatagacttgtgtggaggtgctctctggctaaggggataagttgttactggtttgggtctgcttggttttgccttgggtggggccggtgtcgatggggcaggcttggcacgagcagtggtgccatggcagggcactgtggcatctcccctagcagtggatttggggtccctgcttgcctcacgtggtgcttacacacatgtacacacacacacacacacacacacacacacacaccttacacacatgtacacacacacacacacacacacacacacacacacacacacacacacacacacacacacacacacacacacacccctgttctgcagggcttcagcgtggccttcattcccgcctcgcctcggcctcttttcaattaagaagtgatgccacttgaggcagggtctgcatgatcacttcttgggtttcagtttgaaagctgccatccctgcgactgcccagggcctgtatgttgggaccgaagccaaacaccactgtcctccagggggctttcggcccggggcagggtccccagtgcccgccttcgaatcagactccgcgtttccgcctctccctgggcggacctgccgctagagggcgctcctcctccgcagccggcgccggcctccagcgccccagactcccgcgctgccgcccgagcctgaggtttctcacggcgttcgggattcgcgcttcggaaaccgggaacaaagaagcaagcagcacccttcagaaacagtgttctcgctctcctagcagctggcccgggcccggaggctggtgccaggagaaggcagaagagcccgggcagccggagtgggctacggggttcaggcagtgccaaggaagaagggcctcacaatgggcaattcagctgcctcccgggccgttgtccccgctgtcttcaaacaggggtcccctgtcccagctgccccaggaggagggggggaggcaggcagggccgaaaccctccagagcccagagggggacgcttggtggccgctgcagttacataaccataggatgcttttgtaccgtggaccttgttctagcaggatcctttcggaattgcacttttacatgttgggcgaatttgtgtccgtgctgaagtttattaaaggaaaatagatgg

SEQ ID NO: 12278 - DNA, 759 bp, Homo sapiens
atgacatttctagtaatctctaattccagtgtctttacacagcaaataaattggagaatattgctcccatataaacttgtattatttttcttattttaaattttttaaaatttctgtaggtacatagtatgtgtatctattcatggcttatttggattattttgatacaggcatatgacatgtaattatcacatcagagtaaatgagttattcttcacaagcatttgttctttgtattacacacagtccagttatacactttaattttttttttttttttttttttgagacagagtctcgttctgtcgcccaggctggagcgcagtgttgcgatcttggctcactgcaacctccacctgctgggttcaagcaattctcctgcctcagcctcatgagtagctgtgactacaggcaggtgccaccatgcccagctaattttttgtattttcagtagagacagggtttcacaatgctggccaggctgttctcgaactcctgagctcatgatccacccacctcggcctcccaaagtgctgggattacgggtgtgagccatcgtacctggccactttaattatttttaaatgtgcaattatttttttactacaggttattttatgattataataagtatatgagtataattataattcacacatttctaagtcatgaatgcttttaaaaaatgttccatatttatctttgaacatgtagcatctctttccgcaaataaatgcagactttggttttgatttacat

SEQ ID NO: 12279 - DNA, 1394 bp, Homo sapiens
gagaaatcctacaaatgtaaagaatgtggcaaacctttggatgatccacaaaccttaatgaacatgagaaaatttatactgtagagaaaccctggaaatgtgaagaacgtggcaaagttctttacctcattctcaaaccttgataaacataagagaattcataccggagagaaactgtacaaatgtgaagaatatggcaaagcctgtgaatggtccacaaacctgaatgagcagaagaaaattattactggagataaaccctgcaaatgtaaagagtgtaacaaaacctttaaacagccctcaccggtgaataaacataagaaaaatcatgctggagggaagccctacacatgtggcagaatgtggcaaagcatttaattggtcctcaatgcttaataaatataattcatgctggagagaaacttcacatgtgaaccgtgtggcaaagcctttaaatggtcctcaacccttaatgaacgtaagtgaattcatgctggagcaaaatgcttcacatgcgaagaatgtggcacagtctttaccacatcctcaaactttgttaaacataagagaatttataccagagagaaaccctacacatgtaaagaatgtggcaaagccttcaataggttctcaacccttactgtgcacaagataattcattctggggaaaaaaatgctacaaatgtgaaaaacgtggcagagccttcagaccatccacaaacctttatgaaaattcatatttgagagtagaagattcattccacaaacttacattgagaagatatgaaagatgaatataagaattcatcctagatataaaaccatagaaatgtaaaagatgtgacaaaacctttaagccatactccaggcttcttaaacataatgagaactcatactggaggaaagtcttacaaatgtgaagaatgtggcagtctttaaatcttcctcagtcttttctaatcataagataattcacactgaagagaaactgcaaacgtggaaagtgtgacaaagcttgcaaccacactcaatctattctaaatataagagaaatgatattggtgagaagccacaaaaatatgaaaaatgtggcaaagccttcaaatgcttgtcacatcttactgtatatatataattcctactgaagaaatcccctggaaatgcaaaaaatgtggcaggatttttaccaatgctcatctttttgcacatgatatcctttatattcgagaaaagttatagaaatataaaaaatatagaaaagtcatatctcctcacattttactaactagcaatgttcatacttaataaaaacattataaatgtaatttctgttgaaagacttcagaaaatataggcctttaaagtgaagaagagtattcttaagacaaacaata

SEQ ID NO: 12280 - DNA, 154 bp, Homo sapiens
actaagctgaacactggaaaaataatacatgcttaaagtctgctgttattctaaaatgaaagatatgaattcaacaaagttgatggataactttctttgactgctctacctgaatttagactaagcagtaaatagtttaataaaagatcacttt

SEQ ID NO: 12281 - DNA, 674 bp, Homo sapiens
gcactggtcccatggggaccctatggctccctcaatcttcacccactaggatttgggttctgcctgtggctatttgctacaagaggttaggaagcccaagaaaatgactgaagatcattctggatattttaatttttttttttttttttttttgagatggagtcttgctctgtcacccaggctggagtgccgtggcacgatctcagctcactgcaacctccacctcccaggttcaagcgattctcgtgcctcagcctcctgagtagctgggactacaggcgcccaccaccacacatggctaatttttgtattttcagtacagatggggtttcaccatattgggcaggctggtctcgaactcctgacctcaggtgatcacccgcctcagcttcctgaagtgctgggattacaggcatgagccaccacgcccagcctgtttttataaactgaagccaactgtgaataaactgtagcctacattactcatccatttttggatagttaccactgggagacctttgaaaagggtccatgaactctgaaatcactgagaacatttgcagccacacatgtacatatgtgtacacaggtagacagatggacacaggccgtttctcatccagtttaggaaaacacacatgctcaggaattcagaataaaataaacagaaaact

SEQ ID NO: 12282 - DNA, 33 bp, Homo sapiens
gacccagccgggtcaataaacctggacgcttgg

SEQ ID NO: 12283 - DNA, 4558 bp, Homo sapiens
atggtgccacacagcgcccacagactgggccctcgcacccttgggtgctcccggccgccgcgcttaagaacattgcctctgggtgtcatgtggaccagacttctgaatagagaatatttataacttttgtatgagagagaattcacactcaacaagacactaccagcaccacgtttacagaggatgaaaacacttcacagtctcccagagccgatcgtcctctcccccgccccaccccgtgcttcagccttgcagggagagtgatgctccaggcaacacggttctgagtcaccttctgacacgagctccctctgcttgctttccaggtcttgaaaatctgaattcacttcagtttagtttatgaattttaggtttcatgataagcctcaagtgtagttggacttttattgaatccttcctaagttattgaaaaaatgtcttttcatggtgaatgacaatatttatgttgcctttagcttcttgaagatttagaagttatataaaaaattaatttaaaagcaaaccaaaagaggtttccattaacattatgatttaaccattgtatttaatttcccaccttatgaaacacaacagcagctccctgactggttcgcctttcattgtgtgaggtcggcacttggactcactcagaactgtcgctcacctgtggctgacacacccagccctggaaacggggccccagacgccacgtcgggatttctgacatgctcagcaggtagaccagaggccgtgtgaccagctcagtgctggtttacggaacaactcttacttttaaaaattacttgttcccccaaattgttgagtgccgccgtttggtttcctatgttttctttccctgttttgattttgctgaagggagaggtggtggtggttaggatcagagctctcctggcatccgtggggaggatttgctggtggtggcttcgggctcatgcccagacacactcactgccccgtctgtccaaggcctccccttcccctttgctggtgggaggagctcgtgtgctccttggccgcttactggaagggcgtttttcagagctgcagggacagggtgagcagctgaagggctaggagggaagccggcccccgctctgcagaagctgcatttcagctgaatctgtgtttcagcctcagttggttgcaccgttagcccctctcctcccggatggtcatgtttttgtcacattagagaataaacagccacacacacatttttttttttcctttaaaacagtaacttggaaatatgaaaaggccagaaggaggagcaagggctgttttctggagtggttgaggtgttgtcctgcagttgtcattgtcttctccaccgggctgttcccatttatttcctgtggaactgaatccctcctccctccactccttgggagcccaggtggtccttggccaccattcaggctttccaagaagccaaccaccttggagattttttttcttgaatttcgctgttttcttctgcttcctttagataaaaagcagctcaagagaccttatcttagggatgagaaaaacatgcatattaattccatctgagtgattgtcagtgtaaggccttttaaaacaaaagcaagttctttgttaggaattggtcaaaattcatctctttctttaagcccatcaactcccaggacggtttgagttactcagttacctaagcttgctattcatccaaatcattttctagagtcactgtataagggtctatgagtagctgtgtatgaataaatattacctgtctacctcaaaatacacatactgctgaagcattctgtacaaccgtgtgttatcacagtgcagttttaagtgtaacgttagaacttaggcattttcctgtgtggcggaataagaaaggattaaacagttacaagcctccaaattcaaataaaattaaatcacagttcagatgaaactgaatatcattgtaataatctcataatatatatttgtaactttgtagctatctttgaaatcacttgactttgcaatggtgctaagctgatagatttaaatacacagacgggcgagtggcgcccgtgtcgatgtcttcagccagtggtgaccctgcttttgtaaccgcgttaacctgacaaaacctcagcagcagaagtccctatttttctaggagttcatcgtgcagacagtcttcactacaggactcggccctggggcctctgcctctcgtctgaccttgcagccttagtcgttggaggctggagcgcaatggccctgccgtctgtggagcctctgggcggccttctttcctttctgtcaacctctcatttcacagaaaaaggctgaatttcattttttccagcatgaaagccaggatcggttagtggttggattctattggttttttttttttaaacagatggagttactgtgaagaagttttcacaactatttatgctggtaaaacaaatgctgttaaatcaccttatgcgtcgttttcaacagcagtggggctaattacccggaatacggtctcaccgatgcagttttcatggacatagaaaattcaaatagaatatataatattgaatttaagatttggggggttaaaaaagaaaacttaactttataaaattatttattctattttaagccttctatcatattttcccatccaattgtttggtttcagtggtccagctttatttacaggcatataaaatgaaattgtgagatgttttgcaagcttctttttactttgagtagcttttaatttgtatgtttttatgtggatgaagagcattttttatgcttttgtgcaataggttccaatatgcatttattagacatctgtttaaatggtaatgtagcatttattttgctaaattgaaagggaacatagatggaattccaaaatatgtacattcagctgtttggtttttcgtttttcattgttattattgtgagaatgctgttattggggttgtgtgtgagtgcccgtcagccagtgatgcctcgggccacgctgtggggccacctcagtcctgcctgggtcctggtgccttggaccccacgtgcttgtggccaggctgcccctgggcagggccatgtggcctcagaccacaagagcggagctgccctggcccaagcactgcagctgcctgcacccccgggcttcgcagccttgcttgttttctctgaacagcaacagaacagtgttcacagcgattcaaagggtggcattgggttggacgttctgggtacaagccaacctagtcccacgttgtacgtgaatgtttaatgtgctctcaaaacatggaaaataagtttagtgcacatagctaaatcacaaaacatccaatttctctgtttcctcaggaagtcattactgcgccaccacatcacatgaccttaacatgatcaatgtatttctctgccttgacatttaaatacataaattgagataagtagattagaaaatcattcaaatgataccataatttgtacgggacagggtgcgggcaatggccacgtggccaaggccctgcaggaacgcgccgaggtctccctcaccctccaggtgtccttcgcacccaacagtgcgtctgaggaacgagctgcagtttgagcgttcccctgagatgtgcgtagcctccgtgtaaatgtccactcccatggcttaattgcctatcagacgcattttcccagacgaaagcaatgttgggttggggaagacagtgcagccacccagcctttaccagcagcgtacggcagacgaaggcagtcgaggtgtggaggtgatcacgaagatacatgtgtttgactgtttaatttgaaagtttacattttttatgctttgtgttggtgtgtaatttttgtactcttggtggctagtttttgtcaaatcttttttggaatattgcttaaatgttttgattttatgatagtgaagcttgtattcagtgttttgccaattaatattatatgcttgtaataaaagcaaaagaaaagcttaagtgaaagtgtttctggctggaaatgtattacataaatcatttgtatgagcatgagagatgacttgctcatgggatgagcaatgctgtgggtattggatggaccactcaggcagcctggccgcacacacacacatgcatgctacatatgtgtacgctcagaccacatgcctgcacatatgtccacacaccagcccacggctcccttcctcaccccagccctccccactcccaggttaaccaatgtctcgatttgcttcaggcggcatttgtaaactgtcaccctgcttgcaaaccctcatttaaattggtccagcatttgctaccagagtttaggccacaaactttgtaaagctcagtttgtctccttgcagaaagaggttgctgcagtttggagctggttatgccaaggaaaatacggctaaaaaagaacttactgattcccataggtgtgtcaactgacaaatgaatgttccatctccctacgacaatttgctgcccctccccaaaaaaagcactatggccaaaatttcagtttttaaaggttaagt

SEQ ID NO: 12284 - DNA, 157 bp, Homo sapiens
cagccacagagcccactcccagccgtcctcaccagagatggaccagggaggacaggatgctgggcaggggaagccaagtcacgggcaggccgcagtggttcttgcgtggcctggttttattttcattgtgaaatatcatgctcttatttcagtcctc

SEQ ID NO: 12285 - DNA, 135 bp, Homo sapiens
gcctgtgctgagccccagtgggttgcacctccaccggcagtcagcgagctggggctgcactgtgcccatgctgccctcccatcaccccctttgcaatatatttttatattttattattttcttttatatcttggt

SEQ ID NO: 12286 - DNA, 1550 bp, Homo sapiens
acggcaccgtatctgcagtgggcacgggggggccggccagacaggcagactgggaggatggaggacggagctgcagacgaaggcaggggacccatggcgaggaggaatggccagcaccccaggcagtctgtgtgtgaggcatagcccctggacacacacacacagacacacacactgcctggatgcatgtatgcacacacatgcgcgcacacgtgctccctgaaggcacacgtacgcacacacgcacatgcacagatatgccgcctgggcacacagataagctgcccaaatgcacgcacacgcacagagacatgccagaacatacaaggacatgctgcctgaacatacacacgcacacccatgcgcagatgtgctgcctggacacacacacacacacggatatgctgtctggacgcacacacgtgcagatatggtatccggacacacacgtgcacagatatgctgcctggacacacagataatgctgccttgacacacacatgcacggatattgcctggacacacacacacacacgtgtgcacagatatgctgtctggacacgcacacacatgcagatatgctgcctggacacacacttccagacacacgtgcacaggcgcagatatgctgcctggacacacgcagatatgctgtctagtcacacacacacgcagacatgctgtccggacacacacacgcatgcacagatatgctgtccggacacacacacgcacgcagatatgctgcctggacacacacacagataatgctgcctcaacactcacacacgtgcagatattgcctggacacacacatgtgcacagatatgctgtctggacatgcacacacgtgcagatatgctgtccggatacacacgcacgcacacatgcagatatgctgcctgggcacacacttccggacacacatgcacacacaggtgcagatatgctgcctggacacacgcagactgacgtgcttttgggagggtgtgccgtgaagcctgcagtacgtgtgccgtgaggctcatagttgatgagggactttccctgctccaccgtcactcccccaactctgcccgcctctgtccccgcctcagtccccgcctccatccccgcctctgtcccctggccttggcggctatttttgccacctgccttgggtgcccaggagtcccctactgctgtgggctggggttgggggcacagcagccccaagcctgagaggctggagcccatggctagtggctcatccccactgcattctccccctgacacagagaaggggccttggtatttatatttaagaaatgaagataatattaataatgatggaaggaagactgggttgcagggactgtggtctctcctggggcccgggacccgcctggtctttcagccatgctgatgaccacaccccgtccaggccagacaccaccccccaccccactgtcgtggtggccccagatctctgtaattttatgtagagtttgagctgaagccccgtatatttaatttattttgttaaacatgaaagtgcatcctttccctcc

SEQ ID NO: 12287 - DNA, 1694 bp, Homo sapiens
cttctatttggcaccggcccgtctgtccactgtcctggcttgttccaagcgctgccttctccaactggggtcctggctgcagagctgtctgctccccacgttgggcaactccagccaagattcctacacccaaatgtgaccgtgttgctcacgaagaaggctcagctttgcgtgtgcccagccgtgtgcacagctcgtcccaactcctgcgggtggcacctgcctctcccacctccagtctttcccctgtgatgagcagatgaccaccgccctccagggtcagcgtttggctgtttgtgtgcctgcccacccgcctccctgtgcctgggcctgccctgtgcctgcacacaggagtggctcatggcgtttgccctacacggatgggctgtcctgggagctactggacagtcaccttggtgggaatgccagaggcatgggcattaggtccccccggccagcctccgttgccacatgggctatttttgtccatcgcgtgggacaacctagtattgggggaaaactcagtccactctaaagaagcatcggcgttttggatggacgaatgctgcttcatgcgactccatgtcaatggactattttattcaactcgggtatttatgagtgtctcctctgtgccagccacgtgtgaaagaagaactccaagttactggacaccaggacaaaccaggtagatcactgcatccggttcctcctctttctgccgactctcccgggcaaccgttctgattcctggcatggagttgggggcgagctcatcagtacccagagcgcctggtgtgcagccaaaggcccccattttattagtcggtgtgttcagtatcacgctcaagacaagggccaacctattacttcacacacctcaaatacaaaaagtgcctgggaacgtcgatgaggtattaaaggaaaccactggtcttgtcagtcatgtacacacagaaaaaaaaaccagtcatttttatttttattttttgagacagagtttcgctcttgttgcccaggctggagtgcaatggtgcaatttcagctcactgcaatctctgccacccggattcaagcaattctcctgtctcagcctcccgagtagctggaattgcagacacccatcaccacgcccagctaattttatgtatttttagtagagatggggtttcaccatgttggtcaggctggtcttgaactcctgacctcaggtgatccacccacgtcaggctcccaaagtgctgagattacaggcatgaaccactgtgcccagccgaaaacaaccaagaattttttaacaataaaatgaccagcaagtaaacttgaaacaaaaatggacaaatatctaaaatatttttaaatgtatgtattttaattggcaaataatacttgtatatattgtttacaacttgttttaaagtatgaatacattgtggaatggctaaatcaagttaattaacatgcattaactcacatactttttgttttttggtgtggtgaggacacttaacatctactctcttagcaattttccagtcaccatgtcctactatagatccctagaacatattcctccaatgtaactgaaatgtatcccttgaccaacatcactgcccggccccagccccaggtaaacaccattctaccctctgcttctgtgagttcagcttttctagatttcacctgtgagtgag

SEQ ID NO: 12288 - DNA, 967 bp, Homo sapiens
gccccacgtcgtgaagcgcacgcctcggggacgggctgcagtgggcggggaggccacgccttcctcctgtcccacgctccagcctgccgcggcgtttctgtttcttgcgaccaaagatccgtgagcaacgataaatactcttaggaagagagaaaataaggtttcataagtttgtacttgaaaacatttggattggtaggattttgtaacacgtcaaccatttgatgcttctgaaaagtactttcaacttgcgaaggaaactcttctttaaagactgacctaaacaccgagggaaacttaagaacgtttaaaatataggagtccgtgatttccctgtgttttcagtttctttccttctgtgaacgatgagacttggagaacgggctggtccttcaccacttcctgttggccctggcctggccggggaaggtggcagcggcaccggactgacctgcagtgacccgcgatgccgcgccacgagggacacttatggcttcattcgagagctgctgccaaaacgcctggcgccgccaccgtcgggggctggcttcgaggacgcccgcctgcctcgcgggtcgtgtccgcgggactgtgttcgtacgtgcatagtttcgatatcacatcgcggggctgtgttcgtagctgcgtcgtttcgatatcacaccctctgtgtgccgccttacttcctgcttcgagaatgtataacgtggaaatccacgggaccaaatttctgcagaggccttgccggatggttccataactgtagagtctaattgctatccattacagaaattaatcgttcagttgaaagaagtactgatgacttttcaaaacaaatgaaccaccgtagctgacagagaaccgtatcgtagaggtttgtagttagtgcttatttttgcatgttgatgttgactagctaataaactgtaaatgtaaaccatgcgaataaaatggttttctatttctc

SEQ ID NO: 12289 - DNA, 1983 bp, Homo sapiens
agagcggggcccagtgcactggccatcagcactttctccctctgccagtgtctcaggacagcagagtgggcgtgggtctgggcagtaaccatgctttgtctattactgtgtttgatgtaaagaaatggtgtgttgcaatgccctgaaggtacggccgctctgctgctacagggttcggcatcgtctggtgatgggtctggcctcgcagaagaggccctcgggcctggagatgtgaacacaggcagcgaccctgttccagagggcttctgcgagtcctcgtgagaccagtgcttgtcgtggtgtggggttcagcacggacggaatgtgtgtgcagctcagccttcagagcgtgcattccccagccaggaggcgaccactcagaggaactctgggaaacccacttttgtgcaaatgctgtttttaacacaaacacaaaggctagtgaaccgttcagtcatctgctttctgtttctggatgtgccttttcatacatgtgtcctcttgtccctggcttcttacacttggcgttgtttttaaggtttatccatgcagttcccctccaatgtataaaacaaaggaggtgaaaacctgtccatgcggaagcttgtgcacccatgttcacagcagcattggagaaggataccgaacatcttctcgtgggcttactggccatttgtgtatctcctttggagaggagtctattcaaacctcttgcctatttttaattgaatgatttatcttgagttgtaacagttgttttttttgtttttccttttagagatgggcttttgctcttacccaggctgagtgcagtggcagaatcatagctcagtgcagcctcaaactcctgggctcaagccatccttccacgtcagcctcccaggtagctgggactacaggcacacaccacaacacctggctaattttttaaattttttgtagagatgaggtctcactgtgttgcccacggtgatctcgaactcctagcctcaagcgatcctcctgcttcggtctcccaaagtgttgggattacaggcatgagccaccactcctggccaggagtttatatgtatactgtggatactagatcctcatgtgatttgcaaaaactttatttatttatttatttatttttgaaatggaatcttgctctgtcgccaggctggagtgcaatggcgtgatctcggctcactgcaactaccacctcctgggttcaagcgattcgcctgcgtcagcgtcctgagtagctgggactacaggcgcgcaccaccacgcccagctaatttttgtatttttagtagagacgggatttcactgtgttggctgggatggtcttgatctcttgacctcgtgatccacccacctcggcctcccatagtgctgggattacaggtgtgagccaccgcactcagctgatttgcaaaaactttcttccatactgttgtttcactttctggatagtgtcctctgaagcacaaaagttaattttgatgaagtacagcaatttatctgtttttttcttttgttgcttatgcttttgctgtcacatttcagaagccatcacctaatccaagatcacagagatttacacctagtttctaataagcattttataatttcagctcttatgtgtagatctttgatccattgtgaattaagttttgtgtgtggtgtaagagcccacattcttttgcatgtggatatccagttgtcccagcaccatttgttgaaaacattatttttccccattgaattatcttcgcaccattattgataatcagttgaccaaaaatgtacaggcttatttctgggcacttgactctattccattgacctgtttaaccttatgccagtgccacagtgccttgatcagtgctgctttgttgtgagaagttttactttgttctgcttcaaggctgttttgactcttctgcatctcttgcatttccaaatgaattttaggatccactcatcagtttcttc

SEQ ID NO: 12290 - DNA, 142 bp, Homo sapiens
gaatattagggatgagatggaagaggagagggtgtttttgtaaaattgaattcaggactgatttgttagcctggtgcttttcgtatcagaccttttaatgaattttcatggatgctgattaaaagacaaacctgtgactcag

SEQ ID NO: 12291 - DNA, 155 bp, Homo sapiens
cctccacggagccgctgtccccgcccccctgctcccgtctgtctgtcctgtctgattctcttaggtgtcatgttcttttttctgtcttgtcttcaacttttttaaaaactagattgctttgaaaacatgactcaataaaagtttcctttcaattt

SEQ ID NO: 12292 - DNA, 1609 bp, Homo sapiens
agggccactggtccccaacaatgtgaggggtccctagcagcccaccctgctgctggtgcacagccactccccggcatgagactcagtgcagatggagagacagctacacagagctttggtctgtgtgtgtgtgtgtgcgtgtgtgtgtgtgtgtgtgcacatccgcgtgtgcctgtgtgcgtgcgcatcttgcctccaggtgcagaggtaccctgggtgtccccgctgctgtgcaacggtctcctgactggtgctgcagcaccgaggggcctttgttctggggggacccagtgcagaatgtaagtgggcccacccggtgggacccccgtggggcagggagctgggcccgacatggctccggcctctgcctttgcaccacgggacatcacagggtgggcctcggcccctcccacacccaaagctgagcctgcagggaagccccacatgtccagcaccttgtgcctggggtgttagtggcaccgcctccccacctccaggctttcccacttcccaccctgcccctcagagactgaaattacgggtacctgaagatgggagcctttaccttttatgcaaaaggtttattccggaaactagtgtacatttctataaatagatgctgtgtatatggtatatatacatatatatatataacatatatggaagaggaaaaggctggtacaacggaggcctgcgaccctgggggcacaggaggcaggcatggccctgggcggggcgtgggggggcgtggagggaggccccagggggtctcacccatgcaagcagaggaccagggccttttctggcaccgcagttttgttttaaaactggacctgtatatttgtaaagctatttatgggcccctggcactcttgttcccacaccccaacacttccagcatttagctggccacatggcggagagttttaatttttaacttattgacaaccgagaaggtttatcccgccgatagagggacggccaagaatgtacgtccagcctgccccggagctggaggatcccctccaagcctaaaaggttgttaatagttggaggtgattccagtgaagatattttatttcctttgtcctttttcaggagaattagatttctataggatttttctttaggagatttattttttggacttcaaagcaagctggtattttcatacaaattcttctaattgctgtgtgtcccaggcagggagacggtttccagggaggggccggccctgtgtgcaggttccgatgttattagatgttacaagtttatatatatctatatatataatttattgagtttttacaagatgtatttgttgtagacttaacacttcttacgcaatgcttctagagttttatagcctggactgctacctttcaaagcttggagggaagccgtgaattcagttggttcgttctgtactgttactgggccctgagtctgggcagctgtcccttgcttgcctgcagggccatggctcagggtggtctcttcttggggcccagtgcatggtggccagaggtgtcacccaaaccggcaggtgcgattttgttaacccagcgacgaactttccgaaaaataaagacacctggttgctaacctg

SEQ ID NO: 12293 - DNA, 9031 bp, Homo sapiens
taataataacgataaccatggcattggtatgaaggccatttagctgcccacgctgcagtgtgagtaatgctcagacttcataagcgcagcattggtgctcactgccagtgcagatgttttagggcctcttggctaactcagattcatgaaatggacaaacagtgcactatgttagtttatttgagcactttttatacacacgcacacagtgtctgtgtacatgtacagatatacttcagtcttgatgcagtttcatagttcttaaaatctgtctgaagaatgttgtgttctgtgtagccctcacactgtaagagttcacatggaagtaagtctgcgttggttctgaaagggcacagtgtcagttgagctgacatatactgggtggggtggaaggcgactcacacaccacacctgattcctgttgcttccagacctaggctcatggaggaagccaaagatttctttgttctcatgcatttcatggctttggtcctttaaattctggcacatttttagttacttgagtgttgaggtgagtcagaactaccattgtaatatgactcctgtgttctggacttgcagagtacatgatagcaaaataaagccatttggggctgctgcctgccatcattgtaacatgacacttagactttattatcaaacctaaattttttgccgttgccaaaaacaacaaatagccacagaacgtaggtgtgacacttttttgttcggaggtagttttggtttcctgatttttagggattaccttcatagagctttggagttttaatttcttgttatttggttctccgtgatgctgtttttctcattgtagacatgggtcctgtttttgtcatgtttatgaggagatgataactgggggcccttttggaacagggtagtgaggcaagggttggacaggccccttactcttgctgagtcagaaggcggcacttctggccaggtctctgccatggtccccaggaaggatggggtgtgcctcagttgtttccactcattagaggagtgtaggccttccagtgcaggaaggtcagggacctaggcaacctgggcggggctcatagagctctgcggcttgccactctgaatcctcagcgaccactcctccgagtgggattttctgcagggactcaaaccaactcagtggtggtcgagacctgttcacggatggtgggactggggctgctttacagtttgatacgtgtagataattaagcattttgtgatgtttggacacactggagaaaaggcagtaagaattatttactgaaacatctaggagcttactgaaatatgaaaaggcaaattttatacaaattatttttcctttttcctttctttcttgtccaagttcaggttaaaatcttagaaaattaaatgaaaggtcatttacagttccaaagaagaatattaaacatttttcacttaagttgagatttttgctttaaagagcttttaatgagtttttctgttatcataattttggtccggttattcacttgagttgttgcttatactgttgtcaggtacagtagagagaacatggagcctgctgagatcttctctgttattcctgatcctaagtcatgtatatcgaaggctttgatttagagtaatgcatgaggccagtgtagcggggtcgaggcctgcccatgagtcaggggagctcagtctccctggcctaggcagttgtcctgaccttgagaagacatagatgaagcattttatcatcattagacttaaattttaattcttcagaatgtcagaagttgataggttgttaaatacatttatataatacattaaatatgtgaaattaatacaccttcctacattttgaaggtgatgcatagatcccatagtgtgcatcatgttccttatatgaaaacgtttaaattactgggtcttttccattaaactacttttgtatggcttagataaatcttccattagtgttcatttttatagaattatgctgttaaaactactttaggtgaacaaataaacttgtctattatatattaacgcgactgaactacagtaaatgtttgtgatgtttccaatgctgaatgcctgttagcatatgaggcaaagtgtagtgttataaaaaacagcctgttgactgctgggcccgattctgatatgagttaggtgaccatgagaattgctgtttgaggtccacactgacacacacccattgggtcacaccccctttgcatgtttgtatttcctccctttcatcacatttgtttgaaataaggtacttttatagggttggtatttcagaacactttaggtcatgttgtagtttaaattcttcttgaaaaaggtatatgtgataaataaaaatttttattggaataattattacatggtactacatcaccctgaggaagagaataaattaaaattacacacttgcatgacaaaggcctgtgaaggaattaatgtgatttaagtgttttgtaacttcattttttattcctttagtagagcaaattcttatttttttcgccttcactggtaacagcttttgtgggagcccacaccagtcaagttggatttgaacccagctgctctgtactgcacttagaatgatgtaatattccaggatgctgctgcaggtggcgtatcatcgtacacactcagtgacatttctatcacaatcattttatggaagatgtgtgataatctgtttttactggtattaataaacacatacaatgaagaaaacagataacaaattttaagaccaaggtaagataactaatcaaggccatttaatccgtcacattcatctcataatagaaacacgttcatattccagtggtcaatgtagatttcaagttgaaaggcagtccctttagttgggggctgtccagagctgcagcagggctttgcacggaaggggtggccctgttagagttgcttctcctctagtttgtaacttactggacttttgtggaaaatatcagcgtcgctaccctcagaaacaaactaacagcacacgttaggaggagtcctcatcagctgttctcattgccagtgagatatattcagtattgtagatactacactaatttccaacataagaggcaggaagagttttgattctatccttttttactaaacagttttattatgacactagatacagtaaatttttagaaaaaaataccatttacagtattattgtgaaccatttaacccttttgatccaaggccccggaccaaggggatactgtaatcaggttatgtacaccaacctctgcatcagttgcttctatagagcatcagccctcatgtttcattgtcttaatgtcggggagcagcctggtgtcctgccccaggtgtccgcatttttgcatggtaaggaaaaggcttacttgcccttcagctcataaaagcagaaggtgtgctattcacagtaccatgcgagtagcccacagttaattcccggcagattctttggctgtgttttatctttaatgaacgtttctgactaatattttgttgtaaaccattaagtaatgtaacgcatgtaagatgcttagggtgcctggccaggactccgtggtttcctgttgtgacagtaataatggttataataataaaaatgataaaattgccatcattctatttttatccaaaagtataaattttgctttggcatgaaaagtggtcctcttgactgcattatgcatgcgaggatgaaataaacctagaagtggcagaacactggatttgtgtgtgtggcgctttagggtgctggactgtatggctgagggctggttgggttcctctattggctctgctcaaatgttgcaggatacatagccccaaagatggtctaggagcaatctaagctgtgttactccaaaggacatgaaaaagctcaagagtaaaattaaaattctcaaaaaaaaaccccacgaaatttaaagatggggaaaaaaagatggtataaaaatggctctggttcaataagcagtcacccaaagtaaagactctatcttgaaaggcttttggtgaaaatgaagggatttcatttgaaattacagcatgatgaattttgcatgggtggccagccagctagcccataactgatagatgcattagaagtcagccagcgcataggtgctccctctatattatggagaaagcaaaaccctgcaaatgaccaaatggtgtccaaagagcagcatgacattggcatcagctgaataaccaggggcacatgggggaacgtggatgggaatgatagtgtatctcagcggggggtggggtgacatcgttccctggggacattgggaaggtgggcaggggcaagtgaactcagcactctgcagtgagagggacagtcccatgtgtggcagcattgtcccacttcagatgccaggagtgggctcatcctagaggagcggagttttccgagaggaccatctcctggtttcctgaaggaggtgggtggaaacggctcttgtttgaaagaacttagggaggaccattggcttgccaagagtacagaaattcattatgctgctaatttaacgtggaattccttcatttcataagaacctcaaaataatggtgatacattctagccttaagacatttgaattgccggttgttgaggtgaattttgtttgtcatacatggaaccattttagtcccatttgactcacttcagaccatcttccacacactatgtctgtgcttggagaggggaggtggctctccagtgtaaaacttgaggcattcactagaggtgaaaacttgtcagaatatataaaagcttagattgtagctgttctaaaaacgtaagtactccattgtaatagggtggcatcttcaggtagtgcacatattggcaatagaggtcctgaattgtttttctaagactgatctgagagccattgggccatcaagcctttatatatctgcttctaaaattgccccacctgctctagatggatctttgggcctttcctcagtgttcatgcaaaaattaaatgtcttttttcagcatactgactccaggtgtagttacatctcagtgctgtcttgagtatatattttatctcttatacctgtatctcccaactagaaacagctccagtgtttttaagagaatgtttcttaaaaccaataggaaacttaagcgaggtttcatgacacaacctttcatgtcgtgaaaggcagagggtgactgtgtgtgatgtgcagagtccttggacaggagtcgggggctcctctgtcccactgctgcttcttgagtgggtggagtggtgcttagaggatctccgagaggtccccgcagctctagggagatctgattttgtgttttttgtttaagtacttcacacagaagcctaggtagatttaaaatggggtgctcagggactggggaacaagacggggtggggtggggagatgggcatttggagagtctcatgtagctggagacgttaagagctgagcacaccacaggaaaggagggaggatgctgtgtgagagccatgctgtcaggagcaagcttgctgctcctgtgctgccctggccctggccttgcttgcccatggtgtgtgtgtccagaggtgtgtgtgaggctgccagaacaagtgctgggtctgtcacagagaagtttaaaaaagaaaactaagattataaattagcatctagttccaaaaccaaaaaaagtgcctgtggatgtatataaaattaagatgataagaaagtgctcctgagaaggctcttgccagaagcctgatgtgagtgtgtggcacctgtgatggcagggctgtgagctgggcttctgtcctcctctgtgtcccggcatggaagccagtataagcatttccaaatgagggaaaagtccttggctcgtttgatccagttgagttgaaagggttgccttggcagcagaggctcctctgatggctgacatcagtcactgcgtctgggcctgagacgtgcatggagggctgtaaagccacggattcccctcgctggagaggctcctgtctgatagcggtagatgaaaaataaggtcgttatgactttggcaacttgcttcatttctttttcatttgacttacaacacacttctctaacatctagcccttttaaatttttaattaatttcaaagcttcctctggccaggtagacttttgtatacagaccaggtgagagcccttttgccttagtgtgaaaatgtaacattttatgcttttaaaatcaatagattcatcaccttagttttttaaaaaaaatctataaatagggtaattgctgaggtgtgcggtttatctttgagatgataaagctaaattatagtcttttgccagagaaactgaggtaactgtcattagaaaaggtttcttaaaatactcacaaagctgttattggcttcttaacttctaaaatttggggggtcttgcatttatttattatttatttatttatttatttagagacagagtctcaccctgttggccaggctggagtgcagtaagtggcacaatctcggctcactgcaacctccgcctccttggttccagcaattcttctgcctcagcctcccgagtagctgggactacaagcggctgccaccacacctggctatttttttttgtatttttagtagagacagggtttcgccatattggccaggctggtcttgaactcctgacctcgtgatccacccgcctcaccctcccaaaatgctgggattacaggcgtaagccactgcacctggcggggtcttgcttattttaaaagaaatattctgattcatattttaggactttttgtcaacgaaattggttttgatccctttgggtaccatttttattgttttatgtagaatgttagaaattaccactaatttacctggcagtgatgtcaaattgactgtaattagcaggtagaaaattatttgtattatattcatctgattcctatactggatgagcaaggagcatgcttcctttgggacattcttacagcagggtgtctctccaacagcccgacaggcctcatctttttggttggatacctttgaactccatggttacgtgttaggtccacatttgtgtttttttctagcctacctatagttgttggcctttttgcatataactctcgggtaatattttgaagcatgctgaccatccaggcatatagtattttcaagaaatgactgaggtaggggtgggggtcctggtccggctgatgggggtttgctcagcactgtgccagtggaagcaggtgtattgtgggcagttttgtcattgtcctcaagtccttcgcagacagtgcacagcctgctgtctgcagtcggccagaccaggctcctccccagcacactccctgtgggatggccgctgctcaggacacagtgggacaaagttgggttgataggatattttagattcattttacctttgacaagggcaggccttgaattgggagcagcagccacctggcctcactctggccacaggtgacacttggtccttgctgccacctgcttggggctatgtggctacggctacacaaaagcctgtgcaggttagaagacgactgtggtgtgcagtggtgctctgggagtggagacttcctctgttctcagagactcacccccagccctgaccctagaatttagggatagccaggaagtttctagtttgtgtaacctagaagggtcactttaataaaaattgttatgaactatagtattttagatgatgagtgacttattttaattccactttaacattttactgtgctgttaacttggaagacctgtttgaaattagtcttgatttcacactcatttaatctgctgagcacagggctgttgtcatttgtaaacgcaaacactgtggaggtacttctcgccatcagcttccttctttacaaaaccatcatttcaacatgaaaattatgtcagtttatagaaatatttattgttcaaggtctgtaattgtatttcaaaaacgatgtcgtattcaagttgtgaagggatttgttttgtcaaaaaattaaaaactcaatgtgtatgacgccactctgaagagtaggtgagcgctttgcagtcacagaaggtggcatctgactgcggctcatacaggtcaccctgaagggccacgtgcttttagcagttggctggaatgtgttcactaggttccgttatgtttggtaatatcatcttgaaaagtccctgtaatagatcaaggagactgcattccctgccctgaaggaatgtatttctaaggcaaataggcaacttggtactatcttattctgagtagagagtggagaaagtattttcagactgaagaaaactttgaaaagtcaggagctaagctgctcggagctcagtgccgcagcatggctgtggtggacgcgggaaacaacgggaaagttcttgacagagtctgtgtccgctcagtccctgcacttttcctttccaaatgcatctcgttggatatggaatagatcgtagatgttgtagactgagatttgggactatgttgggaccgtacaggtgaatgtgccacctccacaaatggcttctccgagtgagtcacgtcacctggtgcgtggaggtggagcctgcggctggagtaaggcttgctgtgggacgccctcgtactttgctctccttgcgggtggttgccgagccgagagcattggatcctccccgactgtggctagttgtctgtccggtggctgggagggggtgtggtgggaaaaagtcggaatctctgcaatctgtgtcatggactgtactattgtaaggtctatattctgtatgtgggtcccagaccctgatcaggaaatgagcctcatgtgtgtcgttaacatttatatatttccattcaaaatatgtattcagtgtttatttcctcaaaacagactttgttaatgtaggaaatctctccaagtggaaacgtgctaactttttctgtaaatctgaaataaaaggtgctgttccttcctctg

SEQ ID NO: 12294 - DNA, 3292 bp, Homo sapiens
cgccaggcggccgcttggccggatccaggggcggtgcagggcggccggccctgcctgcgggagagggcgagcatgaactggcccggaggacccagctcgagccgccaggacacagacgtacaggcctcctcgggagggagcgcctccccaccactgagccatcctcagcagcgtccgctgcgtctgcactgatgaccgtctgagcccagctcagcgttcctggacaaacagcctcactcctcagcgttaccgccacacttgaatttctccgaatgtcaaggttccctcccactctatttttttaggttaaagttaattggcatatggaatgttttaatctcctctgaaatgtgtagcgtaggcttttcccaagggtcgctagaaactcgtcttcgcgttgccccctttctggctctcagcgccgtcgccactcgggagaggctgggtgaggcccgtgtgaggactgaccctggattcctcgaaactgccattgtgatcattactctgctctttggaaatggctgtatcatttttttgtactaatgtgaattgttcctcagaaacgcttcttttccatcctagtgagaagctggccctgcaggtggtggcagcaatggtgttgtaagatttcctcccgtagttttttctcctcatggatttgaatgaaatgccaataacacgtccactttcaacgtgtagtttacgcggagcactttcgaggcctggccgggttgggcctacttctcacctgggcctatcttctgaactcgctaggttcttatcaacatttgggggataactttgtatatttttttcatttggcttttctttaccagtttctgatttttattctcaatatatttttgctaaacctatttcacaaatcaccaccgactgaagtgtgtgtttactgatgcggccctgagctccatggcgaaaggagtgactttgcagggcgtgagaccgcagtctgcttagagcacaggaagtgacaacttagggagccccgtagggcgctgcaggccccggggaccccagcacgtgggtctaaagagagacggagtctagctctcctgccacccagagtggcttccatctcagcactctgtgggtctggtgatggaagatgcagtctctgctgatcacatgtgccctctgccagggcacctactgagaggtgcggtcctgggggtggaggcctgcctggcaggtgtgcgtgcctcgtacgtgtgttatgggcactggtctaggccaggtatgacacccactctcctgtgagatttcactttagtttttaaaaggtccagttctacagagtgagacctatctatctgagtactacatatgttttaagacttggttctttttttgagggatccttgaccctgggaagtctggagcaccctgagaagggggcaccatgtgtgcctttgcccacgtgtcctgaggggctgcttgtctgggagggagggagagaacattcagcagcaggtgcttttttatggccttttcttaaaataacctaagggggacacatccatcttgcagagaagtttacagaactccccttgaaaactgctgctgaggctcctgttaaattttctgtggcatcttttatgccttggtaaaaactgcagtgtctttggacctgagagtggctactccgtggttttgtgacctgtaagcgtggggttcaggggtgtgtggccctgcagggtcccacgcctccctgagcactgactggaagtttcactggctggtggctgtcccttctcccatcagggtccccagcaaagttaactacacagaggacccaggggaaacgagctgtgtagccactgacttgctcgcgcggccgtggcctctgaggggcactcgccggttaagacagggtgggagtagtgctttccagttcagactctaacttctcccaaagtgtcctaagaaaatactggatcggctcatagatttatgctccttatgatgccctaacttggaaggttgttctagggacaggccgggcagtgtccccacacacaccttagagtcgaaggccccagggccccgctgtcacttgcccaaaagatcccttccggcaggtaagggactaccaatgcttacgtcaaaacagcagaatcggctttgcagtgcactttggggagcagatattaacttatttttgtgttggacagtagtgaaatcttgtgatttttaatcgctttgataatacttccaaattttatgatttttctgaaggaaataatgcaaacattttaaatatgtttctccccctttccaaaaactgttaaactaatgagcaagtaacactaactttgaatgtctctacaatacccgttgataactcagtggagccaggctttggggtagcggccctgagcttgcagggtttctcgccactggggctgaccacgcccccagctgtgaccgtgggtgtggctggctctcggccctgcccagctttgttctgaggacgtggtgacttcctgaacatcagcttcaatcctccatcattaatgtgaagcaaaacacaaaaaccgccccaatccctcaggattccttggcatccgaaaccagcatctgcacctaaacccatacccacccgtgtgcgcccacagggggatgtgtccgaatgggcagcttaaaatgtggtcacctgtgggggaaactcttcaggcacctgaagtgagaacccagctgtccgtcctcaggccggcctttcttccggcgacacccgtccatggctggctgggtccccttcgcagtgtttgtctgtcttgacatctaaaccccggcgtgtgcagtgcccatcttccaggactaccttattttccagaattaaacctgttttataattcaagttaatgcaaatgactgtcagttgccaaatatcttgatcctatgagtgtagttgatgactgtttgttagtcagtagagtaaaatgctgtgtccacggggtgtcacagcctcaccataccctgttgaggtgtgaaatgccccgtcagaaattaaatacaaacttaaatgtgcctattggtgtctaaacttcatacaatgtaaggtcagattccttttaggaatactgggtgctgtcaccaggtttgatagttagacttaaaaacttgaaattcactttttggggggagggatatactgaaatagagagttgagacttgccagttgggggaaaatagcatttaaaatggaaagctgtgtttggaaaattgtgtatgagtatttttgtattaaaaacattttaaaggcttttttctt

SEQ ID NO: 12295 - DNA, 1781 bp, Homo sapiens
ccgccgccgctcgcccgcccgcccccccggccgccctgtccgcctttgcccgcctgcccgccgcccggcgcggcctgctttcagacgctcaattggcgtttgtgttgggtttccccttttcaacatcctgcggttgtctggctggttccggggggtgcggggctgttgttcttcggcgacactttggtgggggtgggttgtttgtcgccatagcccctcgcccttccccacctgcctgggcggcttgccacctgaagagtggcatcttggaccaccgcggctgtccatgacgctgccctgcccgccgccactggggaaggcccagccttgctcaccaagcacagaacctctgcagcagatcccggggccaggctccggccccgcctgcggccccagcgccactgcctgtggaggccccagctggccacggcgctgctttgctccgcgcatgccgagggtgtggcccggctgagcatgccgcatgcacacagccccgccctgccgccctgcccagactggacccggagacccgggctggtgagcgcccctgtccccagcccccagctggctgtgggagggcctgcccctgcccccacctcctggagggcctggtctgccccgcgccgcccggctctgtccacacctgctttgctctgacgccctccatttctctggctccggcccctcccctgcctgggctgtgctgactggtgtcatcacccaggtgactcccatggcgtccgtggcacagccagggtgggggtccatgggacccctctccccagtgcccactggatcgtgctggcctctcccagatgtccccggggacctcctgcctctggctgacggtccaccctgtgaatcttatcagcccaggctgctgccaacagcgcccagcccacagcttctcccagcctgaaaccaacacattttctaataagttatttagacagaatagcactctgcatgactttaattcttgggacaaaacggtagtttgtaccctaagacacagtttctggcccagtgtgatgggggtgggtggccgggtgggtggagcgttttgctgttggaaacctggagggaaaccctgattggatgtcatttcctgccatggagcacgcctcccagccctggcctgcagtgtgggcagggtggggggcaagggagtccgcagcctccgggaggaggggcagggcgctgccttgggctgggtgggaagaggggtggccgcctcggcttccgctggccatgctcctggtctctccttcctgaggtcacaggcaggggctgccctggacggggggcggggggggtggcctggaaggggagacagaggtggagggtggcacaggctgcacattcagcttagaagtggacctggctttggtggcaggagaagaataaacacttgcccagacccctttgtgtgggggaattggggaggggtcgtggcaggcagggtgggccacggaactgggtcccaggcatcaaggccacgtgcagggccatggagggatgcttctcacgaggcgcttcagaagcgagcgaagggacagagaagccctgcgtccaagggccttttgtcctgttagcaattgaggtgtgcagagcactgtacagaccccactcccctgtacattcctccctggaggtgcccggtccccgcttggggatgggagttttgtagactgtacagaaatcggcaccctattttcttgcagctcagattttgttaatctggaatatacagacagacgtaaagtgttttagcaaaatgg

SEQ ID NO: 12296 - DNA, 2037 bp, Homo sapiens
agtattcagagccccccaggagagacggatggacagacagacagccaggttctccagtggtatctgcctccattttcctgagatcaaaaagactgtttcgaaaccaacatctgatatgtaaactgctcttttgtttccaaccccttccttttgttatctccagtttgatgctatggcgctggacccagggccctcccaggccatctctgttcctctggggtggtccagttctagagtgggagaaagggagtcaggcgcattgggaatcgtggttccagtctggttgcagaatctgcacatttgccaagaaattttccctgtttggaaagtttgccccagctttcccgggcacaccaccttttgtcccaagtgtctgccggtcgaccaatctgcctgccacacattgaccaagccagacccggttcacccagctcgaggatcccaggttgaagagtggccccttgaggccctggaaagaccaatcactggacttcttcccttgagagtcagaggtcacccgtgattctgcctgcaccttatcattgatctgcagtgatttctgcaaatcaagagaaactctgcagggcactcccctgtttcctaagaacgaaaaagtgcaataaaggccattcgttacctacttttcagcagcccacaagatgtagcactattagtgtccccctcagaggcttaatgttgcctgtggagcagtgcccatcccagcccgtttctgcccaccagttgttctcaggaaccttacccatgctccagcgtccttcacctggcacaggacatgcaagataaatagggcaggcacgtgtttgggtgtcctctcttttctgataaaatccatcccgtgtttgccacacgccctccagtcctcagttcccactgcctaacgtctgcccccgtgtagatactgagaggtggtggcagtaattgtggccttatcagccgctcagttccaggcttttgcccaggtcactgttgccccatgttcggagaacctggcccacctgtcttggctttctcatccttcccaacccagtgccgtttatttcagaagcttcctggccactgggcttggatgcttcgggcttctgactgctccataggttttgactggtgaaacaggggcccagatgacaacctctccttcgctccacaggtacgcgggagcctcaggttctctcaggggcagcaaagtggcccaagctgcccctgacagcacagggcctggggggtggctaacgagagaggccttacagtgccggcatgcctcctcttccactgtcgtccttcctcagagggcctcacgccaaacaaacggccttttcgtgtgaaacatcttcagggcgggaaaggggccacttctggctttgttagcaataactgaccttcagtttacccttctgaaggagcagggactcagcacagaattcactttagacggggctgaaggagtgtccctcctctatgtgaaaagaaaattgttttattcttcattctgactttttaactgtttggctcacttccagttagtttgaatgaaaataataattttctacttggagttgaagagggcagaatccgcagctctcatcattgtgatgtgtagcatgtctgccctctgactggacatcattgccattaactttcttctgggcatcacggcaatgtcacgatgcccagacttggagcaaggcaaccttggagtcagtccactcataaaatatggtaacacccattttaaaatttaagttttgtccttaaagacaacttcagtggttaattataaaagttgtgttacttcgtcctaaattaaattgatagaaagatttaaaaatgtgttttgtttctactattcagaaactgcgaactagggaaaggttggtatgaagaaatgtctttccttttttcaatgtacatagttcaactctttctttgttacatttaaactatatccatggatatcagtctgctttggactcctctgctagtgttacagatggaaataaaaccattaatttgaaccaa

SEQ ID NO: 12297 - DNA, 706 bp, Homo sapiens
atgaggactccctggagagggacacgcgagaggcaggccaggctgcaccaccccaagagccacgcccctcgctggcgccccagagccgtggtgcttgccaagggctgtgcggagctggtgctgcctgaaaccccagaccgagaagttgatgctcggcccacgccgttagctcgtgtgcgtgtagtctgtgcgtgagactccttcgattgtagctctgtgctgtcggattggaacagtagttcccgccaagtcctcccaccaccgcggcctcggaggcctgggccgtggccagataggagtttgcatcatccacgtggctccgttgcctctgcattgcgccctgtcctgtcatgtgtcctcaccggggtatcggccgtcactcagctctcctgtgcccctgcgtctcaccctaggcgggctgggcggggcaggcctcctttgttctccacaatctactgtctccgagtgtacacgttgcgctgtttgtgtttgatccccctgacttgtagccagcttgtgtaagatcccttgcagaacgagaaagttaaaaacaagcccacccagtactcacaccatcaagtctgttatagagtgtacgactgtattaacacggaggcctgcctggctacttttttaacatattgttaagtaatattaaaatcatgtctttctttttgaaagatggaatacattagtacagcaggag

SEQ ID NO: 12298 - DNA, 5353 bp, Homo sapiens
tggcagtccatgtggctgccaggccaaggcagtcacaggggccctgaccccaggccacacagacggacatgggcccacatgggagggtgagcaggagcaaggctgtgcttgcctagggcctctgtgatggacatctcgtaggacccagccagtctcatccagcaggttgggttctagggctgaaccaggcgccaggctccagaggacgaagggactctgttgccccacactaacttgccctgtcccaatcccagaaacccaggaccaagctgtgcctgggctccaaggacaggaacactggtccccccatcacactcacccctaagtgggctgggagccaggcagggccagggcagctgggtgggggccggggctggccctgggacccccaggaacgctaagacacaggctccagtaggggctgttgcctccaataaagcagcagtgagctttgccttggtggctggggcttgattgggaaggaggggattaccagcttactgggtgcccatgctgatgtctaagtggtgaccgcagcagtacccgggaaccccaacagttggttgtcttgtcttccagggtgcaggtcactgagtgacttccccagggtgcacagcgagtaacagatcaggacccaaacttgggcagtctgggctgggagcccacaccccactcaccagttctgctgcctcaggtcaggccagggcagtgctgctgcagagctagaaggccctgcagctacagctgcttcattccctgcattagtgcctggttactgggtacctcctgagtggctgtccccgttccagaacttgcatacactgagcgggctacagagctagaaggccctgcagctacagctgcttcattccctgcattagcgagcagttattgggtacctcctgcatgcctggtcccattccagacaggggcctctggcctggctgagttcacagcccagtctggggacagctgggtatgaggtgcttacggcacagtgtccagggcagctgggtgtgcagggactgggggctcccggaagattttttggaggaagtaacagctacgatgggatgggaacagtggaccctaagcaggccaagggtgcgtagggacggtggtacccagatgcccaagtcttccaggcaatacctggctcaggcccagccccaatccatccccttactttctgccatggagttccagcaggtcactctccctggcacaccttccaggctggatttttaatgaaacagactcagggaggtaggggctggcagggaccctagaatccttgtgatttttcttagcaccttatgtcagggaaacctaaactgaggtcagcacttgggcccactgacagtgactgactgggggagaaggtcctgcagcccccttcccctgggtgtgttctggggacctgtggtttgctggcggaaacaagtgatgaggctggttagcggatgtgggaggctgtgaccccagggggccatagggtgcggtggaactgcaggccctgcagatgacggcagccagctgcttccaggaaccaggtgtccaaggccacctctgcaggggtttcctcttcagcctgcctggggtgagaggtcagtgcaccacagccgaggctggagcacagggagcttctgttgttctgatctatctctggaaaaccagccattcctcctccctgcagtcagaattctttgccctgtctgacctgaacttgcttagggagtcatgccactccccactgtggccatagtttctcttcctgtaaaattttattattttagttttttgtttttgagatgtagtctcaccctgtcgcccaggctggagtgcaatgccgtgatctccgctcactgccacctccgcctctctagttcaagcgattttcctgcctcagcctcccgagtagctgggattccaggcgcccgccaccacgcctggctaattttttgtatttttagtagagacgggattttatcatgttggccaggctggtctcgaactcctgacctcaggtgatctgcccaccttggcctcccaaagtgctgggattacaggcatgagccactgtgcctggccccttcctgtaaaatttttaaatggagaattgggtgcgagatgtggtttccagcctggtgcctggggtgctgagctagtgagtggtgcagtccaggacacctttgctttatgtcacttacacggtcacctggagccggctcaagtggctaaagcatcctggggcccagagccaggtgataggtccctctggccaactggacagttgaggcctgtggttacccgaagcccagctggggccctggtccagcctcgcctcccagactctgcacctgctagcacagctgtccacgtctgtgtgagctgctctaggccgagggcctcagtttcaagagtgtgttggggtgggatggggcaggccgtggtcctccagcatgaagaaggagccatgaggagttcccatgacctcccgagacttgccataagtgttctagtccacatataagggtagggttgggattaccatttactgaccacatctgtgaggtgccgagctgggtgcttgacatcatttgcttggagaagcagctgctagtagacccattttacaggtgagagaaccaagtctcacagaggcctgggttcaagtcccacctctgccactaactggcatgtgaccctatctatccttcactgctctgagcctagaccctggcccctgcctggctccctgccaggctccctgccacccctcacgacctctgatggtcgttgtgggggtctcttgcctggctcccagggctagggttagggctctggaggtgctttcactcaaccaagggggccacagcactggggagtgaaactgccccgcctcaccctgcgttgccctctgggtctgtgagggtgggctggcaggaggcctaggccttgccctaggggcagtcctgcttcctcattttatagatagggaaactgaggctttgggaggactcactgacatacctaccttcaagatgagttcaggtgggctcagttctggggcttgggaaaagggccccagtggctttgggaagcacccccagcccagggtgaaacatgcttcttctcttcctgtggttccatccgaaggattgtggtgagccccgtgccttcagttaataaagatttgtattgtgaaaagattttttcttttttttttgggacacagtctcactctgtcgcccaggctagagtggattggcgtgatctcggctcaatgcaaatctccagggttcaatcgattctcctgcctcaccctcccatgtagctgggattacagctgcctgccaaatttttgtatttttagtggaaccggggtttcaccatgttggccaggctggtcttgaactcctgacctcaactgatccgcccaccttggcctcccaagtgctgggattacaggcgcgagccacggcgcccagccttgaaaagatgtttttagaaccagaagaaacctcggttcccactgatccttctgggccacgttgtgcggagctcccctgctggttggggctcagcgcagccccagggaggtgcttcctgcacctcaggatgggcgagggtgggcattgggggagagggggacctgggacctgcggcttagttccctgaggcaggcagggcttattggggccatttcatagaaaggcagattgaagctcagcagggaagaggcttttgagggtgatccaggcgctggagggatggcctaggacaccagggtcacaccaggaacatgggagggccgtgcttgtctctagacgaggggaatgggggaagggccacaacctctgtttctgtgacccagcagcatcaagcccctcgctgggcacctcgcacacaccccctgccttatctctgcctgcacgccctgttccctccacctagactgcctgctgagggggcagtgccaggaggttgcctgtccttggggaagaggggcagtgaccctgtgaagatgcttgacagacaacccccaccacctcagaagtgtgtgtgagtggtgaacccttttaagccatcttccagccattctcactggagggagatttgatgggtacagagcagacccctacctgtctaccctccttcggacccctaggaagcttcgcaggccttccaggctgccagacagctgccctggcgttgccgtctgcttcttccctggccccactctgaggggctcagagctgaggcagaatccctttttcattcatttcctgcagaataaaacaacatacagaaaagtgaataaaacataaatgcacaacctaacacactgttaggaagtgaacgatctgcaaccaccatcaggaaatagttttgccagcacccaagtgccctcccctcacagtgtcacttccggcctctctgccctggcttatgtgagtcttgtgttcttgtttttctaaaaagtcttcagcacccaattatgcaggcattgcagtattttcctgtttctgtgctttatccccttgaatcatacagatgcaaattctggcagctggcttctttggctcgttattatgtctgtgagatttattcatgttgctgtgcgtagtatagtttgtgcatgttcattgctaaaaacttccattgtttggctgtatcgtagttcacagattcatttcactgtcagtcaagcttgtccaatgcatgcagcccaggatgcctttgaatgtggcccaacacaaatttgtaaactttcttaaaacattataaagatttttgtttgcgatttttttttttagctcatcagctatagttagtggtagtgtattttatgcgtgacccgagacagttcttccggtatggtccatggaagccaaaagattggacatgcctgctgtagatggacagttggtttgtttctagtttggggtaactacacacaatgctgctagcaacagttttgtccatgtctctgatgcacgtgtgttttttgcaaatggtgcacaaatttttctagggtttgtactcaggagtctgactcctgggttctagggtatgaagatctttctaaatattgttctagtttacgtgcccaccagcagtaaaacagaattcccttgccttcccatccttggcagacatttcacttttgccagtctggtggggtgtatagttatggccttaatttgcatttagctaattaccaaggagattgagcatatttttatgtttttattaaccattttgattttgtctcctgtgaagtgtctatcatcttttgcccattttttaacttgttgtctttttctttttcttttcttttttttttttt

SEQ ID NO: 12299 - DNA, 1889 bp, Homo sapiens
ccttgtgccggagccgactactggagatgacagtgatgctgccacctttaagccaactctccccgatctgtcccctgatgaaccttcagaagcactcggcttcccaatgttagagaaggaggaggaagcccatagacccccaagccccactgaggcccctactgaggccagccccgagccagccccagacccagccccggtggctgaagaggctgccccctcagctgtcgaggagggggccgccgcggaccctggcagcgatgggtctccaggcaagtccccgtccaaaaagaagaagaagttccgtaccccgtcctttctgaagaagagcaagaagaagagtgactcctgaaagccctgcgctaacactgtcctgtccggagcgaccctggctctgccagcgtccccggccacgtctgtgctctgtccttgtgtaatggaatgcaaaaaagccaagccctccgcctagaggtcccctcacgtgaccagccccgtgtagccccgggctgacccagtgtgtgctcagcagccccaccccaccctgccccttgtcctctcagagcctcagcttctgggggagacatgctctccccacaggggggaggcactaagtcatggtcctggctggaaggtactgaaggcttctgcagctttggctgcacgtcaccctcctgagcctcacctttcctgccgtccctcctgttgtgaaatcaccacattctgtctctgcttggcttcccctccaccctaaagtctcaggtgacggactcagactcctggcttcatgtggcattctctctgctcagtgatctcacttaaatctatatacaaagccttggtcccgtgaaaacactcgtgtgcccaccagcggccttgaagaggcaggtctgggccagatgctgggcaggaaaccccagcggcagatgggcctgtgtgcacccaacgtgatgctatgcatgtctgaccgacgatccctcgaccagaatcagattcaggagctcagtttctttttcacttgggtctctggattcctgtcatagggaaggtatatcaggaggggaagaggcctttctagaattttctttgagcaggtttacaatttagcttacatttttcgactgtgaacgtgaataggctgctttttgctttcttctttccagaccccacagtagagcacttttcacttatttgggggaggcttcaggggactgttctcaccttaactcagccagaaagatgccctagttgtgatcaaaggtaactcgaggtggagggtagccctggggcccctcgacatcaccgtcattgatggagcctgaaccgtgtgctcctcggcagatgctgttgttgttacttccctccaagaggctggaaaagggctcagagctgctgagcaggaaccggagggtgacccatttcaggaggtgccggtaccagcctgactaggtacaggcaagcttgtgtgggcccaacaggcccttggtagagctggtgccagatgtgggctcagatcctgggcatgatgggccgagccacctcggatcccactgattggccagccgagcgagaaccaggctgctgcatggcactgaccgccgcttccagcttcctctgagccgcagggcctgctacgcgggcaagcgtgctgcctctcttctgtgtcgttttgttgccaaggcagaatgaaaagtccttaaccgtggactcttcctttatcccctcctttaccccacatatgcaatgacttttaattttcacttttgtagtttaatcctttgtattacaacatgaaatatagttgcatatatggacaccgacttgggaggacaggtcctgaatgtcctttctccagtgtaacatgttttactcacaaataaaattctttcagc

SEQ ID NO: 12300 - DNA, 122 bp, Homo sapiens
gcaccccggtgcggaccacagagcagaccctggcgccaggaaggagcatgtgttagcgtctcgtcccacctggaattgtaataaatacatctaaataaaacatgccttgggagtgtacagac

SEQ ID NO: 12301 - DNA, 3900 bp, Homo sapiens
gcgccatggtgggagagactgtgaggcggcagctggggccggagcctttggaagtctgcgcccttgtgccctgcctccaccgagccagcttggtccctatgggcttccgcacatgccgcgggcggccaggcaacgtgcgtgtctctgccatgtggcagaagtgctctttgtggcagtggccaggcagggagtgtctgcagtcctggtggggctgagcctgaggccttccagaaagcaggagcagctgtgctgcaccccatgtgggtgaccaggtcctttctcctgatagtcacctgctggttgttgccaggttgcagctgctcttgcatctgggccagaagtcctccctcctgcaggctggctgttggcccctctgctgtcctgcagtagaaggtgccgtgagcaggctttgggaacactggcctgggtctccctggtggggtgtgcatgccacgccccgtgtctggatgcacagatgccatggcctgtgctgggccagtggctgggggtgctagacacccggcaccattctcccttctctcttttcttctcaggatttaaaatttaattatatcagtaaagagattaattttaacgtaactctttctatgcccgtgtaaagtatgtgaatcgcaaggcctgtgctgcatgcgacagcgtccggggtggtggacagggcccccggccacgctccctctcctgtagccactggcatagccctcctgagcacccgctgacatttccgttgtacatgttcctgtttatgcattcacaaggtgactgggatgtagagaggcgttagtgggcaggtggccacagcaggactgaggacaggcccccattatcctaggggtgcgctcacctgcagcccctcctcctcgggcacagacgactgtcgttctccacccaccagtcagggacagcagcctccctgtcactcagctgagaaggccagccctccctggctgtgagcagcctccactgtgtccagagacatgggcctcccactcctgttccttgctagccctggggtggcgtctgcctaggagctggctggcaggtgttgggacctgctgctccatggatgcatgccctaagagtgtcactgagctgtgttttgtctgagcctctctcggtcaacagcaaagcttggtgtcttggcactgttagtgacagagcccagcatcccttctgcccccgttccagctgacatcttgcacggtgaccccttttagtcaggagagtgcagatctgtgctcatcggagactgccccacggccctgtcagagccgccactcctatccccaggccaggtccctggaccagcctcctgtttgcaggcccagaggagccaagtcattaaaatggaagtggattctggatggccgggctgctgctgatgtaggagctggatttgggagctctgcttgccgactggctgtgagacgaggcaggggctctgcttcctcagccctagaggcgagccaggcaaggttggcgactgtcatgtggcttggtttggtcatgcccgtcgatgttttgggtattgaatgtggtaagtggaggaaatgttggaactctgtgcaggtgctgccttgagacccccaagcttccacctgtccctctcctatgtggcagctggggagcagctgagatgtggacttgtatgctgcccacatacgtgagggggagctgaaagggagcccctcctctgagcagcctctgccaggcctgtatgaggcttttcccaccagctcccaacagaggcctcccccagccaggaccacctcgtcctcgtggcggggcagcaggagcggtagaaaggggtccgatgtttgaggaggcccttaagggaagctactgaattataacacgtaagaaaatcaccattccgtattggttgggggctcctgtttctcatcctagctttttcctggaaagcccgctagaaggtttgggaacgaggggaaagttctcagaactgttggctgctccccacccgcctcccgcctcccccgcaggttatgtcagcagctctgagacagcagtatcacaggccagatgttgttcctggctagatgtttacatttgtaagaaataacactgtgaatgtaaaacagagccattcccttggaatgcatatcgctgggctcaacatagagtttgtcttcctcttgtttacgacgtgatctaaaccagtccttagcaaggggctcagaacaccccgctctggcagtaggtgtcccccacccccaaagacctgcctgtgtgctccggagatgaatatgagctcattagtaaaaatgacttcacccacgcatatacataaagtatccatgcatgtgcatatagacacatctataattttacacacacacctctcaagacggagatgcatggcctctaagagtgcccgtgtcggttcttcctggaagttgactttccttagacccgccaggtcaagttagccgcgtgacggacatccaggcgtgggacgtggtcagggcagggctcattcattgcccactaggatcccactggcgaagatggtctccatatcagctctctgcagaagggaggaagactttatcatgttcctaaaaatctgtggcaagcacccatcgtattatccaaattttgttgcaaatgtgattaatttggttgtcaagttttgggggtgggctgtggggagattgcttttgttttcctgctggtaatatcgggaaagattttaatgaaaccagggtagaattgtttggcaatgcactgaagcgtgtttctttcccaaaatgtgcctcccttccgctgcgggcccagctgagtctatgtaggtgatgtttccagctgccaagtgctctttgttactgtccaccctcatttctgccagcgcatgtgtcctttcaaggggaaaatgtgaagctgaaccccctccagacacccagaatgtagcatctgagaaggccctgtgccctaaaggacacccctcgcccccatcttcatggagggggtcatttcagagccctcggagccaatgaacagctcctcctcttggagctgagatgagccccacgtggagctcgggacggatagtagacagcaataactcggtgtgtggccgcctggcaggtggaacttcctcccgttgcggggtggagtgaggttagttctgtgtgtctggtgggtggagtcaggcttctcttgctacctgtgagcatccttcccagcagacatcctcatcgggctttgtccctcccccgcttcctccctctgcggggaggacccgggaccacagctgctggccagggtagacttggagctgtcctccagaggggtcacgtgtaggagtgagaagaaggaagatcttgagagctgctgagggaccttggagagctcaggatggctcagacgaggacactcgcttgccgggcctgggcctcctgggaaggagggagctgctcagaatgccgcatgacaactgaaggcaacctggaaggttcaggggccgctcttcccccatgtgcctgtcacgctctggtgcagtcaaaggaacgccttcccctcagttgtttctaagagcagagtctcccgctgcaatctgggtggtaactgccagccttggaggatcgtggccaacgtggacctgcctacggagggtgggctctgacccaagtggggcctccttgtccaggtctcactgctttgcaccgtggtcagagggactgtcagctgagcttgagctcccctggagccagcagggctgtgatgggcgagtcccggagccccacccagacctgaatgcttctgagagcaaagggaaggactgacgagagatgtatatttaattttttaactgctgcaaacattgtacatccaaattaaaggaaaaaaatggaaaccatc

SEQ ID NO: 12302 - DNA, 153 bp, Homo sapiens
agatggatggcctgtggatgtgtcgggcccgctctggagtctgcatcctgtccattgataatgatgtcagtcctcacgtcagtacacactttcctgattactgtaagtcttgaaacctggtctaataaatctttcaactgtattgttcttttt

SEQ ID NO: 12303 - DNA, 227 bp, Homo sapiens
gctgccctggcctggccaactctcctgtggacatgtcggggtggggcagcccaggtggattctgtgggcctcaggggggccaccctggccaccacaccctcaggagcccagccaggagggcagggggtgacctcgctggaggcactggccccggacattcgccatgctggccatggggctccctggccctggcctcctgctgcccaataaagcatttctgaggaccc

SEQ ID NO: 12304 - DNA, 1204 bp, Homo sapiens
tccctccaccttggccccgtaagcgtggtctgctcagcttccagtcagaaaggacagtgggcccccggctgccactgtttgctggtggtctccgtgaccccctcctcacctgctggttgggggcttccttggccctcttggaaaggaggggctcgtgtggccccaggccagtgtctgtcaggatggtccccccgaggcgctctgggcaggcatcctggtgtcctgagaggctcttgcaggaatgatacgtggcagtgcctgcagcgaggtctgggaacaccctgggtgaggcctgggggtttccgaaaatggaggcattcctttccaaatctggacagcgatcgtttttagtgtttctgtctcaagactggaaaacaatagcatttgtcttgagtgaggaagtgaagcccgctgtgttcatagcaggagagggctcccagacacaggcccgtcctcggaagagccttgagagtgcagctcggacccaccggcggcccccgtagcaggtggtgtgggtgctcgggagtggaggtgacgtcagcagcgctctctgaccgcgggtgtcacgggcatttctcaaaggaagcaggggattcagtgagtgtgaaggtgaacaggatggcctggcagcagggatgtttccgtgagccacaaataccagaaactgaggcgaggctcccagcagccggtagggaaaggtgtttccaggggtccgagggccgtggcctgcgtggccatcccctggagagaggagccgctcagggtgcgcgtcatggagtgtgctcaggggtgcgtggacacctctgctgtggtttgctgctgggggcgatgggagcgcctctccgtcctgtgccctggtccaggatgctgacagcagtgagaggcctgccgtgaggtttggtcttgtcagacctgtagcctggacctcgccgggggaccagggagtgcacgtctgtagatctgtacatatctgggcctttggaggccacgtgtggcatgggaggggctacctggtccctttcacagccaggacacgcctggatgagaaagcctgaggtgcctggcatgcccaccggtgccactctgcagcctccacccctggcctgagtccccctccatccgtcttggtggacacctgtgtggctctcacctgcgttttgagtctgttcttccaggagtaataaattctggacatcatcactgg

SEQ ID NO: 12305 - DNA, 65 bp, Homo sapiens
ccctccagcgggacaccctggttcccaccattccctgccttgctgacaataaagatatttccaag

SEQ ID NO: 12306 - DNA, 980 bp, Homo sapiens
gagccgcagatcccgccccgcggctgcaaaggggctgaatttgcccccagatggcagaggaagtggcgccagcctccttgcagactggtgctctgtgttctgtgggagggaccgggggtctcccggagaggggagctggagggcgcgccctgtggctgccaccggaggaaggggctgacttggggaggtgagttctggaaggcaggggctctgggtccggcaggtcggggtcaccagagccccaatgctcagctgcttcactccgtgtcccccacccctgaggatcaggtgagtgctgcacctctgttggctcgtgccttgcactggggtgccaagggctggaggccctgccgctggccttgtcctccttgggcctcacgcccccttcgggggtggccggttctccccatcacctctctggggcagtcacaccacctgttaagcatcaagctaccacagaggctccggccacctgggctccaccagcccagcccccctgggctccgtgtgcgctgggcctcatccccatctatgggaggaaactgaagctcaggaggctgtgtggcttgcggggtctctgggttctgggccccactgttccccagtgaagcccttgtgggaaggttccgggagcaggtggtgtcctcagagcagcctcgcctgctgaccccactgggagaggcgccgtgcctcgggcccctggtgggagctctgctggctcctgtctgaacctcctcgcagggccaaaggctggcttggcctgtgtttcccctggcccaggcctcagcccctgcgtcggaggtggggctgtgttgggcccattgtcccccgccctgggtggcttcctcttgcacagcctggagcctgccctgaccacagcccagcagctccctgtgaacacctctttgtcccttcactgtcagctgtttctaaacccagacactgtttgtaatagactggaaataaaatgttctttcctt

SEQ ID NO: 12307 - DNA, 529 bp, Homo sapiens
ctcgcacccgtctgggaatcctggacagctccgcgctcggggctgggcagaaggggcggcccggacgggggagctttcccagagacccggggatggattggcctccagggcgcaggggagggtgcggcagggcaggagcttggcagagagatagccgggctccagggagtggggaggagagagggggagacccctttgccttcccccctcagcaaggggctgcttctggggctccctgcctggatccagctctgggagccctgccgaggtgtggctgtgaggtcagggttttagagagcagtggcagaggtagccccctaaatgggcaagcaaggagccccccaaagacactaccactccccatccccgtctgaccaagggctgacttctccaggacctagtcggggggtggctgccagggggcaaggagaaagcaccgacaatctttgattactgaaagtatttaaatgtttgccaaaaacaacagccaaaacaaccaaactattttctaaataaacctttgtaatct

SEQ ID NO: 12308 - DNA, 466 bp, Homo sapiens
tgtaccgcgcttctccacggtagaggcgtgttctcagtttagcaggctggtgttaaggctgtaggaggacccagtttccccatgacagtgccttctaactagccagagaataggtagcttccctcctgatgatggctcataatctgaagcatcttgagctgggggtgtgagggggagggcctgctggctcaccgtgaggcagccgcgggagggagcgctgacgtcacagaagcgaaggcttgatgctgtctcagcagcctcagctgtgggggggaagcgcgtgtgcatcgtgtcaactactgtacatgttggtcatgtgaaaggaattatatatgtatagtattacaagtatttttgcatttttacaagattgaaatttgtagcattttgtattatttacacagaatttatttgtatatgaaactcataccataatttaattcgaataaatgaaacttttctatat

SEQ ID NO: 12309 - DNA, 1622 bp, Homo sapiens
cgggatgggcaagttccttacaatgtgtcacttgcaaataacaaagggactttgagggacatttcattaaatataattactgatactttagaggttactcatttacggtgcaattgcttctgtttgctaatgctgctttgcaaataaaacttgctgccgaccacccacgggcataaaatcaagtgcatttcagcattgcctaaagagctctgacaccacttttcatgttaagatcttcatttagctcctttactgggatttattggatgctgtaaaaaaataaatttacactggatatgcgaagggtttggatctcagataaatgcattttgtggaattgattttctgaaccgaccctgctgtctgcaaaccttcctccatagccatatctagagtgatctctcgctgtgctaagagcaagcctacttcgcatttcttcctcggccatcagcgggtaacagtgctgactgctgccaaggtgcactgtagtaagtaagtggcatagagaacgaggaaaaagacccccccacccctccctgtgctgactcctgagtcggggtgggacggccctgcaatgtggcaggctcggtgtggattgactactccctcccctctgactctggcatcttggtaaggagggaggggcaccacccatctgggtggagacagctggggtttgctccagtgtgtgtagactggcagagcatgtgagggagagggctgggaagagacggccctgggcccgtgaggtgcagaactctccctgcaggtagtctgtctgctctgtgatgtgctgataggaaagagcccccactggccctctggttcacttctattatgaataaatttgcaccaatagccccattagtttttaaagaaatgagctgggtgggaaaagtggaaatgtaatttctggtaagcttgagctactttaatttttattctatgaaactgatatcccttgatgtgggaaacaggcaggaaaggctgtggggtgggggtgggggactggtgtggcaccgtgcaaacaaaatgacaaatttcaactcacaatctttgtaagaaaattgttccagtttgaatcttgatattaaagtttatgtttacaaaactgccagttagatgaactaagtgtgtaaaacaaatagaaaagacattcgcagacatttcttctatgttattgaatgtgttgtttctggtgtacgtgtcaaaagtttcagttttttagatcagaaataaacgacaaatagtgtgagatgtgttgtgaacaggcatggtgaccgtggtcagcgccactcttgtttcctgaaatgtgcttctaagacagaaaatgtattttctcatcaagggtgtctggagacacagaccgtgaccttggcgcagcggtgtgcatcagaggcgtgtgctgagaagggtggtgttaagctgtggaaaatgactcaagagcaataaatcagtgccaaagcttccctgcgcatctgaatagacacaagtgaagcccgtgtgcgcacagtgcagaggccgagcctgtatttccaggtagacgtggactttattgactgtgaattcatttacatgtaacttctgacatttcactctgtgcaaataaagaacatgaggat

SEQ ID NO: 12310 - DNA, 788 bp, Homo sapiens
agggtcccaggtcgcccacctgtgggccagccgattcctccagccctggtgctgtacccccgacgtgctcccctgctcggcaccgccagccgccttccctttaaccctcacactgctccagtttcacctctttgctccctgagttcactctccgaagtctgatccctgccaaaaagtggctggaagagtcccttagtactcttctagcatttagatctacactctcgagttaaagatggggaaactgagggcagagaggttaacagatttatctaaggtccccagcagaattgacagttgaacagagctagaggccatgtctcctgcatagcttttccctgtcctgacaccaggcaagaaaagcgcagagaaatcggtgtctgacgattttggaaatgagaacaatctcaaaaaaaaaaaaaaaaaaaaaaaaaaaaaaaaaaaagaaaagagaaaaaaaagactagccagccaggaagatgaatcctagcttcttccattggaaaatttaagacaagttcaacaacaaaacatttgctctggggggcagggaaaacacagatgtgttgcaaaggtaggttgaagggacctctctcttaccagtaccagaaacacaattgtaaaattaaaaaaaaaaaaaaactctttctatttaacagtacatttgtgtggctctcaaacatccctttggaagggattgtgtgtactatgtaatatactgtatatttgaaattttattatcatttatattatagctatatttgttaaataaattaattttaagctac

SEQ ID NO: 12311 - DNA, 1915 bp, Homo sapiens
gcccacacttgttgctgctcaacaggactgcactcgtctctgccctgcccacccagagcccctctttgtgccctgatggtccctgtctcacccctgaaaacatcagatgcagaaaaagccctggacttggagctgggaagcctgggttctggtcccatctccatgactgattcacgtgtgacctcagacaagtcacgccctctctgtgcctccgttttctgcatctgccaaaggggttaaacacttctgccccacttcaaattacaagattatggggagaacccaattaggtaggaaacatgaaaaacctttgatatttataaaatcatttttacgtgcaaaatataaccttaatatttgaagtgacccccattccccaaagcaatcaaaccgtcatgactttgcaatttggcacatcctagcttgttagagggcacttccgaaaaacacagccctgacagcaaaataaaggtctgatatgttggccccttctatggaaacaacgctgccaaatcctggagcaaaacctgaagtgtcttcatgtgcattctctggcaggccacagtcctgagcttgtaagatggtgcagcatgcagaccagacttgtccccaaggtctcagcgctgcggtctcactcctcccctcatttaagaagactatccttaccttttagtttcagcagtcctcaccaccaccatatccccagtgctgggatggcacacaggtgtccattcagatgagagttgggtcgctgagcattggttactcctgcagagtgtaatcagcaccccatccaactggcccgaaagcccagacctgcagcagaactctccaactctctatcagctttcagggttttctctcctgggaagggtgtaaaatcagcttgtcagattcttcttacagagagtatccaatcggtattggtggagcggctccctatttatacaataggaagcatgggtgcttagaaagtttatttcaggaggaaaatgggttcacacaaaaagcaaactacattctggtctgctcagggagaagcttgcctttgaactggaagatgttgggatgagcagggaaagcttagactttggagtcaggtttgtgttcagaatccagccctgctggctactaactaactgggagaccttaggcaaagcatgcaatcgctctgaatggcagtttcctcatttttaaacagggataataaaactaatattgcaggggagttacagggttaaataagatcctgtgtgtaaccccaagcattggatgactcatagaatggccttttttgtcagcataatcgtcatcattatttagatactttcttccttcactcacccagcaggtcagttttctgtgcaaacaaacctgtttaggattcttccaaatgttcttcctggggtctttgatatttgtttgttacatcctgctgaagttcgactgtgtttttattttttcatccaacttccatttttcactttttacatgattactcaatccttggggctgtccatgtcatctcttagatttcttaaaagacattttaatgtatggttaggttttatatttttattttttaaaaaagaaatagtcagtgttttcctcctttcaaccgagactatttctggattgtgtgctcctcgtcagttgacttgttttgcacacttttctttacttcatgtccccatcaacaaccgtcctgctccccacctcccccaggaaataaggggcctgctcctctccctactgtgaccctggaggctcttaagatgatgatggttttttttattgggctgagttcacgaattaggggcaggagctggaagtcgccctaggaacaccagatttcctggttctgttcaagttggcatttcttgtttggaataaactatttcttggacattccttc

SEQ ID NO: 12312 - DNA, 411 bp, Homo sapiens
gaaaaaagaactgagcattggcaaaaagctgaggatgacaagcttaggggatgaaaggctgccttttcccccccttctgagcgtttctgacagctcccagctgggagaaaccaacatgacgaaaagacaaagaatactggagaagagagagggtgggcagagccacaacctcatcctcccagtggttcctcttgagtttgatttgacaagatgccttcccacccaggtaaccccgtgggaacgtgccagtacctcaccgcacgacctcactgagtcctcacaacaaatccaggctgcagatttttttccccacttggagatgacaaattgaaatgcaggaaggttaaagagtttgcctgaggttgcttagataataaaagaatctggattagaacccagacctacccagct

SEQ ID NO: 12313 - DNA, 3267 bp, Homo sapiens
tttaagaccagtcggtgggacaagacctgaagccctgggtctgggtgtgaattccaccttccctcctgcagtgctgagaggcagcgaggacggagaggacagcggcatctctaggctcttctgagagggacagagaaagaatagaaatgtgccctaaaagcataaatgagtatcacctgagaaaattaggcattcccgtcttggaaacacgtctctgtgagtttgcatttcatttggcttggagccctggctcgatgcctcatggatctttctccccaaggagggacgtcttgaggggtccgagcctcaggccaaggacccctgatgcagactctggaatccctggcccaaaggcctgtctgggcccatctggggctgaggacacacagatacataatgacacctgcagaaatgtattctctgaggacacttagaatatgaggaagagggtgtggcccaaccctcacttcacctggggaggggcttcttccggacagtagacaccctgcccgtgcagagagatgtcatgggggcacctgctctccctgatagatgctgagagcatccagaaacttccagaccagccctctcaccacacccagaagaggcctttcccatctggagagaagcttccagaccagcccttcacacaccacagccaggaggggcctttcccacctggagagaaacttccagaccagcccctcataccacagccaagaggggcctttctcacctggagagaaatttccagaccatcccctctcaccacagccaggagaggcctttcccaccggtagagaaacttccagaccagcccctcacaccacagccaagagaagcctttccagcctggagagaaacttccagaccagccctctcactacagccaggagaggcctttcccgcctggaaacttccggacaagcctctcacacaccacagccaggagaggcctttcccacctggacagaaacttccagaccagcccctctcaccacagccaggagaggcctttaccacctggagagaagcttccagaccagcccctcacaccacagccaggagaggcctttcccacctggagagaaacttccagaccagcccctcataccacagccaagaggggcctttctcacctggagagaaacttccagaccagcccctcacaccaccgccaggagaggcctttcccaccgggagagaaacttccagaccagcccctcacaccacagccaggagaggcctttcccaccgggagagaaacttccagaccagccctctcactacagccagaagaggcctttcccaccgggagaggaacttccagaccagcccctcacaccacagccaggagaggcctttcccgcctggagagaagcttcaggccagctcctcacaccacagccaggagagaccttttctgcctggagagaaactttcagaccagccccacacaccacagccaggagaggccgttcctgcctggagagaagcttccagaccagcccttcacaccacagccaggagaggcctttcccacctggagagaaacttccagaccagcccctctcaccacagccaggagaggccgttcccacctggagggaaaattgctcctttgatggaggttagggactgtcaccctcagcactgtgaacataccgggcgagatcattcttcaggggaaggagctgcccagagcatcacaggatgttccagtgtccctggtctctgcccaccagatgccagcactcccaccattcgtggcaaccaaggatgtctccagacactgccccgtgtccatggggttatcacccactgtgctgagtcaaagggtgccttgccctggtctaatccaggacatagccgtggatacgtccaaaaatccccagaacctagtgagccctctggctctgggagcccctatctcaggaattttcagggtcatttgtgacttttcatttcttaaaacctgaaatagactctcttagaaacaagtgactccttcccagtggccaaaacttaatcatcagagcgcttccttcagttcctcacccatcagccagtgggctctccaaagttaaccaacagctccctcttgtggttcactaaaaaacttggttattccatggagttgtgcaaagctatggcttccttggtgcaatattcttaaaacctgctttgcatagaaatcacttttgcccaggctggagtgcagtggcgtgatctcggctcatggcaatctccatctcccgggttcaagcgattttcctgcctcagcctccccagtagctgggactacagacgtgtgccaccacgcctggctaaatcttttttgtattttattttagtagagacggggtttcaccatactggccaggctgctctcgaactcctgacctcatcgtccacctgcctcggcctccccaaagtgctgagattaggcgttagccaccgcgcccggccagaaatcacttttatattgtcacatgggccctctgcacagagtccgatggctcctcccggggaagcctgattttgtgacgtgtgtatagtaaatgcaggccctctggcagcaccataattggtcggttaccctgagcccagagctctgaaagcatctgtggaatgatcacgggacccttctcctctgagaaggctcccggctgcctccccgccaccgagcttgtagcctgaatgcctggctgtcgcatggagcattttgcttctggggtgtcttccttagccaaagggaacgtgtcatttgctcgaccctggcccacccttgccgcccagctgttgtgctgggcacagtctggggcacaggcctccatgatgaagacgcgtgggctgtcggtgctttcatccgtcacaaactggcacctgtacctgccagcaggagcatgatggggacttccatgctggaattgctccctgattaaaatgagatatggctatttggaagacactgcattttagccagtgtacctgggcacagactcggggctgccctgaagctgatgaaggcttgaaggacggaagggctgagccacatgaaggcagcactcagggccaggggagagagaagaggatcagcagtgcagccccaggatgcctcgcaggtaccctgcctccattttggttaccatccccacttattatgggctgtgggctgttatggtgatggatggatgtggatttggaaggggaccatgagagatgatgtattatgatgaactcatgatttaattctttggtgaaaat

SEQ ID NO: 12314 - DNA, 796 bp, Homo sapiens
ggatggtccgccacgaggagcttccagtgcatgttgccatgaggcctttccccagtgtggccccagcccgacaggcatgcaccagtgccgcctgtgcccacgtgtgcagactgtggctgcagagaccttgcgaccatgtgtagattgcgtggaccccgacaaagggaaggctgctgtgtagctctgtccactctgaataccaagtgtgttgggaattgcatgccatctccaccctgagcctgacctttctgagtgacatgggtgtgccaggctagactaggaggttccggtgtctggaaaagcactttacagatgagattccctctcctcccccaccttcaagcaccctgttccctctttctttcttttgtgttggatttgtttaaaaaccaaataagcatctgtgtaacctccacagtagcatttcttatttgtttggtcactgctacaccttagcagctcttcccctttcctgggggatgtgcacggcagcttgagcctgtcacgtggtcaaggcccggccccatcagaggctgggggaggcggcacattggcagtgtgtcacactgagctgggcaccacaggctgcctcatgaccctcctgtccagcaggtagtgggtgaatgtgtgaaggtcttgcctgaatccatcaggacttgggaaacagagaaccctgtgggggcggctgtgggggaggtccctgccagtgtttagaagagcctgactgtgttcagtgccttggagcagaaagccagggtcctgagtggctgaaataaaagcctctggtggaacctgc

SEQ ID NO: 12315 - DNA, 1176 bp, Homo sapiens
gccctgggcagatgccccggccccagggcttcccccaggaactccatgtaacagaacagacccaggacagggaaaagcagtgcggagggatgggactggggagtcagctgctcatctgcaggctaatggcaggaaatggtcatatttggggtttttccctaatttttttaaacaaaaattacattacaagatccaggttcttcccccccacactcaatcaagccagccctctcctcttctgtcacgtaaaggatatttggcacactcatgcgtcattcattcacaaaacacaaacccaggactttctgcctaaggcagagcacaagactcacagcagcaccgaagcgcatctgccgtccgggccctgccaggcttgccaggctgccagtggtaactgtggacctactgcgtgccacgtgttttcatagactcatcccatgctggcaacagccctgcaaggggcttggctctgccacagggcaggagaggaagttgtagcgcctagcgagagttccagccccagacgcccacctgtgcctcagggcaccgcctgccgagcagagaaggcacagcagccgtcagagtccatgagaggtgaaaccacacagcagggatgtccaatatcagaactattaatatcaataaaagtataaccttcccaggtctatgcccaagagaattgaaaacatccatccacacaatacctgtgctcccgcgttcatagcagcattactcaaaagtcaaacggtagcaacaacccaaatgtccatccacagatgaattaagacatgaagtgtgttctgtccatacaatggaatattatttggccataaaaaggaaggaaattctgacgcatgccacagcctgagtgaatcctacaaatattacgctaagtgaaagaagccaatcacgagtttatgtgaaatgtccagaataggcaaatctgtgtatcagagacaaagcacattggtggttgccaggtactggaggaagagagaagaggcatgacagctaacagggacgggctttctttggaagatgatgaaattgtggaatgatggttgcacaactttgtgaatatactagaaaccaatgaattaaaaactttggaagatgaattttatggtctgtgaattatatctcaattttaaaacttttttttttttttcccgagac

SEQ ID NO: 12316 - DNA, 993 bp, Homo sapiens
gtttccagccaatggattctggtcaactggtggagattggctgacaccctggagaagccgaaaccagagagccttttgttttctcttttttcctgtctatgctctgtctcacttaacactacgttttctgctatggtctgtggttgatgacctcaatatgagtttcgattgttaacgtgtttttgtttgggaagtaattttgtttgaaaatgctctcacatacaggaattagggcctagattgtaagctcttgcagcagtcacatttgttcccgggctttggtggttatttctaaatttttgaggtgctttgctatttcttgtgtgacctgatagctccctggaactttgggtctgtgtgtgacacatgagactcacagttggagttctccagctctggaggtgctgaaggagctgcattaattctggaagacgactccatgcagcaactactgaagaaaggaccagacttcaacggggagtgtggatgggccgacctggctgggactcgtgaatctggagaagagctggagaatggatagtattgtctgtatttggagactttaatttctgtgtgagaccaaaggaggagagatgtgttttgttcaaaatttaaatttgttgtggtacactatcttatgtaacctgtctggtgagtttgtttggacaacctaactcagctttatttgacatggaacctaaaatagaagataagatcttgatattctgtacaagttgatgtaataccctgatgcgttttagaggacttggcataaaatgaaagattggcaaaggcccttgaggggcttggggatgacagtatggaactgtctgcattggaccctaaactggactagaagaggcatcttcaaggttcatacgttgtccagctgtaagttcatttgagtagcagacctaacaaatatttgaggtcagaaccctaccatgttaaaacaaacaaaaacttaccatgttaataaaagtattcatttgc

SEQ ID NO: 12317 - DNA, 127 bp, Homo sapiens
tgccctggagatgtcacagattcctggcagagccatggtcccaggcttcccaaaagtgtttgttggcaattattcccctaggctgagcctgctcatgtacctctgattaataaatgcttatgaaatg

SEQ ID NO: 12318 - DNA, 797 bp, Homo sapiens
cggcctgaccactgcggcaagaggaccccagctggggtgcttacctccagtatgaagtgaattgcaaatcctgcttatggacatatatgatgttggagtgtgggattttaaagtttactttctacaaactctccgtagtatattcatgattcagtgtagaatgtatagactttatgtcttccaagtttaaaaaaagagacagggtcttggtatgttgcccagactgttcggaaactcctgggctcaagtgatccttccacctcagcctccccagtagctgggactacggggtcgccactgcacccagcctgtgtcttccagctctaatcagaaagctgcttgtcgagggcatggggaatcaaactgaatgaacttttctctgcactgtggcaaaactgttatttttatggattttactaaatggcgttaccttttcaagatttatatgtttgtataatcataagaaaattgagccattaaagccttgttattcaatcctaatagtcagttttctagaacctacttttagggtaaatggtacattatttaatattatattaaacctcctatagcgtggattgtagaccaaaggaaatggtacaatttctgagaatatatgttgattttttgtgactaattccaaagttgtatttgaaagtatgacctcacagtcttcatttgtccatagcaaacatatgtgtgtgtgtgtgtatatatatatgtgggttgccaatgtttggtttataatttaaatgttaatagaaattttgagttttattggaaatgatttccttctg

SEQ ID NO: 12319 - DNA, 3206 bp, Homo sapiens
acctgcaaaatagtacaaattattgtttaaaaatgatatgtgatggaaaattactcttcagtgagacctgttaatctaaaacaacaacttaggtttcctcttcaattaactgattcagattggtaataattatctttctcttcttgcttattttagagttgaggacagctatcctgttaaagattttttttcccagctgttaaattcttggctatttgaaatagactagattgtgttgtcaaatcaagaatgggtgtgcatgtgcttgtcttagaagtatcactgctttttgcatcttaactgcagttaattttccttccgactgcggttatatcactatgaccttactagcattgcagtgtcaacaaccacttctgctcttcagagacttcagctttggagcatttaggctttgttctccaagaactgggatatccattcttaccctacagtggcttgatgcctttctgaaggcgagagggaagcctgggtgactcagcggtggtctccattcagcaaaatctcatgtacatttccagtaggaaccgcagaggtgtgcttttcaagactcaccaaatactgtgttttctctcttaggatttcttttcccctaaagtatcacggaagatactatggttcgtgactttcttgctaactgaagaagccaaggatttggggtgtggggtcgtatgcgagacacagtggggtaagggtgcataccccaccccttacctgctctcatactgcagttacatttacaccaaaaccccatgcagggttctttgtggtgagtgttccatacgtgctaaggaccttagttacagattgttactttctggtgacctatgttgaattgaaacccccaaaacttgaaattgtgaacatttgacatgcagtaaaggccacctcatcacccagagaaatctttggctgctgcagctagccgcttcttggctgtgatgtagtatagcttcgatctcattttgtgtttgagagaatgttctgggcaagttctgtgtgtggtgggttggggcgggtagagtcatgagttttccacatccctgtgtggtggttttgctgactgtcgctccgtgggactggctcccgtttctccttggtgagcccggggagccggcgcatcttgtgagtcgcgtctgtgcatggcgatccgctcctccggctctcatggcattgtgccacaggcagaggccaggaggagcagtatgtgcacagccgaaacattttacattttttacattgtttttcttttttaaccaactcattgtttaaaaaacaaaaacaaaaaaaacctaatctgtgaaatcagcgtagcatgcctggagcatcaggaatggcagaaaagtctgatgcgctctagacagcttcaccactcatttgggcaggcagtaaacacacatataatttattagctgggagctgaactggctgtgaaatctatgatttgctttgaacatttgggttttgttgcctttttcttaattgataacacagaaaagaaagtaccatcaaagactgtggagtcattgagggtctgtgtgtcctcaccgagagggacctggtgtgcccgccgggtcgatcttcccacgtgttagggtttatttttatacaacacattttttgacactttaaggtgggtgggtgtgtgtgtgtgtgtgtgtgtgcgcgcgtgcgcgcgcgcatgtgtaaggttttatgttgctgttatttatttacgaacttcagatacgtttttatgtatttttcattcttctggagcttcctaaaaattgataagcatctgcactgaaatataatttaacagcaaaagtaaaaaaggattgaaagttgtaaattcctcatatcactacagtgacgattattctagaaatcgttgcttgtgtagcaaagaccaaataaatagatttcagacacaaccttgagcacagttgattttggacagctgctgtttattaggaaagggctccaggtggcaaaggtgcacacttcctcagacacaggtgagaagatgcagcaccttccacaggtgaatgggacggattcgaagtgagcaaagggattcacaaattatgtatttatttgttttcatagttaagtagctgaagctcagaggctttcagcaacagagatgaaagtgtggctttttagttttgtgaatggatgatcacaaagaaaaagcatttttaaaaagttggcaaacgctgaaacgcactgtggtatgaagcgcattgcatttccatagcactgaagtaccagtttccattcctgggctgagattgtttttcccgtggttgtattgttctgatttcacgtacaccagagtaactgatttttttttgtttgttttcttgtggagttaacaccaaataaaaattgtaaaaaacagtttgttgtttttatttctcatagcaaagcttcttttgtaaagaactccagcttccttttactcatgagcatccgtggaagagcaagtgcccaggttacatttgttctagatggaggtcatttagctctcattgcagacactgctgaaaacattgtgcagctttgctagggaagaaagtggtgtggcctgctgagaaatcagcggctcctccccatctcacccccagcacacgcagggactactacctgagtctgcaaaacacatagcatttttgtccgtggatggtacacaaagctcaatctttttgttttcttctggggaaaaaattaaatctttatatgttaatatgattgatattcattgtgcaaaaaaaatcagtgtgtttttaaagaagtataagggaaaaggaaaactcatatgtccttctgtcactctgagacatacactggtaacatctgtgcaagcccctttccaggattctgaatgtacagtatatatgaatgcatacacagagaaatttacattcaagagtgtactatacttgttcttctataacatcagaaataggtttttactcagatgtcttcatgtcggtaattatagaactacataattatttttatagctgtattatgtagatttaacaggttcctcattgataaaacaatgtttttttggttgtttattcagtatctgaataacgtttctatggacatctgtaaacatgtatgaggggacttttaaaagttcatggaaaatggaattaaaagaaaaataaaaaaatataaactttatttctcaa

SEQ ID NO: 12320 - DNA, 2719 bp, Homo sapiens
ggctgcagcgggaattcgcactcggcaccaatcagagccccatgccgcggcccctctgttgtttcagactgacacccgggcagccgagaagaacagacgctctttaagtttgattcctaacactggagttggccttaaacaaaacaaacacaaaaacttttaaagaattaaaccaaggcttagccttaagcagctcagtggaaggatgagctgctgcggaccacagccagccactgcatctgctgcacagttgaacgatgggcagtggctcacccccactcctttatttcagcaaaagctaattaaattgtaatgtttctatgtcaactactgggaagtatgttacagtcttagccaggatgcatgagagatgttatttgggagacttgagatgctttggctgatatttacatgttttcgataagaaagggatcgctgattgagttattgagatagtttttccagagctggaggtcacgtttctaaaactcacctacgaaagatagcattaaaggaacaggggctctctgaggatggccactgatgtgtgtttgtggatacctgggcatcgacccagcctgcaggtgagctctgggccatgttgccttgacacagtcacagtgtagaggctgcaggtgcacacgtgggctccagtgggactgcgctctgggagactgctccctggcatcggtcctgcggaggtggaaagttcgagaggaggagctatttgcgaggaagccctgtggcaatagagataggcttaaaagcggagagaacacagagtggaatcagccccctgtaagtaaaagggtagagaaagagatgtgtggctgggccctctcccacctgcctgttcagtggaggccagggcagcagcccagaacagcacatgtgggggaggtggccccttgtgccagcagtggctcctctctgcctttgagccctgcacagctggacccatcctaagtgccagtgagtccctcacacatttgactttagaacgtgtgcttcatgacccgttgtacagacggaggagcgagcaacacacgtctaacagcctagacaatctcgtcagatgctcatactggaccatcagcctccccattttagctgactttcccagggtcgttggcaaattttttgttctgtcttttccttgactaattgtagaactttgtgtgaggactttggttatccaaaatcacagaaatgaaccgttttgcagctgcgcagtctaaagggcaggccagtgtctggaagcagggcccacgtggcggtccgctggcaggctggtcctggggagcattctgcggacccggtcacgggcttggttagtcatgcgtacatgtgtgccttggggtgctctgcactccacggcccttctcagccacacttcccaccccagggggtgcccccaggctgatctcatttctgatgttgagggctgtttggctctgtctgtatagcttgtaacaggagccttgggctaggggctggggaaggaaagccgagctggcattcgttctctggactttttatgcctgccatacccgctaatgctcctcgaggtgcaggagcaggttgctgagccagtggctgccccgtgccctccttcccagcactatcatgtgtcacgtttcccggactctgcccctacatctcagctgaatctccagggaggctgcagagcatcgtggagaccactttctgcctcggcctttaaatgctgactcacctcctctcggaggaggcgtcctgtcttcacgggggggtcccggtggcctccagacgtagccatttcctgacatcaagatgttgaatgtaatctggtctgagctgggcctgtgggaggggccgcctgaggcctgtgcgctgttgtcctcgcagatgtacttatttttgttcatgttacgggcgttccgttccttaaagatgtatatattttcttactgtacataaagatgttccttaagtcgtacagaaggtggcgcggcaaagggcctcgtgcagtgtgttcagattgcccctggggatcttctgtgtcttcagcgcccagccctgcgtgttcctggtgaagcagtttcacatcagtctctccagatagcactacgatgtattccgcttctgaacaggatcccatgccagtgtggaacaccttcccaatcttagttcagaagtggcttgtatgacctgttcaggggtcacatgaggtctcgccagtttcctgggtcctcttcagaggccagaaagttctaagttctgagtccccggccagggtcccttaacacctcggcacagaggctgttggcaagtgtagaggctgcctctgtgtgtggtttaagtaaactggaaatgagacattgacgtgctgctcctccagaggtctgcacactccacttcacatgccgttgactctcacagtctaagacttcagggccgggacctttgtccagcctgcacagtagagtgaggctgcctctcccgccaggcattgggatcccatttagaaacggcattcacttcagaaggtactttttaactgctcagtttttgactattttaaatagtttgctgaaaactcctgataacacttgctacatatcatgttttaattgcttgtacagttaacctttaattttatttagtaaagtgtatcaaagtaggacttttttgaattgtaaataggtggttttattaaataaaagtcaatgtaaaattg

SEQ ID NO: 12321 - DNA, 2572 bp, Homo sapiens
tgccaccccagcatctgtcttttcacccacggagggcacagaaccaccagcaaagccggcggctggactggcgcccctcagagacctgcggaaagccccctccctgagtcgtcgccacaccaggcgacaggcaccaccccctctgataaatccaagcccgcccaggcccacggggggcccacgggaccccccgggactccccggacatggccctgcccctatgggacaccaggcctgactcaggcaggttctgccccccagaccccacacacggccgccccacgtgctgtcgctcagcccgaggcctgacttctctgggctgaggctggtcgtcctggagccctcccagtacctcgggctgcaagagctgcagacccgttcagacactgcgttgcgggctccttccccgcagaggccggggcctccctgactttgcttcttcactcccacctgtgcggccacccagtccctctgtgggagcccgggtgccaggccctcccaacaccacaccaccctccaggcccccctgccctccggctggaaactgcagctctgtaaatgcctctctaggtagctgctggcggtggtgggggtgtctcactctctgtctttatagccggcggtagccaccggggtggctctgtcagagttccgtactcgggagcccctttccctgagtgcccagggtgtctcctctgcccagaggggcagcagctctccctggttctccccagggcagacggggtagggcgggctcaggacccagtgcccatggttcctcactcctaccagcaagcagcaccatcccgcaggcttctcccacctgatggctgttctcccaccgggtctgggctctggaaggagccagatgcccccagaaaggtgggtggtggagacggcaccagatgtaccagttttctgcagttccttataggcgaagggaaccgggtggaaaccaagctgggagaggctgaggatggcagggctggaagggccatcagcgtgaccctcattttcaagaaggggaaactgaggcccagggaggagagtaactgaaggtcacagcacggtcacagcagaggtggccgaacccagccctctgcgcgccagtgctgtgcggtctccacacccttacggtttcctagaatcagggatgttagtgtaagtctataggaatataggggggtgggggggtcaccttttgccttgaaatgggaagtcagtagccccttcctcctcctccctcctccccctcctctctggcagggatctcagatgaccgtggcctccctctcagagggggagaacgccagagccctggctggtgatgtgctggctgggggtgaatcccaatgagggtccctctcagagcgggagaacgccagagccctggatggtgatgcgctggctgggggtgaatcccaatgagggtccctctcagaaagggagaacgccagagccctggctggtgacatgctggctgggggtgaatccgaatgacagtgcagacgttctcccatccaccatgtctgagcttgggggaattgcctcatttcccctggaaaagaaacatggtccattagaggggaaagcccaggggtgaatcttcacgccccaaacagtgcccggtggggaggaggcacccgctccttgttgagtaaaaccacccatggagactggaacctcatctccctgggtcggggggtgttcaaggccacaggacaaggggagcaccctgggccacacaggcgtggaggtgtccccaccccttccacctgtcccccagacccaaagctctctccccaccctacctgcccacctggggctcctgtgccccctccccactccagaggccaccctacaagttgtcctcaaggtcatcctggagatgggatccaggacgtggggccatgactctctgggaccttgccacagcccccattcccctgcttgcagtctgcaaggacacctttgcagggattcttgtcctgctggccaccccacccacacctgtccctggccagcaggccgcctgcaagcgtcaggcacacagggacagacatggcgagcacagtgcaggcccggggcccacgggcaacatggaaccctgggaactgccctcccccttagctcacagtgcctgcggtagccactctaggtcgttggccttccttgaccactccatttaattctctctgctgtttgggttgggtttttccccttagttatctgtgggtttcctgtattttatgttaatatttctattaagaacatgttgggcatgtggacccaagcacctgggaaggaggtggcatctgagacagcctgatacgttcccgtctgtgcacccatggagatccaggcgtgggcccgtgtctgtccctggttgtaaattcgagggtctgcatatctgatgttcaggtagacctgggcgcctgggaacgaggccatcagctgccatgcacataacaaagagacaatgcattccttcttatttttcctttttaaaaatcgatgaatcatttgtgatgcttttaacaaagattaaatgaatttgatcagcttttgcctt

SEQ ID NO: 12322 - DNA, 148 bp, Homo sapiens
ggacagcatccaagggagtgggttttgtgcaagggctgggggtctcctgcctctcctggtgtcgccggtggctcattttctggcaaatggaggcacgaacgcaggggccaaatagcaataaatgggttttgttttttttttgcaataa

SEQ ID NO: 12323 - DNA, 967 bp, Homo sapiens
ggggcgcattcctccagcgccaagcgtcagagcctgcagacaacggagggcagcgcccccccgagatcaggacgaaggaccaccgtcggtcctcagcagggcggcagcctcctcctggctgtccggggcagagcggaggctgggcttggccaggggcccgaatttccgcctggggagtgttggatccacatcccggtgccggggagggaagcccaacatccccttgtacagatgatcctgaaagtcacttccaagttctccggatattcacaaaactgccttccatggaggtcccctcctctcctagcttcccgcctctgcccctgtgaacacccatctgcagtatcccctgctcctgcccctcctactgcaggtctgggctgccaagcttcttcccccctgacaaacgcccacctgacctgaggccccagcttccctctgccctaggacttaccaagctgtagggccagggctgctgcctgccagcctggggtccctggaggacaggtcacatctgatccctttggggtgcgggggtggggtccagcccagagcaggcactgagtgaatgccccctggctgcggagctgagccccgccctgccatgaggttttcctccccaggcaggcaggaggccgcggggagcacgtggaaagttggctgctgcctggggaagcttctcctccccaaggcggccatggggcagcctgcagaggacagtggacgtggagctgcggggtgtgaggactgagccggcttccccttcccacgcagctctgggatgcagcagccgctcgcatggaagtgccgcccagaggcatgcaggctgctgggcaccaccccctcatccagggaacgagtgtgtctcaaggggcatttgtgagctttgctgtaaatggattcccagtgttgcttgtactgtatgtttctctactgtatggaaaataaagtttacaagcacacggtt

SEQ ID NO: 12324 - DNA, 553 bp, Homo sapiens
gctgcatccttgccagccgaggcctggttggggaggccaaaccaaggagagcttccccagcagtcgtcagtgctgtggtctctgctctggctgtgtttcagcccacctcctcccagctttctccacatcctcacagtgatgaaccgtatttcataaacatcacacgccagagaagccacagttactcggaagcccccagctgactgcctggcttgtttcagatgcagccgcttgaaacgtgcgcagcatcttcatatcataaagattgtgcacggatccttacaatgtctcctgggggagagcggctgaggctgccttgcacaggcccttcccagggcgctgtccgacgcctgccccaccatgtccacatctgtgaagaggatggggctcctcgagaagtaagaccgtatctgccagcgtttctcaccacactggagagcagctgctctggagcagggatccaccagattggtatttttaaaaaaggtgtcaggcttgctatgttgaggttgtttttagagttacagagaataaaaacactcataatttcctg

SEQ ID NO: 12325 - DNA, 428 bp, Homo sapiens
gggcctggcagggctcatcgcccccaccttctaagaagccctgtggaaagggcactggccctgccacagagatgccactggggacccccagacaccagtggcttgactttgagctaaggctgaagtacaggaggaggaggaggagagggccggatgtgggtgtggacagcagtagtggcggaggagagctcggggctgggctgcctggctgctgggtggccccgggacagtggcttttcctctctgaaccttagcttcctcacccttgttctggggtcatggcgatgcttcgagacagtgggtagggaagtgccctgtgtggcatatggtactcgtgggcgtgctataagtgactgctgttcatgtgggtgaggtggtcactcttgctcagggtctgttgtgcagcccagatggacacctgtttctcc

SEQ ID NO: 12326 - DNA, 142 bp, Homo sapiens
ccccggccccagcacccgccaggatgtggagaccgaggcccatctccgcatcccgggctcctggctcttgattttgtctgccacagacatcccacaaagccgctgccattttattaaagtgttttgatccactttgcactgg

SEQ ID NO: 12327 - DNA, 545 bp, Homo sapiens
actgcattaagaaaccccctcatggatctgcataaccgcacagacattgacaagcacgcacacacacgcaaatacatgcctttccagtgctgctccctttatcatgtgtttctgtgtagtagctcgtgtgcttagaaacctcaccccattgattggtagttcgaagaattggcagaagcagttgcaataaactcagtcaaatgtacccagcctaccagagatggaccaacgatcctatgagagaagagagtatggtgctgggtccttaaaaaaaaaaatgatacttggtccttaaaaaatatgctctcccctccctttttaaacaaatggcttgttcagtcacttgtttgtgtttgaattgatttttaaacagcaggttgtgtgtgtgtgcagtgatgtggtgggagcacagctttcctgggtctggattcccgtggctttgtgcttatgtcatttcttctctctgtgctggtgggggcctctttaccatagcttaagaagtatccctgatttattctggtgtctaataaacacagattatttgt

SEQ ID NO: 12328 - DNA, 3770 bp, Homo sapiens
gaatagcaaactggcctctgtttaacaaggaaagaaagggtgcatgtggcttactgtgtctgaagatactgacatgcagaagaaataagtgcattcttctgcttttcaccccagctatcaatacatgcatctttatcagcagccaaaacactacaagcctcttgtttttcaccaaaaccctacatctcaggcttactaatttttgtgatattttcatgttcaaataaaatgtttttttgtattttctccaagttatttttatatgtaaagttaaaattagatatgagaatgttttgcgtaggggcaacacagtctgctgctatatagtgggggaagcgtgcacttatttctaaacatgggtttttaacttcaagatctgccccagtaatttaccaaaggtagcaaaataatagtgaagatggaatatgtctgctacaaatgcttatttttattgttgctattttcagtgtatacataaactaaaaattagggttgatttttttgctctccattttgacttgcaagaaataatacctcaagataatctgatttattagctatttttaaacatttttaatcacaagctgtattagctttgctgctatataggtgttatgtgtaaatgccacctattaatacgggactgaaaacgttagagacacactgcattgcagataaaatgcaggcagcacaatatggcctaaactgccatagttttagaatgtgaaaaaaatgcatgtttacttacctgtatacaccatatgcatgcactagaattattaactaacgaggtgaggtattgcaaatgttcaaaaaagctctcttgaatctaggtagcatgaacaaattataaaatttgtttaaaaaagcaaacttgcatgcattattgtgacttcaagtttaaaaaatcgtcttacatgtgtacaatatgcaaattagttttagattagagagtgcagccattttgtgatctggtcagtagtggaattcgattttatgcagactggatgtaatatttgtaatccctgtgcaattttgtgacgtgcggttctaattcatgtgcagtgatatagtatagataaaagaatgagtaaaagaaaatacaagaattctaaagaaagttggttttagcccctttgatagtccatggttaagacatcctttataaaccaaagatggccagcacactgctaaccagtcaccaaatgtaagacccataagaaacccatatttaaaaatctgaattttttagaagaatgcaaaactttagtaaaccctaagtaaagtcaaaatggagaaggggaaatatacagatggctagttgcataaaattaaattttacctttataagacaatggtgaaatctggcttgaacttgcttatgtgtttaacctataaatattggggtcttctgtctaaactggggtcactgttgcatggaacattgttcttaatagttgagaattgcttttttgaaaattttcatgaaggaattttggtaatgactttgcttgcaggttttttggggtgttttgagaaagtggcatggaaacatgcagtagttaatgagtttctcttggtactgaacactattagaatatcattagtgatattttttctctttagagcatttttaatgcaactagcccctatattttaatgtaagagttactctgcaatctaagcaaagcacccaacaatggtaaatgttttttaaaaatgcagaactaagatttttgactctaaagagagaaaattacaagggtgttgccttatagcaaacccttgggacaatccttcatgtgagcaaagtgttgatcttaatattggttgtctgtggtgtgcttttttgtactgtaaaaatatgtggttcatgtctaactctgctgttttattgtggttgtggttcaagtttttaatgtttaaagttgatgctgttttcagaagagctttttactaatttatttgtcagtgttccctatttgttacttaaccatgatcctccagattttttggagtattcttttctaaccttaaccctgccaaaccttgatccattttgacatttgttatgcactatttttatatctctgtgagagatttttccaacagtcagctattttatggcacactttttttgactgatgacatctcctttgctatacctcaatttttggaatttagagaagaaatcagtagttttgcaatgttaattatttagatatttaatttcgcagatttttaaactttattttcataatttctgcttaatgtttaaaattgaagagccttttcatgtattaaataatgaacacaaattatataattaaaataattggagatgttgaaaatcattttcccttcttaaacagaaataaatatttggaatgaaggggaatgtactagaacaccctttttgccacgggtaaaaataacagaaatgtatggtttgttttaccttcatttctgtacaagtaaagcttattagtctaatgttttgttcctttcccacctcacccctacctcttttgttttgttttgtttttgccctttatgtactacattcttattttctaacttttaaacactgtattggaggtttttttttaatttacagatcatatttattttactatttttgtagaaaattattaattttgattgtatttttgtattttaaaagcttcttcacttgtgttccctaaatattcatattgctgcccaaaagtatgactgtggaggaaaaaaaaatactttaaaaatccacactttttgttaagaaggaaacatttagcatttatatatttgtgtatggaaaacacttgatattttatccctgttgcatctggctgcacagagcctctcctcaaagatgctacaaaacttgaatataacacattttggaaggctgactaacctcgattctgtgttgtgatgtgcaatactgtttctaatgtttgtataaaaaaaaacagtgtaaacctttttaatgcaaatttatttttttcattgcatattttgcagattttatccacagtgtcattttttactgtcagaaaagataccccttttgtcattgcaactattttttaaatccagaaatctttgtactgatgtaaatgattgtagttattttggatagtgttttgctaacaaaaggagagacttttttcatgcatatttctattttgtttttttgggttttattttattttaatagtagtaaaatacttggaataatttttcatattcttgtcattaatattattttgtatttttatgtggaaatatataattttatgacactaattgctaaagtttattttatgttgaattatttttggagctgaaatctttgtaatattaaagcaactagtttctaattcccagtttctgtatagaatcgcacaagtggtttatggagtgtttggattgtaattataaatggttctttgatatgcaaattaatattttcagttgattttattttatattcctaatggggtgttaaagccgttttttatttttttctaaataaaaagagaacccatgcttttatggacactaggtaaacaccttcagcttaaatttttcgttaaatattttagtttattttattgttatcttccaggtgtctaaatctccagtctgtctgttgtactggtaatttaactctgtaatggaatagtttgctgccaactatttatattaagtaatttttaaatatttgtaatattgttgactgactaataaactattaagttattggc

SEQ ID NO: 12329 - DNA, 2841 bp, Homo sapiens
tcaggaccaagatccctgtggtaaacactctgattgaatctggggttccagaaggtggaacaagcaggaatgggatccaaagagactcccactcagattctaaagcatttaaagacaattctagcagaatttatcaaaacaagatgaaacacagaaaagttgaaaccacaacaaaatgaattctattaaagaatagccccagatataaattctcttgaaagcaatgttcataaatatttaagcaaattaaagacaatgttaacaaattttctattaaatgccctgagtgataaaaccagttggcaataatattgccttattaaatcttcaaaaaatatattttagtctgttatttaagaaaaacataacatcccaaaatctttgacaattctcgaaaggctatatagtaagtcaaaaaccaaaggtaagagatgctaactatttttcaagcaagctacagagaaatgataaatgttttttgttttattatttattccttcatgtttgtatatattcactcaacaaccctttaatgagcctgtaaggaccagacactgtggcgctgaatcagatttaataatgagttaagacaaagcccctacctatgggctagtgtgtggtgatcaaactatcacaattcagtgtgatgagcagcatagcaaacagatggatttgaagctaaaagcacacagggtctgctattcctgaggctgggggccagagaagcttttacgcatggaaaaacactaatcatgccaaggtgtatgtgtttaagggggtgtgatggatgcaaagggaatgaggaattcagcactgcattctctttgcaccctcaatgcatgattggtattctcaacagcaaaggggtgaaaaatctagagacagaggaggcctggcaggggtgataaaaatggagattgaaatgaagagaaatagccagcaggtgattcttctgaatcctttagtgtgatggtttcccaagacaaacatttgtcctaatagctttctcataaatatgggcaccactttacattgtggtaagacattgcttctcatggatctgctaggtatttatttcaaataaagcaaggcatatgttcactgatttacgagtaagctgatgagagcaatgaacaggagaaggagggagagagccaaatgtctgagtaaacagatatcccttccaagtctcacacctcccttagtcccactcttgcttgtgtcagcaccttgttcttcactgaactgcaattcttcaattattctcttccatgattttgtctgatctaccatttctatggtttatggtaatagtattccctttatccctcccttttggtaacttccaatcctccttctatgtattcctttctctgctcattgacttataaatagttttcatacctcttatgtttgaatcaccatgctagattctgtgaagacagaagagtatcaagattaatatattaatagtatagctctgactggtaaatttcttttttttaatcttccccaatttaaattttttaatttaaaagtaaattttactgtcgaaaatgcaaacttggggagggcggaaacatcacacacaaggtttccacttcacacttggagggttgcatggcggctgggcaaaggtgctccccacttcccagatggtgcggcggctggccagaggcactcttcacttcccagacagaggggcggccgggcagaggtgctcctcacttcccagagggtgcaggagccagctctgactagtaaatttctaaggataccagaaaggaaatggcatgcacacacacaaaaaatacctaaattttggatgagaaaatgataaaatatgctaagttctaggctggaaataagggcaaaatgctgtgaaagaagaggaaatgtttacttccaaattaggatgtgacagagaagggatagggaaatcctctctgctcattgggccttacatgatgggtgacacttggagtggcacaagttgggggaaagcgcacttgagacagaggtaatgatggggacgaagtgagaacagagacccagaaggagaatcaatggaccatatttgtaagagctttgaaagccagcctgagaattggaggatttattcataagaaagtgtagagaccctgtgtatttcagagctggatactgccattaccacagatgaaagttgcaatgatctagcagttgtgtgcaaaggcaaggcttgcttttcctgtctttcaaccctatcttgcttttcctgtctttcaaccctatcttgctttcattgtcttcatcttcctgccatactttgtgcacttattgctctccttctgagtcaggacatgtgtacaggagaccaagaacaatgagtattagaaaaaaaggagacagcaaaggtggtttgaggtagtcacctgcttacagataacagccaaagatagaattccaagttataaagcataaaaaagagccaacagaagtaactaatccgggaaaagtgaacatatgggccctttaaagactacaagatttgctagataaactggaaatggagaagttattgcagacagtcatgaaccacaaatcactgtgattaaaattttcttctgatcgtaatccacgaatgcattcattttttggacattgcttacttatcttttaaatgtttcttttattacaaagcctattttgagtagcttttaaaactgaatttcctttaattggtttgaagcctagagatgaatttcgttttcaaatatctggtgggatggtaatggggattagagaactgacatgagaaaagaggagctgttttggtattaaacgaataaaatcttaagc

SEQ ID NO: 12330 - DNA, 327 bp, Homo sapiens
ctggaaactgtgttgctctaaccctcctccagccctgcagcctccccttgcagtcatcattcgtgttctgtgtataccaaatgattctgttatctaaagaagctttttgctgggaaaacgatgtcctgaaaatggtatttcaatgaggcatatgttcaggatttcagaaacaagaagttagttctatttagcaggttaaaaaatgctgcattagaattaaagcaagttattttcttatttgtataatgacacaaagcattgggagtcagactgcttgtatattatcaaacattttaagagaattctaataaagctgtattttacatc

SEQ ID NO: 12331 - DNA, 481 bp, Homo sapiens
gccagtcgctgtggttgttttagctccttgactccttgtggtttatgtcatcatacatgactcagcatacctgctggtgcagagctgaagattttggagggtcctccacaataaggtcaatgccagagacggaagcctttttccccaaagtcttaaaataacttatatcatcagcatacctttattgtgatctatcaatagtcaagaaaaattattgtataagattagaatgaaaattgtatgttaagttacttcactttaattctcatgtgatccttttatgttatttatatattggtaacatcctttctattgaaaaatcaccacaccaaacctctcttattagaacaggcaagtgaagaaaagtgaatgctcaagtttttcagaaagcattacatttccaaatgaatgaccttgttgcatgatgtatttttgtacccttcctacagatagtcaaaccataaacttcatggtcatgggt

SEQ ID NO: 12332 - DNA, 378 bp, Homo sapiens
ttcagatactcaaaaatgtcttcactctgtcttaaattggacagttgaacttaaaaggtttttgaataaatggatgaaaatcttttaacggagacaaaggatggtatttaaaaatgtagaacacaatgaaatttgtatgccttgatttttttttcatttcacacaaagatttataaaggtaaagttaatatcttacttgataaggatttttaagatactctataaatgattaaaatttttagaacttcctaatcacttttcagagtatatgtttttcattgagaagcaaaattgtaactcagatttgtgatgctaggaacatgagcaaactgaaaattactatgcacttgtcagaaacaataaatgcaacttgttgtg

SEQ ID NO: 12333 - DNA, 739 bp, Homo sapiens
gcaaagggcagaggcagttggcctatgagtgggctgatgcgtgaggttggccacacattccttcctgtggacttgacattttggaagaactctttgccagataatgagttcattttagttttatgctcccattgaaaaattttccactatttttataagctgttaatttcttgagtactttataacatgtctgtagcttggataaaccaagtaagtattttttttttgtctttagcaaagtttagactgtgaatatgatgacacagattcttttttatggtggctttgcttgttttaaatttttgcatgacttttcatctttttatgtgtgtttcctgtagtttgatccgaaggaaaagagtatagtagcctgagaatcaggagatgggagttttagtcgtaggccttatgataattaccccgcggtggtgtgtagaaaagtatgtaaatttgctctgttttaagactttgaactacctcaagaagaggaatctaatacaatatttgtaatgtttccagagctctcagaatgaggatttttttgtaaataggtcagaagacgatggaactgtcctgggttagtatagtaatcttacagtaggatccttaggttgatgctgacttctgtttggggtatgtttatattttatgtggtgtttactttttttttttgacatagaaggatatagtgggagcagtgatacgctaacattcattacattctgcagtaatgaatctg

SEQ ID NO: 12334 - DNA, 1437 bp, Homo sapiens
gaaagacgatggaggtggaatcctttaagattatgtccagttatttgctttaataaagaagaagttacccttgtcaaaatcagaacaaacctgatgtctttctgaagattttctgctgtgcgcttccacgttactttggcctgtattaaagcagtagagcagcatcagttattatagtccagaaaaagtgtgcatcagtcagtcacacagatttatcacaatctgaggtgggcctaggaatctcatttttaaatagtctctccaagtgattcttatgaactctttatgtttaaaatcatgtcattatggaaaacttacaagtgtaactagctagtagcttgcatttgagaagcttatgacttagatgggcagaatcaacaaagatgaaaccgcctgaggacacatttaacaagtaacatttctagggaaaatgaaggaagtaccacaaactggctagaaaggagcttatcaatcaccagtgaggaagaccagtataacgttcaacaacagttattttgacaaaaacttattttgtgattcctacagtgaaaacatttttggtgatatctgcctgggaaatctctcttcctaaagtatttgtatatgggagtccttgtttgtgaatgtttcctggattagggaggtgtcaacataaatgtattattaaccatgaagctgctcgctatatttttggcataacaaaataatatttatttactgtggataataattctagtgggaatataatgtgacaggaacttctctttatatacgctaccaatttatgagcactattcactgtcaatttcatttcttgtcttttgaaattgacacttggcctgacttacgaaacttgtactatatgaaattggtcctcttttctgcaatacccaacgaaacaccttttctctttattattcagaaatgtcctaacatggatctgtttgttttaataattgtgctttttttaggcttatcatctactagaggccatttacttaaggtgaaattttaagatggagctaaagtaagatcactggtttttagaaccaaattgctatacatatgtgcctcatagaacttataaaaggagtcaaagtttcaaagcaagatagttattaagcaaaaggaaaaatggtaatgatagaaagtcagttaaaaatagatgattgttcttcattctgtttgttggctctgtgttctcctgtgcttcagattccttatgtgttgttgttttaaagacaatttgcagggggttgggagaaggactgaaaaggtacattaagtgtgctgtaaggaaaagtcttagaaacataataagctaaaatcccattcacacatggccaggctatccaaaaagaaaggagccatgttctcatgtggtttaccataccaaagcttgctttctctggcatgggaaaaataaatttaagcacc

SEQ ID NO: 12335 - DNA, 156 bp, Homo sapiens
acacactcccggcagctctgtctttggaaaaggttgtatacttcttgaccgtgtgggactaatgaatgcttcatagtggaaatatttgaaatatattgtaaaatacagaacagacttatttttattatgagaataaagactttttttctgcatttg

SEQ ID NO: 12336 - DNA, 1009 bp, Homo sapiens
agaagggagccaacaaaaattgttttttctacctgttgacgtgtcaagcactaactgtgggtactcatttattttattcttttgtaaatcacagccaccattcattatttactaggttaagatgaatagacactgaatcaaagttattcatcaacaaaaaagaacagttactaatggaaagttattaaaataagttctataagagtacaattttgaggtttattttttgtatttttattatttgtgcgaagaaccattattgagtttgcaagataagatgtatttgtattttctagtgtctttttatttataacaacacttttttggcaatcagtttgtagctgtgcccttatttttatagatagtttgccatttcttgggtttaatgtttaacaaggctatagaagtttaaaatagtggacaaatgtttgtgaatacacttttaaaaaattgttttaaaagagaaaagcggtcttgctttgttgcccagactggagtgcagtggcataatcatagctcaccgcaagcctcaaatttttgtgctcagatgatccttttcatctcagcctcctgattagctgggactataggcgtgtgccaccatgcccagctaattttgaaatttgcttgtagagatgggatctcactctgttgtccaggctggtctcagaattctggtgagtgatcctcccacagtggacttccaaagtgctgggattacaggtgtgagccaccatgcctggccccatgaatacactactaatattatttgtaaatatgtattttataatgtacaatgcttggaaaattttcagagtattctagtttaaaaaattttttctaattctgtaaattctattacaagtatgttgtttattacaactcattacaactacctaaattttaggtgttaactgtatttaagtaaatgtgttatttttgcatttcatagccagaaaatactgatgttcacttaaagatattcagcaattaaaatgttaaaacttgt

SEQ ID NO: 12337 - DNA, 645 bp, Homo sapiens
gcaagatggctgagaaatacaggagaggcgtctgcttttggaaaggaaatctgctttggtgatgatctttcaggcaatctcaacttacttctttaatcaacatttaatatcaatggatctgtgattaaatgtctgaatatgtaatgcctcgtgaagtatttaataatggcctttatttgtatttggatcaatgaggtttttaaaaaaaatggaagagaaaaccactaaccttgatttttgtattgcaaaatcagatagacctggaaacataaatttaaatccttagacatttttctagaaaaaaatgcaaagtttataaagatgatacaaccatgatttgcaactgtaacaggagaccatttattataagcgtacctgtttgtgaacttaattattctgattccataagctgtttttgcttaggtgatccactgccatgtgatccataatttttctacataaaaaatcaaagttaaaagtcacattatacagttatgcattcatttcaacaaaatagtgaattgataatctacttgttaatatattcggcccatattttgtgtgtttggacaagtacatctcccttttgcctaatgaacttttgaaaaataataaaataatagaataaattagactttgaatggc

SEQ ID NO: 12338 - DNA, 600 bp, Homo sapiens
gcgcggcccccacccggcggcggccagggacccccgaggcccccctctgcctttgagcttctcctctgctccaacagacaccctccactctgaggtctcaccttcgcctttgctgaagtctccccgcagccctctccacccagaggtctccctataccgagacccaccatccttccatcctgaggaccgccccaaccctcggagccccccactcagtaggtctgaaggcctccatttgtaccgaaacaccccgctcacgctgacagcctcctaggctccctgaggtacctttccacccagaccctccttccccaccccataagccctgagactcccgcctttgacctgacgatcttcccccttcccgccttcaggttcctcctaggcgctcagaggccgctctggggggttgcctcgagtccccccacccctccccacccaccaccgctcccgcgggaagccagcccgtgcaacggaagccaggccaactgccccgcgtcttcagctgtttcgcatccaccgccaccccactgagagctgctcctttgggggaatgtttggcaacctttgtgttacagattaaaaattcagcaattcagt

SEQ ID NO: 12339 - DNA, 1901 bp, Homo sapiens
taaatgtcagagtaagagaaacaaactgtttagaattatcatgtttttaaaacatcatagtaatataaatctgctgttaggagctccagttgctaaaacctcaatttaagtctttaaaaggttgtattttgaatgtaaccaaaagtttacagttttttgtccaaatattaaatttctatttcagggaagaagtgctatatctcctatattgtatttttgtagaaaatttgtattttatgttgttgttagtttaaaaggtaattttacacatgctggaatgactgtaattactctagaattccaagtagaatacaataacttttaatattgagaagaatgttcatgctaattcttcttacattacaaaaggcctttgaggatgcctacgtctgaaattgctcttacgaactttaataaaatagttagctaatagaaaaacaggtaagaataaagcaatgttgccttaatttcaaaagctgctattttagaatttgaataagtactcctaaagtgaccattattagggaccagaaaattatatcttggctaagtaatagaggaccattttggtttttgtacttgagaatatttttggtgaattactttgttgtagtgaggaaaaaacctaagaaatttcccctttttttaaaaaatggaaatattcaattgagacttgaggggaataatagaaaattaaggtagatccccaatattttggaataccaaaattgccttaaaaattcccttctgtttcttacatgggatcaaatacttgagattagtacttcagagtactggccttgttcaatttagtacttcaattagtattaaacttcactaaaaagtaaaccatactccaaattgtatattggattgcattttggggtcctaggtcatacgttcttcaaaattattatgattgtactattgtacttgaaattacagatgttattataattacagtcaaatgtagactatcaggccaaattaaaggggagcatggcagataaccataaagtcatttatatttgattttgaaatgtatttttgtactttattttgaatatcatccatatgtctgacattattggaatttgtaacattgttaatgcactaagtgatttaaattcaattgatgaagatgtgattttacagaagcagaagtttcattttcttgaggcttaaaaccaatgtcaccacttgggcttaactgggtaatttgtggtctaggccttttgttttctaagcttactatcttgtgtttgtttatttgcttttaatgaagtattttgtgtagaaggttaaattaggatgcaaaacagatctgccattcctttttcccttatatcttccttttggtcttcatggacgagatgaatgaggattctgctgccctgagggagttcattggaaacctgcgttctcctacctcttccaaccctccattagctcaattttgagataatggaaaattgactggaaattcaaaactcaaactactatctttagatataaacactagtaattaaaatgtgccttttgaagatgttttctaagagaaaggaaatacgttgcagtgatgtgggtactgctttcataaaacagttttttcagtattttgagaattgccatattaatttttataatggaaaacttaataaattgctactgttttatatcataaaattaaaataccatggtaatatttgcaaaaggtctggccataccagaaaagtacagttgagatagttaagatataaccacaagtcagagtacattggttgtattttgtaaactttcatgaactgaattcttatttaaatagtatggttttttttcaataagtatatttatagtgacaaatgtggtagactaaaggtaataaaaatcattgtcttaag

SEQ ID NO: 12340 - DNA, 115 bp, Homo sapiens
tctagcttgccattattgtgtgtgtaattatggccaaaaggacataggagatggactaagatgtcttggaccacctttgtgtaacaaagaaataaacagtaaattttattttttc

SEQ ID NO: 12341 - DNA, 1995 bp, Homo sapiens
gggacgccccagattgtcagggatggggggatggtccttgagttttgcatgctctcctccctcccacttctgcaccctttcaccacctcgaggagatttgctccccattagcgaatgaaattgatgcagtcctacctaactcgattccctttggcttggtggtaggcctgcagggcacttttattccaacccctggtcactcagtaatcttttactccaggaaggcacaggatggtacctaaagagaattagagaatgaacctggcgggacggatgtctaatcctgcgcctagctgggttggtcagtagaacctattttcagactcaaaaaccatcttcagaaagaaaaggcccagggaaggaatgtatgagaggctctcccagatgaggaagtgtactctctatgactatcaagctcaggcctctccctttttttaaaccaaagtctggcaaccaagagcagcagctccatggcctccttgccccagatcagcctgggtcaggggacatagtgtcattgtttggaaactgcagaccacaaggtgtgggtctatcccacttcctagtgctccccacattccccatcagggcttcctcacgtggacaggtgtgctagtccaggcagttcacttgcagtttccttgtcctcatgcttcggggatgggagccacgcctgaactagagttcaggctggatacatgtgctcacctgctgctcttgtcttcctaagagacagagagtggggcagatggaggagaagaaagtgaggaatgagtagcatagcattctgccaaaagggccccagattcttaatttagcaaactaagaagcccaattcaaaagcattgtggctaaagtctaacgctcctctcttggtcagataacaaaagccctccctgttggatcttttgaaataaaacgtgcaagttatccaggctcgtagcctgcatgctgccaccttgaatcccagggagtatctgcacctggaatagctctccacccctctctgcctccttactttctgtgcaagatgacttcctgggttaacttccttctttccatccacccacccactggaatctctttccaaacatttttccattttcccacagatgggctttgattagctgtcctctctccatgcctgcaaagctccagatttttggggaaagctgtacccaactggactgcccagtgaactgggatcattaagtacagtcgagcacacgtgtgtgcatgggtcaaaggggtgtgttccttctcatcctagatgccttctctgtgccttccacagcctcctgcctgattacaccactgcccccgccccaccctcagccatcccaattcttcctggccagtgcgctccagccttatctaggaaaggaggagtgggtgtagccgtgcagcaagattggggcctcccccatcccagcttctccaccatcccagcaagtcaggatatcagacagtcctcccctgaccctcccccttgtagatatcaattcccaaacagagccaaatactctatatctatagtcacagccctgtacagcatttttcataagttatatagtaaatggtctgcatgatttgtgcttctagtgctctcatttggaaatgaggcaggcttcttctatgaaatgtaaagaaagaaaccactttgtatattttgtaataccacctctgtggccatgcctgccccgcccactctgtatatatgtaagttaaacccgggcaggggctgtggccgtctttgtactctggtgatttttaaaaattgaatctttgtacttgcattgattgtataataattttgagaccaggtctcgctgtgttgctcaggctggtctcaaactcctgagatcaagcaatccgcccacctcagcctcccaaagtgctgagatcacaggcgtgagccaccaccaggcctgattgtaatttttttttttttttttttactggttatgggaagggagaaataaaatcatcaaaccc

SEQ ID NO: 12342 - DNA, 649 bp, Homo sapiens
ctaccgtctttttgctaggacttaaactgacttgagtgtggcaaaaagttaacaaaaaaggagaaaaaatgaacaatcgtttgtggtttcttgggaaaacttttcataccaggtgatactattcaaaaaccccgttgtctccctgcaagtgctgatttgaaatgcagaagccacagtaaaaaaaaaaaaaaaaaaaaaaaaaaagaaaaaaaaatcaaaatgtataaatattggaaatcaagtttttcagctgttttgttggttggttggttggtttttgtttggttttgtttaaatgggcaagaagtaaataatgtggctggaatacaagttgaacaaactagaagacacaaatctaacatagtttttatggaccaaggaacttgtatattgtataagctttagtaaaaggtacattttcaccatacctttttttatatcacggtattatagtacaccttgttaccaaataggttgttctcttccccacccacctttgagcttttgctctaaaatacattcaggttccaagcctgaccatccttgtttaatctatcatactcttccaggttttttttttttggtctaaggctggaacttttttcttttttttcagctgaagtcttatgacttttcatgagtcaaaatt

SEQ ID NO: 12343 - DNA, 233 bp, Homo sapiens
tcttcttcacagtcactggcaacacatctagtttttcattagaaacaaatcatgaactatgcaaactctgcataaaaccaaaatgaaactttgcatataagccaataaagatcatgttccctcttcagttaaacctaagtagtttctcactttttgaaacaataactctgcaccaaatattgcatcgcatgctgctgattttcaagagagaagcaataaacacaacttctgct

SEQ ID NO: 12344 - DNA, 1191 bp, Homo sapiens
actggctgacttgatggaatcatgttcaagtggcatctgtaaactattatcccccaccctccactccccaccttttttttggtttaattttaggaatgtaactccattggggctttccaggccggatgccatagtggaacatccagaagggcaactgtctactgtctgcttatttaagtgactatatataatcaattcatcaagccagttattactgaaaaatcattgaaatgagacagtttacagtcatttctgcctatttatttctgctttgttctcagtgatgtatatgcaacattttgttgaaagccacgatggacttacaagctttaatggactcgtaagccagcatgggcttgcaaaaatttcttgtttaccagagcatcttcttatctttccacagagctatttacatcctggactatataacttaaaagaagtaaaacgtaattgcactactgttttccagactggaaaaaaaaaaaatctctgcaagtgaaactgtatagagtttataaaatgactatggataggggactgttttcacttttagatcaaaatgggtttttaagtagaacctagggtttctaattgacttgatttctggaaatgaaaacccgcgcttttattatgggaagcttcttgaactgcatttactattgtgaagtttcaagtcccgctgtaaagatcatgttgttttgttttccccagggctttcactgtgatttactgcattgcaggctgtatgataaaacacacataatttaaagagagaaggctcttgattccttatgcaagtggaagagttgaaacttgattgaaggacttaaaacattcacaaccttaagccgaggtggggggatatggggattcaggcaattgtttacacactttgaataactgcaaaggatttacggtttgtgaaaaatgtgtactgtggaaaagataataaattgaagacattattgtgtgggattgtgctgatttttgttgataacacaaaaaacactatgttttctggagagctgtgtaagctgtcttgttgcttagttgcaatataagaaatagtgatgttttggacgtaagttgtcaacaaatttctattttatattgttatatttttatgtagtttgaaatgtaaaaatgttctaatatcaagattaacaaatataaatttatggtgcatttaga

SEQ ID NO: 12345 - DNA, 3950 bp, Homo sapiens
gctataaaggagcaacagcaaagttctttacatgtatgaaaaggagaataaggggcaaaaaccttacaaagcaaaacgtttaatcacaaagagggggctaccaaagagacaaagctttgcctgccacttctgcctccagatcaggcctttagtgatactgttagcctgattctactgtacaatgtagaaaccatccttgttacttgcatgtctaaccccttcactgattcccaacactcactttctcttccccacccctctccaaaaaaaaaaaaacaaaaagaaaagaaaaaaaaagggggatagttgcaagtttctttcacagtaactgtacgaagcctgattagcagaacacaacacaccctcattatccctaagctgaagcatgattttagtcactttgattttgttcgagtgtcatctggctggtcaaaaataagcaggacagataaaatgtatttcagacataccatcagaaaatggtttatcaccatcaaaggcaatcctttgaaagtgatagagtccctctaaaggtacagtccttagaaagagggactgtattaaaaagtattttgggaatatcaaagctttaatattccaacaaagactaagagaaaaacaatactcagtgggtgattgcagtcctaaattgtcatatgttgttattttcaggtcaagagcatcaacttcaattccatacattcaccaaatattctcagtatacacacagtcttgattacatgtatcaatttcaccagttatgacttctaaaaattatatatattttttcagaacaagaccactattattaactaacttgaacaattgtatcatccaaaggccaaagatcatatggcagatcagggaagtcatgaagttgatttggtcttgacgtggaaaaccattaaacaacaaaagcaactgaacccatgtatgcacagaaacaatcaaacactagttcattttatagtgcccaggaaaatgttccttcttttaaaatggattttatttgaaagcgcagaaaatgaaaactagtgagatatatttttggtattataataggcaattggttgaggttcaagtttagtttcaggtaatattatcagggaagattccatgttttaaaatagtatttatggatcatgggtaggttaagaaagatgcattggcatatagtcttgatagttaagtccacgattatcattttagaatccaggctatgcttgctgctctttttatccacattttaaattacaattgcattttttacttgttcagtgcacactttgatgcaccacaagtgcattaattttgaatcgtgtgcaatatagaaatattttgagactcacaacattgaaacaaggtgacaccctagttgactttatcactaatgtgatttgaacattatttaaacaaatctagactgaacatgaaagaaaggagttttgggcagtgacatttttcacagaatgtatatctcaaaggtgaaagcagagtttttccagtgcaataaaaagaaacagaatatgcagattttgagctactcactctatagaggataacctaacacggctgaaaattgagctgggacattcagacgaaagtgacaatccatggacagaatagggaataacaggtgtgaagagaacaaacttatcactgaatgtttgcaagctggttaaggcatagccttgatggctctctagcaaactgtagaaacaatgtagctttgggtagtttcatgctttgcagaatttcttagactataaagtgacacagcctggaatataggttgataattcactataggtcttcaaaatacttatctttgaaaaccgcttctctgtttggtggggtacaatttgggggtcatttccttatgctctttcttaaatggagttttcattttgatgttagtttatgtataataggtaggatgcaaaaagatatgtaattgaaacaaaaaacattggactaaaatatcagtaattgaacatgtttatgtttgattattatttacactatggaaagatgcaattctagtactttgttaggaaactgcattaaagcagttctgccttgtataatctgtaagtacctattaagacaaaatacttctaaagatacttatgaaatgtatacacattttttcttgcacgttacaaagaaaatactcaattgcataacacggatgtttgacaaacttttttttttttaatgcatttctttctttcatgagacattgaaaccactgatagctcatttcaccctatcttaaacccttctcttgtctataaaactaatacgggtcacaccggaccttcggattaattggatccacattccccaatgatgtttgcaccccattcaagatagccatgccattgtcatttaactcgtgaacctctctttaaaactaaaatggatgtgaaagaataaaattcagtgtactgtaagtattcacagtaattctagtagaattagctgtcataacatgtttattatataatgagctggcatgacacagaaatatattttgtgtttgtatgacttttattttaaataggttaaatctggtgccactccatatatagagtgcttttgaaaaaaaatcaataaaaagaaacaaaaaaaataaatgagtgaatgcaaaataagcaactgtgccttttatacctgttgttacggtaaaaaaacggttgttgggtttggacaatgaggggaaatgggctattcccaacttttttgatcctgtatatttgtccatgtttattttctgaacataataaataatatattaaaaatttgccttctgacaaactcagataatggaccagtcttaaatattgttatgtcataaagcaaagttaaggcattaatatgggctgcttaaatctgactagaagatgaaagcgtttattgtaagtgtaacacagagatactatcaggagtgaaatcagtccatttggcaaggtaaaatactgatttagagttttattctttatttcttttttgttgtgtttctttcagctatggtttcattttggttgtacagtatataaaccatatttgttttctgtacacaagactctcaagtgaattttgcatgcattatacattaggacacatttataaattaatgagtaactatataaatttatgtgtattaaaacgtctgtagcttcaatctaaaatctactgctctttctgaatctccagatatcatttctgtatggtttctgactggcctgctgcctgagtttcagaaaacaagggaggcattatttttatgggaggaggaactaagatggtactgaggatgtctgactgaaacactaccctaggaagctgtcttgtaggaaaatagaataaaacacacagaccagaagaaattgtcaagaagcaaacagccatccaaaaacagtcatgagaaatctaaagacctaaataatcttaggtatatgctctcagtgagaaataagaaaatgtgtccttaagcaaaaataaataaataaataaataaataaataaataataaaaagtgagcatgatcatgaatatagtaaatcttgtgagttgtgacctaggtgaaggtgtaatgataacatctggaggaagcatcatttgttcagctacctagggtttactttcagacttttcctacagtttaaagcacttgcgttcagtgtggtacgatctgtttgtaatgttaatcattgactattgttctgctacttggatgttgatagtgaagcagagaacaatttatcatcgtttattatgagtcactatgcacgcaactatgcttaacatggcgaaatgtattaaacactcgtccaactatttatgaaatactttgcataatttaatttgcttttgtacagttttatgtaaataaattgcttgtcatttttgtctctgcaaattaaaatataacatggtcaaatggt

SEQ ID NO: 12346 - DNA, 694 bp, Homo sapiens
taactctgagacagattatcttctgtaaagttttgtcttctcgtttttaaagttattaaaattttaacagtaggaatttaatgttaatttttgcaccattaatttagcaaaggccatctacaagaggtataccactgtattttgcaaattagaattaaggttcactaaactactgaaagaagtattcagagtaggcagtgtttggcagttctctttgcacttgacatccctaattcatactacatttttttgtttccagaataaatatgtgtgtattacttagatggttagttttcacctgaaattattttcttctgtggcaactaagtggataattacatccagagaaaaagtttctaaagttactactggtgtctatgcaaattggattccatagaagttttagctatgttatttacaatgcaggattttacagataaatagatgctgattcatgcagatgtagtactaagtctgagatattgaaatactgactactttgatgaaactgctggtttaaaaatatttactgatatgcaaatgtcatgcaaaactccactttcaatcttttatatctataataatcgatacctataacaattagtgttctataatgatatgcaattaccatttgcattctttctgtttggtattaaaagtttgcaaacaaaaatacattgcatgagccatttat

SEQ ID NO: 12347 - DNA, 428 bp, Homo sapiens
attccactctaatatgatgctccattatgcaccatactgtgatgacctttctactccgaaacctgctggagcctgcccttggccgtggggtgtcagccaatcactgcttgttccacttgttgtacattttatttttgagtctttttctttctcatatacagaaaaatagtatgaaaataaaataaatgtatgaaacagtattaatgcagaaatgtgctactaatggatgtctgagtcaccagaaattccattcttaaagaggcggttagcacctattagacgtaacagtgatgtcttttaaaaaatccaaaagcatattgcaacaataagtttgagactttgtgtgaacaaagggaaattcagcctcttatgtctttgtctttaatacattaaatactgattttgaataaaaatctaaattgatcaat

SEQ ID NO: 12348 - DNA, 812 bp, Homo sapiens
gggaggggatttgcacagggaggtaagctggtgtcatgctgagcatgcagatgcatttgctccctggatgcatagcaggtgattctgccagcatgcaccagtgcagccttaccagttgtttacatccagcatctgttctgattgtcagcatctgtcccatgctgcttgtcacatatctggagtttcactctgtgtagatgagctgtcattcaggacactaggagaaaaatctgagtgggtcattgtgcccatatccacagaaaatgcagaagttgaacagcttgcttgacaaccctcaaacatctttgagcacctggtacagatgtttatgagaatactctaagatctcaacccttgatcccaaaggcacacaatcacagagcattccttttgactgtaaactgtttaccttgcttttgagagccaaacattgtacccaacctggaaaaagtaactaccccaattaaagtgcctcatgtgtccccagagcatggcttaacttcagggacaatcacccagggaactaataactaaccagttgttcaacagcgggttaagctcagcagttttcacagtagagcagaagtccccaggaaacaaagggttagtcattagctgagatgttgattttaaaacaccttgaccttaacttttttacattattacttttaaatctcctttgggattggggaggctggccaaaataagtcttaaaactgcttatgtcatatttggattttaagttcatgacattcggaacagcaaagccatatatgcaatgtttttatgccattaaatgtctgattccaatt

SEQ ID NO: 12349 - DNA, 1325 bp, Homo sapiens
aatagtccagccttgggtatacttgcatttacctacaattaagctgggtttaacttgttaagcaatatttttaagggccaaatgattcaaaacatcacaggtatttatgtgttttacaaagacctacattcctcattgtttcatgtttgacctttaaggtgaaaaaagaaaatggccaaacccaacaaactaacattcctactaaaaagttgagcttggacatattttgaatttttgtaagtgaagatttttaaactgactaacttaaaaaaatagattgtaattgatgtgccttaatttgcataaatcataaatgtatgtcctctctgtaattgttttaatgtgtgcttgaaatatccagaaaacctatggagttagtaaattctgggctgtcatatgtaggatagccactttttaggtatatgtacatttatatttctatcaattccttagaaagtaaaataaatgaatagatcaaatgttgtgttcatgtttggggaaaatataatttgcagaaacctatgaagtagagcaaagatgctttaaaaagataagtttttttgaactaaattttttttagttctaataatgcacataggatattagtacatcgtacacgtgctaggaaaaaacagcttcagtgtctttgtttaatgtgttgaaactcatctttttaaatcttgaaaaaccaattgtttacttgaaacttgaaagtagcatatttttctgttttttggttgtttgttcatttgtattagcacaatttaatgtaattcctggtttggaggcagcaagacctatgagcaagaactatttacttgaccctcgtttttttctcttgttcttgtgtggtctgaaatctaaaactagactttattatgatagatttcctataagccaatttctaataacaaatagatttattatttaatctgtaccttctatcttctcataattcgtggtcttacagccttccaaaataactccagttgggcacccatgagctaggatcaaactttctttatatactttatatattttacattatttctgatttttaaagcaaatgattgccattatgattacactcaacctaaatagttatgaacagtttcagaacaatgaaaaattacaatactatgtgatagtattgtaactatttttctattttagtcatatgtcgcttatatcctaccagaactcttaaatctataatattcgatatattctacaaactgctttattgtagaagccatatttatgtttattttataatgttttctagtgtcaaactgtactgtggagaaaagaaatgttagatctgt

SEQ ID NO: 12350 - DNA, 1837 bp, Homo sapiens
cagctctgcaggagagattgcaacaccatcccacactgtccaggccttaactgagagggacagaagacgctggaaggagagaaggaagcgggaagtgtgcttctcagggaggaaaccggcttgccagcaagtagattcttacgaactccaacttgcaattcagggggcatgtcccagtgttttttttgttgtttttagatactaaatcgtcccttctccagtcctgattactgtacacagtagctttagatggcgtggacgtgaataaatgcaacttatgttttcttgttggttcctttttgagtgtcactgtgtttgtaaagagcattcacaatacggtggaatttcaaaagctggaagagctcgagatcatgcctcaggcaaaggcgtgggtccatcgttcttccgagagggtttgtgtggcgactacaccctcagcgtccctggcaaggtgcagttggctctcgcccattcttgttatggaaacctaagatgatcattgggaagatcagtgatcttgggtcattgatccctggctcagaggatagcggtttccatcataaaccaagatgatgagttcagcctttatccctcgtggttccactagatgtaacttaaaggagttaacatttgaggactttgttctacatcagattttactatttgaatgtttaagatcactttattgaatttgaagatcatcaaattaaataaaatgatttatttaatttggatatcctgatcactgtcaagtgaaatggatctctctctttggtatttaaggaagtttgtctttaaaaaaaaaatagagtgttttcatacatttttgcttatcccataagtacagttgatcaaagtcatagtaggtaaatgctttatgggacagctgacaccttttagaccctaccaggtattgctagcatgtgagctgcagttgtggggtctgagatatttctttgtggtagtttcatacccatactatagagtcatgtatttatttttgcctgttgtgtgatgtaatgcaatcatgttcctttgagtctccatcccttggaaatctgacttcttgcagaaggagtaggcacatcaagatattcaggggtgccccaagagtctgggactttcaaaaaaaaaagatcaggctgaaactgcagtcagatttatgacagctgacagtttttcagaggtcgcacacagtgactctcctctctcaggatgacgaggacctgtgccttcaacaagcaaaatgctgctcacggttgtcctgcttgcagccagtcactgtgtaaagcctctctgatgtgcacttaagagtgggttgctttctcacaaagatggggttctgtgcagtcacaggtcacttccttgacaacacaatcatttctgatctttatcactgtaaccacgtcttctattccataggagtttcttttgattctctcagttgcggggggcatctcttaatcctggggtaaaaggagagattgccatacttagactcactgtgagtctccccggccatttcacgaggagaccacagtgctgccaccagtgcctaaacaggtggctggcattcgagacttcctcctgttccctgggtcagaggatagcggtttccatcataaaccaagatgatgagttcagcctttatccctcgtggttccgctagatgtaacttataggagttaacatttgaggactttgttctgcatcagatcttactatttgaatgtttactgttggattttgggcatcttattactgttactcaaaaacattgactctgcatcaagaaagaaacaagaaagcaataaaacaagaaataattcatgctcac

SEQ ID NO: 12351 - DNA, 1516 bp, Homo sapiens
ttgcctctgtgtcctgcctcagcgtgactccccactcacctggctctctctctgtcctgcctcccattatctaacacattttttacatgtacattttaatttgattcagctggtctgaatctctgaatttatatcatccaaaacttccatatggtcagtagtagatgttctctaatcctccctctccttaccacgggtcagacctaaagaatgtgaacacttttttttttttttctggggatgctaagcaaacccttcttacagatacgtttaatgtaataagaacaagggaacatgtaaactaacataaccaattgtcagttctccatgtattcctcaaaagaatgtcagagtaaatgtattagaaatacagtatccagactgctagtccttgccagagacattcttacctctgccctgtgataatattttatgcttgacagtgaaaacaagtgtggccccttgcaccggttagctagaagtacagccagatttcaagctagtgcagtcacctcttccgtcattcttcacaaatcttgtcaacctggatcttagacttcatctgaatcgagttctttgccctcctttgtgcctgcagctcatatggaggtctttgccaccaatgggagatgagcccaaactttcgatctaggtgggtgatgtgtagcagttcaagggaagggtgctgtgttttcatagcatggagtcggaggagagggccatttagcagggggagcagaagaggcaattcctcctgggctaggggttgtcagtgaggtttcaacattttgttagctgtgtgcagcattcccagagcttcagtctctgtgcatactcagctttgtagaaccatgctgcaaagccatataccgatggggttatccatgcaactatctccattcctacaatgtccttaatatgagatcatcaaacattgatagtagggactccatggaatatttgcccagtaatggtaagaaatctttcgggtaagagtatggatggttcttcttttacccaatctgcttatagctttttttgtaaacagggaaatgttgagtggtacttgtattcccttatcaaattaatcacatagcttttatacagaaactcttcctgtgtgagctgttaaggtgccaaattggctgtcatttgtattcatgacacataccataaagcatctgctaatgctttaatggattgattcaattaagacctgagtgacactatttgtaaatataactagttgtgaagcacacatacctttattttgggaatttatgagaaaatatagaaaaccacagatcagggattcatatatgtagctcaaaaattcccaaaagtttactgttagagttggcaatttcctatcactatttcagtgtcagaacaaactgaaaataatggctcgtgtttatgttgaagataaatagcaccattattgggggaagttattcaaaagcaggcttttgagcaccatagtctaaatgccaataaaaataattcatacatagaa

SEQ ID NO: 12352 - DNA, 246 bp, Homo sapiens
cctggccagactccatctagttaaaggagacagctggccgccttgcctcaatatgtaccatttaaggggatgttctctgtgcgcctggccacagacatccatttgaggacactacaagcaattttgcacagacaatattgagaatgcaaatttagagagagttatcatttctctcaatgtgtataattgtttttacaaacaattgtgttttctttatgttaatttaaacttacacagcttatattg

SEQ ID NO: 12353 - DNA, 1142 bp, Homo sapiens
tttagtgccccgttttctacatgaagacaccgtcttcctttattaatttagtataattattctatcaatggatacatttttagtaaatgtgcattgtcacaatcctgggcacaaagtgcctgatgtcaaaatgaagatagtaaaacaagggaggaagcagtggatggaccaggattaattcctttcatttcttagtaaattaaaacctgcagctggtggattgtgatcacacattcccgaagtaataagtgaggacgaatgcactgctctggaacataacccagtgctaactgggggtttcatttattcagtcaagcacatcttactcacatccagatttattttcctacagtgcaaacacaccagatgaaactttaaaatgttactttttgtaagcttatcataaatgagttgcagtaatttgtttgcttgtttgtttaaccacaaccactattttaatgatatactaaagataacactatttagttttttcagaaacatctgcattatatgtgtgttggttgtggattttgtttctaaaattggcttagtccaataaataaagaaaagcattaaggacttaaagcaacaataaccaaataaaaacttgataggatctttgaagtctatttaaatattcattccattacatctagactcaccaagaactacatgttatgatgttaagttgaagttgaaacatgatgttttgcattaaatttaagatatgcaaatttatgtagagaaaataaatgttatataccctataatctttcacctaattagtatttaattatatggatttgttttatattataaaagatgttttgattttgtcttttgatattgacaaaattgtttggatatccttatgttctcaagtctgtatctgcctcccctgccttatttcttatgttttgccacagttaacccattgtgcttctttgtaatcaaacagtttgtgggagaatgggcttattgaatgtctaaaaaataagtttaaagtgtttgttaccctaagttttttacatttttaaactctaattacatatgtgaatgttattactctcagtgaattgttattgtttgcaaaaatgcactgggcagtaacattttgtgataaatcctataagatataagtc

SEQ ID NO: 12354 - DNA, 323 bp, Homo sapiens
atacaatgctcctgagaagacagcattttccacaggaggctgtttcctcccctggtggatttaagagacggtcctttctggatacagagaaatgaaacaacggtgacctctccaggtcggcactttccacttctgtacggtggcaaaacgatgacatgtaaccttgctgtttattgtactttgtatattatttcctcttcaaagtctttcttacacactctatcctctgcactgttaatagtaacctatgacataattgtaaatattcagctttttgctaacttttgtattttgaaaaactttaaaataaaattgttgactag

SEQ ID NO: 12355 - DNA, 47 bp, Homo sapiens
actgatctgtctgcatgatagacagtttaaaaattcatcccagttcc

SEQ ID NO: 12356 - DNA, 572 bp, Homo sapiens
aaaatctagtggctaaaagaaaaacaaaagacctctaaaacttcaacaagaccttcaagatcacagaaatttttaaaatttgattccagttaataacagaggtggtgccagaatgcctggactgcagtggatgtgccccacctctttgcttaaaaaaaaaaatgtcaatagccaggcatagtggctcacgcctgtaatcccagcactttaggaggccaaggcgggtggatcacctgaggtcaggagttcgagaccagcctggccaacatggtgaaatcctgtctccactaaaaacacaaaaattagtcaggcgtggtagtgggtgcctgtaatcccagctactcgggaggctaaggcaggagaatcacttgaacctgggagggggaggttgcagtgagccaagatcgctccattgccctccagcctgggtgacaagagcaaaactccatctcaaataaataaaaaggaaaaaaaagtcaataaactgtacaaatttaattacagtaattcatttggcttttagtgtatcttctttgtcccaattaaacagttgcttgctgtgatgtaatctt

SEQ ID NO: 12357 - DNA, 1528 bp, Homo sapiens
ggcatagagagctgctgatatagtcaagcttgcctcttcttgaggagcaccaacatctgttatttttaggattctgcatagatttcttttaaactggcattcttgcctaatgatgttatctaggcaccattggagactgaaaaaaaaaaatccctgctctgtaaataaagctaattaaacgtctgtgtaaatttaaaaaggggaaatactttaattttttttcttaatagtgtaaaaattccctgagctaagctaaaaccatggaagaaacatgctactttagtgtttagcagtgtaccaagactagcaagagtttgcttcaggattttgttgaataattaagataatattttgagtgtgtcagggccattcaaattgttggtgttgcatcacagctaccttaactgtttttaacatggatcctctgtgcctgtgaatttacttgcatgcttgtacttgacttcttaggatgggtagctgaaaagaccaccattttaagcatttgagaattcttaaatatgaaatttattcagaattgaagatggtgacctattcagagcctttttgtccttgtcaacagactgggacagtgtctgattcccccttcaccccccccacccccgccttgccacacacagctaatattctaatggtaaatttctctgtatcaggtggggaaatgtgctgaaggacagtatgtatcccttgcttcatttttaggtcgtaggtttggaatgtcttgtcccagttcttcaaacactcttaaatttttcttaagtaatgtaaaaatggaactgccaattttatttctcttgcaaaaatagtaaatacttgatgttacattattcccaggtttaatgaaagaacccaacttagtttttcagtgaatttgacacctattttttagtgatgaaatttttctttgagaactggcaaggatgcagtcagctgtttgcagtttttagcctgattttggggtctatagagattgctttattggatacttcaagtcattcttgcttgcacttcccctattgacacatgaaagctgtgttggtgttttattgtacatacttcagatgcacataggaatagaagtgtgttataaatctagctttctttatgatgtttctgataatacgagaattgaaaactttaccttctcttgtacatagtcagactatttgtattaaatttacatttcattctaagttcaaaagtttgaaaattattagttttgcaagatcacacactaatgtaaccattttatgaaggttgaagtggatttatgcaggcagttctatatatagaaatacaattctttttaaatttttaggaccaatacaaaataacaaaaatgtaatggaatcagactgaattaaagtaaggctgtatattgaaagtcatattataaaaggtttgctttctttaagtgttatttatcttaaattataatcgttaaatgtttggaagataatttttgaatcataacgtcagcataacttcatttgacttctcaataatcttg

SEQ ID NO: 12358 - DNA, 1160 bp, Homo sapiens
aataaacatccttgaattagaagtatgaaggtttgtaggttaaaattacttttatttgcagtaattcagtcaattctaccctaaagatgtgttttattataaataatattcaattatgaaacaaaaaaattatgatgtttttcaaaatgcaagtgaggtttgattttttactgaatcaaatgcaaatgttacctgttaaagatattacagagaaattttattgattacaaaatatgtaagaaaattatcagctacagttttaaagtttaaaatgctctgattgtttctcagaaaaggttacctttgtattaattgttgtatgacatttagtaatgtcctaaaagtcttttgtgagaggtatttaaagtgctttgagacctgattcatgccccccaaagggtggtattaaaagaggaaaaaggacatagtagtggtagtaaagaaaaaaaggagatctaacaaaaacacttgaatattttttattttcaaaactaaacacataaaatgcttttattttgccatatcctacaggaaggaagacatgcttttgccctttcttctgctttgtatatgaccttgatcttttaccttttgttctgttcttctgtgtgcattttatggaaagaaagttgggtctgagattatattgtaattttatactttctatagacagaaaggttttcagagaaaaagaaatggttaaatatcttccagatgttgctgccttatcgaaatgcttctagaactgtctgtataagtcgtatttcagacagtactaaatacttatattttatttttgaggcatgtaattttaaaactgcagtaggttaaaattctattaaacaaatatagaaaatattttgtttataattggcctggtgtggtggcccacgcctgtaatcccagcactttgggaggccgaggtaggtggatcgcctgaggtcagaagttcaagaccagcctggccaacatggtgaatccccgtctctattaaaaatacaaaaattagctgggtgtggtggcgtgtgcctgtaatcccagctacttgggaggctgaggcaggagaaccgcttaaacctgggaggtggaggttgcagtgacccgagatcgagatcacaccactgcactcagcctgggtgacagagcaagactccgtctcc

SEQ ID NO: 12359 - DNA, 699 bp, Homo sapiens
accccaagagacttcacacaacacttatgtatgcaccccaaagactaatggggagagggagggccgggaagccaggaaagcttggtgttttctctgggtacaccccaagcagcgtctccttttggatacagttattgatgaggcttggccactggatgttttcactaactacactctacaagtgaactccttgcccaggccagttagaaaatcccttggggaactgtgatgaatattccatctttgattaaaaaagtgaaatagtctccataattttggacgatgaagtgagtttttcaaagaattccatatttaaagacacattttatttaactaataacaaaatgtattgcttttgtatatatttagttttcacacttggaaaatcttttcctacatcctcgaaaacataaactcctctgtgagtgaaatgcttgtacgaagctctgccatatgtttgtagtgttattattttcacctcaagtagaaagtctgttgaaaccacttggctgctggatttaaatgggtaatcaaatttaaaaatgaccataaatgaatctttgcaatttgttttctacttacctgttattcacagttggatataaaatacagttccataagatatcctaatactgcctaatgattttaaagttatcactatatttttctgaaatgataaaacatcattcatttatttac

SEQ ID NO: 12360 - DNA, 436 bp, Homo sapiens
tcacagatattggctttgctatctgggtagaaattaatacaattccctgtgatctattccaatgttcttccaagatttttgttcatctataatttaggggttatgttgtctgtgctttttatttttagcttcaaatgaatgtcgaagctatctgctctgttaaattaagcagaagaaccaaaatttcaagggtaggaagatggaagaaatagggaaagagcccttttatagcccaccgtagtggtgggtgactggcctctagtttatataattatttacctctttggcagtacagataacaaaatacactttactggtaaaatttaaaacaaaaaaggcaaaacaaaacaaactcattttccccttagttcccattaaaatatgcatttgaaaaatgaaatagtcatatatatattagtgtgatttaagtctcaat

SEQ ID NO: 12361 - DNA, 1649 bp, Homo sapiens
atgatgttttggcccgagctgcagccaagggtctgctggatgggattgagttgggtaaatcatcaaaacgggagaagaagaagaaaaaatcaaaaacatcattgacaaaaggtgccactactgataatggcatccaaatgaaaattgctgagttcctgaatcgagaaactaaagccagtgctaatctatcagagactgtaacaaaaccacctcttccccagaaaaatactgctcaagtgggggcttcctcacagaccagaaaacccaacaagctggccccccatcctgcagtgcctgcatttgtgaagaacacttgtccctccagaccgcgtgaacggcagacacacttcttaagacctcggccagaagacagaatggttgctctgaaacccatcaagattgttctgcctccagtctttatgccattttcaagtccccaagggatcagatctcggatgccaactcaacatttgtactgtcgttgggttgcacccaaggcacttgtgcccacctgccttcccacacactcactatccagaaaagaggaaaagcctaaagatgacacaccttcctccctactcaggcctcctcggcgatggctttgattgtcttgtgttttttataggggccaaagagcagttgattttttttcaaagtctagtatttctctgaagattctacatctctacacaagatattcattcttttggtcacctagggatcttctaagtgtgatattactttcagagaattcagacaagtgagaaacaataatgtaggagtcagcaaagcagaattcagagacttcagccaatcactgctgctctgagaggatccagttagagactcagtatcagcggtcagaacttatctcactcctgtgaactttcaggctggacttaaagctgccaagtttcccctgcagggaaggaaacactgcctcccttcagcaggtagctcattagaaagccaaacaggcaaacgatcctggcctctcccgccagctgaccgctcttcagcatccatgcggttgtagtcgtgactttctcagtcacgatcaagggtgattttttcttaaatatcaagctgttctttgaacagggaatgaacatgagtttttgtaacgtgactgaagttgagtttaagtaggaagcgcaggaagttcccaagtgccaggtgtgtgtagctcagagttccttttacagtgaggtgtctctcactgggggagcttccaggatcctgagcagactggacacaatcatctctcccttcctctatgtcaagcactgttacaaaagactgtgagcaaatttccatctaaatattaataattctgaagaagaggcaaaactgttgaatgcaagcgatacctattgttgaagaaacccacaaatttctgattctaagatcaggggatacaacaaaatctacaagtcatttcaaatagcacacaggaatcaaactttggtaaatcatttctgaggcacaattaaatatattgtagcactatgttaattaattatattaaatgtcgattcatcttgaatgtattctcaattgcctaccaaaaattggtatgattatcatttctgggtctactgatttttcatcatggcaacagaaattgtcattaaatagaattaagatac

SEQ ID NO: 12362 - DNA, 355 bp, Homo sapiens
tgctctgtgggagggactttgctgatttcccctcttcccttcaacatgaaaatatatacccccccatgcagtctaaaatgcttcagtacttgtgaaacacagctgttcttctgttctgcagacacgccttcccctcagccacacccaggcacttaagcacaagcagagtgcacagctgtccactgggccattgtggtgtgagcttcagatggtgaagcattctccccagtgtatgtcttgtatccgatatctaacgctttaaatggctactttggtttctgtctgtaagttaagaccttggatgtggtttaattgtttgtcctcaaaaggaataaaacttttctgctgataagat

SEQ ID NO: 12363 - DNA, 1808 bp, Homo sapiens
cacggctttcaagcttccggatcactcaccatttctttactgagagtgtcccctggcaactgcttaacaaaatcccaagctcaggggcttctcagcatttacctaatttctgaaaggctcttctgaaaggtggtatctgttctttcgtagcacagtgtttatgtttttcctgtttattgttttggttttttttttttttttgcatttgcacagtatacacaaaagaatatggggttgtaatgatcctgaatagctcaaaaaaggttttagcatggtcaaacaggcttatggtttaaaatgtgttattctcttctttgggaattagctaaatgatgcaataaacctgttttgttttagaatgtctaggaattaaacactttatgtttacagaattgagctgcagaaagtgcaagacatgccaatttgagacacacggtcttctaagactgaaggataaatttaatgcatttcagaaactaaacatcacagcaagctctatctctgagctataatttgtttttaatgcaaagacactagtttgataatatatactgtaatcctgaaacatttgtgttacttacctttggaggtagaaattataccaataaattattgcaccgttagtattagattctgtgtaccttggaagttatgtcattaatataggctggttcatcaaataaagcaaaaccttgcaatatcagctagatttacactccgggacgttgcccaaaggtaggaagaaagcagagggaaatatttcagtcatcatttccaaagtcattatcaaaatctgtgaggaagtttaatcttccaaagagtcaatgtcagacatcaggcctctgttgcctgcttctctcgaggcactagattaggagtcttcaataagagacttaacatgaggtatatggaagatgaggcaccgagataagttcatcattaggtgtgagcactgctcacccttgctggcaagttctccttaagggcctgaagcacaggtgtccaaagaaaagcgttaagtccatcttaatagaatctatgtggtatatgatgtggtcagcccctggtctgtgatcagcaagaacctacagcacagattatgccctgcccacttcaatgaatacctactctcctccattctccatcactttttttgctatcaagaactccggaccttgcccatggagaagtttagagaggaactcttgtggagagctggtttattttctgccctgtgcgacgagtttcagctggccaagaaaggagtcaagttattaaaaagcatcacaatgtagatctccaggctggttttttgttttttgttgttaagactggggaaagggggactatttattctgccttaaatcaatggcaaataagtcaagatgacattttgtgaatgtagactatggatacactcctaatagattgatgtagtcataaaagggggtcaagtagatgtttttctgttatgtaagcaataatttttccgtgtcttattgagtatggctagcgattatttattacatgctagatgggttctttgcatgtgggttccatataggtgcagaaatttcctcagccactggagggatttcgaccatatttgtcatttggatgagctgttattagattgaaatctacacatcatttcattaaaaattgtgccttagaaaacgcaaagctgttgcacatggcgataaattatggatgcagtacattgaagagagatgaagtcacttccaagtttccaagacttctcatggaggtgtttgctgttttacaggaaaaaataaaaataaaaaaag

SEQ ID NO: 12364 - DNA, 1607 bp, Homo sapiens
tttaacatctagttaagctacaaatatagtataagcattattagcagctggtacttctgctaggggttgtaaattccaggtgttacactgacctcaatccaatttacataatttacataaatgcatctcggtggaaaaataatcattttcttggcatgttaaatcaagcttaaaaagttttgagaaaattttactgcgctgtgttgctaatggttaaagaagtctgtatctagtgataaatataccagtttttttaaaaagatgctgttgtgcctatatcatgaagtacattaatttctcatgtaaaaaaaatagctctaaaatttgtttcaacctaattggtaacctgagtttatatctggcatgaattcattatggtgatacacatatgtgaattcagtacattttgagacagtattctaccattcagtaattttggttaatgattttaacacttctcagtgtatttaatttcaaattgtttttttaattggttttatgctgctttgttaggacagatgtgttttgaatgtaccattataagaagaattctatgtatcttaaactatgatcttctaaaattttatttccgtaagtacttctgtggccttgagtattttttaaaaggctcaactgtaagcctcttagccagttggataaatatttggggtcacctagccattgaaagcagaaagcagtagtgacacagctttcccttcaaagagccattgagaaacatttctcaaacaggaaatccttcttttactaatgtggacatatagattattcgtattatagtttgtagaactacctagttcagaatcttgactgccagttttcttggtttcttaggcttgaattttcatagacaattgcaacagtttagatgccttttgaaaggaatgtaatgaagattcagcatctgactatatgtgtgtctatcctgaaataataatggagagtatactgtagattacatgtttacccatcaaatctgacttaaaaggttaaatggaaggttttataggtaaggtaattgattgggaatggggtagggggaggagttgtgggggaataatgtgcatttcagtctcaacgcatagataaatttaggggaattggatgtattattcaactttgatttgggttgtaaaatgtgttaaatcctgttcattgaactcccatcaactcttataaaattcatgctgatcttcattaccgttgcatgattggaaatgtttaaaacattgtacagttttagtatagagaaatgtaatggtttttgtgaccagtttctgtctgcatgtaatttggatttctcaaatacattcattagtaatttatcagtaacattagttttatttttgttcatctccttatctataaaaaggggatattcttaggataaatacatgaaaaattatacttgatagcttaactataatcagctatttttgtatttttgtaatatttgtccactaagctggagaagcagcctcatacagttgattttgtgtatgtggctagtcttattgtcactatgtaagtaatccaatggttttagaaactaaactttctagagcaataaaatgactataatgttaagt

SEQ ID NO: 12365 - DNA, 3484 bp, Homo sapiens
ttctgcaggtggcagcgcggccgaatgtggatttgacttaaggaagttaagagtatcttattaccgtttctgtgagagcattttaagagacgtgttgtatatagatcgcatccatccggctgccaggggtaaggtgttaagagttttatgtggagacgttcttgtaaagttatttcagttaaactgtggacttaacttgaaagtccttttcataaaaggtacctgtttcctcttgttgaatgccttagaacagttaaccacctccccaaccctttttttttttaaataattaagacttttctaaggactgaagattggcaaaaactaaaataaattaaagcagcttctttcactagtagccctttagagaagcataatgatggtactggtaagactgtttgactaatcatacagggtcccaggcatctgcgcttgaggaagccagtgggagtggagacaagggagaggtaatttctcagagtctctacagaaatatttaaggctggagtttggaatcattaaatttggccttctcaaactcaatagcagatctcttaaggttctccttttattgttatcatccataggcattggaaggaaagatggatctttttaaatactagaagttttaaacagtccttgatgtgcttttgttgaggtacctttcagaatgtaaggtacagcagctccggtttctattatggtgacttgaagttcagattcaaggaattggctttgactttttgtaatctaggagcagcagtttgtgagagatttattaaaaatgttaaagagcctgtttttctactaagcaaggaagaaaaaaaacgtgtaataaggttagttgctacttcttaatagccaaagcctggaaatgatctgaatttcgaaaatgctaaaattcgtgatataatcatacaatcggatactgcataataatagaaaataaggcacacttgctatgtgaaacagtatggaccaatctcaacatgttgactgaaattaggtagaaatgagtacaaactgtatgattcaattctaaagttcaaaagcagtaaaaacttgtctatggtgattaaaggtagagtagtacgtacctctgtagaaagaaaggatttttttttctttttctttttaggatgtttgagaagtgacatggggaagctttaggaatgctgagttttctttatcttgacacttgatacatacgtaattcatatatctatatgcttcacgtttttatagtttactgtatatatgttattcctcaaaaaataaaaataagcaattaggacactattgtagttaggcaagggacaatgatgccttggacctgcatgtgtgagaagtagaaatgatcagaaatgattgcattggaagatcattcgaaggtagtattattgataaggcttgctgatgagagtaaactagaaagtgaaagaaaaaaggatggcagcttttttttttttttttttgagacggagtctccttctgtcgcccaggctggagtgcagtggcgcgatctcggctcactgcaagctctgaggatggcagcttttttgttaactttagaactggtagatgatggtgtcgtttactaacctggggaggatgaggagaaaaaactttaggtgaagggaatgatgctgagttttagacatctactaaacctccaattggagatacaaagtattctgcagatcaggggtcatgtcatggctggtaatacaaatttggtgacttcaatacatagaattaaaatagatgggatagatgtgctttatatgacatagatgaggttaatgtaattacatattgatagaagatgagtagatcaatagagaagatatgggagtatggttaggcacagatttttggaatcctttcagtcagttttttatactaacttgatatgtgacatgagaaattgtgtaagctttacttgctgttgtttcttcagtgtaaaatgtcttagataataaaactaaatgataaagtagatacagggttaaaggatatgtatcttgtcccttttacattgtaagcattcaaaataaaacaaaacaattaatgaagaaaagacattgcaatcattcagtaagaactagctgcagacatatatatgtatatatatatatgtctgatactgatatgtcatttatttggcaattgacaaaaaatgactacataacttgataaactgtttatcctcatttgcaaagaaaacaaatgcaaaaaaaaaatcagtaagaaaaacacacctaaaagaaagggaggcaatagtcttgaataggagaaaaagaggagatccaaatggctaatatacatttgaaaaggcatccaacttcttttattgtcaaggaaatgcaaattaaaaccacaatgccacaccactttcactataatggttaaaataaaatagatcaggtggagtgacgttgggaattaaaagagaagcaaatgttggtgcagttgtgagcaaatagaactttcatatactgttgagtgtatactggtacaagcacttggaaaagttagtaattgctaaagctagaagtttgcatactctatgacccagtcatttcagtcctaggaatatattaatcagaaatgcatacctgtgtccaccataatttgttaatagctccaactggaaactacccaaatgttcattaatagtagagtggataaattgtgggatattaacacaatggaatcctttttgcagtgagaatgagcatagcactatggacaaatcctgcaaacataatgttgaaataaagatgccaaacacaaaagagcacatattgtacaactaatgcacataaagtccctaaacaggcaaaatgaatctatgttcttagaagcaggattaatggtatacttgtagggcagaagagtagtgaccagaagaagattctaggaagctagcaatgctggtgtcatgccagacccctagtgactccaatagtaatggcactgtgtccgagagtccaaagaagatgcgtagacagcgaacaagacttgggtttattgggggaacttatatatagggatggtccagtggtagtaggctggacagaagaaccactactgtttgtaaaaagcatgcagtttatatagcattttcatttagcacactccacctagcaacctccatttaacccaaagcaaaggaccttgatcccctatattgcctgtgttgtaagggatgggctgggggttcagacgtccttcatagataaggagtgaaactcagggttagtcgctcctgtttccttagtttgggattctgagcacacattcgttttagatcacagggtcgttctcaggatatggttgttactgctgtcaggtgcatcctctctatagcggggtactggctacacagtttttgttcactagtgataattgttagagctatgcccttaatatatgtcttgtgtgtattatacttcaataaaaagttaaattttaaaaaacc

SEQ ID NO: 12366 - DNA, 1407 bp, Homo sapiens
gtttgatggaatgaatcacctgggtggggaccttggaaacaagtttgtccgtccactctacaaagtttcctcctctcctacactgaaagactcagtgccatgcagaagccttttttttaagatgaaggaaatattttatgtaaagagcaactcagcaggacacagaactaaaactactacttacatctaacagacacactacaagttgaatcaatttgaaaatcatgtttttatgcttccatagggaacattttggttatttaaattgttcataatgtcccatatttcacctgttcagtgtatactgtactttgcaatcatctttccttttttcacattggtaaaaataagtggcatccataggatcatgatttttaatttgttgcctctgaagatttcactccatcaagatctgccaatcttcaatattctggctaaatcttggtatgtggtttttaaacagtcactccgtttcaaagtctgtctttccttatagaatgtggaaattatttctccataccttgtgattttgacctgagtgctaagagaatcactctccttacctagttatctacaaatgttcattccagaaatgtttagttactgaattgaatgaagacatctcagtacactcttttaggtcatagtagttgccattttgtaaaatttcttttttcttctttgcttttttccccttatttggtttaatttttctaatgttaggagatatagtcctagatatttccatgggccagtgtgatgacttttttttaaatgaggttcagtaccataatgtttatttactggaagataatgcatttataagcattttaaaattctgtaaagtgggttagaaatatttataattttacaggcaggacagcatttgacttttatttaaaaggcggcactacttatgtaaatctgagctgtgggatatttcttgctttaagagagagacagaatctctcactgaaactcatggtcatgattttgtataatatagttcatactgtgtctgtgagtttcttcagttacaaatgggcatttagtatagttatattgactataacatgtaagtaaatagctttctactgaccctaagttatcaaggtggaaaaaaaacatgcaattcagtaattgaaaatgtggtgaaaagctgcagctgtcatcatcaaaacaactcataacatactttaaaatgttcaggtagcagtgagcattgttcatatgagaatggcggctgggtgatctctttgctgaattaatgagttcttaacatgtggacccaactgcctgtgtgagatctgtgtcttaaaacttactggaatggaaatctatgaattattgcaaattgtaatgctggaaacaaaaaataaatccttggttaaagggtttgtaatggtg

SEQ ID NO: 12367 - DNA, 504 bp, Homo sapiens
ttggtgggaaaacaaagaattttcattgcaatttgtaatatgctgacaacagaaagaaaattataaaatttgcttgttactttcagggtattcaggttcaaataacctactagtctttcgttgaaagggagtagttagtgggtaggcaagagcttagattttgaagccatgttgcctgttctcaaatatctgttccaaccactcactagtaaggtgaccgtggccagattaacctttgtttcctcttcagtaaaatcgagattatactactacctacataagttgttgttgtgaagattaaatgaggtaatacgttaaatattcagaggtgcaagacacatagtaagcactcaattgtaactacagttaagtccttaaatgccatcgaaaggttcttagaaactgactttaagcaaaatgacacgtagcacaatgttcttgaatgatgtcatttccttaagtggtttgtaacatcgatgaggaaaaaaaattggtttatgcgtc

SEQ ID NO: 12368 - DNA, 410 bp, Homo sapiens
ggtctgttctaatggttccatttagactactttcctcttctattgttttttaaccttacaggtccccaacagcgatactgctgtttctcgaggtaagagattcagccatccaattggttttaggtcttgcatatcagttttattactgcaccatgtttacttcaaaaagacaaaacaaaaaaaaaattatttttccagtctaccgtggtccaggttatcagctctttaagagctctattaattgccatgtttacaaacaaacacaaagagagaagttagacaggtagatctttagcagtcttttctagtttccctggatttcactgatttattttttagggaaaatgaaaagaggaccttgctgtccgcctgcactgcttcctggtaaactataacaaacttatgctgcc

SEQ ID NO: 12369 - DNA, 2105 bp, Homo sapiens
ataccctccttggagttgcaagtattctttcaaggttggaagagggattttgaagaggtatctctccaagcaagaatgacttgtttttccataagggacatgagcattttactaggcttggaagagctgacatgatgagcattattgtatgtttgtatatacatttgtgatagagggctagagtttgacctagagagagtttaaggaagtgaaatatttaattcagaaccaaatgcttttgtaaaactttttggattttgtaaaagcattttcattctcttagaaattcaagtattttcaaggggagtcatttgagatatatttattttactaggagatcttatattctagggaaatgctttaaatggtcaggctccagtcggaatttttttaagaaaaaagtagtttttaatacattggttaggactcagaggaaatacggaaaaaacattgtagatggttaatttacagataaaatcccaagagccttttaaacaacaaggtacctaaaatagggtataattatactgcttaaaatacagttagtgcctattaatagctttttatttcctatgggaagatgcttttggtcttctggctgaagatgtaggcatacctctcactcatttcaatgttttcctgaggtggagccttcattggaaaggggaaagagggattctagggtttcatcagggaccaggaatgcattcctctgtcaggttccaatcaagagaagaccttttatgagatctgcctctgtatagatgttgtcagttaggaaactgaagccataggtcaggcagacatcagctcagcctgtggcccattgggtgatttcctgtattttaaaactgacagtagcctgatcaaagtgatacaatcaatttcaaaacaatcttccagagaccacttgaaggttcatagtttttacaataccctgagacttttcaggtgttggagcctctaaaatatgagatataaacagaaactaatacaagttgttctctggaggtttctatgaggttcttagaaaaatttggttttaaaatcatttgaggacaggaatgtctatagcaagtttactcctattgcgaatcatgtatgctggctttagttgtaacaaacgattttattctaagtaaggccaggtgctactataaaatcatatattcctgttgaagttcttttgaagtcctatctctatttattatatttgaaagttgtcagccaccagtcatccagaatttccttcctgaatctccatgctcatatgcaatgtctacatcaaggtcttcttaatgactattattctcagggtttagttttctaccttctgcctactattttggtctgacatttttgtagccttctgttattattggaaatagtctcttacataagctgatttcgagaactttcaaaatctcacatagctaatggaagttgctttctgctttcttatgactgtttttataaataaactgtttcataaataatgtatactggaaaattgtcatcactcttgtaaacatttgccaaatccaactgtaattagtaccagaacttagaaggaaagtcacaaagcatgccttttaccagaatattgctttgccttttcttatatggaaaatcactgatgtcatatcatttattatcctcacagcagctggcattcattccctgaaatcgtcgtctcctgataaacaataatttagagatatgttcacttgtaaataaaaaggttagaatctaaggacaaagaatgatccaaaaatactaaggaaaaagaacaattttcaattttcagaaatgaattatctgtacatatgaatagaggaaaatactgagtgctaatgttacagggccacaatctcatatccacaattccaaaatctccaaacctctgaaaactgaaatatttttcataaattaggcgtaaattctatgccctgaacaaatgtaaagctatttatgtactttgcttaatgtaatcattcatatactttgctacaaaaatattaatatatttcattactgaatgctaaactgtatttctttttaaaatttggaaaatttttaattctgaaacacaatctagaccttag

SEQ ID NO: 12370 - DNA, 889 bp, Homo sapiens
agtctctagaaacactgagttttaaccaatatgagacacacgaagaggaaaatgaatgcttgcttcttggaagaactgctaggaaagttagcatttttgcagttctaactaatttagatgtgaggccaagtaaaaatgccatttttttggccattgaatttgaaaatcaaattgattatcctccagaatctctacaaactttgaaatactctctaaggatcaaagaagtcaaagagctatgtgtgtctcagaataatctccttcttctggtcacagtatctttgtctctgccaggtggctcttcatttctttggtagctatttttagacttacagtcattcaccaatatacagttagcagtgttctgatagacacagtatcagtcatattctccgttgagtcataatttcaaactcaacaagatttcagaaaggtataatcatgtaatttctcatattaaaactgagaagagaggccaggcatggtggttcacacctgtaatcctagcagtttgggaggccaaggcggacagatcacttgagctcaggagttcgagaccaccttgggccacaaggcgagaccctgtctctacaaaaaatacaaaaattagccaggcgtggtggcacatgcctgtagttccagccacccgggagcctgaggtgggaggattgcttgagtctgcgaggttggggctgccgtgagcccagattgcgccattgtgctccagcctgggtgacaaagcaaggccctgtctcaaaaaagaagaagagaaagggccaggggcttttgctttaaaaaactttttttaaaacagaagtgaaaccacgggtgctttgttcttccttctgcacctccttcttaaactagatagctaattagttattttaag

SEQ ID NO: 12371 - DNA, 208 bp, Homo sapiens
atgtggagatacacaggagcttctatcttgctgaaatattgcttcatatttatagcctgtggtagtgcacatggttaacataaaagataacactggttcacatcatacatgtaacaattctgatctttttaaggttcactggtgtattaaccaaacgttgtcacaaattacaaatcaatgctgtaatataatttgcacctggaatggc

SEQ ID NO: 12372 - DNA, 159 bp, Homo sapiens
gtgaaagtcagtgttgctgtgcatgcgctgatggagtagacgagtgagcttttccgtgcctctcctccacctctcccttctcaaaatacttcatgaaaggcagtgtattctgaaaaagccttcaaataaaggtattgcaacacgatttatacattgcat

SEQ ID NO: 12373 - DNA, 1053 bp, Homo sapiens
aaaattacatcattggacatgaaggagtttcaacatccagcttcatctaggtggtcatgattacctgcatgctttgagctcagcagcagtcttcataaacacatttaaaacaagatcctgggtttttgtggtttgacttctatggtgttttaaaaaaacacagatttttagtgttaatattgtgtaaatgtactcaccttagggattcatttgaatgatggtattataccatgattgtatacagtttgtgaaattgttgcaagggcaaagataactcttaaaaaaccgtcgagattacaatgctctagaatcagcatataagaaaataaatgatatctgcatgttgaattggggtggatggggggagcaagcataatttttaagtgtgaagctttgcatcaagaaattattaaaaagctttttttctccagtattttctgtattatcttaatgtttatggcaaataaaatgtaaaggaacatgcaacagccctcatcttccttgattttatggttttattgtttgtaatttattgatttatttttaagctagttataatcatgtaggtataggaaataaagtcatctataatatttctataatatggctataatatggctataaatctataatatggctggaggcagtgggcagtggttcatgcctgtaatcccagcactttgggaggccgaagtgggaggattgcatgagtccaggagtttgagaccagcctgggcaacaaagcgagaccctgtctttacaaaaaaataaaaattagctggcgatggtgtcgtgtgcctgtagtcctagttacttaagaggctgagttgggaggatcagttgaacccagtggttctgggttgcagtgagctgtggtcacaccactgaactccagcctgtgcgactgagtgagaccctgtgtctaaaaaaataaaaatataatgaatgtgatttatgtagataaattgataatatagtaaataggtaaatgccttaaaaagcatttttaaagaatttgtaaattctaaaacaataaaaatttggtatacatca

SEQ ID NO: 12374 - DNA, 186 bp, Homo sapiens
aacatttaaaacaagaagttattggctgggaaaatctaagaaaaaaagtatgtaagataaaaagaagagattaatgaaagtgggaaaatacacatgaagaacctcaacttaaaaaacacatggtatctatgcagtgggaaattacctccatttgtaaactatgttgcttaataaaaacatttctct

SEQ ID NO: 12375 - DNA, 3251 bp, Homo sapiens
gactttatgcatagcagcgagagagtcactgttaccacagttttgtcacccattagccataaattgctgtttgtatcaaagcgcatgctgcttctcttgcactgtttccctttcgcagggacatgttggtgtttgctattgaattggccagctctgcttgctgtgtggcattgttctcttggaaggctgctttgcagtttgtatttacactacagattggtgaatttgccaacgtcctcactgtgattatgtgtatattgctgtttaaattttgtatatgtgtataaaaggaaaaaggttcacctagagattatttctgaaaaatgtattgtaaaaataattttgtggcatttctagtccctttttttgaatgaaccaattatactttatttggtctcctatgtagcatttcagaaaacaagagaaaactgttaccatgaacaaacattgccagaattaaccttactgtttaagaggccaacttctggaaggaggtaggagtcataactttttagaggcatatgccaaatatcatttggtatacttaacaatattagtgttttaaaatgatgagttataattatttgaacatatagatatgtaacatgccacaaatcatttctaccatgcaaggtgtataagttgtttattttttagtgttaaaactataatagcttgaatataggtaccaatgaacaaattcaaattgcacctcttttcttaaaagaatgggatttaaactcttataaacattctttaacttttttgtttgtttgttctctttttttccttttgcattcttctagccagtgattgatctgctaatgctttctttgccactctaagtaaaatttatttcacctcctcaatgaaaacctcatggttttgctggctgtttataactgcatcgcacttctagttgtggcttgaattttcagttaagctttcatggtatgtaattttccagccttttgagaaaacaagcatactataagtgagagctgttttgttttccttgtttgtttgtttcatgctaggcttttcctggcagcatgtccattgcaggcagtggacaagaaaccaccagcattgagctaacccagtacatgctaggacctgtcctagaggggccacttttcattacctgagttatttgtacagaagggcaatagccattatttttgtggatgaggaaacaagaataaacagaatggtatttttaggtttgtattttatgtctttttttttttttttttttgccattcttgaggaaatatagagatgacatgttttcaccccaactatctggtgctattgaatgactaattcagtccctaaagttctgtgaaaacacaaaagtctaatgatttgagtgagtaaaaggtaatggtgcatttgaacaagtaaatgctgtcgtggtcagcaagatccgtgatttgaacatgtgatgactggaaaaaggtttgggttatttggaactctggctaaaacttctttcgggtgacatgtgatcgtttaaatggcattaagtgaataaagcacacagacagtgctactcttgaccactattttaccatttctttgcaaacagtgttcacattttcatattttttccctaactaaaccaccaaagaaagaaattttgtatgtatatacagtgtgtgtgtatacaaaatcatgatatagtagaatgcaactactttctttttctaccaaacgaaaggttttatttgctgtgaaataaaccagaagtttaaaaaaccctgtagtgattaagcatacttaaccactccttatttgtagattcactttcaaccttaaaaattaataccagtttgcataaaccaatatctgaaaagaacaggaaatgttaatggcaagcaacagctattaatactgatgtgatggatgcatttgttttgcagtggtgactggcctaggcaggtttggatctgtgaagaattgattcattttcaaaattattccataaagttaaaaagttacactttaaaggcaacaggtcatacagttctttaaatctgatcaactgtagctttatttaaagcaaatataaatcatagatgaagttattttaaacactatgttagaatatagagatttttaaaaaatgctgataagcacagttaattctaaaatgagaggattgttacaggagggagatgttacagttaatccacaatcaacattttgatggtagggaaaaaactgcgtaaaaactattgcattatgtatgataagaaagtaagtattccaaagggataatcttgcatattaagaaaactccaaataatctttaaactgccttgaaaaataaacctctttgactgctgagcggcagagtgcttacccttgattgtcttgattttatatatttatttctaaggggagaaaaaggggtcagacagagtaatatgatacattttcttaaaaacttctctaagttgcacaaaactgaacaatcatcaagcacttatttactggctaatgttgaataaattagggtgccttcatctgggttttctttagtacctaagtctacaaccctttctctttttctattgtgtttcgaactccacattgcaatactctgttgtcatggaatacaacctttagatgtttactgctgaagtaggtcagaaattgtattatttgatttgcctcaaacatccactgtaatgttacatgcaccttttttgaagcatgaactctgaattatgtttttataaatctgactaggcaaacctagattctggtttcacaatggatttattttctctctcagtctccattttaacagtgcttttgaagtttatacagaaagctttaaaagttagtttgtgcccttggtttttattcttaaaactgctaaaatacctctgtaagccttatcctttattctttcatatgttgtataataaatgtatagatttcattgaccaactaaaatgttgggtgtctgtaaatgagaccaaaacgtgggttgcttttttcataaaataatttctattgggggttactgttcaatgacagcaggtaacctataactgtgaatgcttcgtgtcgtcagtatttgcattacattcataaaagtgtgcaagtcctgtgactcccagcttaactgaaatactgttatgccacctaacttgagtacagcaaactggttttaggtttcaatgacattgatgtaaaatgatatcccatgaataaaaagtatttgtgtttggtttcag

SEQ ID NO: 12376 - DNA, 2405 bp, Homo sapiens
aagcaccagacctgctcctttgacccagtgcgtggaaacagctgctttctccagtgccgccatctgtcttctgtgtctgcctcagacctcacttaagataatgtcaaaaggcaattctgtgtatcaccccacacagagagttaaatgttttggcttggcgcatttgtaactttagatatattgcattctattttattttatagatactaattccattaatttcataaaaatgattgtataggcatttaggatcatattcattcgaagcaaagtccgttacaaaggttcaagatttccatctcaaaacactacgctcttttatgggaactgtgtgaactgaagtggaaagcatctaccatgctgaggctaaaagaaaagatgaatcattttagtttgcagatggatcgtaaatataattgttggtatcagctttagctcaaaaccaatattaggtgttttaatttccttttaaggtttggaagacagccctaatctcaggttggggagctcatgttagtagcagtgacttaaggctaagtgtagaagataatttaagatacattttctttatatattagccaacaaattatatttattggttggcttgcttttccgttctgattttgagagtgcccagtttggtttagttgaccaatgaatgtcaaagctacttagttgagagaatttccttgttcataaatgtagagcagtgatttgattagaagccagctttgagataaatgttaattacctcatgcatatctcctgggaatatttcaaactgttttaatgcatgtgttatatataaaagtttcttgggacatgctcttcacctgttctacctagttatttgcaaattcagacctcctattgaactctgtctgaccaaaactacttaaactcaaggcccaaaactaggggcaccatttactgattttaaattgagtatatatcccttgacttcttcactgtcaaatacttttgaaacttcacgttcaagataagaatggaatgttgctttcttgcaataagtaatgttctttctgcctttttttcacttttaagtcagccttaaacacatgcctcacaaacatctactttctccacatacctttgagagagacactgaattggcctcagctcagttttgcataagcttagtgccagaaccagcacctgatgcttttcaggtgaaaataaaacaaacagcttctctaaagcatcttacccctgtgctggaggtttgagggacctcttcagtgcctgccccttgagtctaatggtcaccacctcattctgaagtatgagttgaattttttgccctctttgcatatttacattagtcatcactttgaagcaatgcagtgtgctggaaggagcactatctgcctaggtaactgctagtcatgacttggtcatcagcttgctttgtggcactgagcaagttacttcacttctctgagccttggttttatcatagggtgaggaggttggatacaattagtgcccctcttaaccctgcagactcaatgttcccttttataacaagtattttattctgaatatgaaatgaaaattaaagttaatataatcatctatgtgcatgtataattttaagcagtgaacatagtaccctaactataatataaagcagaaaaaaaggcaacttttaataaaataaaatgtatttcaataaaaaagcttgggtataaccaccctagaagataaaattaagtcattagatggctgaacctgcatgtagagccaccagctacaaatgaaaatcaatgtgtgtattggcaacagaaaatcacggtgttgtcattggatgtgactttctgaagtggtgggcaattcttgttaatgttttaaacaaaaaaaaaaaaaccttacagtcttgccctgatttacacagcagtcacattcctggaaaattcaagtgtttattaaaactatgcaacagttactgtgtgttatacgttgaaaggtcttcactaatatctcactaagtaatgagaatgcctacatatcagaattttttttttcaggagccaagcacatatactgatttggaaaaaggcacaggtagctcagtttatttgctttctaccctgcctggccacttgctgtttcttcagtttctaatttgagctgtaactacacaaggaaagctaaatagtctggaaaatttttggaaagaatccacaaagccaaaggagactggcctatactcattttatctggggatgtaccttacccttagagactttgaaaaatgtgaagctcttattttgtaacctgggtaaatgttagtttctagattttcggcttaacatctaataataacatttaaaaagtgcttttgtaactattagttatttgcaataaaatgctttccttctaca

SEQ ID NO: 12377 - DNA, 1023 bp, Homo sapiens
agcaggaggagcactcaagggggtttggtcttcccaggaagagggcctgaggttctcctagtgcaggaacgttgaatattggcaatgattcctggttccagaaagggctggagcagaagggccaagagggcctgtggaactgctacagaaaaggaagtgttgttctgagcagggggacaggattgatgaggcttgaaagagcccactgagccactctctgaatatgtgaaatgtactctgtgtcttttcctttagagtggggagggggcataatcgtttcggtttctgcattcaactaccttgtaaatggtggtccgttgcagtttcaccaaatgtattgatgtgatttacagtgggaatgaaagaacagattaagcattgataggctttcttttttcccccttttttcttttttctcttttcttctttcttttcctctttttccccaagaggaagaattgcttttctcttaccagtatgatttgtaactctggaacactattcttacagaatgcctttctaacctgaaggatacccagatttctttctttatgtacaagatggaaaatcccctacccctcaaaaacaggttgagtttatgggccagaatattttgtataccagacattggtaagctctcatggtttacaggaaggctctggttccccctcacaggatgagcatgctcagttgggcgtgtgtggaggagctgtgaacttcacgctcttcaaccccagactttgactgtatagttttttgtttttttaactgttccatcaggaaaaaaatgtgtcagttgattttggtgtgacttgtgtaaatggttcatggcaatgacgttgggttgcttcctaggcctggctgagttgtgcctaagggtggctgaaatactaaaacacttatcttacagcaagtgaacaggggctacctgccacatcccctccacagatgcactttaaaaagccactcatgctttggcttaaactgtaattaatttattttatgtacaataaatcgcatttg

SEQ ID NO: 12378 - DNA, 224 bp, Homo sapiens
gcatggttttggccttttgtgtatattagtaccagaagtagatactataaatcttgttatttttctggataatgtttaagaaatttaccttaaatcttgttctgtttgttagtatgaaaagttaactttttttccaaaataaaagagtgaatttttcatgttaagttaaaaatctttgtcttgtactatttcaaaaataaaaagacagcaatgactttatatcc

SEQ ID NO: 12379 - DNA, 2972 bp, Homo sapiens
ctggcggattcgaggggttccttccacttctggggccacctctggatcccgttcagaaaaccactttattgcaatgcagaggttgagaggaggacttggttgatgtttaaagagaagttcccagccaagggcctcggggagcgttctaaatatgaatgaatgggatattttgaaatgaactttgtcagtgttgcctcttgcaatgcctcagtagcatctcagtggtgtgtgaagtttggagatagatggataagggaataataggccacagaaggtgaactttgtgcttcaaggacattggtgagagtccaacagacacaatttatactgcgacagaacttcagcattgtaattatgtaaataactctaaccaaggctgtgtttagattgtattaactatcttctttggacttctgaagagaccactcaatccatccatgtacttccctcttgaaacctgatgtcagctgctgttgaactttttaaagaagtgcatgaaaaaccatttttgaaccttaaaaggtactggtactatagcattttgctatcttttttagtgttaaagagataaagaataataattaaccaaccttgtttaatagatttgggtcatttagaagcctgacaactcattttcatattgtaatctatgtttataatactactactgttatcagtaatgctaaatgtgtaataatgtaacatgatttccctccagagaaagcacaatttaaaacaatccttactaagtaggtgatgagtttgacagtttttgacatttatattaaataacatgtttctctataaagtatggtaatagctttagtgaattaaatttagttgagcatagagaacaaagtaaaagtagtgttgtccaggaagtcagaatttttaactgtactgaataggttccccaatccatcgtattaaaaaacaattaactgccctctgaaataatgggattagaaacaaacaaaactcttaagtcctaaaagttctcaatgtagaggcataaacctgtgctgaacataacttctcatgtatattacccaatggaaaatataatgatcagcaaaaagactggatttgcagaagttttttttttttttttcttcatgcctgatgaaagctttggcgaccccaatatatgtattttttgaatctatgaacctgaaaagggtcagaaggatgcccagacatcagcctccttctttcaccccttaccccaaagagaaagagtttgaaactcgagaccataaagatattctttagtggaggctggatgtgcattagcctggatcctcagttctcaaatgtgtgtggcagccaggatgactagatcctgggtttccatccttgagattctgaagtatgaagtctgagggaaaccagagtctgtatttttctaaactccctggctgttctgatcggccagttttcggaaacactgacttaggtttcaggaagttgccatgggaaacaaataatttgaactttggaacagggttggcattcaaccacgcaggaagcctactatttaaatccttggcttcaggttagtgacatttaatgccatctagctagcaattgcgaccttaatttaactttccagtcttagctgaggctgagaaagctaaagtttggttttgacaggttttccaaaagtaaagatgctacttcccactgtatgggggagattgaactttccccgtctcccgtcttctgcctcccactccataccccgccaaggaaaggcatgtacaaaaattatgcaattcagtgttccaagtctctgtgtaaccagctcagtgttttggtggaaaaaacattttaagttttactgataatttgaggttagatgggaggatgaattgtcacatctatccacactgtcaaacaggttggtgtgggttcattggcattctttgcaatactgcttaattgctgataccatatgaatgaaacatgggctgtgattactgcaatcactgtgctatcggcagatgatgctttggaagatgcagaagcaataataaagtacttgactacctactggtgtaatctcaatgcaagccccaactttcttatccaactttttcatagtaagtgcgaagactgagccagattggccaattaaaaacgaaaacctgactaggttctgtagagccaattagacttgaaatacgtttgtgtttctagaatcacagctcaagcattctgtttatcgctcactctcccttgtacagccttattttgttggtgctttgcattttgatattgctgtgagccttgcatgacatcatgaggccggatgaaacttctcagtccagcagtttccagtcctaacaaatgctcccacctgaatttgtatatgactgcatttgtgtgtgtgtgtgtgttttcagcaaattccagatttgtttccttttggcctcctgcaaagtctccagaagaaaatttgccaatctttcctactttctatttttatgatgacaatcaaagccggcctgagaaacactatttgtgactttttaaacgattagtgatgtccttaaaatgtggtctgccaatctgtacaaaatggtcctatttttgtgaagagggacataagataaaatgatgttatacatcaatatgtatatatgtatttctatatagacttggagaatactgccaaaacatttatgacaagctgtatcactgccttcgtttatatttttttaactgtgataatccccacaggcacattaactgttgcacttttgaatgtccaaaatttatattttagaaataataaaaagaaagatacttacatgttcccaaaacaatggtgtggtgaatgtgtgagaaaaactaacttgatagggtctaccaatacaaaatgtattacgaatgcccctgttcatgtttttgttttaaaacgtgtaaatgaagatctttatatttcaataaatgatatataatttaaagtt

SEQ ID NO: 12380 - DNA, 33 bp, Homo sapiens
gggagggcctcctccctcacatcccccgctcct

SEQ ID NO: 12381 - DNA, 2158 bp, Homo sapiens
gcagaatcagtgtttgggtcacccctccaggaatgatctcttcttttggcttccatgatggttattttcttttctttcaacttgcatccaactccaggatagtgggcaccccactgcaatcctgtctttctgagcacactttagtggccgatgatttttgtcatcagccaccatcctattgcaaaggttccaactgtatatattcccaatagcaacgtagcttctaccatgaacagaaaacattctgatttggaaaaagagagggaggtatggactgggggccagagtcctttccaaggcttctccaattctgcccaaaaatatggttgatagtttacctgaataaatggtagtaatcacagttggccttcagaaccatccatagtagtatgatgatacaagattagaagctgaaaacctaagtcctttatgtggaaaacagaacatcattagaacaaaggacagagtatgaacacctgggcttaagaaatctagtatttcatgctgggaatgagacataggccatgaaaaaaatgatccccaagtgtgaacaaaagatgctcttctgtggaccactgcatgagcttttatactaccgacctggtttttaaatagagtttgctattagagcattgaattggagagaaggcctccctagccagcacttgtatatacgcatctataaattgtccgtgttcatacatttgaggggaaaacaccataaggtttcgtttctgtatacaaccctggcattatgtccactgtgtatagaagtagattaagagccatataagtttgaaggaaacagttaataccattttttaaggaaacaatataaccacaaagcacagtttgaacaaaatctcctcttttagctgatgaacttattctgtagattctgtggaacaagcctatcagcttcagaatggcattgtactcaatggatttgatgctgtttgacaaagttactgattcactgcatggctcccacaggagtgggaaaacactgccatcttagtttggattcttatgtagcaggaaataaagtataggtttagcctccttcgcaggcatgtcctggacaccgggccagtatctatatatgtgtatgtacgtttgtatgtgtgtagacaaatatttggaggggtatttttgccctgagtccaagagggtcctttagtacctgaaaagtaacttggctttcattattagtactgctcttgtttcttttcacatagctgtctagagtagcttaccagaagcttccatagtggtgcagaggaagtggaaggcatcagtccctatgtatttgcagttcacctgcacttaaggcactctgttatttagactcatcttactgtacctgttccttagaccttccataatgctactgtctcactgaaacatttaaattttaccctttagactgtagcctggatattattcttgtagtttacctctttaaaaacaaaacaaaacaaaacaaaaaactccccttcctcactgcccaatataaaaggcaaatgtgtacatggcagagtttgtgtgttgtcttgaaagattcaggtatgttgcctttatggtttcccccttctacatttcttagactacatttagagaactgtggccgttatctggaagtaaccatttgcactggagttctatgctctcgcacctttccaaagttaacagattttggggttgtgttgtcacccaagagattgttgtttgccatactttgtctgaaaaattcctttgtgtttctattgacttcaatgatagtaagaaaagtggttgttagttatagatgtctaggtacttcaggggcacttcattgagagttttgtcttggatattcttgaaagtttatatttttataattttttcttacatcagatgtttctttgcagtggcttaatgtttgaaattattttgtggctttttttgtaaatattgaaatgtagcaataatgtcttttgaatattcccaagcccatgagtccttgaaaatattttttatatatacagtaactttatgtgtaaatacataagcggcgtaagtttaaaggatgttggtgttccacgtgttttattcctgtatgttgtccaattgttgacagttctgaagaattctaataaaatgtacatatataaatcaa

SEQ ID NO: 12382 - DNA, 1220 bp, Homo sapiens
gttaacctcagtcatgaagaatgcaaaccaggtgatggtttcaatgcctaaggacagtgaagtctggagcccaaagtacagtttcagcaaagctgtttgaaactctccattccatttctataccccacaagttttcactgaatgagcatggcagtgccactcaagaaaatgaatctccaaagtatcttcaaagaataaatactaatggcagatctgcgatttctgggtccactttctgagatgctttctaaaaccaaccaactgataaaaagtagatgagacttctccaagctgcttcacaagcaaactaaccgaaaaaccgaaaatatacaaacagcttcacacacacacacacacacacacacacacacacacacacacaaaggaagatcatcaatggctgcggtagcctagtaggaatggactatataataatatagcaggtgctcaataactgtttgttgcatttcagtaaaagcagaataacctttcaaaataataacaggctgggtgcaatggctcacacctgttaatcccagcacttcgggaggccaaggtgggcagttcgcttgggcccaagagttcgagaccagcctgggcaacatggtgaaaccctatctccgtgaaaaaatatgaaaattagccaagagtggtggcacatgcctgtagtcccagatacttgggagtgggctgagatgggagaatcgcttgagcccaggaggtcaagggtacagtgagccgaggtcatgccactgcactccagcctggcctgggcaacagagcaagaccctgtctcaaaataataataatatataattttacaccaaaagtttcaggaaaaaacgagtttgttggagttagtttatactttcacatatcaccacaaagatctccagttaaataactatcaatatccatttccattcatctccccctcaaatcatagcctaacagaacactttgaaagctcttttatttaatatttttttacatcctttgaagggagtgcttcaaaaatgaaagcatcagaagataaaatatttttatatttatgcatagcaagccttcgtgaacggaagtgacacactctggattgaataatactgtagcctcattcatatgtagttattcaaattggattaatgtctgtgtgagtttatttgaactagcagaaagtatctgaagatattcaggaataaagtttatacttaaaatagctt

SEQ ID NO: 12383 - DNA, 723 bp, Homo sapiens
caagctgtttgttcatctatatttagtttaaaataggtagtattatctttctgtacatagtgtacattacaactaaaagtgatggaaaaatactgtattttgtagcactgattttgtgagtttgacccattattatgtctgagatataatcattgattctatttgtaacaaggagttttaaaagaaacctgacttctaagtgtgggtttttcttctctccaacataattatgttaatatggtcctcatttttcttttggtgcagaaccgttgtgcagtggggtctaccatgcaattttctttcagcactgacccctttttaaggaatacaaattttctccttcatcacttaggtgttttaagatgtttaccttaaagtttttcttggggaaagaatgaattaatttctatttcttaaaacatttccctgagccagtaaacagtagtttaatcattggtcttttcaaaactaggtgtttaaaaaaagagacatatatgatattgctgttatatcaataacatggcacaacaagaactgtctgccaggtcattcttcctcttttttttttaattgggtaggacacccaatataaaaacagtcaatatttgacaatgtggaattaccaaattaaaagagaatactatgaatgtattcatattttttctatattgaataaacaatgtaacatagataacaatataaataaaagtggtatgaccagtg

SEQ ID NO: 12384 - DNA, 583 bp, Homo sapiens
accttgtgaaagaagaaaagataactgaatgaagcatttgagtataacagacactataccaaaataccaagcaactgttttgagaacccagacttaaaattttatgtattattaaatgttagataaatgggtagtaccatactacaaatatttaaatgcaaaattaccaacctatatagcagttttatttgccctataggttgcatactaacttaagcattcatgtcaccataaaatgcctttagcatttctcaatgactggatgggaaattttcctttattgcctagctgcttgtgtttgagtggttgtcctatgagcaatgcatttggagttcttcagctttcactacttctctgttgcttgctaatcatgtaactactaaaatactgtacaaaattgttttttcacactaacaaatgtgtatatggagaagagggctcatgtgatgatcatttgtgaacttagatttttgaggattatgtgactagtaataaatgtgaaataaattttcaaaaaagttgacatttgataatatttttaggtctatcatatgctgtcttctgtattaaagcaagttcttac

SEQ ID NO: 12385 - DNA, 2001 bp, Homo sapiens
aataatggctttcaatgagttcctatgtggatttttaaaagaacagaacagtaatgaaatatttgaagtacttgttgctgaaaatcatgaacatggacacaaattctacctctgtcaacttttatttaaatcagtgaatatgttaaaaagtttggtttaaaagaactatatctatatgtatattttcatatatatgacagaacaagaatatgtattaatagtgcctaatgtatctatatttttattattcatgaattaaattactaaaagtatgtttatactgtgaattaatataatgtattcacattattctttaataatctgtttattaataagccatgatatgtgtatgtaaatattcttacagtacttgtttttagttgtcatgcctatgtttagaccatatcttaatgtattcacaaagaattatcaactttgatgctatgctgtcatgcttaactttttcttcttaaaattattcatagatctactgtctgttgtcaaggggaatatattcaggtctagtcttcttataatagcagaggtcttggtaaaataactaccatatataacgtgttattgccatctagaagaactatgatgagaaagatacatttatatattatgtaaaatgttaactatcatcatatggactctatgtaacacaaattcaaaagcaaactaaaagctatatgcagagttttgtataaaacaatagaacagaaatttgggacatttttctaggaaataaaattcctcggtgtattaatctaaggtttcaaagtataaaagtatatggggtaggccgggtgcagtggctcacgcctgtaatcccagcactttgggaggccgaggcgagtggatttcctaaggtcaggagtttgagaccagcctgagcaatgtggtgaaaccccatctctactaaaaatacaaaaattatctgggcttggtggcgggcacctgtaatcccagccacttgggaggctgaggcaggagaattgcttgaacccgggaggtggaggctgcggtgagccaagatcatgccattgcactccagcctgggtgacagagtaacactctgtctcagaaaaaaaaaaaaagaaaaatatatggggtaaatacagtaaaacgttttgttaaattccaatatacattcagtgataccactctttttcttctaagcctgtgtgttataatttaccagttccccaaaatgccatttttaacgccgaactgtgtaatatacatggaaaacagctttttacaattaattttcaaagttgtaattttaaagaatttgggtgtatacctatgttaatgaaacaacagaagtacaaaaaagaatatcagatacaaaaatcaatcgtgaagaaaatctgttcttaatatatttcattatgattgaaaaacataaaaactaacataggaaagtgaatgatcagttacttatgatatattttgtttcctcttgtggtttaataaagtgaagtgtgtgtgtgtgtgtgtgtgtgtatacctgggggtgggcagtgctctttttctaaaactaatatggcttatatatctgaattatgccctttttagtgtgtattaggatgtgggctggtttgcttttctaccacctttgtaattttatgtatcccatctcctttgtgtgaattcatatattatagcaaaatacaagagacatgggactgtttgcaataccatatggaaatcttttaataaatatatgtaaataaaataaaaaatatttgtctccaccttttccccaaaagcaacagcaagacatattttgttagatattttatttttaatgttttctataatttaaaaatgtatagcctgccaaatgttgttttcataaccatgatattgttttgaaaaaattttatcttaaaatactgaatgttctgaccttttatagatgtttttgattttgttttaaataattttaaattatggagcttgacctagatttgccaataaactttctagcct

SEQ ID NO: 12386 - DNA, 1830 bp, Homo sapiens
gaaagaatgccattgaattttttaggggaaaaactacaaatttctaatttagctgaaggaaaatcaagcaagatgaaaaggtaattttaaattagagaacacaaataaaatgtattagtgaataaatgcttctctagatccatattaataaacatgagcatctaacccctcctttcttaggctagacaccaagatatttcagccagcctttatcattcctcttactttatcctttttccttaagtattggtggtcactactattgagtttcttccttaacactgattaaatgatcttaactccctcagctaaaactggcattactgactcccagctatatttctccagacttgcatttttttttttttttttgagacagggtctcactgtcgcccaggctggagtgcagtggcgtgatctcagttcactgctgctttccctcctgggctcaagcagttctcccacctcagcctctcgactaacagggactataatcttgcagcaccatgccgagctaattttattttttgtagagatgagctctcactatgtcacccaggttcgtctcaaactcctgaaccctagtaattctcctatctcagcctcccaaagtgctagggttacagacatgagccactgtgcctgtctagacttgtactttcaactgtccatttctccctgtctgtcccatgggcactcatgaaaaaacagaatgctcccaactttattcatcttccaagcctgtagctcttggtatactcactgttgcaagtcagaagcttgatttcatcattgatgtttttctcacgtttcacatctcactcatcaccaagtcatgttggtgttaatttctgattaacccttgaatttaccgtcttctcatcctctgtacaaaagcctcaagtgagggtcaaattcaacattatcctgatctagacagcccccattctcaatccacccttttccaagttgattgcccaaggacttctaacaataaactctcttttgcaccacagacttctttgaaaatatacatgctgttgaccctctctgtagaaaaccgcacacataaaacttaccaacagatttcattggttcttgggttctcccgaagcctatccatggtttatagattaagaattgatgaggtagctgggcacagtggctcacacctacgatcacagcacttcgggaggctgaagcaagcagatcacttgaggtcaggagtttgagaccagcctggccaacatggtgaaaccctgtctctactaaaaatacaaaaagtagccagccgtgatgacaggcacctgtaatcccagctactcgggaggctgaggcatgagaattgcttgaacccgggaggcggaggttgcagtgagcctagatcatgccactgcactccaacctgggcagcagagcaagactctgtctcaaaaggggaaaaaaaaaattgctgatgtgacccatgaagggaactcattttcctcgtaattttggactgccacacattggtacctttagttctctgaaggcccacgtttttatcattaagacctatttgttagctagtagagctttatgttcgctgtccatgaaaccttctgtaaccacagtgactacaagtagttctttctctattgaattattaggtccagaatagaagatgtcattgtacactttatttccctcacactgtgttatgctctgatgtgctatgcttagctatctgtcagagattagtaaattataaaactcatgtgtactacttaagtttatatcttatgctagtttataagaacaattaaaaggacttagaagattaactttggt

SEQ ID NO: 12387 - DNA, 1819 bp, Homo sapiens
tgagaatattcttgttgcaggctgtttttaaactagtgtcagtgacactaggaatataataaaggtaacacagcaagaagcacagaactactccctcttcatctccatattttcataatttcttgtgtttcaaatagggaaacatcttcctcaaagtctgcctagtgagatatggcctactggttgcctcatagctttgtacagattatgaggactgaaaataattgggcatttacccatcttggtatctgttgtatcctttatctgtgtgtgctgatttgatcttttttcagtttcacataccttatctaaggtttcccaggatttaaacagaaactacttctatgatttcagctggagtctgaagatacttgtttctgttcaagtcccactttaaattatgtcttaggagactgaaagtggaatcttctgagcattcctaaatatctgcttagaaatatcatgtgataaagagggaccttcttaatacactgatgttcttcactaaatggatggccacaagaaaaataaagtaaatgtcttaaataatttaaccataaattttctgtcatgtgatactggaatatgggatacttttcatgtttatatatatatatatatgtatatatatatacatatatatatatatataaacatgaaatatatatatatggctcctttgtgccccatgtcattttcagattatggtagcatgctgatacagcaccatgaaagaactcaaggaaaatatatcaatgtaagaagttcactcttagacccagtgttctgaggtcacatgggtttggactgtctcaatcagaaagattaatgactgttatcaagaacatgaacattggcttcctccatagagaagaaatcagtatctgagttgcataccaggcagtattaaaatctaacaggtctgtttggcccattgatagatactcaaatggtgtctccttctggttatggattttgaccattgattacctttctcaatgtaatgaagtattttacagtcaatttgtggtgtaaatgttgctcttgtctttccttgcttacaaactactttcacattgaacagctgtgagacagacatattgagatgcctgcccttgttagtattcattttatgctgcccaagatatcatttaatttagacttaacaagtatttccttgtgattatattactctgtccttgttaataaagtgctgctgtgtttgactctgaacatactaccaaaacttcttcaaagagttttttatgaaagactttcctcctttacaagaaagaaatggggtgctgcctttctgtttagtaaaagcagaatttgcagtggcatctaaagagatcttttttaaataaaaattatgtattgtggcataatcctttttttgagctctacagagaacagtcttttggtaatagtggcaggtatttattccttctgaatatataccccattataggaataactgttacttatttaggattccatcattgaaaattttgacccaaggcacagcagtgaaatttatagttctcaatttagttgtcattattgacaggcattggtattattagtcattgctaagcaactaaaacttcatcagttcaaataagttttaattgtcaaatgaagtataaacacatgaactttctagaaatatttcctcttttggataggtctttaaccagttcatatatatactttgtcaaatatatggatgtgtatgtgtacatttataagaaccagtatggatacatccattcactgtggtacattttaaaataaaatattttagcagtgaatatgg

SEQ ID NO: 12388 - DNA, 16 bp, Homo sapiens
ccaggactcagcccac

SEQ ID NO: 12389 - DNA, 21 bp, Homo sapiens
tgaaactttgaacaaggtttc

SEQ ID NO: 12390 - DNA, 180 bp, Homo sapiens
ctattttacaggagtcaacaagataattaaatatcttggtgtcttgtttctattgtgtggctttttaaaaatgacaaatatgtactgtgttgtgataaaaagtattttatttgtttaatgatatgcatgcttttcttctgtaaatatataataaatttttgtagatagtcttgatgtgtg

SEQ ID NO: 12391 - DNA, 2280 bp, Homo sapiens
ccatggcaatagttacagcattgccagcggcgaatacctgagcaactgtgtgcaaatcatagaccgtggctataaccataacgagaccgccctagagaaaaagattctgaaggaactcacttccaactatatcccttcttacctgaacaaccatgagcgctccagtgaacagaacaggaatctgatgaacaagctggtgaataaccttggcagtggaagggaagatgatgccattgtcctggatgatgccacctcgtttaaccacgaggagagtttgggcctggaactcattcatgaggaatctgatgctcctttgctgcccccaagagtatactccaccgagaaccaccagccacaccattataccagaaggcggatcccccaagaccacagtgagagctttttccctttgctaaccaacgagcacacagaagatctccagtcaccccatagagactctctctataccagcatgccgacactggctggtgtggccgccacagagagtgttaccaccagcacccagaccgaacccccaccggccaaatgtggtgatgccgaagatgtttactacaaaagcatgccaaacctaggctccagaaaccacgtccatcagctgcatacttactaccagctaggtcgcggcagcagtgatggatttatagttcctccaaacaaagatgggacccctcccgagggaagttcaaaaggaccggctcatttggtcactagtctatagaagatgacacagaaattggaaccaacaaaactgctaacaccttgttgactgttctgagttgatataagcagtggtaataatgtgtgtactcctaaatctttatgctgtcctctaaagacaaacacaaactctcagacttttttttttttaatgggatttttaggtcagcccaggggagaaagataactgctaaaattcccctgtaccccatcctttcttgtcctttccccttcagatggagacttcattatgttaatgaacaagatatgaagaaaatggcactcattgtggccttgttgaattatgttgtgtatgttttaacatctctgatgctgtgttactaaaattacaaggacctgctttttaaaaggccagaacaattgtctgaaattagtaacaatgctgcatctagattggagtgctgcacaaacaaacataagagcaaagcaaaactgtatcacatagggtttttggtcactcacaacctgaattcaccacagctggaatagctgtggaaaacaaaataaaacaacaaaattaataatgaaatggaggggaattctagaattatatgctaaatgcatattttatgatttgctgtattaactgatgataaaactaatggcagaaaaagaagttgagcaatttctatgtaatgtacagatactagcattgcacatatagtctgctttctgttcctccagaatttgagtcctgttaatgtagtagaaaaaaaaaaaagaaattttctttttcttttgtgctggtcttgcaagtttgtctaccagtaagagagcaaagtttccttcctttcttctctttcttcattttctttttttcttttttgccttttattcctttaaaatttcgcctggcaaaaaataaataaatggaactatcactttataagaatcattttctagtaatgcaaacaaattattttttacaaaaaaacaaaataaataaaattagacttccttccctcactatatatctttatgcagtcagaatatttccaacagtgttttttgcaaattagagcaggacaaacttttatgtttacagggcacgtctgttgtaatgcaaagcatatttggcaagcagttcatcaccaggacactagctatgattctagaagtcaaaaggtgtctatagaactagtggggcttctgcatgtgaaaaacggttttccataggcattaaagtgctgaatgctcagtctgatcaacaagtgggcacctgcactaccactttttagaggaaattcactccctcgtaagcattggaaggtcaaattattttgaagtgatttttttaaaaaaaagtcttctgtttattaacaggaaaatttatttatttgacaggattttgagtaatgtaggaatacaaaaggtaaattagcagcacatataatttttttttaatttatgatccattttgtatggtctcaaagttggatgacctcattactaatatttgttgtaaaagtgaaacttgtttgccaaccaataaacaactgattgagatttagaagatattgt

SEQ ID NO: 12392 - DNA, 541 bp, Homo sapiens
aatacaatgtgaaagctcctttgtatatcttggtaatttatattttcaaaacgaagttcttacttttaaagagaattacctatattctcctgatactgattaccaagtcattcacctgaacaccagaattagaattaaacattgtaccatacaatttcattatcttatcagaatgaaaccaattcacagggaaactagagactacggctgtggtggtaacctgcagatatacacattcccatgcactgacataagttgaaaacacatagtactttctagatggaatttttttctttaggcctcaatgaaatacatttcccctatataattccaacagcagtttctctagttctaaattttaccaattcccaaaaaacctaagttttgctgaaatctgatttgaccaatttatcaaatatgtcattttaattacctagctggaagttagagacatgaaatgtactagaggagcccttttccaatggaaatattatataccacattttttgttaatggaaataaatgtcttcattcccatgtt

SEQ ID NO: 12393 - DNA, 799 bp, Homo sapiens
gagagaaaagcctcatggaacagataacatttttttttgttttttgggtgtggaggccatttttagagatacagaattggagaagacttgcaaaacagctagatttgactgatctcaataaactgtttgcttgatgcatgtattttcttcccagctctgttccgcacataagcatcctgcttctgccagatcaactctgtcatctgtgagcaatagttgaaactttatgtacatagagaaatagataatacaatattacattacagcctgtattcatttgttctctagaagttttgtcagaattttgacttgttgacataaatttgtaatgcatatatacaatttgaagcactccttttcttcagttcctcagctcctctcatttcagcaaatatccattttcaaggtgcagaacaaggagtgaaagaaaatataagaagaaaaaaatcccctacattttattggcacagaaaagtattaggtgtttttcttagtggaatattagaaatgatcatattcattatgaaaggtcaagcaaagacagcagaataccaatcacttcatcatttaggaagtatgggaactaagttaaggaaatccagaaagaagccaagatatatccttattttcatttccaaacaactactatgataaatgtgaagaagattctgtttttttgtgacctataataattatacaaacttcatgcaatgtacttgttctaagcaaattaaagcaaatatttatttaacattgttactgaggatgtcaacatataacaataaaatataaatcaccc

SEQ ID NO: 12394 - DNA, 799 bp, Homo sapiens; identical to SEQ ID NO: 12393

SEQ ID NO: 12395 - DNA, 23 bp, Homo sapiens
ttatatctgagatttgaagctgg

SEQ ID NO: 12396 - DNA, 250 bp, Homo sapiens
ttatatctgagatttgaagctggaaaacctgataggtgagactacttcagtttattccagcaagaaagattgtgatgcaagatttctttcttcctgagacaaaaaaaaaaaaagaaaaaaaaatcttttcaaaatttactttgtcaaataaaaatttgtttttcagagatttaccacccagttcatggttagaaatattttgtggcaatgaagaaaacactacggaaaataaaaaataagataaagcctt

SEQ ID NO: 12397 - DNA, 240 bp, Homo sapiens
ttatgtctgacatttgaagctggaaaaccagatagatgggttgacatcagtttattccagcaagaaagaaaagattgttatgcaagatttctttcttcctgtgacaaaaaaaaaaacttttcaaaatctaccttgtcaagtaaaaatttgtttttcagagatttaccacccaggtaatggttagaaatattctgtggcaatgaagaaaacactagggaaaataaaaaataatataaagcc

SEQ ID NO: 12398 - DNA, 374 bp, Homo sapiens
tatgattgaaaatttcattctctgaatttctcctctcaaggaaaaccatcttatctgaagactggactgttgttttagaatagtaaaatcccatattgaaggaaattgttctttttgagttatctacttaatagcatatcattctttttcttaagctaaattttcctagagagtttattgtctaaatttcagttgtgtcttgccatatggagggcacctaatcagagggtattaaagtgtttactaagttttctagtggacattttgtttaaaaagtctttgaattgccagttctgtaagtgccatcaattaaaatagttttgtgcagtgacagagattttcttttttcttttcaataaattacactttaaggc

SEQ ID NO: 12399 - DNA, 268 bp, Homo sapiens
gcttgattggcaaatacgacttctacatccatattctcatctttcataccatatcacactactaccactttttgaagaatcatcaaagagcaatgcaaatgaaaaacactataatttactgtatactctttgtttcaggatacttgccttttcaattgtcacttgatgatataattgcaatttaaactgttaagctgtgttcagtactgtttctgaataatagaaatcacttctctaaaagcaataaatttcaagcacatttttacat

SEQ ID NO: 12400 - DNA, 264 bp, Homo sapiens
gtttgactggcaaattcgctttggactcgtgtattctcatttgtcataccgcatcacactaccactgctttttgaagaattatcataaggcaatgcagaataaaagaaataccatgatttagtgaattctgtgtttcaggatacttcccttcctaattatcatttgattagatacttgcaatttaaatgttaagctgttttcactgctgtttctgagtaatagaaattcattcctctccaaaagcaataaaattcaagcacatt

SEQ ID NO: 12401 - DNA, 262 bp, Homo sapiens
gtttgactggcaaattcactttttactcatttattctcattcatcataccgcatcacactaccactgctttttgaagaattatcataaggcaatggagaataaaagaaagaccatgatttagtgaattctgtgtttcatgatacttcccttcctaattatcatttgattagatacttgcaatttaaactgttaagctgttttcactgctgtttctgagtaatagaaattcattcctctccaaaagcaataaatttctagcac

SEQ ID NO: 12402 - DNA, 3915 bp, Homo sapiens
atactgatgcagaaataagtgaaatctacaaaagttttctttcttttccaaagactatttcattctgttgtattcagagtattcatctcactacattgatttgtttgtggtagtttttccttggacttaatttatattgaaaaaacattgataattaaataaataaaatagataatttagaccaatggtgataaggtctggatgaaaactacgctatggaggactgaaatggcaatcattcagcctagcctggagtctgattatacagctactataggatgatgttagtattggttttgagtgcaataggttttttcctaaacaaacatattttgtagtcaatgaactttttgtcacaaaacagtaaaacatctgtgtttaacctatggtaaacaacatgttaatgaactatgctatccatgacttaatggacagttcaaatgtgacatctacagtttttcatttctcttttatgccagcacacaatcaattcatcaccaattgtcatttgatttacttcaaaaaatatacccccaaatcctaatacttctaaccttctccactgcatctagccaactctagctattgtcatccctaacagaaatggaggaatagcctctttttttttttttttttttgagacgaagtctcacactgttgcacggctgtagtgcaatggtgccaactcagctcactgcaacttccacctcccgggttcaagtgattctcctgcctcagcctcctgagtagccgggattacaggtgtgtgccaccacgcctggctaattttttgtaatttagtacagacaggggttccctatgttggccaggatggtcttgatctcctgacctcatgatctgtccgcctcggcctcccaaagtgctgggaatacaggcgtgagccaccgtgccctgccagaatagcctattaaccagtctacctgcttccacttttcctccaccctgatcacatacacacatgcattatccactgagcagtcacaatcagatgttaaaccaaacattattcagataagatctctgaaaagcctctgatactttctcttttaaaatggaatatattctaaacacctctccaaggacacaagacttaccttgtctaactaatgacttttctaacttcattccctatcattctccatcttgccccatgctcctcatgcagcagcttttttttttttttcctttttcaaatatgttggttttgatcttatccaagaacctttgccctgatgtatgaatgactaactgcttttctacttcgggggtctcatatagaaatcctgcttcagaatactcttccctgagcactctatctaaataaatccctcttctgcaacccagtgctttttgttctattactgacttcttttccttgtagaagttactattactgctttttacctttttatttatttgtgtattgtctttgttgttgccctcatcttatctccacaaaaatatatgctccataaaaacaggcatttctgtgtcttattcagcactttatcagggcctataacaatgcctgggacatattcagtgaccagtgaatatttttggaaggaaagaaaagaagaaagaatgaagtaacaaacaaagaatgaaggaagaaaaaatttttacaaacattcaacatatttttattttgaaataattttgtatttttccctatatcctacattggatcagaatattactgttatgtatagccatgaggacatggtctcaaaaaatgagaaactttcttagacagtaaaattgttaacttgagatgtttgcttccatcttctagagccaagtaggatctaactttaatttgacttagccaataatctgaaactattatagtatctgtctttcacagatacatgcaatattcacttctaaatatttaatgataaatttgtaatcatacatgatagtcaattttaatgattatgttgtcaaaattcaggctttttgtgtgaattgaagacttaaagaagaatttgtaaatatgactgtataagaaacaacagaaagatgaagatgaaccgaaatagaaatatcaagaggctacaaagtcttagcaaattataattgctaatggtacattatgtggtgtttagtatcacatttagaatgtagtcatttgttaagtttttcatggggtaaaagaaagaatttattccaagaaaattttggaattttaaaaataaacatgacatcttatcatgagaaacatttacagtttttgcttttactacaagatactgtgaaatgttctgctctgtcagttgtgaaagtatgaaatttaagtctatcactacaataatattttgtttttagtgttcatttttttcctcctgactacattgagatgagttagattgagtgaaaggtaaacactaacatttgaattgaggtaatttccactgtggaaaacaaactgttgttagtaaacaggcatcagctttgagacacagaaaagtcatccaaaccagaagattgggaacttcctcaattactttgtcttccatttattgcattcaattagtcaaaaatgttgttaattatacattttaaagactatttttggtaaggtctatgacacattcaaaatactacatacaagtttgtattatcataaataatccaaaagaaaacatacatgtaaccaccaccatctggaaatttcacactaaattataaaacatttccatcactgcatgtattgtttaatgtcgctttatgaatccaccttcttccttatctgtagagttaaaaactacttagtggattagggtaattcattctacttttaaaaatgatttttccacctctaatgtattctataaaataatattgttcacttttgcctatttttgagctttttatagaaaaatgctactgcgaaattattttgagtcatatcttttgatcgatattaagatacatttgcagagttttgtatgtgtgtttatatccatcttacataattctttactgtatagcgttccctttagccactggaaaatgatataatgtcattgcttacagaaggtgactgattcttattcagtgctactttctacagacaggtaactattcgcatttacgattaagaaatgttcacaccttcacactggtatcaactgcaacaaccactatacttctccagtgattgccagatggcccactatacatcctttcttctatttctttcttttgtggccagaaagtcaggacctcaaagaggtataagtttgtgtgtataattccctggcttttttctaaaattttagtatgcatttatgtggcacttaatatataaaagagttttatgagttttaaaaatgtatataaacaagacatataataaatggtatgtcatttcacaatttactatttttactcaacatttatatttctgagacttttcacatttttgaatgtattcatagtttcactttaattgatgtttgccatgaaagatcaaatatatcacattttatttgactaaaaagtaaactatatttcctacattatgctatagaacttatagactaatttaagttaattataggccttatctcagacctttgcaagtagcctgaataaaacttttcattatttatattatcacatgcatatatgtgtgtatgtatatatgtgtgcatgtgcatgcatagtaaaaatcttaacccaaaactgaaataaaaaattataagagaaaatactattttccaccaatatcacaatggataatcttttttaaatgactacatatgtcgataagttacaaaatccatatatgagtatgacaccaataagaacattttctctaaccattttgaatacgaataaccatggattctaatagcaaacattattaaaatattattgaaataa

SEQ ID NO: 12403 - DNA, 401 bp, Homo sapiens
ggaaaaagatgtggccatgccttggatataattttaggctattagcttcctcaatactagtatcagttctttggaatacatgaaatatcttgactcttctcctaaatttgtttttacttatacatgttattaaactctttaaatatgtcatagaaaataatacaatcatgtaatgagtcttgtcttacaaaattatatgtctcttcaaatatcctatcattgtataatatggaatataataacacagaataaagctagtatcattaaatcaattggataattgcattagtaaatgatgcctctgcaaaatggtagtacccatgaagatatgtatattgtcattggatgtatgatgagtgttgtgattggaactgatgaagtaaaataagtatctagatttg

SEQ ID NO: 12404 - DNA, 165 bp, Homo sapiens
gtcacctgaaattgaaattgagccacttccttgaagaatcaaaattcctgttaataaaagaaaaacaaatgtaattgaaatagcacacagcattctctagtcaatatctttagtgatcttctttaataaacttgaaagcaaagattttggtttcttaatttccac

SEQ ID NO: 12405 - DNA, 167 bp, Homo sapiens
gacttgctgaaaccaaattactacttcacactctccttcagccatttgtctgccttcagtcaacagaaaatgtgattttcacagattcagctcttctctccttacattttacattcatgccacattcaatattttgattcttgcacaataaagccaactgattgcaa

SEQ ID NO: 12406 - DNA, 150 bp, Homo sapiens
gtcttaaacactgaatatcacactcttcttatgactcttgttagcgattcaaggacataaatcttcattcttttctggcacagactacttaaatgggtctgttttcactttgctcatttttcttcaataaatctttttggcaagcaactg

SEQ ID NO: 12407 - DNA, 112 bp, Homo sapiens
atacagacaactgcaacaggtgccaccacccacaaaagacaacactaccctcgtaactactgcttctactacccaaaaataagaatttcaacactacttccaagagactttt

SEQ ID NO: 12408 - DNA, 394 bp, Homo sapiens
ggtccaccactccatcctgatgccccaggttatccacagcctccttcccgaccaagaccctatccacctggacctccatttttccctgtaaattctccaactgatcctaccctccctactcctgcaccccaaatatgaacaactgcagcaggtgccaccaccaccacaaaagacaccactacccttgtaactactgcttctactacccaaaatatgaattccaacactgcttccaagagacatttacataaaattgcttccatttttggatgagaatgaaaaattccaaaagtgctgagctttggggagaaataatcttagaaagaaattgtagaaaaaacccatgcagacataacatttataccaatgaggcaaaaataaagaattgagcacc

SEQ ID NO: 12409 - DNA, 118 bp, Homo sapiens
acatgcaataaatgatattttccaaactgctctgatatcttagaagaaataaactgcaatgattttgatggaaccaaccctgatctaaccagcacactaaataaagtatttgagcaat

SEQ ID NO: 12410 - DNA, 1118 bp, Homo sapiens
tatattgtatgttgtaaagtgttctgtcatttacaagatgtgattcatgagtgcagaactaccacctttcttttagcaccaatcccaacatgaaattatattactcagatttaaagcactatcattaatctttcaatctaattattcaccaccacaagacctattaacaagacaaaatgcctctatcccacaagccagatgcaggtctggggttcaaaataactctttggatcctacagagatagcctactgagggcaaagaaagtccttagataaagagagaatattgtatgggccatcaaccatttacttttccctgaatgttagaaactacaaaaccactaccttgtacccccatcaaaatcccacctgaaccatctaatcctataaacataaaggggtaaaattggaactctccagatgaacaaagacatctaaatatctgtagatagaaacatttatctatctaaatatattgatagacctgtcattgtattgattaatgacaaaaccctttagataattatcttccattttaaataaaattttatttcacaaatatgagccaagaaagaggaaagttgatttgaagtgaggattagaagtgaatgacaataaagtctgtcagccaagcacgaaccaagactggcactatttttcttagtgtatataattgtttaaactgcaaggttgacatttattgtgttgtgtctaagttaatttcgatctaatgtacctgattctagcctctgtgaacaacaagaatatgtttgtgtatgttcacatggtgcttataatatttcactatcaattcaattaattcacataaattccatgtgaaatgtattcaacaatggaatattttctaaaacatttagtatacatttgaatgtattttaaaccatgccaaactactgctttaatgtcaagtttgcagaattgtctctgaaaataaaaaccctgactttagttgtaaaacaataaaagttagctacttggtatacggagatgttaatttgggatatggaggcatttttatcttctgtcactactacttaaaactctgatgattatgttagatttttttgctaactaataaagatttcaaatggcaattt

SEQ ID NO: 12411 - DNA, 277 bp, Homo sapiens
gctgtttcaaattttttcaactaagctgcctcgaatttggtgatacatgtgaatctttatcattgattatattatggaatagattgagacacattggatagtcttagaagaaattaattcttaatttacctgaaaatattcttgaaatttcagaaaatatgttctatgtagagaatcccaacttttaaaaacaataattcaatggataaatctgtctttgaaatataacattatgctgcctggatgatatgcatattaaaacatatttggaaaactg

SEQ ID NO: 12412 - DNA, 555 bp, Homo sapiens
cagctctaagatattagctactttctgtatgcacaagcttcccagctttgtccccacagtgtacctttttgctaaaacacttattacccttctgcagcaaaggcattaaaagcgctaagcatatattaataaatgcaagtggctagaaatagtgtaggtccccttcttgctttcaatatcttgttgaaataaaatgtgtcaattgtctctgtgatttagaaacactattaataacatcagagcaaggttctaagggtctcagcatttgatcatcactttttcttagctgtcttaagcattatagaatttctcttaccagcatgacactattatattcaggaaacatggcactgcttttttctctaagcaaaggcaaatatcctcataattctaagctaattcatttaaactttattaaatggggattggtggaaaactcctgactggtattactgggtttggtataatttaatttaaaattctcatttatagagtattttatttaatctagtataaaaaatctagcctattttaaataaagaatttttctcactg

SEQ ID NO: 12413 - DNA, 1964 bp, Homo sapiens
gggttatccaaccaagcattcttggggaaagagaaatcactgacattctataccaatggttcccaaaattttttccccaagacttaattaagtgtctgactgtcttggtgatccttaagttttctcccctctcagcaataggagtagcgacccaggtggagctgagattaggcctctggggatcaccagatctagcactttcacagattagtgcagaccttaaaaaagcaagaaggccatgaccatccctgcctcgaaacttgcaagtcacttgtctgagttagtttccttttgcttgatgacttcttttgctctcaaagttccatacttgcaaaattggtttttcaagactgaaaggcagattaactttccattctacttatggagatccacacatcagtatagtcctgatgcactgtacgttttttgcttgtgttgatcttgtcaggtttttttcctactcaatattctcttcaagcattttttttcttccactgccactctctttacctttatcatttctttttcttagctttcttccttcttttctctctccctcaaccattctgtatttagctttctaatcctcatctttttctctctgtatatcacttcttacatattaaattagctattttaaccatttctagtctcttctttatgtctacctcctccattatgtcttcgtctcttccaacctatctgttctgtctcccaatgtaccacttatcaactaatccctctcctctctgattcctttcttcccttcaatttatctttttccctgttacaccattttcatcttaagactgcatgtcactctcttcctttttgtatccactctccaaatcgtaccctaaatttttcttgacccagcttaaccatcattacagaatatattttggaaatggtagacactgatagctactttgtttttagttatcttagggtctctaccaagtagacacagttcagttagagagacgtatttaaggagaagggaaggcaggatacccagaactagcagcctagggaaaaggcttaggaagatggagaatgaggaactgaagaaactgccgctctgagactgcacatccaggaaaaaagactaggacttgccacacactgccaattcataatccgcaggatctgtagaagacattttgggaaacactgtcttaaataaaaactcaatgtttagttgtttttttttttttttactagttcagcataagggattctaccagtatgtgctactactaacattcttcatgtccatgcagaattacttacagacactctttcttggtatcttgaataaattgtgtaaattattttgaaaagtggatatttctatatgccttgcttataatacatcagggattattattcttattaataacatgttggcctattatctggatgtcccttgcctagagcaggaaaaaagtctcagaattacctaaaaacatactttataactttaagagatttcttaggatacatcttcaggggcagatttcataacaacatctcaaaaatttggggaaacacaacgttgaaaacttcctaagaaaaggaatcttgcccttgaatcttctgaagtacctagcacagtgtcttcaacatagaaggtacccaataaatatatatcaattcattttttaatgactttcaacactcccatgaaaacaccgtagtctgcttttcctgaaaggtgactgtctaggatgctgaatgagccaccactccgtagctttatatattcagcaacatttccatcatagaatttcagcgttagaagggatcttagaggtagattatccaggccatcccctactgcttacattcccctccccctggccagttttatattttaatcacacattgaaaaattcattaacttattctgtataaaactgtcttttaagaattatcctttcaaaataaaaatgttattgttt

SEQ ID NO: 12414 - DNA, 433 bp, Homo sapiens
agtttttgcttagcataaggtttttggcagttttggatcaataaatttttacttttaactaaagtcattgtattaatatataatactttaaattttaaaaattcttgtccacaaggaaatttgtctgggttattggacaatttataagaactatgggagcaatatgaaggtgcttgagaaaagagatgatgttgaagttttccaatattctgttgaagttttccaatattaagtattagcttagggaaatttcacagttcattgtggagtgttaaacttagaacatgtgtaacttttcacataaagagaatgcatctttgacagttatcttatttgtaaggcagcctataaaatagttctgaagtattttatttacctaactataattattgggccagatacttgttaataaatgggcttaatgttaacatgg

SEQ ID NO: 12415 - DNA, 2258 bp, Homo sapiens
gcatttttaagttggtcacgtcgcaagtccgatatcacaacttaattgtaaaaggaagaaatctgaaagttactacatttaagctctgattctatataaaatgtcaccaaaaagttgactttgaatttgttggacttttaaaaaaccagttggaaatataggttgggtttttttcttattgttttctccccagggttagaaaaattggtataagttcctaattaaaagctgaataaactttgagaaattatttctgagttgaccaataaataaaaataccactttctttaaaaaagcctagggaattgaagctctgtacatatactaatgatgcctttacaacccagtccttgataataccagattctcggtgcattgttcatgtctgtatctgcaagcctgttctgccattgcagtgtgatgaacctagaggtaactaccatgtgaacttgaactcttctaaaatagttctgtgtctcttagaccatgaccccttttcacttttgttatataggtttaatccccaagccaaggatagtacttagtatttcactacacttctattctcagtaaccaagattgcttgcaactttttttgccttggtgacttttgaaaaaaaaagaaaagaaaaagcagcatccttatatttctttaaaatacatagaaataaagttagtaattaggtaacctatgataacataataatgtggacgcctggggaaaccctcctcatgtttgtcatcttctacctctgccgttttcctgcaattccgcttcctacttaggcagttcagagagaacaattctaataaaaacactcctctcctattaacaaaaaatgatgcagtacccatttttcgtatcctgcttttcttatattggagtaaaaaggacagggtatagacatgaatgatgatattctgcctggcctgtcatttcttacctggaaacatttacttaagagtttctgttactttttgttcagatggggatttgctaaaggttctgggaagctaataattgaattattagaaaaacatttcagaataggaagtaaatgataaacttatattctttattattatttagtacaaaaatagattcccagtagatatccacaagcaatattagcagggcttctgtttctaagtgaccacagactaaccctttctaggctttaacattgtaaataatcctataaacagtttgattttttaagatgatttttgatttgaagagacaggctttacataagccttcattccttcaaaaggtcctgacaaaatacttgggtttttttctctttttttcattctggtatgctttgcagcatttcagctgctttggtggggacacagataaccccttcgcttccagctcttaaaattctttatctttttcttggcaaaaccagaattaagagtgtaagatagattccatgtgtgcttatataggtccctgcacagattggacttgaaccaaaattaagtccaaagaacatatgtttagaccaacttcatggaagtggaagatcctgtgctcttgaacttattttaattcttataatttgcacctatataaacaaagctcctactgtattcttctcttcatcaaccttttgtggtgatgggttgccttttctacgagcatttggaaggagtgatcaaataccgaaattgaactttctaaaacctacacatagcatgcgtttaaattctattatataaagccccaagtgctttaccttctaaaacatgcttctctataggtgcaaagttataagatatgtagaagaaaacatccatcagaatcttctggagaatatggtcagagtcttaaacaggcccagtgctgagttctttgtccacttagtcacacatcttttgtgggaatgggaaaggaaggagacagccaaactctgacaaaggcttttccttatagaataacccaaagcctaggtgagggttgatatataatgtcccatgatttaatatatgtggtttgggggaaaggacaagaaaaaactataattccacatataagaaggtagttgcccatttacaagttccagttatgtgtgtaaaacagaaaaattaagtaccaaacctattaggaaatttttttaaaaagtggatttaacttaaattactgtgtacttgaggttggctttggatatggattttctaaaaagtgatgttttattgtttatcatctaatggctgtaaactgtagtactagaataaaaaaaatggaaaat

SEQ ID NO: 12416 - DNA, 545 bp, Homo sapiens
gactggaggccaagacctggaccaaaacgtttatgcaggctcctctgtacctgtgttttagctgtcaggatctcatagagcccagttcttagagtcaactaaagagttgataggaatttactaggtccagggagaaaaggcagtggttggggttactggaaattttgctcattttctctaatgactgtatgaataaaagtgaacttacttgagcctttctcttctaaatctaaacaacctgatattgaaggtttgctttatagcatatctttggaaaggcaactcatttttatgattagtgatactggggtggatttaataggagagagaatccaggcagataagaataaaaaggaaaatgatcatctccttctatagcatttgcagattcaagggggagaggtagatgctgagatcaaaatgacagttgttacttatttttccaggtgctgttagtataaacattgtttcctcttcacccctgctaactacctctttaaagtatttctaccaaactgtgaacccaatctcagggaaaagaaatt

SEQ ID NO: 12417 - DNA, 6116 bp, Homo sapiens
aaggatgcagagctgtgcaaattgttcctcaaatgaagcagtgtggagtgtattggggattttgttatattttgtttttatctggattgtttttgtcctaggtttgggggcgggggcttgtttgggttcctttttctttattctgattatgtgaaaccatattctattgctaggggaagccaagaaccattctctatacacttgataagggtaaatttatcttagtgtttttaaacttggttttggttacttgaggagttttttaataatattgtgtgctgcaagaaagtgcttgttgattgaactgccgatggattggtttctgtgtggtataaattgtggcccatttatgaagtccccaaaagagttatgtttttaagtgccttggcaggctcacttctgaggtgcaaaacatagatatagaactgaacagggcttgaaacaatattaggattactacccagggcacttactggtgcatgttgtaacatatctatgataaaagccatagtttacctaaaatggtgatttccagcctttactgctttgaagaaacagaatttgtaaaggtatgcatgtagaacataaaaaatatttcttaattattttttatattgatggtaatatattacgttcaacaatgcttaaagctctacaagcaggtcttttcccacctcttgatatctgtgatactgaaacttgaggatgttgaaatgtattacattttggcttctttctacatgttaactgcactgtagatgtaaaaattcaggttatatataggattgccatcttcagaggtgatgctgaactgtgaggtttcctagtaattgccaaatgagccgtaagtctgcagaattcccttctactttgaagagaaggggataggaatgtatatttggctgggggcatggagatgttcgtatgtatgaggagttagggatggggagtcaagttctagaaagttttgtctgaaaacctttgaatagaatggcatgaagattttaatcaattacttataaacaaagtcttagagacttccttttaggaatcaacttccatgagaagttaaaaataaattattaattttaggtacagacattaaacatggaatttaaggactgttgggggaaattgatcacttcttagcatttccattcagtgaatggagctgatgtttgcctgtcattttaagatgataccataccttctttggttattataggtccagtttgaagcattctgacttctggtttttccaccctgaaaggaaatgtttttctttgcagcagtattagataatgaaaaatgctaattcagtagttattaacttctaaattttattcgccatgactttctagtgaattattaccataaataacaatttcagaaacttagtttttagaataaatattaatttttccacttcagttttattctagaaaataccctttttagaaatccagttttagttttgtcattttcgataaatctttcttcagttagaaatatatatccttccttcagttgaaacatatacctttttcacatctaggaagaaatgcttgctctgaaatagtatagattaaaaacactcagtagaaaagaatctaaaattaaatgaatttgttttgccattaaagtagagcagtgatacaatttaatgccattacaattatgttgactagaaactgcctttttctccacttcatttctagcaattatttaccaagtaccaacagtagaagtaacaggaaagcctggcagagttaaatatcttggacatttattggtaaagcttatttataaactgcagtcagagctagttaatttccttaaatctttttgtattcagatagataatatgaatcattatgggttgattcagaaataaaatttgtgaggtgattttgaatcttgtccatataggaaaatgaagcacagaattactcagtcttccatattgtatttgacttcatatcaatctagtaaaaaaggagttgcaatagccaagtatagagagaatagtgaaaaattaatcttgccctttcaagccttatacagtagtacactgtacttgtttttagtagtaagacctactttcccactatatgtagatagtttgttttcactgtgccagaatctcaggtgcctgcttagagtatttctttaatcacagtcactgggaagtaaggagatgtatatatgtgtatatatggtaacaaagcatagcagttctctaggggagaggcctggcattgcacatggtgttacatggctacaagtaaggaaaaaatcagaaagtgaaagaactgatgtaataaaaggttgatttggttggttcccatgaaagttagtaagatgcccttttaaatataaggatcagtgctttgttctgcagcagagtttgctgataaatgtctgttggattctttttggatttctttaattaatttgtaagtaaccaagataattattttcccccttgctctctatattaatacgtagctataaagcaacagttggttttcttatcctttgataaaagcatcccataaaatataaagtagtaagttaacatagtattattgtcacacacaatgctttttttggttaaatgttgatacgaagcaatgttttggaattactttaattgatggagtagtggtggtagagagaaattaataacaaaaagagtgaaaatattttaattagcagtagatggtgctactggctttcatttgctgacttgattattccctttctcttaaaaaccatggcattagactgcactaaattaacaagcatgttagttgctggtagaggttttggaggttaatttaccttaaattggaagacttttaattgcagtctctttctaccttccctctgttagtcatttgtaaattctaaatggtcaccataaaatgtattaggtaggagaagatacgttttatgtataatatatctcagactgagttactgcctgtcttatcaggatggataaaacactacagtctcttatcaggaaatagagatgatgtggatatttatatattacatatataaccaccagactccattttatatattagcattttccttgcttatgggaaaatagcaaaacaacatttcatttatacttttgtttacccctctctgagacaggttttgataaccactgaaatggtagaatatgtgagatacaaatattgagttgtagaactttctttttaaggtgaataagtcatgccttaacatccaaataagagttcatcttcagagtggttcttttgggagcactgtttattccagctatactgcaaaagtataatgtttttggaactgttctagagcataccatgaaaagcagtttgttattatgcaggaaaatcagtttcatcattttagttacactaaacacttttggcagcttaatatgacctttttaaattttttttattttttttatttttatttctttaagatggagtcttgctctgttgcccgggctggagtacaatggcatgatctcagctcactgcaacctccacctcctgggttcaagcatttctcctgcctcagcctcccaagtagctgggattacaggcagcaccacacctggctaattttcatatttttagtagagatggggtttcaacatattggccaggctggtctcaaactcctgacctcaagtgatccgccctccccagcctcccaaagtgctgggattacaggtgtgagccaccacagccagccagtatgacctatcttaatcatcagctcaactgtaatttaaatttggctgttctctggagctaaaccattagggaagttcaaaggaatgtgccatgatttccgaatttgcacaagagaatgttttaagcattggtagcataattgaataaaagaatagtttcctgatgtcactattttgaagtggaaattatcacttggatgtggaggttttactttttaaaaacattcagcttaattaccttaccttaattaccttagttagatatactaatggaaaaaaaccaagtcctttctctagaacttgttttctatttttgttccttttcatgaaaacttctcaatttaattttaactactgtaggatagtattgattgaatggatactatggaaaagtggatccaatatttaagatagaagtagtttaaggagacaacagcctttactgccatttttttttaaatgttttcactcagatgaacaatttgactttaataaaagactggagatttttgtacaaagaaataggaataagtttcatatactaattatgctgagttttaagcctacatatcacaaaatatttagaattgtataaccttttcatatatttataacttttaatgtctttttaaaagatgtgggaccaaaaatatatttataatttggaaatgtgactgcataccaataagaaaacttaccttattttgaaatttatctgggatattaaagaatctaccaattcttaaaaacacagatttatactttaagcttattttaaaattaaagaatatataccaattcttagaaacactttaaggactactcttaaataacttaaatatcagagttttgttgtaatattaaaatttaccgtggaaatcactgttgttcagctatcaccttaattgtgtatgatatgataaatgtttagcagtaaagctatcttaagatttaatggaaaagtttaatttgaagatgtaacaaaaattctgaccacagttgattctgaatttttaaggctttcctaataggctgatcacagagaataatccattttgaaggtataaaactgcactgtatgtctgtcacttgtagctgaactgattcacattttgacaaaagagagaaaatacaaaaatgagttttgcaaatgtaataactttttctgcatatagaactaaataattgaaaaatatgggctatagttctcaaaggtagatagtaaaatcactggctttttccagctgtatgtttttccactgtgcgtgtacacacacactggaaaataattaggctgattttgcaggtcttcattgttagagattctgaagtatttactgtcaattcataggtttcagtttatttaggaaattagtgtttgacagctttttttaaattatttcactgaagctgagattattagtgatacaaagttaaaatttcaatatttaatttctctatatattattaatattaaattgttttttacttataaattcatgttctcatctgatttaatattaaatttgtataggtgggcgtttcttaccattttgcacaagtttttgtttttctgaaatacttaattgtgcaggttgtaaaaaagattagtgcattttcattttaaggatgctttgctccttaaattgttcgacagaaatgactttttagggaaagtagtttttttggagctactaacttgtatttattattgtacatgcataaccagggtggtgagggcactaatcttgtaggaaacacttacttgatgttttatttgaacttttcctataggtttaacttttactgcatagaattaacactaggaacagtgtcatgaaatctgggttgaaggagaatacagtatatatgagaacacttaaagttcaaatagaaatcatttctgaagacaaaagcagaggaatattgtcagtgccaagtaatggaagaataagggcggcatttacactgtgcaagtattgagaagagtgcataaagacagggaactactctcatggagacagtttctctcttataatcaagtaactagaaggggaaaaatcatctaagttatgaaatccaacataggcgctatattacaaactgtgccggattatgcaaattgtagttgttactgatcaaagtttaattgcttcatttttgtttaaaaagggatactgatgtcagaaaatctgtaatatgttttattcaaaagatgtaaataatgtatacagacttgtatgtgatgggatgggaaatatttaaattctaggtgtttttttttttttaaagaagaaactcaatgtttataagaaaaaaatgaataaatagttacgtttggccatgaatcctg

SEQ ID NO: 12418 - DNA, 1518 bp, Homo sapiens
tcttgctgaagactacaggcagccaaatggttccagatacttcagctttgtgtatcttcgtaacttcatattaatataagtttctttagaaaacccaagtttttaatcgtttttgttttaaggaaaaaagatttttaaaatgaatcttatgcaaaactttttgaccagtttcttttcttttgttttttttttaaaaaagacatttaaagacaaagacattatttctcatagcaggaaatgtagaggtagatggttccagtatcagcatagtgactaaactacattataaaagatccagcttccttctgtcattcccctcttttgtcttcctcagcaggttggcttttttccctggtgcctctcacttcgttggtgaccagtttcttaaactgaaagctttaatgttacatagtaaatggtagtgtgtcctgtgtaaattagtgtacctattaaaagttgcaaagtggaattaaaggaatccctagaataaggattctgaagttttattttaaattattatcttcttaacagtttagtcccacctcttacttcctgcctcagtctgctttctctactgtctggattaattaggcagcctgctataaagttaaagtcacacatttctattttgcaaacactgtgattactctttgctttgtagtttgctttgctttgtagggttctgcttttaagtttttctctttttcagacaaattactgataaaaatgatattgctctatatgtaatatatcctgaaagcattattttttgttgaataggaaataaaattaatgaagacagaggctagaaagcatccattaattaatgagacacacttaactacttatctctaaaccatctatgtgaatatttgtaaaaataatgaatggactcatcttagttctgtatataaatatattttctttctagtttgtttagttaaggtgtgcagtgtttttcctgtgtattaaacctttccattttacgttttagaaaattttatgtattttaaaataaggggaagagtcattttcacttttaaactactatttttctttccaagtcatttttgtttttggtttcttattcaaagatgataatttagtggattaaccagtccagacgcactgatctttgcaaaggagacttaatttcaaatctgtaattaccatacataaactgtctcattatacgtatgcatttttttagtttgtttttgtttggtataaattaatttgttaattaaatatttcttaagtataaaccttatgaactacagtggagctacactcattgaaatgtaatttcagttctaaaaagatgtaataatcattttagaattaaaatttattctacttttaaataaattatgaatattaaaggtgaaaattgtataaattactttgattccattttaagtggagacatatttcagtgatttttagtaacctttaaaaatgtataatgacttttaaaatttgtagaattgaaaagacgctaataaaaatttattattt

SEQ ID NO: 12419 - DNA, 4295 bp, Homo sapiens
tcctcctagaactccagtaaaagttgtgcctcaaattagaatagaacttgaacctgaagacaatgattatttctggaggagcaagggaacagaaactacattgtaacctgtttgtctttcttaaaactgacatttgttgttaatgtcatttgtttttgtttggctgtttgtttattttttaacttttatttcgtctcagtttttggtcacaggccaaataatacagcgctctctctgcttctctcttgcatagacacaatcaagacaatagtgcaccgttccttaaaaacagcatctgaggaatcccccttttgttcttaaactttcagatgtgtcctttgataaccaaattctgtcactcaagacacagacacgcacagaccctgtcctttgcctctattaagcagaggatggaagtattaaggattttgtaacaccttttatgaaaatgttgaaggaacttaaaactttagctttggagctgtgcttactggcttgtctttgtctggtagaacaaaccttgacctccagacagagtcccttctcacttatagagctctccaggactggaaaaagtgctgctattttaacttgctcttgcttgtaaatcctaatcttagagttatcaaaagaagaaaaaactgaaggtactttactccctatagagaaaccattgccatcattgtagcaagtgctggaatgtcccttttttcctatgcaactttttttaaccctttaatgaacttatctgttgagtacattgaagaatatttttcttcctagattttgttgtttaaattatggggcctaacctgccacttattttttgtcaatttttaaaacttttttttaattactgtaaagaaaatgaattttttcctgcagcaggaaacatagttttgagtagttctacctcttatttgtagctgccaggctttctgtaaaaattgtattgtatataatgtgatttttacacatacatacacacacaaatacacaatctctagggtaagccagaaggcaagatcagattaaaaacaccatgtttctaagcatccatttttccctttctttaaaagaaacttaactgttctatgaaggagattgagggagaagagacaaactcctatgtcatgagaataaccgatgttctgataatagtagcatctaggtacagatgctggttgtattaccacgtcaatgtcctatgcagtattgttagacattttctcattttgaaatatttgtgtgtttgtgtatgtgctctgtgccatggctggtgtatatatgtgcaatgttagaaggcaaaagagtgatggtaggcagagggcaaagtcattgaatctcttatgccagttttcataaaacccaaaccacatatgaaaaaatccattaagggtccaagaagtctgtccatatgaaaatgagggtaaatatagtttatttcccaggtatcagtcattataattgatataatagctctaacatgcaatataaaattcataggagtattaatagcccatttacacatctataaaatgtaatgggattgcagagctgcagagtacagtgtaacagtactctcatgcaatttttttcaggatgcaaaggcaattattctttgtaagcgggacatttagaatatatttgtgtacatattatatgtatgtatatttcaaagtaccacactgaaaattagacatttattaaccaaatttaacgtggtatttaaaggtaatatttttaatatgatacattacatattgtgaatgtatactaaaaaaacattttaaatgttaaaattataatttcagattcatataaccacaactgtgatatatcctaactataaccagttgttgaggggtatactagaagcagaatgaaaccacattttttggtttgataatatgcacttattgactcccactcattgttatgttaattaagttattattctgtctccttgtaattttgattacaaaaattttattatcctgagttagctgttacttttacagtacctgatactcctaaaacttttaacttatacaaattagtcaataatgaccccaattttttcattaaaataatagtggtgaattatatgttattgtgttaaaacctcacttgccaaattctggcttcacatttgtatttagggctatccttaaaatgatgagtctatattatctagctttctattaccctaatataaactggtataagaagactttccttttttctttatgcatggaagcatcaataaattgtttaaaaaccatgtatagtaaattcagcttaacccgtgatcttcttaagttaaaggtacttttgttttataaaagctctagataaaactttcttttctgatcatgaatcaagtatctgtggtttcatgcccctctctatacctttcaaagaactcctgaagcaacttaactcatcatttcagcctctgagtagaggtaaaacctatgtgtacttctgtttatgatccatattgatatttatgacatgaacacagaatagtaccttacatttgctaaacagacagttaatatcaaatcctttcaatattctgggaacccagggaagtttttaaaaatgtcattactttcaaaggaacagaagtagttaaccaaactaacaagcaaaacctgaggtttacctagtgacaccaaattatcggtattttaactgaatttacccattgactaagaatgaaccagatttggtggtggttttgtttctatgcaaactggacacaaattacaacagtaaatttttttataagtgcttctcccttctccatgatgtgacttccggagataaaggattcaaaagataaagacaaagtacgctcagagttgttaaccagaaagtcctggctgtggttgcagaaacactgttggaagaaaagagatgactaagtcaagtgtctgccttatcaaaagagcaaaaatgcctctggttttgtgtttgggagaaaagtatcttggacgcactgttttccttgataaaagtcatcttctctactgtgtgaaatgaatacttggaattctaattgttttgtgtgccaggggcagtaatgtccctgcctcttctcccaatcaaggttgaggagtggggctggggagaggacttaactgacttaagaagtaggaaaacaaaaacctctctcctcagccttccacctccaagagaggaggaaaaacagttgtctgctgtctgtaattcagtttgcgtgtattttatgctcatgcaccaacccatacagagtaaatcttttatcaactgtatactggtgtttaatagagaatgattgtcttccgagttttttggttccttttttaactgtgttaaagtacttgaaatgtattgactgctgactatattttaaaaacaaaatgaaataatttgagttgtattacagaggttgacattgttcagggatgggacaaagccttcttcaatccttttcatactacttaatgattttggtgcaggaacctgagattttctgatttatatttcatgatatttcacatttgctcttcacagcatgagcatgaagcccagtggcaccaaatggctgggtacaatcaagtgatattttgtagcacctcactatctgaaaggccatgagttttcagatgatttcattgagcttcattgcagcctgaaattttaaaaaagttgtgtaatacgccaaccagtcaagttgtgttttggccagagatttagatatgtccaatttcctggctcatttcattgtgctctatgggtacgtataaaaagcaagaattctgtttcctaggcaaacattgcaactcagggctaaagtcatccagtgaaacttttagagccagaagtaactttgtcccagtcctacaatgtgaaaagagtgaatagttgcctctttttagccattttcatggctggtacatattcgtacgcattacttttcagaatcaatacgcactttcagatattcttatttttattctcttaagtctttattaactttggagagagaaatgatgcatctttttattttaaatgaagtagatcaacatggtggaacaaaatgataaagaacagaaaacatttcaatatattactaataactttttccaatataaatcctaaaattcctataacatagtattttacagttttatgaagctttctattgtgacttttatggaattaagagatgaagaagatgagatattttagcatttatatttttcaaaattatatgtatacttaaaaataaagtaactttatgc

SEQ ID NO: 12420 - DNA, 250 bp, Homo sapiens
aaagagctagtgtgataatcctaactctactacgcattatatatttaaatccattgctttttgtggctttgcacttcaaatttttcaaagaatgttctaaataaaacatttactgaaagccctctctggcaaaaaaattaaaaataaacaaaaatggtcataagatcataaacaatcttatgttgtataaaaatacgtagagtgacttagacatgtttgcatgaataaatatatttctagagaacagttt

SEQ ID NO: 12421 - DNA, 324 bp, Homo sapiens
cctaccatgagaataagagaaagaaaatgaagatcaaaagcttattcatctgtttttctttttcgttggtgtaaagccaacaccctgtctaaaaaacataaatttctttaatcattttgcctcttttctctgtgcttcaattaataaaaaatggaaagaatctaatagagtggtacagcactgttatttttcaaagatgtgttgctatcctgaaaattctgtaggttctgtggaagttccagtgttctctcttattccacttcggtagaggatttctagtttcttgtgggctaattaaataaatcattaatactcttctaagtt

SEQ ID NO: 12422 - DNA, 145 bp, Homo sapiens
gggaagagaagacaaaacgagtctttcattcggtgtgaacttttctctttaattttaactgatttaacactttttgtgaattaatgaaatgataaagacttttatgtgagatttccttatcacagaaataaaatatctccaaatg

SEQ ID NO: 12423 - DNA, 125 bp, Homo sapiens
ggaaggcttcctatctgtgtggtgatgaatcgcatttcctgagaacaaaataaaaggatttttctgtaactgtcacctgaaataatacattgcagcaagcaataaacacaacattttgtaaagtt

SEQ ID NO: 12424 - DNA, 1250 bp, Homo sapiens
aaaaattcattctctgtggtatccaagaatcagtgaagatgccagtgaaacttcaagcaaatctacttcaacacttcatgtattgtgtgggtctgttgtagggttgccagatgcaatacaagattcctggttaaatttgaatttcagtaaacaatgaatagtttttcattgtaccatgaaatatccagaacatacttatatgtaaagtattatttatttgaatctacaaaaaacaacaaataatttttaaatataaggattttcctagatattgcacgggagaatatacaaatagcaaaattgaggccaagggccaagagaatatccgaactttaatttcaggaattgaatgggtttgctagaatgtgatatttgaagcatcacataaaaatgatgggacaataaattttgccataaagtcaaatttagctggaaatcctggatttttttctgttaaatctggcaaccctagtctgctagccaggatccacaagtccttgttccactgtgccttggtttctcctttatttctaagtggaaaaagtattagccaccatcttacctcacagtgatgttgtgaggacatgtggaagcactttaagttttttcatcataacataaattattttcaagtgtaacttattaacctatttattatttatgtatttatttaagcatcaaatatttgtgcaagaatttggaaaaatagaagatgaatcattgattgaatagttataaagatgttatagtaaatttattttattttagatattaaatgatgttttattagataaatttcaatcagggtttttagattaaacaaacaaacaattgggtacccagttaaattttcatttcagataaacaacaaataattttttagtataagtacattattgtttatctgaaattttaattgaactaacaatcctagtttgatactcccagtcttgtcattgccagctgtgttggtagtgctgtgttgaattacggaataatgagttagaactattaaaacagccaaaactccacagtcaatattagtaatttcttgctggttgaaacttgtttattatgtacaaatagattcttataatattatttaaatgactgcatttttaaatacaaggctttatatttttaactttaagatgtttttatgtgctctccaaattttttttactgtttctgattgtatggaaatataaaagtaaatatgaaacatttaaaatataatttgttgtcaaagt

SEQ ID NO: 12425 - DNA, 1118 bp, Homo sapiens
gtaacaaaaaagaccatgcatcataaaattgcccagtcttcagcggagcagttttctggagatccctggacccagtaagaataagaaggaagggttggtttttttccattttctacatggattccctactttgaagagtgtgggggaaagcctacgcttctccctgaagtttacagctcagctaatgaagtactaatatagtatttccactatttactgttattttacctgataagttattgaaccctttggcaattgaccatattgtgagcaaagaatcactggttattagtctttcaatgaatattgaattgaagataactattgtatttctatcatacattccttaaagtcttaccgaaaaggctgtggatttcgtatggaaataatgttttattagtgtgctgttgagggaggtatcctgttgttcttactcactcttctcataaaataggaaatattttagttctgtttcttggggaatatgttactctttaccctaggatgctatttaagttgtactgtattagaacactgggtgtgtcataccgttatctgtgcagaatatatttccttattcagaatttctaaaaatttaagttctgtaagggctaatatattctcttcctatggttttagacgtttgatgtcttcttagtatggcataatgtcatgatttactcattaaactttgattttgtatgctattttttcactataggatgactataattctggtcactaaatatacactttagatagatgaagaagcccaaaaacagataaattcctgattgctaatttacatagaaatgtattctcttggttttttaaataaaagcaaaattaacaatgatctgtgctctgaaagttttgaaaatatatttgaacaatttgaatataaattcatcatttagtcctcaaaatatatatagcattgctaagattttcagatatctattgtggatcttttaaaggttttgaccattttgttatgaggaattatacatgtatcacattcactatattaaaattgcacttttattttttcctgtgtgtcatgttggtttttggtacttgtattgtcatttggagaaacaataaaagatttctaaacc

SEQ ID NO: 12426 - DNA, 359 bp, Homo sapiens
ctactagctgcctaagtgtgcactttcaatctaactgtgaaagaatcttctgatgtttgtattatccttcttatattatattaacgaaataaatcaagttgtggtatagtcaatctatttcttaataatactgcaaaaataatgctgacacatcacaatttcatattttaaaatttccagaattttaagcaaaaagcattatgaaggaaggcttggtttaataaagactgattttgttcagtgttatatgttagctgatacatatttgttcatttatgtgattgcagtactttatagctacatatttaccttgaatgttacaattagcttgccaataaatattagtagctcttaagcat

SEQ ID NO: 12427 - DNA, 700 bp, Homo sapiens
ccagaagggaggaggaagctcactggtggctgttcctgaaggaggccctgcccttataggaacagaagaggaaagagagacacagctgcagaggccacctggattgtgcctaatgtgtttgagcatcgcttaggagaagtcttctatttatttatttattcattagttttgaagattctatgttaatattttaggtgtaaaataattaagggtatgattaactctacctgcacactgtcctattatattcattctttttgaaatgtcaaccccaagttagttcaatctggattcatatttaatttgaaggtagaatgttttcaaatgttctccagtcattatgttaatatttctgaggagcctgcaacatgccagccactgtgatagaggctggcggatccaagcaaatggccaatgagatcattgtgaaggcaggggaatgtatgtgcacatctgttttgtaactgtttagatgaatgtcagttgttatttattgaaatgatttcacagtgtgtggtcaacatttctcatgttgaaactttaagaactaaaatgttctaaatatcccttggacattttatgtctttcttgtaaggcatactgccttgtttaatggtagttttacagtgtttctggcttagaacaaaggggcttaattattgatgttttcatagagaatataaaaataaagcacttatag

SEQ ID NO: 12428 - DNA, 1286 bp, Homo sapiens
atcacatgaaaggataaagcaaactgaagtcatgctatttgtttatttgacaaagggtaaaacctttatattttactacaaagctatttatttctacatggtatttattttttcatgggtgaaatcattgtgaatcaattgattcacatagttttatgcatttcctgctaatttattttgagttttaagaaaacaaccaaaacaattccaatgaaaattttagtaacaattgtttattttgagggtatttgttcataacattaaaacaataaagggctcataataaataaatatatttttgacacaattaaatattacatagagtatgtttacaacaaatatcctgtcagccaaatggttacccatataaaatgtaatttaggttttgctacttgcatgctaacatttttaatgtattttatgatctatgtcatatattaaaaaagagcttgcttactacaagaaaaatattgaaatattgaaaatattgaaaatattattattgaaaataaaatcttgatctcaactatcccccaaatgcatcctataagtccatcctaatgagaaatgatgttctatttaaggaaaggaaaatattccgggaaggcaaaaaatgcagtgctgtttggaagtgtaatgattttatcacatggtgaatgactactaagagtaatgattatatcacattgtgaatgactacttgccacagtaaaaatacatgaagaatgtgttaggtttaaacgtcgtttctttcttctaaaaaatatttggttagtaccttcactgagcaatagtggaaaaataaaaaaataagtaaacagaaaaaactaaagttgtattttcccacaaatatagtatgaatgaggtcatattaaagaacagcaactgttaatgtttgttcacaaattcagaaatctaataggaaaacatgatactttcaatgtgccaaaactaaaccttagtatacaactaaaaatctcctgccttcttgcctacctgtcttccctcttctgttacagaatttgttcctcaaagtagatgcaatgtttctaacacaatttaaattaggaaatatatatgaatgtcgttgaagtctattttgagactgctaaagctattaattgatactgtgtttttatgcccaaatcccagtatgtttatgtaccaataatgactcttacccagcgcatgtctttatcagtgtgtactcgtgacgatttgtgtgaaaatagacttgatgtttataattaataccattacaactgtataataaaagcaatttgaag

SEQ ID NO: 12429 - DNA, 397 bp, Homo sapiens
agtcacttcatatgcaatcgtttgacaaatagttattcaggccctataatgtgtcaggcactgacatgtaaaatttttttaattaaaaaagagctgtaatctggcaaaaagtttctatgtaatatttttcatgccttttctcataaacccagacgagtggtaaaaatttgccttcagttgtaataggagagttcaaacgtacagtctcccttcaacctatctctgtctgcccatatcaaaattataaatgaggaggacagcaggccccaagaaagtagggactaagtatgtcttgttcaaaattgtatattcagtgacttacactatgcctagcacacaacacacactgagtaaatatttgttgagtgaaataaaatcaagaaacaagtaaaaactg

SEQ ID NO: 12430 - DNA, 3952 bp, Homo sapiens
atggcgccatcaaacttatgggcagggataacagtgtgcctggttaatattaatattcccattttattaataatatttatgttgggtcaagtgttaggtcaataacactgtattttaatgtacttgaaaaatgtttttatttttgttttatttttgacagactatttgctaatgtataatgtgcagaaaatatttaatatcaaaagaaaattgatatttttatacaagtaatttcctgagctaaatgcttcattgaaagcttcaaagtttatatgcctggtgcacagtgcttagaagtaagcaattcccaggtcatagctcaagaattgttagcaaatgacagatttctgtaagcctatatatatagtcaaatcgatttagtaagtatgttttttatgttcctcaaatcagtgataattggtttgactgtaccatggtttgatatgtagttggcaccatggtatcatatattaaaacaataatgcaattagaatttgggagaagcaaatataggtcctgtgttaaacactacacatttgaaacaagctaaccctggggagtctatggtctcttcactcaggtctcagctataattctgttatatgaggggcagtggacagttccctatgccaactcacgactcctacaggtactagtcactcatctaccagattctgcctatgtaaaatgaattgaaaaacaattttctgtaatcttttatttaagtagtgggcatttcatagcttcacaatgttccttttttgtatattacaacatttatgtgaggtaattattgctcaacagacaattagaaaaaagtccacacttgaagcctaaatttgtgctttttaagaatatttttagactatttctttttataggggctttgctgaattctaacattaaatcacagcccaaaatttgatggactaattattattttaaaatatatgaagacaataattctacatgttgtcttaagatggaaatacagttatttcatcttttattcaaggaagttttaactttaatacagctcagtaaatggcttcttctagaatgtaaagttatgtatttaaagttgtatcttgacacaggaaatgggaaaaaacttaaaaattaatatggtgtatttttccaaatgaaaaatctcaattgaaagcttttaaaatgtagaaacttaaacacaccttcctgtggaggctgagatgaaaactagggctcattttcctgacatttgtttattttttggaagagacaaagatttcttctgcactctgagcccataggtctcagagagttaataggagtatttttgggctattgcataaggagccactgctgccaccacttttggattttatgggaggctccttcatcgaatgctaaacctttgagtagagtctccctggatcacataccaggtcagggaggatctgttcttcctctacgtttatcctggcatgtgctagggtaaacgaaggcataataagccatggctgacctctggagcaccaggtgccaggacttgtctccatgtgtatccatgcattatataccctggtgcaatcacacgactgtcatctaaagtcctggccctggcccttactattaggaaaataaacagacaaaaacaagtaaatatatatggtcatatacatattgtatatatattcatatacaaacatgtatgtatacatgaccttaatggatcatagaattgcagtcatttggtgctctgctaaccatttatataaaacttaaaaacaagagaaaagaaaaatcaattagatctaaacagttatttctgtttcctatttaatacagctgaagtcaaaatatgtaagaacacattttaaatactctacttacagttggccctctgtggttagttccacatctgtggattcaaccaaccaaggacggaaaatgcttaaaaaataatacaacaacaacaaaaaatacattataacaactatttacttttttttttttctttttgagatggagtctcgctctgttgcccaggttggagtgcagtggcacgatctcggctcactgcaacctcacctcccgggttcaagagatcctcctgcctcagcctcctgagcagctgggactacaggcgcatgccaccatgcccagctaatttttgtatttttagtagaggcggggtttcaccatgttggccaggatggtctcaatctcctaaccttgagatccaccctccacagcctcccaaactgctgggattacaggtgtgagccaccgcacgtagcatttacattaggtattacaagtaatgtaaagatgatttaagtatacaggaggatgtgaataggttatatgcaagcactatgcccttttatataagtgacttgaacatctgtgcccgattttagtatgtgcaggggggcgatctgggaatcagtcccctgtggataccaaggtacaactgtatttattaacgcttactagatgtgaggagagtctgaatattttcagtgatcttggctgtttcaaaaaaatctattgacttttcaataaatcagctgcaatccatttatttcatttacaaaagatttattgtaagcatctcaatcttggtttgtcagtttatcttaagcatgtcaattcataaaaacaagtcatttttgtatttttcatctttaagaatgcttaaaaaagctaatccctaaaatagttagatctttgtaaatgcatattaaataataaagtatgacccacattactttttatgggtgaaaataagacaaaaataatagttttagtgaggatggtgctgagtaaacataaaaactgatttgctctcagctgatgtgtcctgtacacagtgggaagattttagttcacacttagtctaactcccccattttacagatttctcactatatatatttctagaaggggctatgcatattcaatgtattgagaaccaaagcaaccacaaatgcataaatgcataatttatggtcttcaaccaaggccacataataacccagttaacttactctttaaccaggaatattaagttctataactagtactcaaggtttaaccttaaaattaagatttccttaaccttaaccttaaaattgatattatattaaacatacataatacaatgtaactccactgttctcctgaatattttttgctctaatctctctgccgaaagtcaaagtgatgggagaattggtatactggtatgactacgtcttaagtcagatttttatttatgagtctttgagactaaattcaatcaccaccaggtatcaaatcaacttttatgcagcaaatatatgattctagtgtctgacttttgttaaattcagtaatgcagtttttaaaaacctgtatctgacccactttgtaatttttgctccaatatccattctgtagacttttgaaaaaaaagtttttaatttgatgcccaatatattctgaccgttaaaaaattcttgttcatatgggagaagggggagtaatgacttgtacaaacagtatttctggtgtatattttaatgtttttaaaaagagtaatttcatttaaatatctgttattcaaatttgatgatgttaaatgtaatataatgtattttctttttattttgcactctgtaattgcactttttaagtttgaagagccattttggtaaacggtttttattaaagatgctatggaacataaagttgtattgcatgcaatttgaagtaacttatttgactatgaatgttatcggattactgaattgtatcaatttgtttgtgttcaatatcagctttgataattgtgtaccttaagatattgaaggagaaaatagataatttacaagatattattaatttttatttatttttcttgggaattgaaaaaaattgaaataaataaaaatgcattgaacatcttgcattcaaaatcttcactgac

SEQ ID NO: 12431 - DNA, 248 bp, Homo sapiens
gatatcacattggagtcactgccaagtcatagccataaatgatgagtcggtcctctttccagtggatcataagacaatggaccctttttgttatgatggttttaaactttcaattgtcactttttatgctatttctgtatataaaggtgcacgaaggtaaaaagtattttttcaagttgtaaataatttatttaatatttaatggaagtgtatttattttacagctcattaaacttttttaaccaaac

SEQ ID NO: 12432 - DNA, 3866 bp, Homo sapiens
caatggaatatggcctgggatgaggattaactgttctttatttataagtgcttatccagtagaattaataagtacctgatgcgcattgaacgacaatcttaagccctgttttgttggtatggttgtttttgttttcctccctctcctctggctgctacaacttcccctttctggtacaagaagaaccattctttaaaggtgagtggaggctgatttgcagctgaagtgggccagccttgcaccagccaggccagaccaccatggtgaaggcttctttccccactgcaggacccactttgagaaggaccgaggaggaggatttgggttgttttgttaggggttactttcaggggaacatttcatttgtgttatttcttaaacttctatttaggaaattacattaagtattaatgaggggaaaggaaatgagctctacgaggatttcaccctgcatgggagagagcagggttttctcagattcctttttaatctctatttatctggttgtttctgacaggatgctgcctgcttggctctacaagctggaaagcagcttcttagctgcctaattaatgaaagatgaaaataggaagtgccctggagggggccagcaggtcacggggcagaatctctcaggttgctgtgggatctcagtgtgcccctacctgttctcccctccaggccacctgtctctgtaaaggatgtctgctctgttcaaaaggcagctgggatcccagcccacaagtgatcagcagagttgcatttccaaagaaaaaggctatgagatgagctgagttatagagagaaagggagaggcatgtacggtgtggggaagtggaagagaagctggcgggggagaaggaggctaacctgcactgagtacttcattaggacaagtgagaatcagctattgataatggccagagatatccacagcttggaggagcccagagaccgtttgctttatacccacacagcaactggtccactgctttactgtctgttggataatggctgtaaaatgtttaaaaacaaaacaaaacaaaaaagaggcactagtctatctgcaattactcaacgaggcattttcataggaaacagactatgattaatccatttattcttcccacacacttaccttactaagtctttgctttaataaatgagcaaccctgggtatagtcttaaaattctgcacaataaattttgagaaagaattgttcctctttgtaggtatctgtgtattgcaatcattctcaaccaggaggtgattttgccccctgactccaccccagggacattcaaaaatgtctggtgacagttttcattgtcatgacttgggggtgctactagaagccaggaatgctgccaaacattctaccatgcacagcacaacctacaacagcaaagaatcatccaccccaaaatatcagtagtgccgagattgagaaaccctgatttatcacaatgcccactgtgacagaacaagacactcacagattagtgatacgttttatttttaacaaaatgaaatgatgtgttaagtttttatttccaaagtgtttagtttattggctgatgggttgttcttggtatgcatggtgacctttttatttctgtgtgcttcctagagagctttatttcatggcgacaactctgtcttcttgtaacagctgatattagcaagcagcatcttatgtcctgatttcatatagtagaaaacaaacattgggtccgacttcaaaatgtgttgtattgtcctacagtgtcataaagaacctgaaaatgaacttttgtttctaaagttggaccttgctgccatgactgtttagtttacagaaacttgaccccggctcatcctgtctctggctgtggcccggcaaagcactgaaaacccctctggtctcagagacagtaggggcagtgccactttctacaacctgccaacccacacactggagtaattctgaaaaaaattattcctaaactctctaagtgtggacggagaatgagcaagccccagaagtattttacaaccagagtgggtaatgaggagggggcttactggaatcgtcatatctctgaatattgaaaacaacaactaaaaaagtggaccttctcagaaaaaaagggcagcaaatgaccaagggcgccccttctggccgtgcttggcttgagtaactgtctctctttccccacccccatcacagggctttcagtttggcaaaggaaaagcagataaaaacagaacattccatatgtttctttctccatcggccaaaaacattttgacacaatgtttgtgaaacacctttggagaggtgcacttctgaatgctgcctctgccgtaaatcctggggcaagggatcagcctcttcccaggaaccatcgccttctataaaccgtgaactcaagcaggcattttttttttcttaccgaaaggctgctattgtgcaagggcacataatgggtctgttgctcttattggcttccaaatgtgcatggcaaagagagagatgtgggcctagagcagatatattcagcaaggtgacagcttcccataacaattctaacacttcttatcttatgtgagaataaaatatttaagggttgaaccttattttgccaaatgtatcttttctgcttttgaattgggcagaagattttagcaactatattctacaaatgttacttataacacacacacacacatctgaaatatatgccgaaaattgacgtctttgacctcagggagagcacctgtccaggtctgcctaaaggaaatggctccagtgggtctaaacaaccacatcctatccatggataggtctagtcataacactttagagagaatgtcagagcaggagggaggcaagccgcctcttctcggccatcgactgcagatgatgaaagagcgggattcaactttgttttcttttcctgtggccccagtgaaacctcctgccctccctgcacgtctgtgtcttcatttctaaaatgggggtgatgctttcatattgacctcaccccatactacctcacagatgtgttgtgaggattaataaaattatgtctatggtattttcagtttctggagaaaaatacttatagacagtttaactattacatagatatataagtgatctcagtttcttgtttgctgtgatactaatgtgttgttttaacttattccataaaatgacagttgtgtcctagccacatcagacagctatctaagctctggactacccctttgtgcagctgaatcactgcagggttgaccatgcctggtgccacagccatggtttccatttctagatgaaaggatggcctaggacataggtctcaaagactcttggatcagaatcaggagattagggaaaacaggatggatacctgagcactaacagcagtagacgtagacctctgtcctttaccatctgaggtcttctggattctttgtggggttaattttgatttgatgtcatctgtttgcccttcatcttgcttgcaagtgtgcatggttcaatccctcacatccaggaaatgaattttgcaattgggccagatgctaatttgcacgttgattcaccttctttgcctttaagccttttttttcttttttttttttttggcaaatgaatgtaccatttcaactttgattttaatagtgctagttgatattggtaataatgctaaccaagagatcaatgccagatttttctcttggggtaagttagctgaagtcatttaaagatggaaaggtgggaaaattctttgatatttgatgtcattgtatccacatttgttgtaagacatattgcataccaattataattatatcaattaaagttgataaaagcttc

SEQ ID NO: 12433 - DNA, 2810 bp, Homo sapiens
aataatttcatgttacgttccacctaaaattgtcattggtacaaatttttataaaatctcatttaccatcactaaataatatccatcatttaaagtgctgctttggattctctggagcattatgcattatagttgttatccaaagacttttttgaaaatatgcagaaatttgtggtaattatgtatttgtgtcttgtgacaattatgttttatagacctacactagtgccaggtcactattgtaagatgttaaaatctcaagaaaatttcacagagctaaagaaatgatgtcaaattagtcacattaagctatagtagaaggaattggacacttctccagatatttggcttcaaaggagtacctttacttacatgtgctttatggtaagtacattgaattttactttaaatgcattttactacaaagcacaattcatttgtaatgcatatccatcttggattcaatccaaggtgctttagctatcagtagtaccaaaggatctttttacaaggcttcctgtggtattgactctgagaataacacatagtgaagatctgtgggcttttaaaattgttcacagccaatttaagaagacccctcatgaagtctcagttttcagtacagtacatcattcctcctcactaggagcactttgatgtaaaccagaatagctttaaaaagacaaaaaggatcgtagatctgatttttaaatggttggttgctctgacagatctgaacactttgcttcatgactatttcgtcataaaggtatatgtttaaaatctgaatggcagtactagctctatacttttaatactgctttgtattttatatgtaaagtagtattgctgacattttaaaaaaatacaaaatacaaaagaaaccattagaaattaataactgtggctcttccagttgaaataggaattggagagaaaggattagaatattttaattaggggagtagattattgtccaaaggcttttatttagagaaacgggtaattaaaacagcagctttagaatagcttcttactgaatatgcaaaagaataattccttgttatttcctaattgatccaagtctcataaatttagcttttgtcataattccttaccgaaaacaactgaaattgagagtcataaatactgtgggttagaataaaaaccatttgccaaagcaacactctacttagaagcacatgtacatacatggacctcattcagaagtccatgttgtagcagttagaatttgagtatcagccatttcattgtagtaacaaaaattgaattgcattttgtgctcagttgtttattgtaattttatttttgttacattaatattagttaagatatggtcacttgaattttttgtatttaagaattttctgttttaatgcatgttatacttttatgtaggattccaaaccttccctctaaatgggatttaacccacatctgcgagatcagcgttatgctaagaggaaatcactgaggccatatctttttacaatctgaaaaaaaagtagtaaaaaggtagttaaaaaaaaaaaaggccgggtggtggctcatacctgtaatcctagcactttgggaggccaaggcaggcagatcacttgaggtcaggggttcaaaaccagcctggccaagatggtgaaaccccatctctgctaaaaatacaaaaaaaaattagccgggcatggtggcacgtgcctgtaatcccagctacttgggagactgaggcaggagaattgcttgaacccgggaggcggagattgcagtgagccaagatcacgccgttgcactccagcctgagcaacagagcaagactccatctcaaaaaaacaaaactactttcattaattacccattatttattttagttacttaattttgagttcataaatggccaccctaatggaaagtttgggtatgatcttaggttttatggagatgttttcaatagagattatttttccctcaccctatttgtgaatatataaattaaagtaagacaatggagtaagtaagagggtagatccaaacacagtatgtctaaattctagcactctactggctgcttagaatacaccaaacctggaagacctttccaagagtaaaatcccagtctgccactatcaaaattgccacagtcacttttactacttgtgttcatagtagactcagcacttctttttcactggacctagtataactgagaaataaataactgtgtgcaaaatattggtatcattaaggacccagagctgcccattttctctttgttctaatagggaagcaattactgatagaaatgtgagattaaaaatagggtcctccctgctgctccaaacaaatgcctaaacacagtatgtatctcagtcctctgttcccagagattccaccctagcccaggaaagaactggcctgtgtaaagcaaaacccaagtcatccccctccagaaatttctctggcagccaagcctgaccctaagggttccactttgctttaaaagctaggagtggcctctagagccaggaacacattaatacaacagttcaacctcagcaccaagtcaggtacgaagcgcttgatacgtggaatttttctctatatcaagtttaaatttctggaaatagactttggttgctaatgacaattacagttataccatagtctgtaatttgagaaaaggtgaaatgtatttaatatatatttagttttaataaaaagataaaattattacagaaataattgagagagagaaaatctattataatttatttgaaaaataaaacattttatccagt

SEQ ID NO: 12434 - DNA, 278 bp, Homo sapiens
gagggaagagaaacccaaacatactgaagcaaaaaaaagcctatccttcagaaaaaagcaacaaaaagatttctgttttatctttcgaaactaaaactattggatttgaagattaagtatcctaaacatcactgactagaaactgttctctttgtcagcagtgaagatattggatcataggttattgatggttgcaaaattggacaataaccacgttatttttatcctcaacctcttatggtcacaggatatttatgcaaataaaatctttaaatggg

SEQ ID NO: 12435 - DNA, 916 bp, Homo sapiens
ttttcaaatctctaggaacaatagagattatatcataactctgaagatggactctaaactttggtttacctccatggaaaataaagatttagaaaccaggtggaaaacattcactattaagactattgatatatttttgtaatgttgccacccatgttgaaaaccttaaaactgaatttatgtagaacacacatcttttatttaaatccatctgaactgtcccaaaatgtaatttgcaaagagcttcaaacaccaaaaatataccattttaaggcatgtggtgacaatgctatttgccttagttcattcgttgtttactttgcaaaatttgtgacttttaagtactaacacatttgattgaatgtgtattgaattggaattattatttctaaattcagcatttgagtccttagttgatgattttcttttaaagaaattagtttatttaaaagcaagatagcctgggttgggagttagtgcatatcatcagccctccatctaatgtgattgctaagatgtgcaggataggacagcttagaatgagtgccttgacacctacatatggctgcattccatacctcagtgaagaagccgaaggatgctgacacacagtgatgtggagggcattccggagaaacttttgcaacagtgtattaatgtgattggttttctttttgttttaagctaaacatctaaaacaaatttcaagttaacagttcatacaactcagatttagtagtattgtttatcataaaacatattatgttcctagttttaaaaagacccaaagtatgattaatataatttattggcatttttgctgaataggtttaagtcagataatagattttaaaaaagcaaatgaggcaatgtgtcaaaatttaatgtttcataataaaaatagatacgttgactt

SEQ ID NO: 12436 - DNA, 266 bp, Homo sapiens
tttgatgcattgtttatctttcttattctttacttgaaataactatagggatccacaggagatcaaaaggaatgatgtattttttacgtgttggccaaagtcactggataaaatgagaattgtatatttgttattcattttgcaaattcagaaagttggtccagatatatgtcacagaacttttcacttgtatactactcttacaatggaaaaaaatcccgaaaactgtatacttctgattaaattcaataaaagattttgattag

SEQ ID NO: 12437 - DNA, 1130 bp, Homo sapiens
ttcagtttgcaaagtaatggagaagctgtagaacaatgtggaagaggctgaggttgtggaacacactgaataaaataaaggcagtgtgactccaaattcagccatctgaattgtttaaatttgctagtggattttgtctaatgtgcagaaatatatatgtctaatgtgcagaaatatatatgtgtgtatgtgtgtatatatatgcacacacacacagataatgcttccagtgaatgtgaacttcttttccctgtggcactgattgacagacttgtgctgatccattattactttagggcttgattctcttggggagtgacttggctaagcttcaggtgtaaactgtggtcacggagcaaaaacattaaccagctgcccagggttcaagcttgagcctttaggtgatctttaaactatggtagtaaaataagcctcactcaaacatagctgacttcctattggtacagcttgaaaagcactttttactacatacacattttatgcttaaaaagttaacatgatacgaaactgtgattagaaaatatctggtctggatgtgattagtaaggatacaagataatgttctaagactgcctaatgctttttgtttgattttcatctgccaggcgttgttatgtgctatgagggtagcaagtacgtctttgtcttaatgatctaaggctggtgtagaaacaaagggcctaatgagaaccaatcatcatggaagtcagttgcgggggcagcccataaggaaagggaaagtgagtggggttgggcataggctgagtgaggtggcctgaatgacacctcttagaggactgtgaagtacaggcacagcccgactgcagggagggatgcacccatcatttacccatgggagcatctgtaggaccatctctctcccacttcttctcccctcccccaccgcatctggccagatggactgtcctacagcaatcgtttccatctgtcaccctcttccctctcctttcataccagtcactatcttgggtaacaaatttatacaggacagtggtacagaaatacatctttgctctgagaatacagcaaatattaacttaaattattataactgaacaaataataaaacctgaattttaatatcttca

SEQ ID NO: 12438 - DNA, 4073 bp, Homo sapiens
cctcttctaaaatacccaaccaaaagatcactgtttctctcaacactatttaatctgaaaaatgtttcagtacaaaccactgtttgaactatctgggttattggtgtttgttcctgatgaaaggaaaaaaattctctccaggaggaagcctttttccttcttgcccttcctgattgatcttctgagagctcgaatgctgctggacacgtacccctttctattattactttgtagtagaaagaaagttaatgaaactgagaactgattggagggtgtttgatcatttagtttttaacaggctgaggcaacatggatcagtgtgtgtccccctcaggaatgtatccacagtggccttccttgctggtgggcagtgtatcctgatggcagggtacaagtaccattaatgaagggtctgcaacataaagccttaaaaagacacacactaagaaaactgtaaaaccttgaacattgttatttatattttttaaaatggaaaagatcactatgtttgttgtgctaaccacttatttgattctgttttgtggtggacatagatgattacgtttgagctttgtattttgtgaaaaccttaatgaaatgaattccaaagatagtcacgttgagcgtgaagactttttttcttacattcctgtcttatttttaccaacacgagcaggcattctgcgcttccactggactgagtatgggggagtcctgctcccctcctgtctcacaccttccccaggaggaaggcctcatgcactgcggttattgcatcatttcctagtgcttcatgtcattatcactggtggggaaacaaagctaaattttattaacaaagacaactctcagacctatataataggaggaggacgtccagaatccaacaaaattcaaacggagcccatgctgttctcctgaacaagatttgggctaaatacggcctgtttattgaggctgttttaatgatgctttaaaaaaaaaaaatgttttctaaaatgtcaaacctgttgaccacactttgattaaaaactgcctccttaacctctgaagactgattttgctttatcatgtttcaataataacatttcagaggttactctgtagccccagttgtaagcttataaaaacaaactggaaggctgaggaggttatgggctggcagccaggctatgtttacagctgctggagatggcagtagccttatactttgagcaggtagtacatcccaggctgtgctagaggtagatttgttttttcacgtttgatctgtggctggtggccacctttgttgatttgggcttacgagtttcatagtagccagtcttagaaaattgggggagtaaaattttgaagtaaaaaaaaaaaaaaaatgacaagggaaccaaatgctccttctccccttagtacattttcattacttaatgaagttttatctcctatgtaagaatatcaaaattgtagtttgggtctccagtagagatgtcttttgattaacttataaacaactggccacccagaagtttcctttgcatagtcaaccaaagctatggctttgttctttggagcttatatactgcatgactccattgatacaaataagacagcaccttggtttcccagggatgttttcattcagaggtcctgtctcccaggaaagcagtagaaccagtgacagcattcaacagccacactgcatggtcatcagtcttaggccaacatgggagcctgaaattaactccatcagtaactacctgtgtgtcttgctgatactgaatgagccctcacaagccaagccaggtggaagacagccagcaaacgtctacagttattcttagtgaaattcctcagaggaatccagggggctcccagttcccaacactcttcgagatgaccatttttcgggatttgactggggaacattttacatattcagtctttctcaaaaatttttatttattttcttgagaaagggtcttactatgttgcccaggctggagtgcagagtggtgcgataacagctcattgcagtctgaacctctgaggctcaagccatcctcccatctcagcctcccaagtagctgggaccacaggtgtgcaccactatgcttggctaattttttgattttttatagagacgggggtctcgctatgttgcccaggctggtttcaaactcctgggctcaagggatccttccgctttggtcccagaagtgctgggattacaggcatgagccacttcacccagccacttttctaatttatagacataaaagtaattgactcccacagcacagtaacaggcaatgctgcttggcatgccacaaacatctgaaagcttgtgacactcctaggattgtgtccattctttcattatgtggaaactttgttctgttatgtgaaatgggtaaggcaccaagtgagactttgaaatctaatttttaggtggatgtgatatttattgtaataggacttgacctctgtactttaaagaaatcactaaccaaattttcaaagtttccttttaaatgcgtttagctagaaatctatgtatttatccctttcctattttgcattcttctcccactatttttaaaaactcatttacagtagaaaccattcttctttctcccaacagtatcctttgccaagaccatgagaacagtaaggagcatgttgttggtcagggtttcagaatacgcgtgatgtcactgagaatgtttgctcacagtcaataattgtctttgtggatgtgataattttggagatacacttctggtcagaactcaggtgagataatcttgcaatactccaaatgcagatactccagccacccgcaaggttccaggaaaggacaatgtcctgcgagaaaatcaggaggcctccacttcctgggccacttgagaagttcctgggcatgtcactacatgttggttgactcagccatttctcatgctgttttgtttcttgcggtggccacttaaccccaaagaatgaagggaggatccacagtgaaagtgcctgagtttctctatgagaccagatgctgtcgaaaccaaacatcttttcctttgctctatgggaacattttagggtttgttttgcacagctggtttccagactagaagattaacaagtttgggtccacccctaagaatcagtggctgtcttttaaggtgaggagtgtgggcttaactgaggtcctttgagggagctataaaggagaaacaacctgggacatcccagttttcctattcctccactgttaatatctcatctaaaataattcatgagtttaaatggtaaatatatgctttaagctctacctttaaacttgtatgttattcaggcatctcttattaagatactgggtctctggatacccaaggaaatgttggctttttattcttatgtggttccaaatttacttctcttcagtttaattgtccatggtagtgctggcttcattgttaggttggagttattattttccttttagaacaacatgaattttattcaccttactattagaaaaaggaataactacagccagaaataacttcatttcctacaaggtataaaaagtggtcaagtgaatgtgaaggggcttttctacacaggaatatattatcgggaacaaagtatttcctgctgccttaactctttgggatgcataggataaaatgataaagaccattttaatatcagaaagggttgtcttattaatttttaaataaaacttcacatttcttaatggggagctcattcagaaactaaataatggtttctcaaagtgtggtcaggatacgatctgcatcagaatccttggaatgcttgttaaaaataccaattgctatgacaaaaccaagtctgctggaaactgcatttcagcaggtttcccatgttattctgatgtattttaacatttgagagccactaccaatcatctgtacagttcctactgttatgatcacaataagactaacatgaatttaataatctgaataatttttaaaatttaaataaacagaaattgaagttaaatttaaaaataaaaataacctcagaagttg

SEQ ID NO: 12439 - DNA, 4102 bp, Homo sapiens
agcctggcaagccaaggatgttcccgcattcacctgcttttgcagtaatatcgtatctctgccatgtgtgttctttagttttattttattttattttatttttttacccttcctcaaacaccagtaactattattaactcgttttgctgaatgttgttgggtggtagaaaatgatagaacaagggaataaccgcgaatgctctgtgcagctggactctgtttccggaaagtaaatgatttgctttttatgcctgttctgaatggcagcacgaagcaggcctgttacttgtatgtcgctttggacagaggaaagtggggtaaaatgctacctgtacgtctgacatgaaaacttctcaccgcctcagcagctgaactaaaaacctgaatagccatgacaagagtttgcattttcttgatgattcatctccatgagtgcacaatccctgaactcactgtcttttctccacacttgtcctaagccaaggtagatttgtacgtagacagactggtgagcaagcattatattttatttttacccttgcatgacattttcattttaatcaataacattatttggcctgagcttgtgggtctgttcagactgtctcctctcatggtttgaaactgcatctgaatgcctgccttcaatcctggccaagttggagtagactggtatgagaaaactatgattagttcacatttactggtgcatccttgatcctctcacagatagaggtcttaaaggttggatcatgtaacattgcttagtagaagaatcttcttctaaggatgatgggctttctacagcctgcttaccactaacagtaaggaatctttcataaacacacctcagtttgttcccagtgggcttagagggaggacctgatgactgattccaggatacttgtacttctaataacatttttcatgaatcatgagaaaatttccacagatacttcccttagaaaatttgctataaactctgtatcattggtagcacaaatttgagcgaggccttgtcaattttaaggtggaaataggaaggaccacaacatgacccgtaagtcaagaaggtagacatttcatatccagcttccttgcttagtctcctttcagtatttggcaataaaagaaagaagaaatagaacagctgaagtctcaaatcattgtctggaattttcctcaccttggctagctccacctgctctttgtctaaggcccttgcctcatcagggattagaactggcccatatgccagaacctgtactaaatgcctaatttgtatggaagagtgcatatttaatctcttttctatactgctcctttctgatgcttatcctttcatctgtgtgattgttttttcccctctactaacaagatcctcccagctttctctctacatgtagaaaggataacatttctcatgaacccactgcccctctgcattttcctcactggttagagattaagtaaataggatagaatatgctgcgtctcccctgacacacactttcttttttgaatgagcaagtctccattttgatttcagcaaagattttttctccttttctttgtcctcaaccatacttagaggaaagaaggaatggtcttccatgaactgattatgcttaattaagcaaagtaaggaaattagtttcatggaagcctaaacaaagctggaatagaaactacacactagacacagcagtagtcatagtcttcacaggtttaggagctactggaccaacattcttgtttttgcttttgtttttttaaataattctagtctggagctaactgtggagcagccaaatagtagctggcatgttgattcaaaccatgggctgaatttgctcataggctgtgcatcagacaaaagcttgaatatttgtgttgtatgcttgttccaaccaccgcttgtgtgagcatttttgtggcttgtacagaaagtacacttttaaattgtctcttgcatcactaaaatttttttaaaatgagcataacaacgaaaggcatccagctgactttttgattccaagattattgattggattgacttttttgcattaaatttttcccagcaaaataaatcatatggcgagtcagggaataaaaagtcaaaagaaacaaatagaagcttttttttttaaaaaatgtattgcttctgaacttttttctgccactgctccctagccctgtttagtttgttattgctgcttttcttttttctttctgtatctatgcctttttttcacagtagtccttggctctgcacggaataaatgataccctcaaatctaattggatgtgctttcgcctttgcatgtaagtacggtagtaagaaacctttgagatctttctgacttttcaaaattagagaaagcaaatgggatggatagattttttttttcttttcaaggggggcaggaaggtaatggtttgagtagcctttgtttaaaaaaaagactaaatatatttaaaaggccacatttatatttttttcacaagaaccacataataaattccacttcttgacctgaatttggaaatccgaaattactaatccaggccaggtgtggtggctcatgcctgtaatcccagcactttgagaggccgaggtgggcagatcacttgaggcctggagttcaagaccaccttggcgaacacggtgaaaccccgtctctacaaaaaatacaaaaattagccaggcgtggtggcacgtgcctgtagtcccagctacttgggaggctaagtcaggagaattgcttgaacttgggagatggaggttgcagtgagccaagattgcaccactgcattccaacctgggtgatgaagtgagactctccaaaaaaaaaaaagaaattattaatccctgcctgtgctctacatagcctcatgggcatcattggatagctcagagggcccttgattctggcaaggcaaataaagccagaatgagaaattaccatcttctactagagaaaaccaagagaaaaatttttatgctaggatgcctttatgaccacttaattttttaatcttagtttaatggtctctccctggtgctaactgctgacagtggccacctcttttttggggattgaggggcctacataactagctggccttaccccatatcttttgttcaaacataataccatctttttgcttcttctgaactttagatctccataacacatgtactgtagaatgtgatggaaaagcattgatgagaatttattggcagttcagattgtgttttcccaacttaggctctttattaattggttaaggttttctccaaaaagggcatttcaacaatgggaattatttaatgtaacagtgggcacagattacttatcttccttctctgctttgtgactcaccagcagtaacacacacaatccacatcttgtgcacctcaaatgaacagacttggtttccttgctttcttgacatttccatgactgtttcacatacaaactattgggtgaggtttttcagctgttaccgacccacgtcctgctgtctctgtgtggtcctacaaaaactgtccattcccacccctttgctttgccatttgcaagagtctggaattgtcaggtctcagcttcgaaaagtcctggttccactgacaggacacattctttagtgggaattaagacctacaaagtctagtttgtatgtaggtatgaagggaattttttaaataaattgaaaagctgtgaacagcattagaactttgtctatttcttaattttaaaatatgctgatatgccttaaactgtagttgtagatccttgtcattttgctgtttgaaaataaccaatgtgttttctaaaactgtcgtgtaatctactttcattgttaatgcagaattgtcatatatgtaagctgcatgttagacatttgtcttttttaaactaaagtaattgtattgatgtgaagcatatcattttttcaaatatgaaagtgatcacttagcaacatgcttggtaatttggcatctgttaaggtaggagagtggtgaacagataatctatgcatatatcactagtgccaagacataaagcgggggaaaatatatttttacccaaacatt

SEQ ID NO: 12440 - DNA, 869 bp, Homo sapiens
aaatctgattgttctgtcagaatttatatttacaggtttcaaagcaataaatgggggaataggtagtttcctggtttagcccccatctagtcaggaattaatatactggaatacctaccttctatttgttattcagatcagatctggcctattttcatatttatcctaagccatcaaatggggtagtgcctcttaaaccattaacagtactttagacattggcactttatttttctcgtagatctttagctactttggggaggagggaaggtgctgataccttcaatttgttacttttcaagatttttaaaaataactagtgtagcttatcttaaacattttataaaaccttcagatgtctttaagcagattggaagtatgcaagtgcttccttagcagggacagtggataatccttaatggtttatcatagatttcaccctccccccttctcagaagagtgagtatgctcttaaatgtcaaacacatttttgttgttttgttttttaaatgatcagtgtctatttgatgtgatgcagatcttataaatttgggaattataatattgacatttctgtgatttttatatatgtaatgtcttaattgagatttctgttaaggcagaaataattaggctagggctcttagttttcattcctattgcccaagtattgtcaaactatggtattattttaatgttactttaaaaatccataatctgctagttttgcatgtacttatatgaaaacagtgcagtaagttgaaaactcagtatctatggaattgataaatgttgatctggtgtagtatattttatcgcattttcttatattaaaaaatgtctgcatgattacattttatttcctttgt

SEQ ID NO: 12441 - DNA, 793 bp, Homo sapiens
tgctgatatttccactaagaacacctgcattcttcccttatccctgctctggattttagttttgtgcttagttaaatcttttccaggaaaaagaacttccccatacaaataagcatgagactatgtaaaaataaccttgcagaagctgatggggcaaactcaagcttcttcactcacagcaccctatatacacttggagtttgcattcttattcatcagggaggaaagtttctttgaaaatagttattcagttataagtaatacaggattattttgattatatacttgttgtttaatgtttaaaatttcttagaaaacaatggaatgagaatttaagcctcaaatttgaacatgtggcttgaattaagaagaaaattatggcatatattaaaagcaggcttctatgaaagactcaaaaagctgcctgggaggcagatggaacttgagcctgtcaagaggcaaaggaatccatgtagtagatatcctctgcttaaaaactcactacggaggagaattaagtcctacttttaaagaatttctttataaaatttactgtctaagattaatagcattcgaagatccccagacttcatagaatactcagggaaagcatttaaagggtgatgtacacatgtatcctttcacacatttgccttgacaaacttctttcactcacatctttttcactgactttttttgtggggggcggggccggggggactctggtatctaattctttaatgattcctataaatctaatgacattcaataaagttgagcaaacattttactt

SEQ ID NO: 12442 - DNA, 183 bp, Homo sapiens
atgtggtgaattgtgaaattactttcagtggtttaagaagcaatggagaaaatgataatacagcataatttttacatttgatgtcttgttattgatcatacttgaaagtgaactttaacattgaaaaatcgtacagtcatttcaagaataagaaaataaaattttctctttgtctgaacctgc

SEQ ID NO: 12443 - DNA, 3145 bp, Homo sapiens
tggaggagacctatgtgtatttttttctaaaatcatttttataaaatggggggaaatactggtatttttataatctcgcagataaaaaagggaaaactatagctttgagtggcagacagcacacatcacatgcatcaactcacaactgagctacctcattcagcaaagaaccactgagaaccccagagtattacagttatttccgtagatccctttaatagtgtcaacaactgtacacagctccttctgtaaggctggtcttagaaaacaagtactttagtatcaggacaggagttgaacaattaggttagcagatggagatgagaggactgggtagagtaccatggcagatctcagagagaagaagtaggtacgggcctttggttccctcccccagccccagctttctcctacagggcttttcctgagtccccagacagcagagtatgaactgctgacacccagattccattaaaaattctgctaatcgacacaacacatatatttgctcatgatttcacttgacagcgtatgctccttggcctctaattgtactttgcttttccagagccctttttacctggggatttcagtgtgcttaagtaaaatcctctgaaaaccacgggagcctctgcctcctcagccacagagaactccctcctacaaagggggagactgaaacccgagttaaggaggggcctggcaggcgtatcagagcacattagtgatgcccttcaccccagggaggtgtctgttcccaactagtttatgtggcactgagacatccatccctgaccaaggatgctgcgaaacaggatcaatgtactacggccttttaattcaacattgccataaatgctttaaagaaaacccaccacactttcctcctactccggtctttgcccgttcctgtaacagacaatcccatgtcctaggtatggttttttattctgttagtgcttcgggaaagtaagtgattcatttgaataaggcaaattaggagaaagcccaggttggggtgaaatcagacttaacagatacatgctggttctccttgctgtgtgtgacacagcagacagaggcactattcctggtgcagtatttcagggatttctctttgaggggttcttttctggtagctcaggcaattatttttaccatatcagcacatgacaaggccatgaacacatggctctaaaataatttagtgttcaagtatcagcttaactattttgtgtaggctacacacagcttgcttttgtttctcttctgtttctgccttattggcggaaacataagcgtgcatgccatgttgttttgaattggaggcacaatttcattattcgagagtaaaagacatgtcctcttctgatgcatggcacaccatagtcaccaagcaaataacagagccttcacattgtgtaatatttgtatgagaatgactcaagctctttgagaacattccaaactagtaacatttcgctactaaaagctagaaaggatgaactgtgaaaggttctaggcagctctgtgagactccaagctccttgaaagtaggacctttgtgagccacgcctttcattcttcaacagtgccttgcatgtaacaagcactccagaaatgtttgttgaatgaatgaatggtgtcatgggtgaatgatggggagtaaatttaggaaggggaagtgagagagtatggtggcaatatcacaagggaggagagaggaaaacaattatcttctctacttggattatgagataaccttttcttggaggaaagaaacaccgctttacaaaggcatgactctggcggtggtcctaaggaagcatgagcagaaaattcataaaaatgtatcatcagcaggagatgagactatgaattggcatccagaacaggagatttagagcaaaatctaatttagcattctgagatgagtgtcaggttttcaggagagaatgagttggggtgagcccagagtctgaaactcctgactggtcaggtgctacttaagaccagcttgggcaattcagggcagaactcctgtatcagcctcatggacacccagaattggtatctcatggctggagagctgatcagccaggcacagaatctccagaacaacctagagagtgaatgctaatttgtagagcgaacttccatttggcccattatttgtaactgtgtaactgctccaagtgccagaatgcttacacgttaaagcagcacctttccatttgcccacatattcttcttgcacaccccttccattactgctgaataggacattgcatgggaagagtacagaggtggcagaatgaagctagagtgggaaggactaaagactgagccccagagtgctcccagcaaccgccacgtacaaggtctgaaatgacaagggcaagagtgagataggaaactgtgtgtgaaaggaaagcccttgcagtatttctgcctccctttctttctgcctttcaccccactaaatgtatgttattgaatgccagtacttctctagtggatgcacacttgttaaatagtgttaagagatgtggagatgagatatacccctttgatgtagaattattcatttggtttgtttcatacttcattataggaatcaagtaatttgatgactaatgtggattatatttcagtcaaagctctgctttcaatttctctgatttgctcactaatgccttgtgtgtgttttactaaccttttatatcttgccttcaagtgagaaggaacaaacaactctcagtggttactacttgcttttatatgctggctgtgaaggttaaaagaaagaatggtctgtaccattctgctttgctgcccttttattgtaccccaggcctcctagaggactcctgcagattctattgttgggtgggaaatagtgttggaatgtgtttgcacagtcttatgatattcagtctcagtctgctataggtatttgttattcttggatactacacacctgctcagactgagtaaacatttgtggtgctgtcaacctgatttcttgactctcaaatgatttttgtatttccaatatgaatttgtgtgttatgaatttctgatttctccaatagtatatgccactatataaatttgtattaataaatgacagtcttgttggttt

SEQ ID NO: 12444 - DNA, 333 bp, Homo sapiens
accaagaagataatctccaaaggtccacgatgggctttcccaacagctccaccttacttcttctcatactatttaagagaacaagcaaatataaacagcaacttgtgttcctaacaggaattttcattgttctataacaacaacaacaaaagcgattattattttagagcatctcatttataatgtagcagctcataaatgaaattgaaaatggtattaaagatctgcaactactatccaacttatatttctgctttcaaagttaagaatctttatagttctactccattaaatataaagcaagataataaaaattgttgcttttgttaaaag

SEQ ID NO: 12445 - DNA, 510 bp, Homo sapiens
aataacagctctattattattcagcaaggccaaagacttttgagaatgtgtatggaaaattctttttgtgcatttgagggcaaaattcaggccatcttcttatacatatactatcaaattatgttgtgtgcattagaaatcagttgcttgatagtagctattaaacccaatattgctgatagtatgctaatatcctaaaacttaaatattgcatatctatgaatgttaaattcagaatatctctaaaacatggaaaattgatgtttcaataaaaagggagacattttattattttgccttactaatgattttgcagctctgtttttctgcacactcaatagaaaatattgtgggtctgagatgccctttgaaaatgcctgaaagaaaacatgggctactacattatgttaatgttttgtaatgtccttttaatgagtggtgacataaaagggctgctttgttgtcctgatatggcaaaaattaaataaattctttttcactttaaatcag

SEQ ID NO: 12446 - DNA, 152 bp, Homo sapiens
atacttctgatggattctcggcattaactcctgtttcaaaaaagtgtgaacagttttatgaatttgaaagaaaatttggtagctctttatagcattcattcttaaagatcagtcagaataggtgatttctaaataaaccaaatagaagaatg

SEQ ID NO: 12447 - DNA, 796 bp, Homo sapiens
ctcggaaaggaccccagctttccacgcgcgcgcaagcacagttaagccacctgcaggaataaacacgcgagaacatccaccgcttccttgcaccccgaaaccctgcacaaagacacatacattcaccgcccccccgcccccccaacgcgcacacacacgtcctctcctcccaggaacctcattcaaatatttacccgggacacacacccccccccacacacacacacagacacactcacacacaagagccaggatggtggagttttgattgggtgggttgtttgagggggttttcttttgaatgcacgcattttcactttccccaaaacaaaggtacattttttaaaatgtcatatattgcaacatattgatgcatttgtcatacgtttctacttaaattattaagcacttacgatttagatgtaataattatatgtaagggcaaaatttattttagatataaagtaaaggaggagggtgagatgctttctgcatttcttgatgacagtttgtgttcctacaaaaataaacaaaatgaataaaaagggatcaccattcaatttgagtttccagggggaagtgcatgtataatgaaatgataatggacttcaatgaagaatgtcatcaattatgtacatatgtattttcttttaatacaaagtgtaattttgtgccagtgaaatggagtctgaatagttatgtgtttcttttatccctggaaatatttattaaactttatagtttatccgagtatgttggatgctttgacaataaatgactattttcttcaaagcaa

SEQ ID NO: 12448 - DNA, 4675 bp, Homo sapiens
ctgcaagttcagggagcgttttcaagaaaatagctataatacctatgcctcagcaatacatagaactgaaaaaacagggcgggagtggtatgtggccctgaataaaagaggaaaagccaaacgagggtgcagcccccgggttaaaccccagcatatctctacccattttctgccaagattcaagcagtcggagcagccagaactttctttcacggttactgttcctgaaaagaaaaagccacctagccctatcaagccaaagattcccctttctgcacctcggaaaaataccaactcagtgaaatacagactcaagtttcgctttggataatattcctcttggccttgtgagaaaccattctttcccctcaggagtttctataggtgtcttcagagttctgaagaaaaattactggacacagcttcagctatacttacactgtattgaagtcacgtcatttgtttcaatgtgactgaaacaaaatgttttttgataggaaggaaactggaattctttgtactaatacagggagcacactccttcagttcagcaagacataaagccttttgctttatgcttgagggatatttagaactttgtattttcggaaagttaaataacagggactacgtatttttctgacttttacagattaacctgaaagaacatacatgatacatttttatttttggtttccaaagaatattttgatgcagataaaatattttgttaacttttgtttttttttgtttgttttcttaaaagtacctctgcattgagcatattttcttacttttattattttaattaatatgacataagcaatcattttatgctgtttatgaattataaatgtgtttatagctcatttgtaatatggaaatcttttacatttttcctattcactgcacttttttattgtttttatttctagccatacctcagataatatgtttagttttacattttaaaatgtttaaattctctttcacagcaccaaaggctcagcttggatttgtgtgtatgtgtatgtcaattcatgacattatgtggaatcctaaacctttggtggctgggatatgatgggttagaagcaaggagaaaatataaggactttttgatggaattaaatgtgggaggtaaggaaaaggatttagaggtaaaagtacactaagtttgcaacatttattgagatctaagtctgtcttgccttcatttctctttttatctcccccttgccctcattcttgaacagctggaggaatacattttattctgtccatgaagcatacactatgaaattcaagtgcttaaaaatacttctatgactctctgctatcccactgtatagatccacagggagcaaacacttagaaatgatagagaactgaaggagatcaatggtttaacagttatccatgccaagtcccattgtcagaaatattcttattactcagtcaaacactctttgagcttcccttcctaaaggtaaccaatccagtgaatagatgtgcccttttataaggaaacttctgatgtttattaaaaaaactggccttttgatagaggtaacttaatttgggaatttgttgtgttgaaatggcatttaatttcaacctaaatactgactgctggacataaatcacagaaaatttaacttaagaaaatttacaaaatttattctcaggtaatcattttaataaagttctgcaaaatacacgtttatcttacattcagaaatgtggcaaaaaaggcatagctaaaggctaaacatatggctttagtagtaacaaaagggttcatagaaacttcatggtttgcatttaaacatgtttaaagtgtacttataaactatttttttcttaaagcaaactatgatttattttggtgcacaaatacaaagtggaaacttaccaaaattgaactagctaccatataagcagattgctttaatttgatgggaaaatagtacacacatatatataacaaataatatattaaaaaacccatccatcaactaaaacattatatgtatacatcagtatagtgttttattataaagccaattatctgattaagcattctttccactgaatgcataatgtttaaatagcataaaatgaaatgctacaaaaattgaactaatttatactttaaagtatttctgggttaaatgaaacaatgaaattttttagtatgttcaactctcatccaaatggcatatgaccctgtttacacagcctaaagctaaaaatattactctagtttattctaatctattgttaagtattgtgcactgtataccaagttcttagggcacatgaaaaattttagctgccaaacaggaactagtaaacatatgttcctaataagtgaagggaaagataataatgatggtcaacaataagccacgtcaatgcataagttgtataggctaaatgttgcttgtaggctacattaaactcaaatgtaatagtttatcttatactcctggtttgatttgattagcatattaacgtgaaagtaggatagctactaaatatatattatgcaagtcaggaatcattaatttcaaaatttaaagccatgctaaaattaaaaagaaaatattaaattacacaattacacttgtctttactggccatacaaaatgattttttttttttttttgagacagagtcttgctctgtcaccaggctggagtgcagtggcatgatctcggctcactgcaacctccaactccctggtttaagggattctcctgcctcagcctcccaagtagctgggattacagactcatgccaccacgccagctaatttttgtatttttagtagagacggggtttcaccatgttggtcaggatggtctcaatcctggcctcttgatagtcctgacctcatgatctgcccacctcggcctccccaaagtgctgggattacaggtacaatgatgtataattaatgcttagtgaagcataaagttacctacatcaattaattaaatgaacttatgtacagaaaacatgtataaatataagtctatactaatgcttacaactttctaagagggttcttgcttatgtagctttttattattttaagtaactagaaccaccaaatatcaaataaaattatttggttatggttatgttcatctaaacacaacaataacttttatattaatatttaggagtctattttgtctataggtgacaaacatctccagactaacatgtcagttttatcaattatattatgtttaattatttaagatttctttatgtggaacatctatagagataaatagaaattttcaataagatgtagtaacactgtgatttatctttcaagagtctctcttcacttccttctaaagagactaatttgagagtacaggtgcatattaattttcttggttctttcagctgaattatattggtccagaagttcaaaatcatgtgacaataataagggatactgacagaagttatttccaagtttgtgtatatattataaaaattacatatataaaactaaggcttttatttctgttatttttaagcttttatttcttgtagctaaaaataaaacatcataaatctggtaggtaaatttcttattaaatcaatcttgaaatagaaaatgtaataactttcttaccattaacattttttacccttccatagaagggagggaataaatcatgacttatcccattttcaataacaaaacgaaactatggcactaaccaaaaacttgcattctggcataatttttacagttgcagagaattgtttctgggctcattaaaaaaagtagtattgcagacattgctgcaatgggaagcagacaataacttcttaaaggaattctacacctcctttaagatttacttaattgctacatctaaattctgataatttaaaatccattttaggtgataaaattttttaaaagttttgaaggaaacctctggataaatggacaaggcctaatttttttttgtagtcaatccaactgtactggccaatttttgaaataagattatatgattaggtattagcagagacaaagagttacctcctccatcttactctgccctatttgaaagtctcaggggagaaaagggaacaagatgctgatccaacctgagtggagtcaggtgaggcatctttacatctaagaatttttttttaaattttattattattatacttcaagttctagggtacatgtccacaatgcacatgtctgtcacacatgcacacatgtgccatgctggtgtgctgcacccaccaacctgtcatccagcattaggtatatctcctaatgctatccctcccctctccacccaccccacagcaggccccggtatgtgatgttccccttcgtgtgtccatgtgttcttattgttcaattcccacctatgagtgagaatatgtggtgtttggtttttggtccttgcaatagtttgctgagaatgatggtttccagcttcatccatgtccctacaaagaacatgaactcatcattttttatggctgcatagtattccatggtgtatatgtgccacattttcttaatccagtctatcattgttggacatttgggttggttccaagtctttgctattgtgaatagtgctgcaataaacatatgtgtgcatgtgtcttt

SEQ ID NO: 12449 - DNA, 130 bp, Homo sapiens
gtaccaacatgttaatttcctaataatttgctaaatttaaataaattccgtagacagagcaaattagaataataaatgagccctgtagctggaaggcaaattagaacaataaagttaataaagaagttag

SEQ ID NO: 12450 - DNA, 3995 bp, Homo sapiens
cctggcaaagaactcatttgaatgcttaattcaatcattagtttatttttatggacttcttcctgttttttttttttttttttttgcactgccaatgcattttgtttcaaaagattatttctatagtcagaggggaatgagcaaatagactgaagattgccaccaaggaaaagaactgtatttgtttctgaatgtaacttaaagcaagatttttagtaaatatggacatctatttctctttttgtaatcaaacacaacaacttatcaaactgtttttagaactgttagagaacacactggtttatttttgtaatgttctttgaaaacagaatggagaagcagcaatagcttgtcatttatctcatttaatgactaatgggaaatagagaacaatttcgcgttttgaattaggcttattgccttagaatcctgagaaagtgctaaataatcaactctgatgtttttcttaagttcttgagactcttgtttatccttgtttttcctccacaagtcattgtctaagtgtaatggaaagtttatgctgagcgttagtgtgtatgtatgtgcgtacatgcgccaggtgcctgtgccctctgtaggatggtttgcttaatatggttttataattcagtttacacaggattctttattttttttaattttgtattttggcaaacaccattcagttataagaactttgccaaatatgatagaataattcaagagcatatacagagagttaccacttgacccagctatttaattgcaaatacagttgttttcatttcatttcctaccagaaaaaggaatcagaaacctagtttttgaaaacacaagtgtaattcctcttttgtacttctttttcacaaatgcttttatttattctaaattgaatttaaaaatccttcctaaagccattaactctttaattctcctgatatgcctttacttcctatgaagttattggtagatgttgaggcccaaaaactggtagaatattgaagatcttcttaaatgaccaatttaaccataaccaaatattgaatatcattcttcagtcacatctaagtcaggcactttttcacatagatcagggcttttggctcagtcacgaaatctacaagttagcaaagcttacaaaacattattcgtcaggtatgggaatcaaatatagacacttgtttgtctttgctttccatttctatgtgtcacatacatatatgtgtcctcttataactttagtcttcaaaattatttcaatatccttcttctcactatatttatttgtgtgatggaaatgctttcaggccgtagatcattgttggtgttaatctgtggttaatcctcattttagttccgtcttatctgatacttagaaatatctcagccattttggaggctgtgcagtatcagaagacgtggagtttgttctgtctctgcctgtagctaattatggtggttcagtcatttaataaatatgttttgagcatctattttgtgaaaggcactgtgttacctgtgtgtctttagtgtcctcactggtaaaatgaagaggctggccatgagctggaagggttaagtttataattccagctatttcacacccgtcttccttgaaggaatgatagtgatagatataaaaacactgtaagtccctcttttaataaactaaatgaaagaacatcctatacttcgctgtttgtaaattagtatggcattcgctttggtttaagtggtattttattgcaaacccattaaaagaataactcatgaaaagaagctctttgacaccttggggtacacaaatgttggtgtgggtgtgtgttaattctgtgagtgagacacaccagttctaaaaaaaatgagtgaagttctggtgcctgagttaccatgctttcttctagttcttacagtagcataaaattaaagattcaaagtgagatggaggataaaattactttttaatacatgttctcaaacatttgaaaataaaagtatatgatagaagggggccagagtgtggccaccatcctgatcgtactgtttttcaataaagaaaactttttcattggtagatttggtgaaattctaaatttaggtttttttctagagctgtatcaaccaaaacttctggcaattcccagtatcacttcttagccttcttatatccaaatgcctgtttattacctttcttaatttgaatcaatgcctagttattacagattgcaccccacaatggccaaaaacccactacataataaaatttacaggtactaactagttaagattatattttaagtagcaattgatataaaattacaacacaatgaaagaacttgggtaatctcttagcaatggaaataggttttaaccagcagtttttctgggtgctttgtaactatcattttactaatgaattgaggatgtattatggtttaaattggaagagttttattcccaaagaataaagcaagattatctttcagtagtagagattgaagtaaatgtattaatattttaattaatacagatttactaagagtagttagaaaatttagtaagtgcctgttttacaaattgttaggtactagtttctgtataattcctacacagaagctttagaaatctcctgatattaaattattaaattggcattcatgaaaagagaagctacaattataaactccatttgctaaatcatgcataatactctctctctctcttcccccacaagtaatctctctaccccatgcagtgtgcacacacacacacacacagtcagttactgaaaaaaataattctttttctttttttttttaaatggagtttcactcttgtcgcccaggctggagtgcagtggcgtgatctcggcccactgcaacctccacctcccaggttcaagcagttctcctgcctcagcctcctgagtagctgggattacaggtgtccgccaccatgcctggctaatttttttatttgataaaaagaattctttttctcaataactgttctcttgaattcaaattaagggactgccaaagtcaattagaatattttaaaaatactttgttgtaacctgtgtaaataatatacaatttacaggatttgggattgtagaacttaaactggaagactggattcctcagatctcaggactataacattccagataaatttttacattccctttgctgtatattaactgatgatcatttatatgttaagattttttaccttaatatttctgaataaaactcttattgcccatttaatattttcataggcaatcaaatgtgagtaatactgctaagagtctgatttattaaaaatatttgtataattcattcagtttagtttttcagtttagtctttctgctttcacttttctctgtgctaacaagtaactaatgtctgggcattgacttcttattgaatcaaagttgggttaggcatagctatgcacacctgatgtgtaagattaaagaagagattaaataagaaatcttgggtaagttggacttttctgtatagctcttttttcctctgagttgtattttaatgtagtttataagtgataaaatgatccttgttttctaaaagccagtccttcccttcagctttccacagtttctgtaaatgtttaatacttgtacagtcaatggcaattttaaatatatatatatatataatatatgtatatggaaaaggttcaaagatgcttttaatttatttaatgactattgccttcctataataataattttcatccttaattatgataatacttttagcaagaaaaattcctttttactacagtttttagatgcaaaatgcagtttggttctttagtcaaatccacttagagggtatattgcagtgaaactgtgaaggatacttcactaccaatgtataagctttgttgaatttgtatcattttctttcagtaatgaaaagctattcattatacagtatggaaataaaaattgcttcattga

SEQ ID NO: 12451 - DNA, 967 bp, Homo sapiens
agaagggttgttaaggcagaccgccctgttccccagagttgtccctgtagtgtctaggtttattctaatggtaaaagtaacttacttaaaaaacatatgtacacatatgtatgcaagtatgtatatatgtgtatgctcagattaacttccataggtacataagtgaaagaagtctcagttcagtgaacacaaaacttatttaaagatgctttatatgtagaaattgtttcaaatcatactctaacccttagtgagggcaaagtgtagttggtagaagaaattgctaaatacctatctaatgtgctatgtttatcaaatcgtgtactaaaatggaaagctagttttgagaaattattcagaagccttgttattttaaaaatgaaatatttcaaagactgaatattttcaaagaaaatgaataattcattgcccttgtgatttagaagattataacagctgtatttcatatttgcctccttatatatatcaaagaccaaggtatttccttctgcttcaaaagaacaaaattgggaaagaaaactcacttgagtcttgatcaaacaagtgtcttttacttaagaagaaacttggtaatcattgtggcacccacagcaagcagttgccttaccagtgaaaaaggtgcactgaggtaacatctaaaacagagatgtggttcttaatgtttaacagaacagttctaatcctgccacgtgttatcattatagattttatagttgcctttctaactacttagcacagtttgagaatacgttaattgctatttactatttaaaaagttttactgaaatcagtccataacattaagatgagccctaatatgtaagattttcctctggaatggatgtgagaaatgtaaattttataacagcagtatttatcctggtttaattctaatacgatgtcatgttaatttcatgttgtgattaataaaagcattttttcttca

SEQ ID NO: 12452 - DNA, 1044 bp, Homo sapiens
gagacctaaaatatattaacattttaattaagaatacttgatcaacattttttgaagttcaatttaccatattttataaattgcgcattctgcacagtggacaagtttgcaattctgacttattaaaatttcaaattctgcatatcacaaaatctccttatacttttggtatggcttgcagcatttatgagttttccaaaatatagaaagcagtaggtcagtaggagcaaactagccaacaggtactgtctttgaatttactactgtaagactaagcagtgttactggacacagttttaacttgttcaatctgcttcaaaaacaagaaaaacaacaactatgagttatcaaaatattgactccatttatgactagactacatttctgaaagatctttggtttatgattcttaagaatattgacaatacctataaaactttgaagataacttttacttaaatatgaaaattatagtttgaaaattaggctcaagcaaatatcaaatactgcaaaaatccccttgtcccaggataccctaaaatagaagtgcttaaactttgtcaggcagaaggtaaagtacatgagccatgagattcttccttgtgctgcagccacgctggggagtgcaatctggaaagaacatacctaatgtgtttttcaccatccattatctctgaactttgaaatattacttttgaataataggctggacacttagtttgacttgaaagagctcaatgctcatcggaaaacagggagaaacctaatctgaagatggaagcatactaaggacaattttctccactcacatccacatttgaaaagagggacagaaaaacataggtaactctactttcacaaatgaggatagtttaacggatagaagaaacaagcacattattcacctgtgttgtaaaacatctactcttttttgtcactgaataagtgttcccaaagtacagttaatcctaatatgaaaacttagaattgtaaaagattaatgataacgtaaaagtatattgattaaaattccccttacaaagt

SEQ ID NO: 12453 - DNA, 387 bp, Homo sapiens
atccttgcagaacttctgtgcacatgacatctttttccatgttgtgcagatcagtttcactatctccaaagcatttgcatcatgaccttatacatttcaatcccttttatgctggattccgtttaaagaagacattattagagcaggaagtacaagcatttaaaatatgtagttcccatatatttcagggtctctgtgtattaagctaactcagatgttttgaaagctttttctttaaacagaggtgaaatatctgtggctaaaaagtttgagatttgtgataactttgtagtcatgtaaaacttaagtgcttcatgcctctccaaatgtggttattctaataaatggagaaatgagccaaataaaagtagtactttgtttttagtt

SEQ ID NO: 12454 - DNA, 526 bp, Homo sapiens
attctatcacgttaccactaataaacttattttacagtaagtggttgtatgatgccaatactgactcaaaccaacctttggatagaaaagtgtttgaggagtgaggtaaagaatgacacttccccttcataccaatgtccattaagcagattgcttatttaaaatgttaacactcatcacattttatctatgttgaataaaagtggttctgtgtgattgtcatttatatctgatccccaaatagctcatacaataatccattcaatagaatggaattaaaactgttcagaatgattttccaactagcaaatataagtatgcctggttaagatatcttccctttgtagaaatgttacattgggatggatagtggtgctgtcacagaaggacaaaatattcctagacgagtctaccctcaaaccagtagtgtcttttacatgaagagatgatttacacctaatagacattgaatatgatagacatacatgtatatatgtatcagttctgagttccactggcctatccc

SEQ ID NO: 12455 - DNA, 1105 bp, Homo sapiens
gaggacggatgacagcctttagatctagaactagcccttagaaatggaatggctttttttgttttgttttgttttattgttttgtttttattattgttaatcttttctacagaatgattgtctctacctctttatgccagaggcagaacctacaggtgccctttttggcttttgttgttgttgtaacattagccccatggattgtaaggtggtttactgagttaaaacagattctgcttttgtaaaatgatggcatcactgtggactgaatgaaatatttgtatagaaaaaagtgcttgaaaagtgtgtttggaactcatcgatagggtaattctccaaaaatgcccaaactctttttctgtaattagccttgccactttcttcagtcacttaaatggtgagattacacatcagtgcaagatgaccattatggttatggtctactgcaaggttgaaaggaaaaatggaggattgtatttaggaaaagggacaactttgtggccacctgctctgaaagtcaaaaggaaatgtaaattagtgtcattagtgtgttggaagagaaatactattcagtaagcttcgccaaagaaaagtgagtcaaagttaatgtgtgtgcgcatttatatgtaggcagctcgtagaccacattttaaccagcaactggtaacaaagagcttagttttccttgtttgaatgctgtagatctgtacctagtacccctcccatctactgatttgtttgtttttgtaaccaaacacattttcagatagaaggagccttaaaaaaaaaaaatcacattgagtaacttcagtatgaatgaatgagagtgtgtggagctacccctcaccctccacccctttgtgctttttattcccgaattttcccagtctcttaaacagaaaaatgactgatataattatcttttggaaactgagccttaattttttttagagggggaaataagttttccccaactcacacagcataagcaatgtttgacagcaatataatgccgttgtaaactactgagagtattgtatctgttctggtaaccatgtacagaatgtgaaactgtcttatgaatataaataaattctatatttct

SEQ ID NO: 12456 - DNA, 500 bp, Homo sapiens
ctggatccagagagggaaggactgacaagaaggaattattcagaaaaacactgacagatgttttataaattgtacagaaaaatagttaaaaatgcaataggttgaagttttggagatatgtttctctctgaaattactgtgaatatttaacaaacacttacttgatctatgttatgaaataagtagcaaattgccagcaaaatgtcttgtaccttttctaaagtgtattttctgatgtgaacttccttccccttacttgctaggtttcataatttaaaagactggtatttaaaagagtcaaacactataaaatgagtaagttgacgatgttttaagattgcacctggcagtgtgcctttttgcacaaatatttacttttgcacttggagctgcttttaattttagcaaaatgttttatgcaaggcacaataggaagtcagttctcctgcacttcctcctcatgtagtctggagtactttctaaagggcttagttggattt

SEQ ID NO: 12457 - DNA, 1947 bp, Homo sapiens
gcctgctttcgcctgctgtctctgatggctctggcaaggactccagggattctggtgggatatgacttagaaccaggtggctggtcacctggatgtacagaagtctaactggtgaaggaatatcatttacagacattaaacatccatatctgcaatgtgtaccaaagttatatcatgccccataatgctactgtcaagtgttacaactggatatgtgtatatagagtagtttttcaaaagtaaactaaaaatgagaagcatatttcaagaattattttattgcaagtcttgtatttaaatgttaaatcaatatgttgttgcaatttagcttgctttcaagcttcaccccttgcacttaacataagctatttttggcattgtgttatcatcggcttattttatagatcaatatttttatttcccttttttgctgaggaaatgaagataagcaaaaatataaatatatatataaatatatgagttattaaaatcagaagaatactttgtggctgtgctgtttgtgccaatagactttgtcatgaccaaaaagagaaatgtaaatagttttataaaatacagtcgaatcaccaggaacctttgagctgcttttaaaattcttcccctggcaccactcagttttgcttttgcgaggcgatttgacataggaactttgagactccatgagaaagtccctttctgaggcccactgtctaccttgccagatcctcagtgcgtatcgccaatgcaggatgctccttagaaaagaaaaaatggtaaagaatggcatttaacgattcaggctttgaattactctgtccctctggaccgaatctctttaactgctggatagttttagaggaattctcctgctacttaggtactgggaaacaatgcttgctaaaccatgcccacgtgagcacctgtctcccactcaaacctctcccatctcccaacaactgcactttagaataccagcagtgaaatggtattactgtttccctctgagtgaaactgctagagtatatgtcacgtagtgacatttttttctcactcaggctattgccatctgggattctctccctactacagctggcaaagttggtttgcagcaagaagatagtgggagggggccaggctgcaggagaaggagaaaagtttagaagaaacaaaccattttgcttctaattttgacagtatcactttcctgttaaaacatacaataattttaaaaggtgaatgcctaaagttccaattttagcaaatatgggaacctcagcaatgctaattttctagaaaaacccagggctctttggagctagagttttgggagaacagttcttcacaataaggcaatggttttgagaggccaggcaaataatctttctcaccgtagaacaaaaagttacaaaaggcataatcggaaatagagactacatacttgagtttatggggtttgtgttgtttgaaggttcaatgcttgcatgtgtttatttattttcaagagggaaagtggtctgtactgctttcatccttgccactgtcttgcttttattttttactctcccactgagcaagcgtctgtggtcctatggtatcaaccagtatctttatagcaataatttctttaattcccttttctctctctttccaattatttaaccagttacttccacctggacatacgataggaaattcaaactcaaaatatgaaaattgatcttaataactctcccttcatatcttttcacctatttccagtccttatcatagttgataaaaacctcagactcatccagaaagctatatgatgcactagtaaaaaaaacaaagatattcaaactgcttgggttcaaatggtatacaatttgccagctgttactgaaccttctatgcataactttttttttcctctgtgcaattggaataataaaaatactactcccatag

SEQ ID NO: 12458 - DNA, 598 bp, Homo sapiens
catgaaaagagcctctggatgcatttccatttctctccttaacctccagcagactcctgctctctatccaaaataaagatcacagagcagcaagttcatacaacatgcatgttctcctctatcttagaggggtattcttcttgaaaataaaaaatattgaaatgctgtatttttacagctactttaacctatgataattatttacaaaattttaacactaaccaaacaatgcagatcttagggatgattaaaggcagcatttgatgatagcagacattgttacaaggacatggtgagtctatttttaatgcaccaatcttgtttatagcaaaaatgttttccaatattttaataaagtagttattttataggggatacttgaaaccagtatttaagctttaaatgacagtaatattggcatagaaaaaagtagcaaatgtttactgtatcaatttctaatgtttactatatagaatttcctgtaatatatttatatactttttcatgaaaatggagttatcagttatctgtttgttactgcatcatctgtttgtaatcattatctcactttgtaaataaaaacacaccttaaaacatg

SEQ ID NO: 12459 - DNA, 5337 bp, Homo sapiens
tggagccccaggttgattcaatgccttgggaactatttttgcacattggaagcctcaaaaacagtccagacatttgtttcatcaggacaccaaactctaaaaaagaagcaccacgagatggccaggacatttgtccacttaaactctcaacaacagtgtgatcattggttggacactgtggttatgcagaagcagagatgaggaggctggccccagagatgatcttgcccttcctaactaaaggacagaagtgcaatttagcttaaatgggtgtatgaatggtctagaaacatttctattttttttttaaaccagcaggatacaagttgcaaatgaaatgaggagaaacagtttcaactctgaaagtgaatttcacgtcatctcagtagccacgctagtccattcccagaaggaaatttttttttttaacaatgacttttggtaaagggttttgtggatgattttttttcttttgagttttgggagaaatatttgtttagtaacttctaatggccatctgtaaaccataagtaatgaaggactccactgtgccccactttctgccaatgaacagtggcttgataataccaagtattgttgtaatttataaaattgaaggcaacccccgctcctgccgcccccaatctccccattgcctagagcgctgcacattgaccccagctctgacttctcattactgtgctgaaagtcagcccacgtcggagcggtgaggaggagccacagcacatggggtgccacctcgaggtctgcacaggaggacttggcgctgccatttcctacccctgccatttcccacccctgcttcagcgaaagggactctctaacagggcagtcactgttgactctattctgaatttcctcccttggggaagaagggaaccaacatttatacctgaccagatggctaaagtgcttttaaagttttgtttaagtagagctggaatttgaggtgctgatctgtggtctacagttatgtggtaactcatgttgtccagccaactcagagtttcgtcagtgaacaagaaacatgaaatctgcttcttagagaggctatatttttctgctacaaatattttatatttatagcaaaactagactttcagagtccttgattgtctaggggaagttaactccctgagaggatgtagagatttggggtggttgattagacttttgaaaaactcatcaccacatgccttcactccagagtgttctcagctagatttgatttggttgaggaggaactgtggccctccgtaagttattgccatagtgtatgcattaaaccaagtccattttgaatgacctaaaatgaagtaacacaatcagaaatcccatgtgcccataagcacagatttttctttttcattgaaactttaaaggttattattggaaacattactttgagtgcagtgtttttaaaagccaattcttttttatcccttttagaagtagaatttgcacacttactacaattgaggagtgtcatctctataactttttctccgcctttgtcccattctgcccctgtacatgtttcctaccaagcatgtttcacattttcctattagtggaggagggagaaccatatttatttataatgaagacatctaagatccctatgatgaatgcaggaactctcttggtagtttgtaaatacacaaagggatgtgtcgagggatgggagcgatgcttatctctcacagtgtgagtggtctgtgtgaggctgttccttcagtttcttctccagactgttctttggttgtcactaagtcagaggtctggtccctcatgtttaggtgaaagccagagaatgacagctgtagtcatatctgagcataagaccttgatgtgtgattcctgatgaccggtttcatttattcatgttataaagcaaagccctggtcctttttaaactactagttttaaaaacctgtgttaaatgaacagtaattgcctggtaggtttggtgtgtgtgtagcattgtgtgtccatctgttatatgtaaaggacaaggcaccagaatcaggctttatttcgatattgaagatgttatttaacatctttcttttttccttactcccttagccatcccctccccttttgtcctatcattccctagaacaagccacctgtcaattgtgaagggttgtgttctttatggcaggttctatgcagattgtgccagagcatgtgcgtgttctgttggcaagccacagtgctcccttgactgaagacatttccaggtagatttctcagccagctctaaaacagattgctttttcagtggccttactctttgtgggtttttttttttttctctgaacttgatataaagattttatttgtcccttgaaaaagtaacaaatgtgcatagatcaatttgtactactttggtcattggatatttctgatccttattgcattgtacctaaaggagagtaactaatggtaacctttttaatagagtatgtgaaaggtagtggctgatgaatccttaacgttcatagggtctttttgctgttacggttgtatatagaggtctgaaggatttttaaaatgatttgcactttttcactgcatgcttacaattcccaaaggcaaaatctgtactgaggtagatcatttgaaagggctagattataaaattaagccttagagtatggaaagttcttataacaataatagtacacacttcagagtaagacaaatgcaaagcatcttaaggagtgaaaatagagtgtaaatcttgcctttggcactacaaggtgtgtgtgtgtgtgtgtgtgtgtgtgtgtgtctttagtaggaaatggaagaacactgttttattttttaaagtgtttaatgtttctgtcctttctgtgaattattgaatttaagagccctgctaaataatgaaaaaacactttactaaaatttatcaaattatactgggttcggattgtgaaaacattggccacctagtagcagtggtgaggagtgggagggcccagcaagcatttatcagaaatagaatcacaataggaggagaatttgactgtctgatattatgatttgattacaatactgaatgggaaaagtatctaatattttgtaacaaaaagaccttcatattatctgttttgaccaaaatatgtagctatttcccttacacagattggaccgcacttatctcccttgtcctgtatcctttaatttcaggtctcaggatgtttagaaagctaaaaccccctacccctttctggctgaaaacttgccttatttggtatcttacacattaatgttactagcatcaggagcttactgttttattatgattcatcttcagtaatttttagaagcaagaagaaagccattgtgtcctctacaattaacaaaacttatctctgatatacaaagggatataaatatatacacttaaatagagaaaaagaggttgattgaattgtgcctttgagtgaacccagtttttaaataccgctgtgtttgtttcgccatggcttcagggatgctacatggctcttgcaccttttactcctctgctttatgaagtttgagttgtatttgtgcatcttaaagtaggttgaggcttgaggctgggctttcgggtttttttgttttttgttttgttttgttttgttttgttttcttgtacttaaacctgcttgcttcctaccacagattctttattttcccaaacactacaaaaaaacttttaaaactttgccatttcatctgtttacactctttgccactgattagcagtatttaaatcttgcaagaatattttgtgctttctttagaaacacaagagtatagatttttctcactgaaaagtgagagttacgcattgcagccatgaagggatgctaggatcaattatggcagtaccttttttcccctcctgttcttgagccagttgtctcttttgttttgggtcccacttaggattaatggatgtaaggtattttcctgtgcctttattttgtgtcattctattggaaggaggtgtaacggcagaatagcatcgtgttgggggttttccttcaaacactgcaagtgatattgccaccatgtgaacctcaaatatgcaatccagttgtgttggtttctcggtgacttggagtgttcatctcttcatgaattgtgagcactgaccatgttcttcagttcttaattatggtgagttgacaaataccaactactgcttttctttaggtggctataaatttcttactgtcaggaggaaatgacattatattctgttccactgaacgtcagagatcagcaggcactgtactgggtagagaagtgcctatacttctctacctaagagggcaggagggaaaccctacagctccttgtgagcctatatattagtatatcggcctggagaggacaagggaataagaccactcatagtgaggctggccaagctgcactggtcggaccaggcagtggctgacctaaggaagacaacttgctttgcttaaaagtagattttttaagcaatgcttaacacaggcagcattcacctttgttcaggccatcgacatgtattgttaaaattactgcatatccccctcagatatcaagtatacactgttcatgttggggttgtgtgtgtgtatgtgtgtatgtacgcacgcatgtgtcccaaatcttgttttaattttttttttctgaatgtgatcatgttttggatgatacctgagcagggttgccttttttttatttattaccattatatattatattatattatattatatattttttgctttcttataactttggaggaaagtcaaatcttggtattattaaaattgttttaaaaaggagtaaattttccagttgataaatgaaaatcactggcctatgtttaataagtttttctttaattactgtggaataacgtgccagctatcatcaacacaatgattttgtacatagggtagggaagcagtgatgctctcaatgggaagatgtgcaacacaaattaaggggaactccatgtattttacctacttcagcaatggaactgcaacttggggctttgtgaataaaatttagctgccttgtatagtcgtttgaaagaatatgtgatctgtgagagaattatagtttttttttagaagaaaaatctgcaaaagatctttccaaagacaatgtgccacagatcttttgttctctgtaatgaggattaattgctgtttaaacaaaaatgtaattgttcatctttaaattctttccttttcataagaggatcaagctgtaaaaaaacaaaaaaattaataaaaatttcgagaaatc

SEQ ID NO: 12460 - DNA, 324 bp, Homo sapiens
ctgatggtctccgtgtaagccaaaggcccacagaggagcatatactgaaaagaaggcagtatcacagaatttatactataaaaagggcagggtaggccacttggcctatttactttcaaaacaatttgcatttagagtgtttcgcatcagaataacatgagtaagatgaactggaacacaaaattttcagctctttggtcaaaaggaatataagtaatcatattttgtatgtattcgatttaagcatggcttaaattaaatttaaacaactaatgctctttgaagaatcataatcagaataaagataaattcttgatcagctat

SEQ ID NO: 12461 - DNA, 303 bp, Homo sapiens
aacaaaagaaaaacccgtaagattccttttgtgaaaagtttggtaatgggataggaaaaaaagatttccaagaaagtaaagaaaggggagaaataaacataagacgtatgtaaacaaaaacaactgggggaatcaaatcaaacagttggattcagaaccaagacctaactcctgcagagacagactctgaatgcatgacctttggtacatgcctgttaatattcatgttctgaaaatattttgttaaaagtgtaaatctaaacataaaagaacaattaaaatattctttaatacttcacacag

SEQ ID NO: 12462 - DNA, 1038 bp, Homo sapiens
catcagctgtcctaagaagcagttgtcacataaaggagtcttagggacttgaaaatgtatcatgataactataatttattgatgttttgatcaaaagaataaccagatgccatatttttcctgaaaggaattgctggacattacacttgtttttagggtgtcatcatttcacagaggtttaaatactgtggagtgacaccagaacacagccaaagaggctagaagcaagaaaggatctgcatgataactttgcagctgagatagttcctaattcatcaacgtaacaaacaaagctattgggtgtccatgatataccaggcactatgctaggtgttgagaatgtaaagcaggttaagacttgtttcttgctcctgaggagcgtatagaaggacccacaaagctacagagttaaagagggatatgtataagagaaacaagaattgttacaacccagtatggtgagtgccaagacagagagctatgaacacgatatctatctgggaacactgagaagggtgaccaatgcgttggagaacgagggagggcttcatagcagaagacattggagttggaaggttgcatagggtttcctcattggagaccgggaaattctattcttgggataaataatagtaaattctataggattcaatacttagtttgcaaaagcactttgaaattatggcacagtgagttgttttggataagaaaatctttttctcccaattaatttaccaattcatcatttttttttttttgtagaactcccataaacatcaccttactaatcactggtgatgataagaaggattgggtcaggaagagtgggagaaagaaattcctctttacgtagatactttttagctttattttttctaaaatcagtttgcgtgcaatgctagaaaaaaactgttctctgagtcctttacagagcaaaattctgtatgtaagattcaattgatttttgacaaataccatttgaaatattacctcaacataaaatacttgttttgtaataaagattataatacccagaag

SEQ ID NO: 12463 - DNA, 12 bp, Homo sapiens
agctccagcctg

SEQ ID NO: 12464 - DNA, 344 bp, Homo sapiens
tccaccaggagttcccagcggggtgacagtctgaagacctcgtcacctgtgagttgatgtagaggagagccacctgacagctgaccaggtgaagagaggatagagtgaagaactgagtgagccaagaatcctggtctccttgggggaatttttgctatcttaatagtcacagtataaaattctattaaaggctataatgtttttaagcaaaaaaaaatcattacagatctatgaaataggtaacatttgagtaggtgtcatttaaaaatagttggtgaatgtcacaaatgccttctatgttgtttgctctgtagacatgaaaataaacaatatctctcgatgat

SEQ ID NO: 12465 - DNA, 514 bp, Homo sapiens
aaggagaaaaaatacaatttctcactttgcatttagtcaaaagaaaaaatgctttatagcaaaatgaaagagaacatgaaatgcttctttctcagtttattggttgaatgtgtatctatttgagtctggaaataactaatgtgtttgataattagtttagtttgtggcttcatggaaactccctgtaaactaaaagcttcagggttatgtctatgttcattctatagaagaaatgcaaactatcactgtattttaatatttgttattctctcatgaatagaaatttatgtagaagcaaacaaaatacttttacccacttaaaaagagaatataacattttatgtcactataatcttttgttttttaagttagtgtatattttgttgtgattatctttttgtggtgtgaataaatcttttatcttgaatgtaataagaatttggtggtgtcaattgcttatttgttttcccacggttgtccagcaattaataaaacataaccttttttactgcct

SEQ ID NO: 12466 - DNA, 2082 bp, Homo sapiens
tatgtgtgtttcagtatgtgtgtttctaataagtgaggaagtggctgtcctgaattgctgtaacaagcacactatttatatgccctgaccaccataggatgctagtctttgtgaccgattgctaatcttctgcactttaatttattttatataaactttacccatggttcaaagatttttttttctttttctcatataagaaatctaggtgtaaatattgagtacagaaaaaaaatcttcatgatgtgtattgagcggtacgcccagttgccaccatgactgagtcttctcagttgacaatgaagtagccttttaaagctagaaaactgtcaaagggcttctgagtttcatttccagtcacaaaaatcagtattgttatttttttccaagagtgtgaaggaaaatggggcattcctttccactctggcatagttcatgagcttaatacatagctttcttttaagaaaggagccttttttttcaactagcttcctggggtaaacttttctaaaagataaaatggaaaggaactccaaactatgatagaatctgtgtgaatggttaagatgaatgttaaatactatgcttttttgtaagttgatcgtatctgatgtctgtgggactaactgtatcacttaatttttaccttattttggctctaatttgaataagctgagtaaaaccaccaaagatcagttataggataaaatggcatctctaaccataacacaggagaattggaaggagccctaagttgtcactcagtttaatttcttttaatggttagtttagcctaaagatttatctgcatattctttttcccatgtggctctactcatttgcaactgaatttaatgttataactcatctagtgagaccaacttactaaatttttagtatgcactgaaagtttttatccaacaattatgttcattttaagcaaaattttaagaaagttttgaaattcataaagcatttggttttaaactattttaagaatatagtactcggtcaggtatgacggctcacgcctgtaatcccagcactttgggaggccgaaacaggcgaatcacttgagcccaggagttcaagaccaacatgggcaatgtggcgaaactccatctctacaaaaaatgcaaaaataaaaaatatagtactcaagtattcttgatcctgtgtttcaaaactagaatttgtaatgcaaatggagctcagtctaataaaaaagaggttttggtattaaaagttcatacattagacagtatcagccaaaatttgagttagcaacactgttttctttacgagagggtctcacccaaatttatggggagaaatctatttctcaaaaaaaaaaatcttcttttacagaaatgttgagtaaggtgacattttgagcgctaataagcaaaagagcatgcagtgctgttgaataaccctcacttggagaaccaagagaatcctgtcgtttaatgctatattttaatttcacaagttgttcatttaactggtagaatgtcagtccaatctccaatgagaacatgagcaaatagacctttccaggttgaaagtgaaacatactgggtttctgtaagtttttcctcatggcttcatctctatctttactttctcttgaatatgctacacaaagttctttattactacatactaaagtttgcattccagggatattgactgtacatatttatgtatatgtaccatgttgttacatgtaaacaaacttcaatttgaagtgcagctattatgtggtatccatgtgtatcgaccatgtgccatatatcaattatggtcactagaaagtctctttatgatactttttattgtactgtttttcatttcacttgcaaaattttgcagaattcctcctttctacccataaattacatatatttttcttctttagtcatggagaactccccccctcatctcttccctattatctttccctgtgtactggtattattaaaaagacattacatacgcaagtctttctcgacaatcaagaatgttattaatgtgtaatactgagcactttacttcttaataaaaacttgatatagtagc

SEQ ID NO: 12467 - DNA, 636 bp, Homo sapiens
tcacctctgagagactcagggtgggctttctcacacttggatccttctgttcttccttacacctaaataatacaagagattaatgaatagtggttagaagtagttgagggagagattgggggaatggggagatgatgatgatggtcaaagggtgcaaaatctcacacaagactgaggcaggagaatagggtacagagatagggatctaaggatgacttggacacactccctggcactgaagagtctgaacactggcctgtgattggtccattccaggaccttcatttgcataaggtatcaaaccacatcagcctctgattggccatgggccagacctgcactctggccaatgattggttcattccaggacattcatttgcataaggagtcaaaccacaccagtcttggattggctgtgagccaattcacctcagtctctaattggctgtgagtcagtctttcatttacatagggtgtaaccatcaagaaacctctacagggtacttaagccccagaagattttgctaccagggctcttgagccacttgctctagcccactcccaccctgtggaatgtactttcacttttgctgcttcactgccttgtgctccaataaatccactccttcaccaccc

SEQ ID NO: 12468 - DNA, 276 bp, Homo sapiens
ccagcttgcttgtccaacagccttattttgttgttgttatcgttgttgttgttgttgttgttgttgtttctctactttgttttgttttaggcttttagcagcctgaagccatggtttttcatttctgtctctagtgataagcaggaaagagggatgaagaagagggtttactggccggttagaacccgtgactgtattctctcccttggatacccctatgcctacatcatattccttacctcttttgggaaatatttttcaaaaataaaataaccg

SEQ ID NO: 12469 - DNA, 1575 bp, Homo sapiens
ggcttctcagcttgtccagtatttcccttcgttcctcagtgtccacattgaggcctatacagaaaatcatggggagtgatttctatttttttattgtctaagtgggttgggacttttaaatactgagcctggttgatgtgtttctgggattgtatagcagtaaacaacctttttgaaaaattagaggttggggatggggtgaaaaattggcccttgtatgggaggtgtttttgtttttgttttaaaccaaactacccagtattccttgcacttgtgaatgtgttgcactctgctggatgaaatggcagtggatttttaaactttaatttcccaaatgtctctctcagccctgatgttttctcacagtgcttccttgtccttctcttaacttctcattcctctataagaatgatttagactgacctgtccttttttatctgcgcatgcgagaacatcaccttcctctgtacacttggaaatgcctctggcttgttgcagccctcctttaacccaaaggaggaaaggactgcttcagaaactcccaattccaaaaagctgagtctgggtccattattttggcagaactcctaagaatttatgggagcctatataaacatatcttgcttttaaaaagttcttgagggaatagcaactttcccatggctgtgcctatttcctagaccttttaaaagatgtgcagagcagcttagcattcgttgcagctgagcctaattttttcttgctcatccttgtccctttgacaataaggttaattgatagacccaccacctcttgcactctcgcttttggagcaagttgcattaactattttgagtctctatattgtccaagaaaagtagaaataataaatttactttccctttttctatcaccttatgtcctctaccattttctccttcctcccttcccttattttctccttttcgtaccctgtgtcctccctgattttcctttcgtttcttctttattttatcccattctctgttacttgactcagtgctcccttcctctcctctccttctagtggatgcatgcagcctttttttcaatttttatttaaattgcaaaatttttactcagattttttttcctcttccctaattgctaagatttaaggacgttctttattatgaaactttatcacattcgaaatgtttgtttacagtgggattttaggggggattgtgtttaaatcaaatatatgtattttaaaaataatgacatgctcaaccttcctcatcatggagtaagaaaattctacatgattaaagaatccatgtaagtctaattttaaattcctagtaactagagaaaagacttatttatataaaatgaagtatttatgaactgtgataaagcatcaaatcttgatgaaggattgtagatttttgctttttctttttgtttttaaaacttattccaattgctaaattggtagtttttcagtctttataaatacaggattaaaaatatatatacagttatatgaaatgtttattttctatgtgtgtgcatatagttcaatattatgcaataaatttggtgttttaactt

SEQ ID NO: 12470 - DNA, 349 bp, Homo sapiens
taaggctcttaagtatttcagtgtatctgcatctttgtgactatctgcagtgaaactttgcttgtttgaagtcctgtggattccaaagccaaatacattttataaatgattttggaattagatgtcagtttggattacttaaattacaactctttaatgttgactctagtcattgggcattgacgtgtaacttgtctttctactgtttctaatatctattaattagatcataaggtacctgaggccagggatcttgtgtctgttgtgcctgaatttggcgtgtctaataaaggcccatgcacactataggcactcaataaaacttacatttttatgatttttctttgaa

SEQ ID NO: 12471 - DNA, 1209 bp, Homo sapiens
gttagtatgaaaaacagactatcacctttattgagaaacagccagtgttttcatttatctttgcttgcacatctgctctgttttggtttttctacaggaaatgaaaatcaacttgtttttttaatatgagtaaacttgtatgtctattttataaaattatttgaatattgtttaatgtctgaatatgaaagagttcttgatcctaaagaaatttagtggcacagaaaacaaagtgaatttgttagcataattattcctattcttatttcttcattttaagtcattgcaatggaaagtaatattataaaatggtaattacaacatattatcagtcacagttttctttccaattaaacacttaacttttgttattccctgtatataaatatataacacacattttctagattcacaaatttaaataaattactcaaaaaatgaaaattgattttgtaaacttttatttttactctttacgttgagttgatcaattttccatactaagattttcattcagaatcaaaattaagaaagttggactgaaaatatgaaaaatgcttaactattgttctcttcctataattctctaattataacatagtaatttacatgtagttggacatgtacactcaagtctaagaatatatgagtggatcatttaccgccccccgccccacaacatctataaggggcaaaaagtctttttctaataagtattcttctatggtagtacctacagatctgcccttcttcttctaaagggtaagtcataatctgtgtaatactacaatttatgggatgctcactatgccctgtttctcttctaaacaatttacatgtaatgtctcattcctcacaataacccttgtaaagtgggcatgattaccatgatttttatagttgaagaacctaagacacagagaccaaggcccatgagctcatagggctgaggcaggatttggaatcaggccatgtcttctccagagcccacatccatcctttctctatattgcctcccacagatgtgctaaaatttatttaactaatcctttatcctctatttgtgttgtctcccattttttattattacaatattactgtggtgaacatgcttaaaaatacattccttggatatctgacaacgtgtttctgaaaaacagattttcataagtaataataaaaataataataaaaaagttttggtatggt

SEQ ID NO: 12472 - DNA, 1534 bp, Homo sapiens
aaacctgactaacatcaattgaagattggggttcaggaggcctagatgatccaccatgacttattcaaaagttgaagatgaaaggaaagaataaagactctttccatccagttctctagtctgaaaggaaaagaaataggcaaaggacagtaggcttttctatatcattatattcattcaaatgattctcttaaaataataatgaactaaggaggctctgtaagcaagacaaacggtcaggaggcctccttgctccaagaatactccctttttactttattaaaatggtttgtaaaggtaaactaaattgactaaagtatcaatatttccatatatgcgtgatcttttagagaccataaactgtcagtgtattaggctgttcttgcatggctataaagaaatacctgagactaggtgatttataagaaaaggggtataattggcccacagttctgcagactgtacaggaagcatagtagcatgtgcttctggggaggcctcaggaagcttccaatcgtggcggaaggcaaagggaagcaggcacattgcatggtgagaacagaaacaagaacaaggaagggtggctgggaggcgccacataattttaaattaccagatctcacaagaactcactatccggaagacagcacccagccatgagggatccaccctcatgattcaaacacctcccaccaagccccacctccagcactggggatcacaactcgacatgagatttgagcagagacaaatttccaaactatatcactcagaatctggaatagaaagagtatgcaccataacacttttattctctacagaaacagacactgtgctgagctcaaaaaatagtgattcatcaaatatgaatgtgcaaacctcttttgtactgtatctgtggaatcctggttactggggctttgagcccctgtcccataaaatctctgtaatactaacctaactcatggcatttctttaaaatcaaatttaatgaaatgatggacataaagcccatggaactgagtgtgtaatcttctcttatttgattagatgttaaacttgaaacacttttttttgataaaatatgaaatacataaatgagttaaattgttgtgactttccttataagattgaaaacaataaggtgtttttaatactttttttctgtgttctcttgaaagtagctttacatgtattaagcaatcctggctttagatattagggacaataaaaatatctgcaattttcccagttttatatagccattgtttgcaagtatgaaaacctgtcttttgttactgaaatattatcttttattttggcttttttgataacttttatgtttgccttgagcaagtcacttatcttttctatttgtgttttctatttcagtttatttatgaaagacagtaataatgattgtgatgtaccttacaaaaaaagataaaatcgtattgaagagactgttgaatatgaacgcagtgtattaaatgcccgatataggaacaaaaataaaatgaagaacatttctatt

SEQ ID NO: 12473 - DNA, 1758 bp, Homo sapiens
aataagaactgtgaactctcaattgatgaggaaatatcaacttggtgcactcaaggacatttacattatgatgaccatggggtttatgaacatttataactttttataatttccatattacatttctcatagtatggacaactttttgccactaactgaattctccaaatactcacacgtgaaatttcaaaaaagaagccacaaatatgtagttctgaagatgttgaataatcattttacaaagcagttttctgaatggggattagttggtgattgtttgtaacaaatatgctaatgctttagaaatgtcagtatttttgtaattatttctacctccaaatatatatatattgtctttcactggataatgtgtgtagatttttacatgtgccttatttgacaatgcttatgtcttgtttttgcttgtctcatttgaagttcttttttattatgttaaagaatgcagctgtatagattatatagctttcattttattgctatttgaagcagatgttcaccaatgtcagcaagaactcaacctgaatttaaaggtggcattccatatactaacatcccccaggtcctctcaagtacttctgctgaaacaaatttatttggctaggcactaagttgttttccagtgaatagtaactaaagaagcccctaccttgctccatggattaattccttctgttcattttccaactgcactaattgtgcatattactctgcctaatcttgtgcatgttttcattgatttccctctcccggcttttgcttctcttgaaactgttgcccagtcacttctgctccaattctcttcctctctaaatagtagtttattactgccacatctccatgcatcagcaaaatgttggtgacatttttctagcctggcagaacagattacttaaagctatttcatttcaaagcagactgaatgtgacttcatctaaaggcagcattaggtactgcatggaaataggtcattaacttgaaactcttatcaaaatatattttaccagtttccagaatttccagtacaggaccgcctgaagagagagccattgttcaattccaattcagtgtgagtgacaaagtgaaatttagaagtgaagttgtctatttgatatttaactctttattaaatctttctttaaatttctgcctgtcagtctatattgctgtttttattatacatcagtttctttgtataacttgtgagttccatgtgttttgtttttattatgtaaatatcattataaataaacttatttataaatcaaagatttgttaatttttggaaatcatgcttttcaaagcatcctaacttgctaagatgctaggtagtacgaccctctggatttggaaggcaaataaaactcttacagtgattatttagatattaaagactgagaactcacggcttaaccccagtcttgatggtatattgaacagactgaatatattttaccattacagggctaaaaggagtcttcatgtgttaatactacctccttgtacatcactatacccaaatcagttattcaaattgttaggaattttaccttttaaaatctcataatggatatctcatgttttctgtattaatgtattttcaatgataggctgtttctttttttgttgttattgttgttgttgttatatccatacttttatctctaatgaaatgtagttgggttcttcctgtaatgcgctattatgtcttgggcttaataaaaatatttgtgatcataa

SEQ ID NO: 12474 - DNA, 4158 bp, Homo sapiens
aagtcaacagttcaggagaagagaaggaatttgaagagaaaaaggaaaattaaaattactaattaatttttagattcaatatttatatggagttttgaaaaataatagtggccctgaaggaataaattccagctttaaaaaccaagtctgaggaaatatttggcttcataaagtaaagagacggtttggcatttattattactttttcctgtattttatgcccataaaataagctttataaaaaccaatttcctgatggactattaaattcatcttagaataaattagtgaagaatttaattttagaataaataatccaatctgaaataattataccttctttccttgttaggtagttatgagtaaatctgcaaaaggcaatgaaaatgccttaaattttatcaataacagaattattgtatttaaaaaaaaactaatacttatctttaaaatagtaaataggattttaaacagagaattttatcagtaataggtgtcagtttttaaaaaattgcttgtaggctgagcgcggtggctcacgcctgtaatcccagcactttgggaggccaaggtgggtggaccacatgaggtcaggagtttgagatcagcctggccaacatggtgaaaccccatctctactaaaaatacaaaaattagccggacgcagtggcacgcgcctgtaatcccagctactcaagaggctgaggcacgagaatcacttgaacccgggagggagaggttgcagtgagccaagatcgtaccactgcactccagcctgggtgacagagtgagactctgtctccaaaaaaaaactttgcttgtatattatttttgccttacagtggatcattctagtaggaaaggacaataagattttttatcaaaatgtgtcatgccagtaagagatgttatattcttttctcatttcttccccacccaaaaataagctaccatatagcttataagtctcaaatttttgccttttactaaaatgtgattgtttctattcattgtgtatgcttcatcacctatattaggcaaattccatttttttcccttgtgctaaggtaaagatttaattaaataattttggcctctcatagttttctctctctttaaagagaataaatagagggccaggtgtggtggctcacgcctgtgatcccagcactttgggaggccaagacgggcggatcatgaggtcaagagatcaagatcatcctggccaacatggtgaaaccctgtctctactaaaaatacaaaaatgagctgggcatggtggggcgtgcctgtagtcccatgtacttgggaggctgaggcaggaaaattcttgaacccaggagacggaagttgcagtgagctgagatcacaccactgcactccagcctggtgacagagcaagactccggctcttaaaaaaaaaaaaaaaaaaaaaaaaagagagagagagaataaatagaaaagaatgtggctgggaattgtgaatcagaagattataccccccaattgtttttcaatccccttttctcaaataataaattagttaaatcagtttctgagttatgccactggctgatgaagagttgagaggtctctttgcagaatgatctttttgtttcgttttgtttcttcttctgcatttaaaaattaaaagattggtttgaggatgtgatgaaattgagactttttgtggttttctctcaataataagtgaaccaatttcaaatgtgatcacaaagtttggaaagcttttattcacagaggttgggtagtgttgggaggggagtttaattactcagattggcctgttatttgatttcctcctttgggaaaagaattatgtagataccacatggagacagggaaacaattgtggtaaaactgtggatcctgttgctatttgcccagtgagaaaacagattctggtatttgatttggtttttctctttgtttccagaatggatgaaagtccatgaacctcctaagttataatttaaatttgtttggggcaaggtgattttatagtcgagacagagccctaggtccttcctgccccatcactcacttacgacatcacttccattgtgtgcatgtttgttatagaggaggttttaggctacaatatttgtttaacctccctaagaactttcaaggcatctgtcctgaaagctgttaatttatggtctagcagatttatattatatgcagataataattaactggggataaaagaatggcaaggggtgacacaaagtagcaaactgaatacttctccaatagcaaccccaagctacctcctcaccctgcatcttggagggaggcaggaaatttcttttgaaataaagtgctggagctgaattctgcattatttatcgttgctgctgaaaccacctataaaagacttgctggctaatgtgcattgtcatataatgtacactgtcacatctttacagtcttgtatgttatagaatacaaaataagttgatggttttgtttggtgtgagctttttgtttgtttgtttagttttgccttcataggttatatgccaagatagtatttgataagtcaatgacatttggatgttttcttcaaagaattttatttgacccagatttcttataaagttatcttacattaaggatgtcattttcatcagaccttctttctacatattattcatgaagcataatgttgcatttctccaaattttatgcctgaaagggtagtgttgcttcctaaggtatcatgttgtctttgtgctttgtccatctcttccgtggcgaagctttatatctgttcctaaaacagttaatcctgtgaaataaatattgaacataatccagaagaatctctctgtttcccttggggaatgccatatttaattcaccagcagtaatcctttaataactggcagagcactttattcttctggtgagctccctgaatatttatttttctgattataaattttctatattagtagcattttttaattattacttcttcactatagagcatttacttttagtctctagatgtatattttggaatgctgtacttggcataacatagattaaaatcataatgcatgactaaaaactccttggatttatttcccattttaaaatttttagcggtaagttcagatttataatctttctctagacttccatggtctgaatgttgcctgctgaagtagcaacctaaaaagtatcccctgcttatgcttgtccagttggccctccatgtccataggcttcgcatctgtgattcagcccactgtgggtcaaaaatatttggggaaaaaaatggatggttgcgcctttgctgaacatgtacaaacttttttttgtcattaaacaatatagtataacaactatttacaaagcatttacattgtattagctattataggtaatctagagatgatttaaagtgtatggtaggatgtgcataggttatatgcaaatactacaccattttctataagggacttgaacatcatggactttagtatcctagggggttcttggaacccatcacccataggggcaccataggacaactatagtaccgtgtttatttcctattaattcaggttccgtttagagtctaaaactaaaacctaatcatttagtcacagtgtaaaaacaaatggaaataacagctcaaatcttcaaaatattactatagcattatgtttaaaataatctacaacaaaaatgtaccattttcaagcagtactacattaggagcccttttatagaaaataatttcttctttacccccgttccagtgtgaatctagtattctgttaacatttgtgtggcatttggagtttgtcatccccattgaagggagagccttctcagacatgaagcaagggaaacatactgaatagttttacacaaatttgatctggcttccatttgtccccctcatttcccaaatgtttaaatgtattggatttggattctcaatgtataagttgccttatctgttaatgtctatcttctgtctctttaattttgtatatctgctgttttgcttttggatacattttctaattagaagtcacatgataaatataatcagtatagtaataataccataatgtgcacatactcaataaataaatgactgcattgttgtaaatg

SEQ ID NO: 12475 - DNA, 1136 bp, Homo sapiens
tttatgagccttgccccccaagcagccagcacataccttttcatttactttttttttttcaacttcatagcaaaatctgtattaaatttgccttatgaaaaaatagaactttttctatacttttctaacaatttcctattgttgtgagaaaaggaagatgaacatgttttgtgctagttggtagctcacaaatgtaaaaccaaaaaaaaaaaaaaatagaaaattaagggactagatctatttgtggatttgtatctgtttttgttgtgattagggtagtaatcttggaaaacgaattattttcataagttgaatttggttagttggttggttgaagcagaggataatgagcaaataaagtccttgtctaatttggaaaatactttctttatattattaacatctcccaagattactttttaagttcattattatgttacattcaaagttgattgtaaattattctaaataagtaaatataaggaggcaagaataaacaaagactttattaaagaagagtgcgtgcattgtagatttaggtatcttttaaagtaggtactattcaggatggctctatgaagaggaggaggtccagatttggctcctgaaaaaggaaagaagagaattttacccctatttgcaatggagaaatacagtattctttggtttggttggatttgcaaatcctatttcctatcaaaggaaatatctctagtggatatttttagaatatagacaatttctaggtattaactaataagatatggaaaagatagctttgctttttttaatcagaagaacataaaataaattacaatatgaatgattgtgagacatcagagaaatattttacttagtgacgtaaactactgtgcactgctgctattcctaggaagctgtgttttgggcaatacatggaagctaaatatatgaccagaaatgctttctgccttgtaatatagtgtattatatattagagctaaatttagtaataaatgcattttgaagtttggaaaagtattgtaataaagttgcctttaacttagctttgtacttgttctgtttccttgaggctagacacagtgccatccaggacttattacagtataactgggtaaaataaacaattctctgac

SEQ ID NO: 12476 - DNA, 252 bp, Homo sapiens
taggagaggaaaagtaagcatctctgcagaaagccaacaggtactcttctgtttgtgggcagagcaaaagacatcaaataagcatccacagtacaagccttgaacatcgtcctgcttcccagtgggttcagacctcacctctcagggagcgacctgggcaaagacagagaagctcccagaaggagagattgatccatgtctgtttgtaggacggagaaaccgcttgggtaacttgttcaagatatgatgcat

SEQ ID NO: 12477 - DNA, 157 bp, Homo sapiens
agggaggctacgtgtgaatttatcatcagtctctcaatggaatgttcatggtcaaatttaagaaactgtgttctcaactcaaggaggaataaaactcataaaacaaaagccttgtaagcatttattaaaagagattattaaaagagattgaaagaca

SEQ ID NO: 12478 - DNA, 1744 bp, Homo sapiens
gaactgcccgatacacggcatcatcccatctctaatttcccctctgtcctccatccagcggcttcttccgcttcattctctaccataccacttgtgcatgcatgtgatgttctaataccaattgaagaaccgctgtaggtacctccctaataagatttctaaacctatagttagtgtgatcatgactttgtcaaaggcaagtctccacccataaccgttctcttgtattcctgttgcttgagctacattaagtagaatgtgcatgttgtagtcctatgatgatgtaaacttggtactacataatgacttgctccacacatgcagtaaactacataatgatgtactggtaaactagaaacaaagaatgcagcaggatctgtctagcttattaaagatgaaactgaattggaaaaatagctccattttttggtgcttgggaagcacagtgaccaaaaaagttgtatggctgcttattcattagtctttcctactgatgtcaaatccatggtacctagagttaaataaaattccaatgctcttactctttaacttctggtttctcctttttcctttttagactattgaaactgccacaaacttggcaagactttctgaggtttctgattccatatttaattgactattatcaatagcctgatattgaaaaacatttgtagttttcagtgtgaaactaaggggttgaagaatcactattacaatccctattacagagcatttcgggttttgcttgtattttagattctgatacatacgctgtttcactcaggaactacttctaccagttaatcagcattatccagcacttgtctttaaaattcatttggcgcttgtttgttttcaactgaggaaattgagtatagttcattgaagaatggaatttttttttttttttttttttttgctgtttttcatcattcagctagaaagtgagaagttttatcttccatagtccttttaaatcttatgttagaactagcaggacgtaggtggaaagatgaagaaataagcttgtctagactaaagaaaggaaagcaggttataaaagccatagtagccagtccagttcattctgcagatggccccataccaatcgctgttagagtttgccacctccactttcccactgagaactgcagcaattttaaaggatatgagaaagccaagactcaagagatgagaagacccccttggcgaaatatagtgtactcttcactgccactgccaccaccaaatgggtttttagagctttgaaacacaatctttgtaaattaatcaaaacctccctgtgacccacctgccttctccccatacccaaatttgaccactactggcctaaaaggcaagatgggcttcgatatagaaggactgcaagacagtagaaagggctgccacggaggtgacagtagctccttcctctccaacatgtgatgctacacatctctgtggataatctaagttggacttttgactctaaaacagctataatccaagaaagttaaattctaatggaggtaaagaatcttgactgattgttccctttgatgtccaaataagggaactattgtgagtacgtatgctacacttactataagaatgatactgtttgttgtctttctcctgggctggatagtggactatattttattacaggctttgaaagacatctgtaatgttgcatatctgttcatattaataacttaataaatagtatatgaagctataa

SEQ ID NO: 12479 - DNA, 1491 bp, Homo sapiens
tttctcccaagatggcacatctcagtaccttcttactgtgctatgcattttattgagagtacagaaaggaagaggaacctttttttaatcacttgttttgttttgactatagataagaaaggactacagcatttgatgtgtgtcctcaagaacttgtcttgggtctgaaaaagctgagaagaataaaggaaacattgctcaactcttcagccccctccccctgcacacctgttttctcatttgccctttgagcacttttacttaaacttgcttgtagttgcttttatcactgccgcaaaacagccatcaagagccatctgctttccaggtgaacattggaaatgagaatctttgaaacttagcaatatgtgttgcaccagattttttaaattatatatatggaaatatatatgtatacattttaagttctgtatacataattaccaaacactatgtgacctggagtttgtgttgtttctgctctgacaggtttatatgttcttacaaatggatccatagtttgcagtgatttaattcctggttgggatttggcctcccctctcccccatgctaattatttacccttgtaattgtgcatagggaagcactcacccaatgagactttctccaatgtggactctgtgtgtcagtgaatgaatgtagtaaaattcactttggaaggttatcaggcttttaaaaatctagtttatggcaaaaatagccattttccaagtggtggctgactgttgcagggaatgagaatttcataatacactgctatttcagacctctgtttggtcagaaatggaaaagaaaaagccccctttcttcccttttctgttttacttcaagggcataccttggaggtgctcagagaagcgtgaagtttgcactatggtggaggatggggaaagagttctaaagtgtctccagctgtgaacccaggaggtcaagtgggctattaaaatctaacgttgagtaaatgtgatagtgatgagaaaggaattttgtgtactgtaaccttgcagtagagatgcagctgtccttcgtgtgtggaaacacacctctcctttacatagttgggaacctcattagaaatgacctcagctgccccatatctacgttcctttcagcagttgtccaagtaggagtgtatccagtgaagacatatcaaatcacaaagtcattgtcattagagtgtacttgattactgggcatccttgtaatataatttcataccactgacacattatacttgtaagagaacatctttcccagagtgcctcagaccttattgctttaaaatataataatgttttcattacttttattatttgaatgatttagtaaagttgactgaatctggtatagactttgggagtatgtgtgtgaagtttttatcaaactgtaatatttgtgaatggaatgccttgcaatatgaatgttaatataatgtgtaaagggagattaaaaagtttgaatgattatcct

SEQ ID NO: 12480 - DNA, 192 bp, Homo sapiens
aagttctagactgggtgaattctttcatgaatatgagcttcacatttacatcatcaaattatttttcaaatgaatatttttggtattgaggaatcaagtggtcctctttatggtggcacatgtaaatctaaaaatacctgtatgtaatgctacaaataaatattactggaaatgatatttccatttgtagtt

SEQ ID NO: 12481 - DNA, 1149 bp, Homo sapiens
aactgacctgtgatattttacttgaatttgtctccccgaaagggacacaatgtggcatgactaagtacttgctctctgagagcacagcgtttacatatttacctgtatttaagatttttgtaaaaagctacaaaaaactgcagtttgatcaaatttgggtatatgcagtatgctacccacagcgtcattttgaatcatcatgtgacgctttcaacaacgttcttagtttacttatacctctctcaaatctcatttggtacagtcagaatagttattctctaagaggaaactagtgtttgttaaaaacaaaaataaaaacaaaaccacacaaggagaacccaattttgtttcaacaatttttgatcaatgtatatgaagctcttgataggacttccttaagcatgacgggaaaaccaaacacgttccctaatcaggaaaaaaaaaaaaaaaaaaagtaagacacaaacaaaccattttttttctctttttttggagttgggggcccagggagaagggacaagacttttaaaagacttgttagccaacttcaagaattaatatttatgtctctgttattgttagttttaagccttaaggtagaaggcacatagaaataacatctcatctttctgctgaccattttagtgaggttgttccaaagacattcaggtctctacctccagccctgcaaaaatattggacctagcacagaggaatcaggaaaattaatttcagaaactccatttgatttttcttttgctgtgtctttttgagactgtaatatggtacactgtcctctaagggacatcctcattttatctcacctttttgggggtgagagctctagttcatttaactgtactctgcacaatagctaggatgactaagagaacattgcttcaagaaactggtggatttggatttccaaaatatgaaataaggaaaaaaatgtttttatttgtatgaattaaaagatccatgttgaacatttgcaaatatttattaataaacagatgtggtgataaacccaaaacaaatgacaggtccttattttccactaaacacagacacatgaaatgaaagtttagctagcccactatttgttgtaaattgaaaacgaagtgtgataaaataaatatgtagaaatca

SEQ ID NO: 12482 - DNA, 2028 bp, Homo sapiens
gaaaacagctcaaccaaggggaaggcacgatccgatctcggtcgttcatctttaaatagatctttcttgccaaggaatgctctggcccaggagcaaggtggaatgtttccctgacgctgtgatctgcagcaggcttcaaatgaaaaccgactaaggattttctttcaaaaacaaatcagaagcagatgctgattgggacccatataccacgttgctgactcacgttgctgcccttccatgatgttgccatctccttgagaacactgaagcaatcaccattctgatagaaagtgcttaaaccaccactcttaggtctgctcactcttagaacacacaatggaagaggaagggtttttgttttcactcattgtggtccccaagcctattgacactagttgcctagagtcccactgtgagtcatggtcagcctgtctgacatccaggttgtgctattaaccaagaaggaaacagatacttggaggcttagatgacttctgcaggatttatattcagatagaaaacatcaaatattttcaggggagaggtttttttttttaatttttccccctttatacaaaaaaaaaagaacatttccaaaactaaaatagaaaatgcttgtggcatttattttctctttttaaaaggttcagaaatttggcaggtcctttgcttctaatgacaaaactgtgagagctagatgtcctatgggcaattaggtagtataataaaggtaaatgaaggtacaatttttaaaccattattttcaccctgttggggtaaatgttttaaagagtgagaaaacataaattgagaaagggtgataaagtaatagataacttttagtttaataataattattgttattatactactaataatagagcacttgtaagcactaagttatctttatccaacatttctccaaatggactgaaagaaacttttcaaggacagtgtattataacaatccctttcccagaattagttgtatagggttggcccaagagatgtaagaaaaatctcgcattgctccctaagcaccctgggccttattaaagagcaacttctatttccagtcgggggagtaacactaaagctacaagaaatatgtaataatgataggtaataatgtgttccaaagctttttcaaactagaataaggaggcaaatagaagaatgagatactgatgtccacagttcattggcagaatctaaccccttctgttatcttttttaatactatttttgtttagatagaagtttcaaagaagataaaaatgcttgaagagcctgagagtaaaaagattatgctgcaaagctatgatataaactgctcttgcagtccaaagggatacctgattaaagaagtttcttatttaaacatctcagacgcaaaaattacattaaatttttgtatatttcaacaacattttaaatgtattttgttatgtttgtattatataggataaagcaaatgtcaagttaaaatgtattgtgttgtttgtaaagtaagaagttactggccaggagcggcggctcatgcctgtaatcccaggactttggtaggccaagacaagcagatcacttgaggtcaggagttcaacatcagcctggccaacatgatgaaaccttgtctttactaaaaatacaaaaattagctgggcatggtggcaggcgcctgtaatcccagctactcaggaggctgaggcaggagaattgcttgaacccgggaggtggaggttgcagtgaaccaagatcgcggcgctgcactctagcctgggtgacagagtcagactccgtcccaaaaaaacaaacaaacaaaacaaaacaaaaaaaaacagaagttacaaatgaatactcacggatatgtatagttttatgtttgttttcttagaaacaaatgtgtttctttgggtgggtaatattgtgttttactatgtttaccttttataaaacataacctgtttatttatattctttggctttgtttattaaaaagcatgattttgctgtgcatgtaccattttg

SEQ ID NO: 12483 - DNA, 808 bp, Homo sapiens
gttattataatgaaactcacgaatctacggacattttgctttcagggtgaagcaagcttgaatttggattgcctgctctctttaaagcgaattcatactatgacagcagaaacaaaacttcagatttcagaatttgttattggcaaaatttattctcattatacctgcttcatatgggtatattactattaaaacagaataccatagagtaattgcattatttgaaaattctctcattttacaatgcacttcaccaatgaaacagctaatttccattttgaaaattaaaagaaaacagcacagagaagttaaatgcggtgtagcaaagttatggggtctgcttgagggcactaacctcaacagattattcctcctctccttagaataaccatgaaaatacaaatttacttagcacatttttgctttttaagtagctggttcattttctgaatttctcacattcagagttccagtcattattgttacatcatgtttgcagaaaccttgtcttatttagtgtctatttgcatataaccctgaaaacattattatttgaaaacttttctatatctcaaattaatatacattttcataacctacctttgtattaagacttgcaattttatcaatctattatttcttagaaacaatttactagcttagaatagaaagcaatgttatcgtcatataattttcatgtacaaatgccacaaataaattgaatgtttaaagctatgtctgagtttttaaagtaaatttataagaattagccaataaaattgcttctcggccttttggctaagatcaa

SEQ ID NO: 12484 - DNA, 709 bp, Homo sapiens
cctgctgacaatttcccacaccgtgtaaaccaaagccctaaaattccactgcgttgtccacaagacagaagctgaagtgcatccaaaggtgctcagagagccggcccgcctgaatcattctcgatttaactcgagaccttttcaacttggcttcctttcttggttcataaatgaattttagtttggttcacttacagatagtatctagcaatcacaacactggctgagcggatgcatctggggatgaggttgcttactaagctttgccagctgctgctggatcacagctgctttctgttgtcattgctgttgtccctctgctacgttcctattgtcattaaaggtatcacggtcgccacctggcattccttctgaccacagcatcattttgcattcaaattaagggttaagaaaagagatattttaaaatgagagtcacttgatgtgccattttaaaaaaaaaggcatattgctttttctaatgtggttatttctctgatttgcaaaaaaaaaaaaaaaaaaaaaatacttgtcaatatttaaacatggttacaatcattgctgaaaatggtattttcccccttttctgcattttgctattgtaaatatgttttttagatcaaatactttaaaggaaaaaatgttggatttataaatgctattttttattttacttttataataaaaggaaaagcaaattgatgacctc

SEQ ID NO: 12485 - DNA, 1137 bp, Homo sapiens
taataataacaatattttctcattctttgtgtatagaaaattttaaaatggtggtcttaattattactactggttgaacaattatttcttccaatttattttcttcctgcactactgtttgtatttgatcctttgtctattcagtcacttaattagaaattaaattgtcaagcctcttattctgacttcaaagaattaatgtatcttccaacaataaaatcacttctgattttaatctaggaaaacctaaattgtggctatggatccaaagctgtttgtttctttgaatatcaatattttcaacaggatcttgtatttaaaattcccacctacattgttaaatatgttattttttcatatctcttttggttttgataatctgaagtgtttttttctcgttttggccttccaaactgcatttggttaggtgaattaagaaaaatattgccatcaagaattacttgtgttttcacagagatagactctttgctttatagagattgttgtgtatttaatatgaatatcccagctttagaaaagaagtaaactggatacaaaaagttccattgaggaacagttatttacagtataaaagatttgtttactttacaaaaggcttgtgtctgtgtgtgtgtgtgtgtgtgtgtgtgtattttaaactgactcagtgacagctggggtggaatggcaagaacacttacaaccaaactcatgggctgctgcaatttgaagatcaattggtaataaacataagacattaattcatattaaaatagttcagtgttcaaaattgtgtttatgtggatatttttctctttttaacactataaaccattaaaatacagtcatcccttgtatacgctagggactggttccagggccacacatataccaaaatctgcccatactcaagtcccacagaaagtcttgcagaacccatatgtagaaaagttggccctccagttgaccctccgtacacatgagtttcacatcccatgcacaaatgctgatctgtgtgacctcacctgcatttgattgaaaaaagtatgcgcgtaagtgtacccacccagttcaaacccgtgtgtaagggtcaactgtacaaaaaagtttgtgaaataaacgtactggagaatcttt

SEQ ID NO: 12486 - DNA, 5331 bp, Homo sapiens
atcttgagtctggcagcaatttgtaaaggctcataaaaatctgaagcttacattttttgtcaagttaccgatgcttgtgtcttgtgaaagagaacttcacttacatgcagtttttccaaaagaattaaataatcgtgcatgtttatttttccctctcttcagatcctgtaaaatttgaatgtatctgttttagatcaattcgcctatttagctctttgtatattatctcctggagagacagctaggcagcaaaaaaacaatctattaaaatgagaaaataacgaccataggcagtctaatgtacgaactttaaatattttttaattcaaggtaaaatatattagtttcacaagatttctggctaatagggaaattattatcttcagtcttcatgagttgggggaaatgataatgctgacactcttagtgctcctaaagtttccttttctccatttatacatttggaatgttgtgatttatattcattttgattcccttttctctaaaatttcatctttttgattaaaaaatatgatacaggcatacctcagagatattgtgggtttggctccataccacaataaaatgaatattacaataaagcaagttgtaaggactttttggtttctcactgtatgtaaaagttatttatatactatactgtaacatactaagtgtgcaatagcattgtgtctaaaaaatatatactttaaaaataatttattgttaaaaaaatgccaacaattatctgggcctttagtgagtgctaatctttttgctggtggagggtcgtgcttcagtattgatcgctgtggactgatcatggtggtagttgctgaaggttgctgggatggctgtgtgtgtggcaatttcttaaaataagacaacagtgaagtgctgtatcaattgatttttccattcacaaaagatttctctgtagcatgcaatgctgtttgatagcatttaacccacagcagaatttctttgaaaattggactcagtcctctcaaactgtgctgctgctttatcaactaagtttttgtaattttctgaatcctttgttgtcatttcagcagtttacagcatcttcattggaagtatattccatctcaaacattctttgttcatccataagaagcaacttcttatcaagttttttcatgacattgcagtaactcagccccatcttcaggctctacttctaattctggttctcttgctacatctccctcatctgcagtgacctctccacggaagtcttgaactcctcaaagtaatccatgagggttggaatcaacttctaaactcctgttaatgttgatatattgaccccctcccatgaattatgaatgttcttaataacttctaaatggtgatacctttccagaaggctttcaatgtactttgcccggatccatcagaagactatcttggcagctgtagactaacaatatatttcttaaatgataagacttgaaagtcaaaagtactccttaatccataggctgcagaatcaatgttgtattaacaggcacgaaaacagcattaatcttgtgcatctccatcggagctcttgggtgactaggtgccttgagcagtaatattttgaaaggaggttttggttttgttttttgttttttttttttgttttttagcagtaagtctcaacactgggcttaaaatattcagtaaactatgttgtaaaaagatgtgttatcatccagactttgttgttccattactctacacaagcagggtacacttagcataattcttaagggccttggaattttcagaatggtaaatgagtatgggcttcaacttaaaatcatcaactgcattagcctgtaacaagagagtcagcctgtcctttgaagcaaggcattgacttctatctatgaaagtcttagatggcaccttgtttcaatagtaggctgtttagtacagccaccttcatcagtgatcttagctagatcttctgcataacttgctgcagcttctacatcagcacttgctgcctcaccttgtccttttatgttatagagacagctgcgcttcttaaactttataaaccaacttctgctagcttccaacttctcttctgcagcttcctcattctcttcatagaactgaagggagtcaaggccttgctctggattaagctttggcttaaggaatgttgtggctgacgtgatcttctatccagaccactaaagcgctctccatatcagcaataaggccgttttgctttcttacctttcatgtgttcactggagtaatttccttcaagaatttttcctttacattcacaacttggctaactggcatgcaaggcctagctttcagcctgtcttggcttttgacatgccttcctcacttagctcgtcatatctagcttttgatttaaagtggcaggcatacaactcttcctttcacttgaacacttagaggccactgtagggttattaattggcctaatttcaatattgttgtgttttagggaatagagaggcccagggagagggagagagcccaaacggctggttgatagagcaggcagaatgcacacaacatttatcagattatgtttgcaccatttaccagattatgggtacggtttgtggcaccccccaaaaattagaatagtaacatcaaagatcactgatcacagatcgccataacataaataataataaactttaaaatactgtgagaattaccaaaatgtgatacagagacatgaagtgagcacatgctgttgaaaaaaatgacactgatagacatacttaacacgtgggattgccacaaaccttcagtttgtaaaagtcacagtaactgtgactcacaaaagaacaaagcacaataaaacgaggtatgcctgtatttttaaaaaaagctttttgttaaaattcaggatatgtaataggtctgtaggaatagtgaaatatttttgctgatggatgtagatatatacgtggatagagatgaagatcttaattatagctatgcagcatagatttagtcaaagacatttgaaaagacaaatgttaaattagtgtggctaatgacctacccgtgccatgttttccctcttgcaatgagataccccacactgtgtagaaggatggagggaggactcctactgtccctctttgcgtgtggttattaagttgcctcactgggctaaaacaccacacatctcatagataatatttggtaagttgtaatcgtcttcactcttctcttatcacccacccctatcttcccacttttccatctttgttggtttgcaacagccccttctttttgcctgactctccaggattttctctcatcataaattgttctaaagtacatactaatatgggtctggattgactattcttatttgcaaaacagcaattaaatgttatagggaagtaggaagaaaaaggggtatccttgacaataaaccaagcaatattctgggggtgggatagagcaggaaattttatttttaatcttttaaaatccaagtaataggtaggcttccagttagctttaaatgttttttttttccagctcaaaaaattggattgtagttgatactacatataatacattctaattccctcactgtattctttgtttagtttcatttatttggtttaaaataattttttatcccatatctgaaatgtaatatatttttatccaacaaccagcatgtacatatacttaattatgtggcacattttctaatagatcagtccatcaatctactcattttaaagaaaaaaaaattttaaagtcacttttagagcccttaatgtgtagttgggggttaagctttgtggatgtagcctttatatttagtataattgaggtctaaaataataatcttctattatctcaacagagcaaattattgaaaaagatgaaggtcctttttatacccatctaggagcaggtcctaatgtggcagctattagagaaatcatggaagaaaggtaattaacgcaaaggcacagggcagattaacgtttatccttttgtatatgtcagaatttttccagccttcacacacaaagcagtaaacaattgtaaattgagtaattattagtaggcttagctattctagggttgccaacactacacactgtgctattcaccagagagtcacaatatttgacaggactaatagtctgctagctggcacaggctgcccactttgcgatggatgccagaaaacccaggcatgaacaggaatcggccagccaggctgccagccacaaggtactggcacaggctccaacgagaggtcccactctggctttcccacctgataataaagtgtcaaagcagaaagactggtaaagtgtggtataagaaaagaaccactgaattaaattcacctagtgttgcaaatgagtacttatctctaagttttcttttaccataaaaagagagcaagtgtgatatgttgaatagaaagagaaacatactatttacagctgcctttttttttttttttcgctatcaatcacaggtatacaagtacttgcctttactcctgcatgtagaagactcttatgagcgagataatgcagagaaggcctttcatataaatttatacagctctgagctgttcttcttctagggtgccttttcattaagaggtaggcagtattattattaaagtacttaggatacattggggcagctaggacatattcagtatcattcttgctccatttccaaattattcatttctaaattagcatgtagaagttcactaaataatcatctagtggcctggcagaaatagtgaatttccctaagtgccttttttttgttgtttttttgttttgttttttaaacaagcagtaggtggtgctttggtcataagggaagatatagtctatttctaggactattccatattttccatgtggctggatactaactatttgccagcctccttttctaaattgtgagacattcttggaggaacagttctaactaaaatctattatgactccccaagttttaaaatagctaaatttagtaagggaaaaaatagtttatgttttagaagactgaacttagcaaactaacctgaattttgtgctttgtgaaattttatatcgaaatgagctttcccattttcacccacatgtaatttacaaaatagttcattacaattatctgtacattttgatattgaggaaaaacaaggcttaaaaaccattatccagtttgcttggcgtagacctgtttaaaaaataataaaccgttcatttctcaggatgtggtcatagaataaagttatgctcaaatgttcaaatattt

SEQ ID NO: 12487 - DNA, 630 bp, Homo sapiens
ggccttttcaaatgatgattcccatctcctctcagttgcctagcagggaacattttaaatggatgtagatgaaaggtctcacataaatcctatgttttatgagacttgctgggagctctgctttgcattccctttataaaaagctgacatgccagaagccctgattgactttttttccccctgcgagaatgactaaaaataacatggaagaagatttagagctctgcagcgattgaaaaatgcaatatcaaaatataaaatgtggaagaaaagcctcttcttaaagctattgtaacttgcctggccccacgtagttcaaggattatgtgagataacacgtggccccatgaccactggagcacatgggttaatggagttaggggaatggcctacaactctgcatggccgtcttctttccccaaactcactgtggggagatgggtgaagacaagtcaggccttgttaaagttagtttcagaacaattactcatgccttcctttctcatccctaaaacattggtgggggagctacacaatgtactttttcttttctagaggaagtatctattcactgtgaaaatctgaaaaatataacaaagtatgtgtaagataaaaaccccttgctatttc

SEQ ID NO: 12488 - DNA, 2148 bp, Homo sapiens
aatgagatattcacatttgatattttgccatccgtcttcacgttggatgcccagtggcattcaggaggttcttggcataactaggaaacagcattagccatcttgaacctattgtgctcaggaaggaaagcaacagggaaatcttggaagtaaaggctccctgcaaagcatcacaaatgctttacaatgtgtgattaaaggactgctggtttttatagtgagaatcccctgaagtctcagctgccaaaagaataatactagtggaggttccatcacaggaataacaatttccttctcacttcacaagctcctctgatcttgccaatgtgatgtttaattcaaaacagcgcacttacagcctttattttatacttatttagatattcacatgggaactgaaagtagactcagtggagttttttgttttttatatttttaacaattgtactttttctatcactttaaaaaaatctagtcaggtaattatagtacagttatttttaagctggggttagttgaacttgtatagcatttaatatactccttttaaatatatttctgccaggcatggtggctcatgcctataatcccagcactttgagaggccaaggtgggaggatcatttgagcccaggatatcgagaccagcctgcactacaaaaaaatccaaaaaatgaggtgggaggatcacttgagcccaggaagtcaaggctgcagtgagccttgatagcgccactgcactcctgcctgggaaaatgagacccagactcaaaataaatcaatgaatgaattaataaacaaataaataaataaataaatttcccataaattaccaaatgagattgtcactggttcaaattattaaataattgccataaatttcctattacgggaatgtggaatttggacatacattttaacaataagtacattgattaatacatttaagtttataagtaattattgaggatccagtattttcaagaccttggcctagtttcttttcaattcaaagatgagttgcaaaagacataatgttttgcctatggaagtagatcatctagaagaaaaagattaaagaattagttaagcttttttttttttttttttttgagacagagtttcactcttgttgcccaggctggaattcagtggctcgatcttggctcaccacaacctctgcattctcctgcctcagcctcccgagtagctaggattataggcacctgccaccatgcccggctaattttgtttgtaattttagtagagatggggtttctccatgttggccaggctggtttcgaactcctgacctcaggtgatctacccgcctcagcctcccaaagtgctgaaattacaggcgtgagccacctcacctggccatgttctttatggaatactacaatgtgttgtcacaggatttgttattcagatgtcaatcatttttatttatatatttctgggtaaaacttattagtggtgtgaggagtgcagaatatggaagcttacctaaattctttttctgccagccaacattttaaaagacaaatgatgcatcctttctcaatgctgctaattctttaaattttacatgtcccaatttattccatttgagatttattttaatgttttcaacccctgtgtaacatgtatcatgaggagaaagcactatcattgatcatcactatggattaaaatataggaatattttacagggcagtatgggtgggggtgggagacatattggaatcgtgttttctgggataaaatttttaaaaagaattaatcattagccctgagtattttagtcatttgtgcctatagaaaacaacatgctcttttattgtggactttcttcttttaagtgaggtttaatttatatacaatacaataacagatttttaagtattcatttgagatgttttgacaactgtatatatacatgtaaccatcactggaatcagatatagaatattccccttaaatattgtcaggtaaacacattgagaatattttttccagtctgtggcttacctacttattttcataatgaatgttttacttgtgatgaagatttaacttacccttttactttaatgattaatattttctgtgttctttctaataaattttacgaactctgaggtta

SEQ ID NO: 12489 - DNA, 2680 bp, Homo sapiens
caactccagaactaacaatgaactcctatgttgctctatcctctttttccaattctcatcttctctcctcttctcccttttatcaggcctaggagaagagtgggtcagtgggtcagaaggaagtctatttggtgacccaggtttttctggcctgcttttgtgcaatcccaatgaacagtgataccctccttgaaatacaggggcatcgcagacacatcaaagccatctgtgggtgttgccttccatcctgtgtctctttcaggaaggcattcagcatgcgtgagccataccatcctccatcctgattacaaggtgctccttgtagcaaattatgagagtgagttacgggagcagtttttaaaagaaatctttgcagatggctatgatgttatgtgttcggtgttgtaccatgagtagtattgacttcccttgagatatgatgtacaatgtgcttgtgaaattgacttaccctcttcacttaagttagttctggcctgacctgaactctgacttttactgccattcactttataaaataagggtgtgtaacatatcaagatacatttatttttatctgttttttttttcctgttaaagacaattatgtagagtgggcacgtaatccctccttagtagtattgtgttttgtgtaaatgtgctattgatattaagtatttacatgttccaaatatttacagactctagttgcaaggtaaagggcagcttgtgatctcaaaaaaatacatggtgaaatgtcatccagttccatgaccttatattggcagcagtaggaaattggcagaagtgttgggttgtggtaacggagtgatgaatttttttttaatggccttgagtttgatctctgcaaaggataggaaacctttaggaagacaagaaactgcagttaatttagaactgtcactgtttcaagttacactttaaaaccacagcttttaccatcataacatggctctggtaatatgtaggaagctttataaaagttttggttgattcagaaaaaggatcctgttgcagagtgagaggaagcatagggggaaactccattggaacagattttcacacaacgttttaaattgatataagtttaggcagttgtagttcataacttatgttgctcatgttgtgctgtgtcaggatgggataggaagcaagtcccatgcttagaggcatgggatgtgttggaacgggatttacacacactggaggagcagggcaagttggaattctaagatccatgaacccccaactgtatttcctccctgcatattttaccaatatattaaaaaacaatgtaacttttaaaaggcatcattcctgaggtttgtcttaatttctgattaagtaatcagaatattttctgctatttttgccaggaatcacaaagatgattaaagggttggaaaaaaagatctatgatggaaaattaaaggaactgggattattgagcctggagaagagaagactgaggggcaaaccattgatggttttcaagtatatgaagggttggcacagagagggtggcgaccagctgttctccatatgcactaagaatagaacaagaggaaactggcttagactagagtataagggagcatttcttggcaggggccattgttagaatacttcataaaaaaagaagtgtgaaaatctcagtatctctctctctttctaaaaaattagataaaaatttgtctatttaagatggttaaagatgttcttacccaaggaaaagtaacaaattatagaatttcccaaaagatgttttgatcctactagtagtatgcagtgaaaatctttagaactaaataatttggacaaggcttaatttaggcatttccctcttgacctcctaatggagagggattgaaaggggaagagcccaccaaatgctgagctcactgaaatatctctcccttatggcaatcctagcagtattaaagaaaaaaggaaactatttattccaaatgagagtatgatggacagatattttagtatctcagtaatgtcctagtgtggcggtggttttcaatgtttcttcatgttaaaggtataagcctttcatttgttcaatggatgatgtttcagatttttttttttttaagagatccttcaaggaacacagttcagagagattttcatcgggtgcattctctctgcttcgtgtgtgacaagttatcttggctgctgagaaagagtgccctgccccacaccggcagacctttccttcacctcatcagtatgattcagtttctcttatcaattggactctcccaggttccacagaacagtaatattttttgaacaataggtacaatagaaggtcttctgtcatttaacctggtaaaggcagggctggagggggaaaataaatcattaagcctttgagtaacggcagaatatatggctgtagatccatttttaatggttcatttcctttatggtcatataactgcacagctgaagatgaaaggggaaaataaatgaaaattttacttttcgatgccaatgatacattgcactaaactgatggaagaagttatccaaagtactgtataacatcttgtttattatttaatgttttctaaaataaaaaatgttagtggttttccaaatggcctaataaaaacaattatttgtaaataaaaacactgttagtaat

SEQ ID NO: 12490 - DNA, 722 bp, Homo sapiens
aatgcttccactaccaaaagacattagagaaaaccttaaaagtaataaagagaaatatatttgtcacttatacctaaaatatgagtggctcatttttgcattactctcttctagacttgactagtcatttacttggtatatattgttttcattgattggggaaacactagatttttacctcggtttttgatcatttataatggagagaggaagttgcctatgttttgtaataatttattttttagcaggaatattgattagcagcttttttttctttatacacatagataactaactagattaatgtttagtttcttatttgtaggcacaggatgcatgaaatttcaagctctgggattttttgtatattgtgtatctgtatcaaaaatatcctctccttttcaaaaatgacaggttggaaaatgtttgtcagacttattaactggtcatattataataatactgataatgaccaactgctcattctgaaagccaaacataaaagctaggagaagtggcatctgaacatttttgctttgctgccagagtaaccctgactaataatacaataacagcaatttttttaaaaaactgagatttcctactggcttgaagtttttctatttagcaaaataattagtaataagttttgactaggtctaaagaatgaacacattgtaaacagttgccacagtagtttctaataaattgatcataaaagc

SEQ ID NO: 12491 - DNA, 400 bp, Homo sapiens
ggagcaaaacaaaggcatcagctcttacaccaaaagagttaacgctgtaaccaaaggtatagttttgttttttattttaggagaactgactggtaaatgaagaaatggaccaaattttgtgtaaacgattagaaagatgaacaaagtattgccctttgactggttttcttcttcatcctgagaaagatacattctcttgcagctcttcattcattggtgacaagcccccaccccgggactttactaatgagcttgttaaagaggtgccaaagaacatattcctcctttctttattctttctccaccaaaaccctctacttcagaattttttcaggatatttttcagcccaaggtcagaagaatgtgttaatattttaaataaaatatctggacatctaca

SEQ ID NO: 12492 - DNA, 3032 bp, Homo sapiens
agagcatctccaagaagagatggtaaaaagatatataaatacatatccttctaagcagattcttcctactgcaaaggacagtgaatccagcaactcagtggatccaagctgggctcagaggtcggaaggagggtagagcacactgggaggtttcatcttggaggattcctcagcaggatacttcagccattttagtaatgcaggtctgtgatttgggggatagaaaacaaagtacctatgaaacgggatatctggattttacttgcagtggcttccaccgatgggccaatcttctcatttcttagtgcctcagacatcccatatgtaaaatgagagtaataaaacttggcttctctctacctctcagcactaatgatggtcaaatgccttacatcttttctgatatctctaaaatgctgttaagttctggagaagaacttcaggagaagaagatctatcagctggcttttaaagacctatgacaacatgaaagtggtgttcagcctggaatgctttgtcagagatgggtgtggatttaggttatactgggggagaacttttctcagcacagattctatgccagcttctttgggcttgttctgtcactatctttttgtttatgattttagtttttactttttgtagatgtgggatgaagtggactctgtcgtgtatattgaggaaaaaagaaattataattttaaaaaatcccttgtaggattattatctaaatttatatgtctaacttctactacaactacaggaacagtgagccttgctacttctttagtagcttcttggcagaattcctttctactgagttatttgcaaagatgcagctctacctttttacttaaggcctgaatggtgagcatggggattttgatactgggactcatcaggaaaggattctgctttcaaactatactgaacattcctgtcctagcgtccctgccaccaggcccaatgcatctgatccttgaatatactctcaaagaattcactctctttttattaagagaactaaattgtttctaaatgtagatggtccctctggaaaagcagttttcagcaggggtggtaaccccttcagagggagtttggaaatgtgtgggtatgattcttggttatcataatgatgggggtgctactggccttctgctgccatgggaccaggatgctaaatgtcaaggtagtcctatacagtgaagaattgtcctgctcaagatgccaggatttcccccagtgagaacatgctctaaggaatgaccacccctttcttttattctcccacagtgctccatgtacagaagtaagcatagcagtcatatgagcaaccacattcctgaacctttcctcatgctggctctacacttaatcctttacttgtatgtttctgtaattcttacataaattctattaagagggtggcatactgtagtggatgaagctgaggcttatagtaggtaaggcacaaagttaaaaagtaacatcactgggtttcaaacctactggtctctgtgactaaagaacactttcagaaccacttcttgattctgccaccacttgatcccataacaggctaccccttggcctcatgctggagttgtgtgtgtctgtcttcatcccaggctgagctccttgaggtgaggatgttgtgctgtttgcctccctcacagtgccttggtcttagtggatgcccagttgtcttgtgaatgacttttaagaagtgtacttaagagaaaaatcctaccttatttgaataattacaagtcatgtttttgttgcttaaaggtgataaatcagtgtatattatttgttaatgtccattaaagccagtttttaaaaaaatcactggacttttgtgtttaccatttaaaacaaccattttaaacaaacttagaacgatgccttagctgtttataggtaacagaatgtaaactcccaccacctggagactaggccatatccagggacctcacactgactttcctaaaggagagaagcagctacgctgttcatactgatagagaagagggcaagaaaagatccagagtggctgttactttgaaaattaaacgaaagatgaaattctgaacttaaaacacttctgtttggccttctataactgatcacccttctttgctctgttttccagataaatggagacaccagatctccctaacctctgacttctgccgttagccatactctgtgtagttagatctcagtctgggaatggcattccagggcaattgtgaacatgaggctagatttttcctttgatttagcacattcctaggcagacttttgcaagctcaaaaaatgaaaataatatctgcttaaccaaaacataatcataggaagaagaaaaattttaaaatgattgatttttgactctacattctttatctaccatactgctcttttcctttttagaaatattactaagcactttccgtatagataaatgaaatacaggctaatctttaggtgtcttaggaatttttgctttttgaaaaagaaaagctaatagcctaactgcagaggaactgagtggatggggtagctgctgtatagatttttagatgagatgatacagtgtggattacactgtaccttgggcgggagagtttgttcttgatatggaattcatatgcttttgaattgcactaataactcagcattaacaagtatattactccttaaattatacatgcattttcaatattcctaaccaaatagtttatagcttattgagaagaagtctgttcttggagagatgttgaaattagatgtttattaaactttaaaatataatgccttaagctgtggcactttaaaaacatctttatatataaattgctaaaaggactgttaatgcttttctcagacacattggcattttacaattttgcacatggtttatttgaaatcaaaaaataactatactttgttttataagtctacctaatatctcatttttgattctcatcgttagcacagttttgttgcttttattaaactatttt

SEQ ID NO: 12493 - DNA, 817 bp, Homo sapiens
tgtgcagcttctccggctctgagaagaacacctgagagcgctttccagccagtgccccgagtgcctgtgggaatgctctttggtcagacattccctcacacagtacagtttaataaatgtgcattttgattgtaatctatcgaagtgattattacaccagttacagcagtaatagattctccattaagaaataattcccttttttagtctgttcatttctgtgtattttctaaacagctttacacccttggtgccttggagcaaacatgttttttgaaccttgtcatttttgtgaagaattgcctagattccttctctcatcaacgggaaagtacttcctctgagagtgcgagtgcaccatgctcactgttgctgcgtgggagagtcacaagccactggcaagcaagtggtatagtctgtgaagcactgcagcgagcagcacctggatcttgcctttataagaacattttactacctgcagctttgagtcttgccctacattttgggcatgacataagatgtgtctttattcagctcgtcgtgaagatgctgctgctgaatgggtcagcatatctctgtttgcatggtttgcaggaggtcggttttcatggtcattcagttccacagatctgaatgattactgtctgtctgtgtcttttttccatgagaaatcactgttgcaaattgcctataaattgactctactaaaataacaatgtttcagtctgaaaatttgaattgaaaaaaatgtataatataaaattgtaatacactcaaatgattataaaagtaaaagttggtaatttaggcagaagct

SEQ ID NO: 12494 - DNA, 461 bp, Homo sapiens
gtccaatagaaaaagttggtgtgctggagctacctcacctcagcttgagagagccagttgtgtgcatctctttccagttttgcatccagtgacgtctgcttggcatcttgagattgttatggtgagagtatttacacctcagcaaatgctgcaaaatcctgttttcccccagagagctggaggttaaatactaccagcacatccctagatactactcaagttacagtatatgatcactaatatagtatgctcttggtaccaggagctctgatatatatctggtacatgtttgataatgacttgattgttattataagtacttattaatacttcgattctgtaaagagtttagggtttgattttataaaatccaaaatgagccttttattgaatccagttctctatgtgaccagttctctgtatgaatggaagggaaaagaattaaaaatcttgcaaagggg

SEQ ID NO: 12495 - DNA, 559 bp, Homo sapiens
agtgcctttgagaagaaatcagtggatactggatttgctcctgtcaatgaagttttaaaggctgtaccaatcctctaatatgaaatgtggaaaagaatgaagagcagcagtaaaagaaatatctagtgaaaaaacaggaagcgtattgaagcttggactagaatttcttcttggtattaaagagacaagtttatcacagaattttttttcctgctggcctattgctataccaatgatgttgagtggcattttctttttagtttttcattaaaatatattccatatctacaactataatatcaaataaagtgattattttttacaaccctcttaacattttttggagatgacatttctgattttcagaaattaacataaaatccagaagcaagattccgtaagctgagaactctggacagttgatcagctttacctatggtgctttgcctttaactagagtgtgtgatggtagattatttcagatatgtatgtaaaactgtttcctgaacaataagatgtatgaacggagcagaaataaatactttttctaattaatacc

SEQ ID NO: 12496 - DNA, 783 bp, Homo sapiens
agtagaataaaattgaataagaaaaagatctataacctaggtaaagcataatctgtcagagaagcgcgtgagaaatttgaaatgaaggcatttgttaatacaagatgcaacgcacagcactctgtctgaggctttggtaaaaagtaaaggggaagaaagaacttgacagatctttttcaactcaaattaatggtaacgatgatgctgtttcaccaagtatattttgaattggtttctacacatttccagtagtatggcagtacagtgctctgttcattgcaagctggcaaatttatgtagctatgtggaatgatatgtcataatgtaaaattagataaattcttttttcttataattaatataacatttctggacttgaactctggcaagagatgccaaaaggcattggtaccgtgttatttgtttatatgaattactttttaacaaggaatgtttcttattcattaaatgaattcaacattttctctgtaaaaacaatagagtttcagtacatgaactatagaaaaaaatctatatataatgtacataaatgttacatttgtaaagaaaatgtaaaaatgtaactatagcatatgaattgcttaaactgtgctgcattgttggatgacaactctttttgtcacagttagagaatgaggttgactaatgcatattatgaattgagtccacaaaggaacacaaaactctttgtaattctgttaaatcttttatgtagatttatttatgatcagcctactaattaaaactatttcgcttgacagt

SEQ ID NO: 12497 - DNA, 120 bp, Homo sapiens
tcttacagttttaaatgtcgtcagattttccattatgtattgattttgcaacttaggatgtttttgagtcccatggttcattttgattgtttaatctttgttattaaattcttgtaaaac

SEQ ID NO: 12498 - DNA, 304 bp, Homo sapiens
gtgaaacagttgacagacatcaccagttgacttctgcattaacctgcatgatctgtttctactatggattggaaacttgtttcttgaacaagtcttgaagatcttggtcattttatgacaatggatctaaaatgtcagcatcatgcaaagtgcaacggaatagtgaattttgctctaaaagagcatgaacaagtctttctaatgttttgtacagtgcctggcactctgtgggtgctcaataaatggataggagttttcatttgaagcatatttgaatttttaaaataaagtgttttattccctt

SEQ ID NO: 12499 - DNA, 506 bp, Homo sapiens
aataagataaaaggacacactatcaaaacactttagttttttgacaatgcttttcttttaaatatgagcccatttagatcaagtgcagacatggatcattgtcctatgagagtgtaagctcctcaagcacagctcgtgcttctgtttgtgcactctggctgctgtagtgtatgcttctctgtgtcctgatatatcaacttattgctcatctcctttgatgaattaggcatcagaggttaaggtcccctttctttctccctattatggcatgcattacactgtactgatgacctttaacttgcctggctcctccattagaataaaagcagtcactaatttaatgttagaataaatgaataattctagataattactgaaatgagttgttggatgttcccagttagaatagaaagcattttttgaatttcaacattttaacatttaaatcaattaacttatgttattaaacaaaaataaatgaacattaaacatgattgtttctaaat

SEQ ID NO: 12500 - DNA, 1525 bp, Homo sapiens
ggttctgcagctcaggtgcatgtgagctacaaaactagcatctaagggtataattgaccctaggtttggatgacttttggacagactttcacattgtacatgaaaatcacaaatggaatgcttttaagtatgtttaaaaaataccatgagacctctgaactgaaaagacaaataatgttgattttttttcttgtgtggaaaaggtctacagaaataatttttagagtggtgcttaataaattattaatactttttagggtaatgttttagttcttaaaaataagttcatgtgaaagtagcaagtgaactctgtatttaaaaatatagttttttgagtcatgaggaaacattagcaaaaccagctaagccttgatgtttattcatgttcgaagtgcattatagcatttgctgtggatgttttctgacattgcctaatggagagcgtgggatcataaaggattttgtgttcactaaggttaaatctaactcacgggagagagagggctctgtctcttggtaccattatgcattgtgatactatagagttgtgttcatatttcttgtaagaaaaatttttgcttttctttagaaatataggtattagcaaaagtaagtatacaaagaggattatgacaaatagaccatttctttaaaaatggtaactgttgcatttaaacacatcgactgacagattatatggatatttaaaaataactttaaatcaatcttttaatattttgctgtttgctcttatgttctcccttctttcttccttccttgtcttccctccctttccttccttcattctttctttcttctgctctgtcagaagatatacaagtagccaaagcatcacgagccaagctgtttgtcttttgccatattgtcttttgattctcttgataaagagaaagcttttgaaattacttactgccctttgaaagtctgttttacaaccccaaaggatattttaggactttaaaagggaagcttcagtggattcatttggttagattcttttcctaggttaaaaacatcggggaacttaaatacataggaaaggagttcacaaataaaatttagtttttttagaaagagaatattttaataactgtagtatactacaagaaacatctcatggctttaagattaacgatagcgataaggcccactcaagcatctcacagtggtgatattacatgtcacttagcaggatgcaacctggcctagggatttccagaagacaaggccacctcagcacagatgcaactttcataaattttagaacaaagcctaaccttactagattaaacttgctctatgaaagaaacacttggtaattgacccagactgaatacatgtataagaaatgggaaagatctcccaaactctgagaacggtcctcaaatagaagctctcctagtcagttggtcatctgacctctgactatatccggcctatgacaccagccagctcctgctttctgtcttgtaagagcactgctggaataaactacttgagcatt

SEQ ID NO: 12501 - DNA, 808 bp, Homo sapiens
aaactggaattaaaaggaaagtcaagaagaatgaactatgtcgatgcacagtatcttttctttcaaaagtagagcaaaactataggttttggttccacaatctctacgactaatcacctactcaatgcctggagacagatacgtagttgtgcttttgtttgctcttttaagcagtctcactgcagtcttatttccaagtaagagtactgggagaatcactaggtaacttattagaaacccaaattgggacaacagtgctttgtaaattgtgttgtcttcagcagtcaatacaaatagatttttgtttttgttgttcctgcagccccagaagaaattaggggttaaagcagacagtcacactggtttggtcagttacaaagtaatttctttgatctggacagaacatttatatcagtttcatgaaatgattggaatattacaataccgttaagatacagtgtaggcatttaactcctcattggcgtggtccatgctgatgattttgcaaaatgagttgtgatgaatcaatgaaaaatgtaatttagaaactgatttcttcagaattagatggcttattttttaaaatatttgaatgaaaacattttatttttaaaatattacacaggaggcttcggagtttcttagtcattactgtccttttcccctacagaattttccctcttggtgtgattgcacagaatttgtatgtattttcagttacaagattgtaagtaaattgcctgatttgttttcattatagacaacgatgaatttcttctaattatttaaataaaatcaccaaaaacat

SEQ ID NO: 12502 - DNA, 1779 bp, Homo sapiens
tgtattcaaatgttagagtttaattttgtgaatctattgtttctcctctgaagcatttggtggcctaatttacaagcacgatggagagagccttataaacagataatgcttttactaagcactgtgtttatatgtcttgcaaagcctttaaattgttcctctttgtttatgaagaaagatactaatagagtacttaatatactcagggattccttctaagtgtacttcataagatattctttacaaactgaagataatgaaatagttattttaatacctttaaatatcattctttgtatcttaaatctgtgaagtagaacaatttggtcttagctttacattttcagtaccaaagaaacaccacttaatcttctctcttgattgatttttaaagtttaaataccagtacttgagggaccaatattaccatcttaatctttattttattattcagaattatacagacctaatatcattttattcacatatgtcttactactttaaatcctaccaaagtaacctgggcttaagttttacttgaggatcatatgaattagccaaaagaatggctgactgttgcctttgctcttataaaatcaataagagaactctcctctttttttaaaaataaatctaaatgattatcttgaaaaagtattgttttccagtgtcacttgactcttgaataaaaataactgcagtgttccccaaataatttaacacattgcaaatatgattcaagaatctggcctttttcatgcttggtactctcttctcttgctccattccttacaaagctccttcaaatatgctatgaaattagagggaacatagtgcttaactctgctccatggattttagaggaaaaaagctaaataattggaaactgttcaggaaagagagaaggcagattatttcttaaaactaaatggaattagaatttagctttgacctcacctagcaatctaagtgtgaaaatggggagacctgtgggcatccccagcatgactctgcatatctgagcatatatctccttatagatcaattttatgtataaacccttagatcctaatccatacagaatagcactgatcaaatttaaatgcatgacttgattaaagacatcaatttcatagaagctggtggcaagaatatgtttaatatggcacttgatacctcctagatccataatgtaagtccaataggcagaaaagatggtaagttactatgtttcaatctgctatatctagaaaatctaaatttatttggaactttcaaaaatgtaaggtaatttagaatcggcttgatgagaattgaagcatatggaaacaaaaccttagctttaactttatttatacaataatgtgccctaatcatgtactctgaaactttataaactttcctgttgctgtttcttaattatcacttctcaatccgtacagccaaactagtaaattcaaatgtagactgggttgtgggtggcagatatagaagaagaaatttccagaccaaaaaatattaaatattattttaaattatttcagaagcaaaaacatattaacatcataacttaccagaaaaaccccactatcctcataagattaacttaaaattctgaccacaatcagaaccagcacttgaagtctatgtattgtttcaagtaggacatattatgaggtgagatggtttatccttctgttttatgaaattaatacattttaaaagaaaaatgttagtttaagggggtggtaaataaaacagatttcaacttgcctacaa

SEQ ID NO: 12503 - DNA, 2135 bp, Homo sapiens
aacatggccgaattgaattgtttgacatttggtagccatatatgtaattgaagaagttatatatttcactttttgacaaccgaaaaagtttgccttgtttcaaatcatgtgctggctgttttgtaagtaaatttatacatggatgtcacttaaaactaaactcttgatcataacagggttgaatatatattttgaatatacattagcttattcaaaactcttgtttcactactgtgatctctgtctcctttatacacctctatccccatgccaaatcttaagtaacaccaccagaaagtgaacagggaaaataacaggacatggaattcaaatcaagcaatatagttcttataaagagttccaataaaacatttcagaagaaaaagtatgaaacaagctaaaagtaagtttcacttagaaaacttctccccactcacactccccaccaaataatctcatattatttgggaaatatttggatttcaattgtccctacccagcctaaactaaggtaaatgataattagcatacactaccttaatattgtgatgaaaatcagtaaagatagaacgttttctaaaggtcaaaaataatatatttattattactggggaaagctcccaggttaaatataacttttttaaaatgtaacatttggacctagacctactttaatatatcatttgaagtttcagacaattttggtgctaattactttttgtgagtttttaaagtctcatagcctagttgactgcaccctatggtaatgccatattttcttgtatctaacaagttgcatattttttcctagagagacattttcagtgtatttttttttagaaatttataattttatagttctttcataacacttattctgagttttgaaacaatgtatttcctatcttgacatggattttttcacaaaaaatttgtattttactgttgttttcaggaaaaaaatcagatcatttttctttgatatctatatcagaaaggtacaatattaacagtataaaaccaaatgcttaaatttggaacttagccaattttgataatctttttctaaggctaaagtcacatcagtaattggctagccatgttattaaggtgtcttaattcagcattttcaggttttatattgaaatacgcatttctttaaatattctttgaaaatggagaatggctttagtgatattttgggttttgttagagaacctaaaatctttacactttcatctcaaagattataaaggaaaggggggtagttaagatttagaattcaagttaaatttcagaaattggggcagtcaggcatttgtatctttggtagggcaacaagtaaaacatgtagagtgcttgctatcccacttcataaagcttttacccaatcttatttctaaacctctgtgcattcttagtgtcttctcattctgaaacagaaaataaggaaaaacatttaacttagttttctaaaatcagataatcctaaacaaaaatgttagtcagggtcactaaaaagtattgcacatttatataaatacagtccttttaaaatttgacttttaaaaaacaaaagactttgtacgatattgtgtttttattgcttttgcaatatttttatagtagcctttatgaactcagtataagtgcaagttgtttgaaaaggtgtttttattagtgcacaatagaattgtgaggttttcaatagatgtcatgagattttgtatatctacataaaatatcagtacatttttttctaatgctactggaaattttacttttcctttgcaacacataaatgatatgatgtacaaaataacagctctggttccaccagtacctaatgttgaaaacatttttaaagtaatttttaatactaactatttagtatactgtcagtactgtacatctgcacactggtgttaatagggtatatattaaattatataaagaaataagatattttgctgttattctttctacatatattattggtcagtacatcaaataatatttggctttgatatgggaaaaaacaaactttgcctatgtaatggaaataaaatattttcttttatgaaatatattagaatgcagattatactaatatcctgaaataaaactggtaattt

SEQ ID NO: 12504 - DNA, 1640 bp, Homo sapiens
ggtaaaattgtgtgaccttgtttatcagttatgaccaaatgttaaaaaccaactagaatgtataagtgattgtgcttagcctttttgtaagggagatgtgtaagaaaccatgttgtaaatgcttattttattacaaaggagtagggatgataggatctgaattgatacagaattaagtgcaatttcatcatctgccttctgcttttcaagaccaatttaatggtcctgtcatgttactgattaaatttactttgtcttgtctttatagcatttctgtttactatggtagatttccactttcaatttttaaaattaattttactttgaatgatttatgaagcctatttcattgtctaactatgaaaatattaagacttttttgttaattctcagccgatgtgaaggaagcatgaggagggatcgtcagattcagatttagaatagtgttcccgtttccagcattatttatttctatgacttctttggattttattatctaatagtaagtacagttgatgtgggtagatgactctaagaaatgctgaagtatcggcattacatgtgtttatttacatgtcctagtatgataatgttgattcaatctgaacaaaagataatataaaaataacccttcagagtttggacatttcaagttggtaataataaaaaataatatttaagaagatatatatatatatatatttagttttttccacttcattttacatgccactatattgactttaattgatatacagtattaagtttttaggtgccattatttttaaaaaattctatatttccaatgaacgatgttagattttacacagaacatattctctgcatgatttcagaaaagaaaatctaaaaaggtaatacgggtatttcaaataaaatcctttctggtatgaaaggctccattgattttattaagccttcctttaccttgtagtacaaggtgctttaatgggatagaactaagcatatcaatatctataactgcattttgtgctagacaattactgttcttttctctaaaatgtatatgtcaatttacaaggccagggatagaaaacactccataattgctttccttgattttgctgaggatttggtatgattttagtaagcaaactgttttttggtttttccttaatgtttttaattttttttcctcttgcaacaatgacggtgcatgttcttataaatataggaaggtccagatataaatagtaacctaaagttcttgctgtgcttaaaaaaaaaaatcatgtggccctttcaatatttgaactgctaagcaatgacatctgtagttttatctccttttttatgtcatagaaattaatatgatactttaaatatgtaaatataatacattaggtaatgctattatttatatctgtcttaacataatttaagttgtagctgtgtcttggaaatatttttaaggtaatctatattcacattgcctgtgttaatgctttttaaagtttgtatacatcagatgtatatttttggtttggcataagctacgattgtaatttttcttggctttttgttcataaagaattttttgaaggaatggtaacaaatggtaatttacaaatggttgtgaataaacacatttttacacttaa

SEQ ID NO: 12505 - DNA, 462 bp, Homo sapiens
aatacggcacagtctggtcctttggggcttgggcagggccgtgacacaggttctggccaatgatttgcaagaggaattgatcagtatcactttaagtcctgcatttaattggcagcacaagatcctgcagagcctctttccctctgccacagttatcaagaatgggtcaggagaccgctgcttctgggcataagtcctgcaaggaaagcaacatggaaaacagccccaactcacccatgagggatgaaaagcactcttgagaaaggcatgtgttgtttaagccattgagattttagagctttttgtcactatctgtcaagactgatactactggggcttttcctattgatttgggagttctttacatattaaaaaaatgtgagcctttgtgatacgaattcaatttgttttcctgtcttttgacatttgactttgcataaaagtttatctgtgcataatttt

SEQ ID NO: 12506 - DNA, 258 bp, Homo sapiens
aaaaaaaaacagttcacctcttaatacttcacaagatacttgagctgttcttgggagattcacttttattatggtagcactgcataattaatgtgtttttaattaaaagaaatatctttgttcctcaacttgtaaataagacttttttctagagacaaatatgatgtataccacaatttttcttaaacattttatttgttgaaattatcttagatgtcagtgtcaggtgatttagtaaataaatgtgttttgaacatt

SEQ ID NO: 12507 - DNA, 2258 bp, Homo sapiens
agccatcacacagaagagggctgtggtgaaggaccagcatggaaaacgcattgacttggagcacctggaggatgtaccagaagcactagaccaggacgacctccagcgcgatctccagcagctccttcggcatttctgcaaggaggacttgaagcaagaggccaagtgaggggctgcccagttctcacaccagaaaccacacattcactcaatatgcagcttcctgtttcagtaggggagtgacctaactggcctaattaatgggataccccgacatttccactgttagcaaatatacggcattttgctttagttttcccccatcctctttaactataaagctaatttgtgaccaaagatggcatccttcatactggatgctgtatccaatactttgttgtgtctgtgctaacctgggaactggccacctccattgttctttgcttctgcacaagatccatgaaaatccattgatcagaagaacttcacctgcagacctcttcaagtgacactatgtaggaatccttccaaggaatatctatgtacaatgtatatagctgaaatgctcagatgaacaacatattaaaattaaaaccactgcctattgtaactacactgggcatcagaataaaaggcctctagaaattgctgaacaatggttaattaagatattgctaacacaatcgagtgataatacagttttactgcaaaagaagcacttcaaacctattatgtccttagaacttccagagtagccactgctcccagttaaaggtgggtcagtagccttgcagaactgtcctgagaagttattgctggtgctggccagccatggcttaggactccaacagccactctgagggaggggagaagggagcagaggccacgcagaatgaaccgatggggtattcagttgctggcagctacattgtgtggcattctagcatcttcaggtctttagatcttggacaagttggcagggtattttaaaagctataactactgtagttttccagttttcattgctgctttagcaaaccacgctgtcttacagtggtactttcttctggccactgcactgtagataattcattggaaacaagatttacccactacataaaaggttaaactccttcagtatgttggagtggtttctttttttttttctttctttcttttttttcttcaggtttatatcttctctaatacctgcatgtggcgtttaaaaatcaagaccacggtcaaacccctcttctaatcacattaattgtttccattctttttaccctgagtgagcacttttcactttccagctaggtctgtttttcagcttgcagacaagattgagaaatccttgaaaatttggttttggttaaaatttttggtttatttatttgaaatccacactcccttggaaactcttaagtgcatttgtgcacttctgtttgtttgtctcaaagaagggactgtaacaatctgagtaatttccatgtcctcttccttattcctctagtggttgaagctgtgtagcattttaacatatatatattcacaaatatattcatataaacagtatacattttgaatcagtcatttgttaaagaaaagtatattcaatgaagatgaaatttaaataaaaaaggacagagtctatcctccagggattgaacattttccaattatctggtcttttcctgttgtgcaaaaatgactcattgctccgaatgtcaaaaacaaatgcgacaaacaatggcacttcatcatttaaagtaatgttgccaagagaaaaaatttcctgggagggaggtttcccacaagccaaatctcctaagcctcaaatgctagcactttttggcagttggataggaaatgagacattctttggcagccaaaataagagaggccgatggtgaaactttttgagacaccctatggccttcttgtcaaaaccttcactggagctcaagaaaagcatttctgttgtgttatttgcagtgcagatgatgtctgtgtaacaacataatggttattcacctttttttgattttgatttttgctgtgttatcaaaaacttgaatactgtgagaagaagtgaattttcagttgacgaatcagcatcttgttcccatggtgataacactaattgaatatatctatgagggcatgtattagttaatggaaaaaaaaatacaacactaacaatacatagctgcaatgtgtacaatggctgatttaattaaataaaatgtacaagtgtt

SEQ ID NO: 12508 - DNA, 308 bp, Homo sapiens
gccaacagcccaggtgatagaaataaattggttcactcattgaatttttattgctattatttagtctaacagctactaaaagtaaaacatcagtaaacaattctaacatgcccttatgagatctactaatgaaattctgtggaattaagatggctgtaaaaagcacaaacctaaaatgcagaaatgtattttattcaaatactgatgtagagagttttggcactgaaccttttagaagccttaattatttaaatcaattcagtgactgtgtcagaccttagttttaaatcttgatatgtgcgtgtccc

SEQ ID NO: 12509 - DNA, 149 bp, Homo sapiens
cactgagagaaaacttgagacttcatcgtccatgtagaacacaccttttccaaagcttccagaagctaccaaaaggcagttgaaaaatatacctcttcaaatgagaaaaaagaacagtttcttccatgtgctggcacgtggatgattag

SEQ ID NO: 12510 - DNA, 618 bp, Homo sapiens
ttgttgaagacattgaacctattcatcctcctctaaccttctttattgtaattaaatttcaagtgggagacttaactttagaactcacttccagcttgcactttgctttaatttctctgagctgcaagaatgtcttagcgagccttgcttgcagttgtcacacacactgtctggtttttttcaggataaatgaatgattctgccttttgttatgtgcgtgaacagaatggaacaactcaagtagcttcatcttcagagactgaatttattctgatagacttcagctaattacaaaggattttgctaatttttgggaataaataatggaaaaagatccagtctgtggtatcatgctagtgctgacagggccttgatagaatagagttggaaaagatggtaagcttttgtcagggttttaacattttcttgatgaaacaataaaaagaggtaagcttttttcttctttttttttaagttttaaataaactcagatataatttgaatactgaagaaattaagagactttgaacaaaaactcttcccaaatctaaatttgataggggaggtggagattccaggggtgggtgaaagaagagatagaacttagcaggcagactt

SEQ ID NO: 12511 - DNA, 3304 bp, Homo sapiens
aagttagaagaacggatcatgtgccaactgtagttttttaaaaaaaacgctcctttgtagggttttaaacttttctaatagatttagattcacttttggtcttggcttgttctcataagtcatttatctaagtttgtgtttctgtgtgtgtgtgtgtgtgtgtatgtatgtgaatatacacacacacacacacacaggtgagtgtgaatacttccttgttggctgatccatagagcattacttggaagaaaatttcactatttgcattgatgtgctggcatttatatgtaattcataattttgattccattaataggtagtctatgcaacaaactctactcaattaaagtaaaactaagtatttcttcattgtaccttagtccaggaagaaattaatggaatatggtgtgctaattatcactacctataacatgaggaatataacattgcagaaatttctcataggggcatgccagtgagcaattactttataaaaatattttccttggtgttaagtatttctctgcaacttttttttttttttttttttttttttgagatggagtcttgctctgtcccacccagtctggagtgcaatggtgcgatcttggctcactgcaacctgcgcctcctgggttcaagcaattctcctgcctcagcctcctgagtagctgggattacaggcatgaaccaccacacctggataatttttgtatttttagtagacacaaagtttcaccatgttggtcagactggtcttgaactcctgacctcgtgatctgcccgcctcagcctcccaaagtgctgggattacaggcgtgagccaccacacctggcctttctgcaacatttttttaaaaaaatctaataaatcttagatttttaaaaaagaattaaaatgtgggagttctcagaaagaaataaacacatgagaataagattattacacattttggaaggacttttgaggaatgatgtgatgtgtagagaatagaaagatttagatatatgcctgtgacaggaatagattctgggttcaggggtccccatctgtcaaatgagaagattggattatctaatcttttagatccttaacaactctgatattctgagattctctcatttgtagaatgcccgctgatgcattgtttattttttttgctcataatataaatatcagattatgtttaggagtggattaggtaattagtgtcactacatgtatcattaaaggtcctaaaaggaattgttaggcggcaggctttgtgttacgtgttacatggagtgagggtagatgtgaagatttaaaacgattgatggatttaaggaagtggtacataaatatgtctgttattatgcaatcgtaggtcatgataatttattcagttatagaaaacatgccacagaagcctatgtaacaagtggtgcttctttagaaagttgtcattagaatgttctgaggaagttaagcagctgcttcatcaatcccatgacacatgccttgttagcatgcccatcaaataatcagatcaaacacctgctccttattgccatacccacgaactgttaaatataaaaaaattcaaagtatttgacatcttaagcaaatatccagaatatttttaagtaaaaaaccatcttaagtattcaaaatttccttggttttttaaaggtgataattttgctttgtgttacttttttgctcttgaatgtatcgttatgatggtctcttataatcatggtatctttcacagaataaaaattaaaaataatgccagggtgcaagtgaccaaggccttatcttgaaagttaaaaaaaaaaagtaaagaaatcacagtaagttctattagtgatgatagaaccagatataaaattgttcagtgatggagaaaagaaacgataaatactttccaaggttatattgttaaattatcttaaattatcaaggtgtaagatgtaatgatcccaagagtttttatagaatcctaaaaaataacgcctgatgtatagattagttagcaaattctcagaaatcccccacataaaagccttactttgttcaaaatttattatagtggtttaatcattttagatttgaatgttttaagataggagagacttagcagaaaatacttggcttgccagggccacgttctacttcattgctttcttttataagtgcaaggagttatttccatcagttgacatagatattattcactaaaattttcagcagactcaaaatagagaggagactttaaacttacatgttagcataaaacagacttctctctcattgcatgcactagatcaatattatcatctgtattaagctatctgaatttattcgagacattaagaaaaagacagtacatggtgggaaagctgcacatttctcacaaggaaaaaaacattctatatttgtagcagaaatcagtggtttgaaaagtcatactttgcagatatgaacctgaaaatcaaagtgccattgttaaatcatcctaaagtgtactgtgggtattctccagcatacttgaaaatgaataaagttagattgctcacattgaagctaatggttgagacaagacacctgccagagtgaagtttgattcctatgggtgagaagatgtagatgactattgttctcactaaagttctaaaataatagcaagtgtagagaagagccgttgctttgaaaatacataccacatttgttataaagcatttgtttgttagtatcaatcacataggtagaaagagtttgagttttactgtggattaaaaagccttccctaaaaagagagcatgccagtcatagagacactaatttggcacttttcctccttcttaggtttaaatgttataccaatgcatgtgtttgaaatatccattaagatgatttaaaatttgtcttgtattttgagtttcttaaatgcgtggattcttgttcatttatctctgaatatgtctcttttatattttggcacaattatacacattggaaagggccaacctattagggctcaagtatgtatatgcaaaaaaaaaaagttatatcaaacaggcacagttattacaactagagagaaattccagaaatatttgtttttttaagagaaagtaaattttcacattagatttctattcaaagtactaatatctacatggtccacacttttctattttaaaaaattgtgttctcttgttaaatagattaacatttccacttctgtttatcacaaaagactgtatttgaaatatgcatacggaaaattgaaattatattagtaataaatgtaacttg

SEQ ID NO: 12512 - DNA, 1580 bp, Homo sapiens
aaagaaagttgtatgtgccacataaaactctgaatataaaagttgctgttctactattttaactactggcaaagccacttgcatttttcattagtagcaacaatagcaatttagtgattttccttttctgacattcaatttcaatctcagatcaaatactaataaacaattagaaatcttactttaaaaaacttataactcacttgtcttcattcataattttgttttcacctggtttaaagaatccagatattttactgcaaaagttcagatggaaaagtaattgacagtttcacctttgtctcattttatatgatttattacagtgtaagtttttcaagtggaatctagaatcaaaatacagggagagatatgaagacctattcagagtttcatctggggatgaaagctatggaagatgatgtacaaatgttattgatggagaaaatggttgggtgtgtcctttctggtgaccatgagaaaataatatgtcttgatgaagtcttttcattagtcactcttagaattctaaagtgctttgcacttttcaatatgttttgaatcattaggtaatttattctggatgatattctccaaaattcaattcagttattatattcatttagcattaagtcaaggagactgagaatgactcaagggacgtcatagtaccatagttttaaggaccaaggtgtgcccagaattcaagtttcacaaatcccaatgctgtgcattgattatgttcaactttatgtgtgcattcttagaagagtaagaacaaataaagtacaccgtaatatacatataaatacattcatgtttgtgagagaaggaaagagtaagtaatttgaattggcagctttctttgctaaatctttaaattctgttaagatcctcaagtaactggggagtacatgctttaggacacaaacaaaaacaaagggcatgaaagtatctgaaagcaatgtagcacatatctatcgtaatatatgtaatatattgacataaaagacacaaactaatataaagttatagttatatcttaaaatataattgaagaagcatatgacatataacttatagaaatcagtatcaattcctcccatttcaattcagttaagacttctgtgatagatgtttatagcagagaagaaatgtctcatcaatagaaaactatcagataaagtttaggagataggaagaaggactgtgtgtagtaatgaaaataccaagttgcaacattacatgtttacaaaaaaaaatctgtgtttgtagtgtggaagttggtgactgttttaatcatcatctagacttgttaagtagaaaaattttaaaaatttgcttatgaaaatataacccccagaaagtaacaatgacaaagtattatatttatatatattattgtagagaatttgtatatttttaaagatgtcttaagatatcttaattttatttataagttttggtgtttacctgttttaaaatgataatgttggcatctgtgataaactatcaatgaggctcccatcatgccattttttgttcattttaatctttaaaaaataaaaattaggcatatt

SEQ ID NO: 12513 - DNA, 2307 bp, Homo sapiens
agtgaaaaaggactagacctgtgttacataataatcttggttcaagctgcccttctgaacaaagatataaacctagcatacattgtaatagataactggtaaaactgaccaacttttacttctcagaggccatttaaatataataggaacctactgaccaaacctagtgatacataaaattaaagcctgtggcatttttaaagttgttaatcactatacatatgtatgtgtatatgtgtatacacatatataattttatgatcaatatcttagatattttagaaattccctttgaatagtcttggcgtgccgtgaaaaatagaaaatcagggagatataataattcatttgtcatatgctacagttgaataaaaattaaatttgtccccctattttgtggccagtagactgggaagtattaaactaaccagtactcatgtatggagattataaactatgctaattgaaaagtaccaggtgatacatagcctggtacttttttgtcaaagaattgctttatgaagaagcactttctaatgggtaaccagaaaagggcttcacccatttgtttttgacttctatgatagtcactgcatatgatccctttaagtgtctttaaaaaaaatgacttatgaatttgatagcatttggggaaaaaaagccttatatgattaacaatttgtaagttttcaagatcggatggaatttaattttgctcctagaatttttgtcttcagaatatctagttaagataaattaggcctttgactattataggtattcataaatgctactttagccatgtaagttaaaaagttaaaatacttaaactttagtgtatttatttatctcgttactttttttctaattttatatgaaatgtgaaaggtctttattttggtttggtttactttgggctgctaaccaccagtgttaggaattaatgtagggcaccctcttattgggaatgtcactgtaattgcctacattttctttgctgtaatattacctgcttataggttgtcaacccattttatctgaatttgaaaatctatctaggtttccagattaaatttctacctttcatatagagagtttaattttaataaaatgtttaattagagcatccttcccttttattctactttgaacaaatagtaattttaccccaactacttttcatgaagagtgctttgaaaattaaaggaatttttattattatggtaaccttatgagtaaaaataagttactttaattgctttatttcgttagttgtcattttattttgtactatgctggtaaactaattgtggtttagaatagttttatgttcactcctgataactgagaaacagaactaaagttttccttacattgctaaatggataaacctcatattcaataaactagtaaatgtagccacttgactgattgcgtaaatcgtgttaaaacattctaaaatgttgtaactaatttaatgtgaatactgttaaacagaaaataattgcttataaaagtctaacttcacccagttaccaagtcttggccaaattttatcttctgcctatagtttttactagcctttttaaactataatagtgagtgatcattactttatattctcgtaagttagaaatacttgaatgccaaattaattttgttttaagaaagcttatttttaacataattttttagtgtggagggtttgtaaataatgtaaagtttgtaaacctgtatttaaaataccaaagtttttcttcttttataacattgtaagatactagaaaaatgggcttcaagttttttaatagctttcacagtttgtgtagttttttttttctatttggttaagatgtgagttggaaatgtattatttgaaacatttaaactaatttttgtatttaacagcagtctcagacatttgtcttttcaactcagttgagttgtagatatcaaatagaaatgtccagttttgcctcttttaagtactgtccagttgaaacctcctgactcatgtactactacacaaactagaaaatgcccatttatttttgttgattcaacactccagatacagattgatacatatatactaatcattttatttcatgtaaaagttttacatctagggtgcctatttatttttatagatgctttcatccagttataagcttattataactttgtaaatatttcagccaacagttgtaatgtttaaaatacttaccttcagaatgttatattttcatgtgaaatcaatttcttctaattcaaaaaaattttaagataaactgatttttaagttta

SEQ ID NO: 12514 - DNA, 164 bp, Homo sapiens
agctaacagttgtatatctgtatatataactattaaaagggatatttattccattctgagaaccctgggtattttttattcacaaatccattataaaatctagcaggattttaaaaatagttttttgtttttaatgtgctttaaaataataaaccttctggagc

SEQ ID NO: 12515 - DNA, 45 bp, Homo sapiens
aataggcaatccattatcacattaaaaatcttgttttgtttggtg

SEQ ID NO: 12516 - DNA, 917 bp, Homo sapiens
tgttactggctaagtctttggaaaataatttttcataatatgtcatgctaataataaatatattgatagccaagtcatggtgcctaaaatgccagctattgccaagaagaaaatagttgatgtctgtcaataactgtgcatggtctgagattttaccctacttataagctaacaagttagcctgttactgtttcgtgggatgctacagaatgcataagacacctgggtcagaaacaaaggacttatcgctcacagcaaaagctgtagccagagcttcatgttggttttattcagttcctcatttttctagttcccacaggaggaacacaaagggcccatgatgaaagcctgcacacagtgggttatgttgtaagcttgggttattaactgcttttatagtaagcaaaaaaatcctggtctttgtccaaagggagttattaccccatacttgaagatagcttagtgtaaacacaagcctaggacatggactaggtaaagacaaagtccttgcattcttgacatacccagtaagtatgcagggacactcagagcccatagtggatagtctcttccaacagtctgctcctcagcctgagatgttcttggccaaacttgaattttcacatgagtatgccactctatcagctactctgattaacctgacagtcgggttgtttagtcagtaccaaatttgttcatttggtctcatatagcaattaatgcaggctattatcagacacagcagcaggatgaagccaacctgcagtattaacctcagtcctgtcccccaaggtcttgactcaatcaactctaagttccaagggaggaccaataggtctttttattaggcagccagaatgtagtgaaggacaatttattatactttatgacccaataaagggagctttgactgacgt

SEQ ID NO: 12517 - DNA, 5839 bp, Homo sapiens
ttttaatggccacatctaatctcatttcacatgaaagaagaagtatattttagaaatttgttaatgagagtaaaagaaaataaatgtgtatagctcagtttggataattggtcaaacaattttttatccagtagtaaaatatgtaaccattgtcccagtaaagaaaaataacaaaagttgtaaaatgtatattctcccttttatattgcatctgctgttacccagtgaagcttacctagagcaatgatctttttcacgcatttgctttattcgaaaagaggcttttaaaatgtgcatgtttagaaacaaaatttcttcatggaaatcatatacattagaaaatcacagtcagatgtttaatcaatccaaaatgtccactatttcttatgtcattcgttagtctacatgtttctaaacatataaatgtgaatttaatcaattcctttcatagttttataattctctggcagttccttatgatagagtttataaaacagtcctgtgtaaactgctggaagttcttccacagtcaggtcaattttgtcaaacccttctctgtacccatacagcagcagcctagcaactctgctggtgatgggagttgtattttcagtcttcgccaggtcattgagatccatccactcacatcttaagcattcttcctggcaaaaatttatggtgaatgaatatggctttaggcggcagatgatatacatatctgacttcccaaaagctccaggatttgtgtgctgttgccgaatactcaggacggacctgaattctgattttataccagtctcttcaaaaacttctcgaaccgctgtgtctcctacgtaaaaaaagagatgtacaaatcaataataattacacttttagaaactgtatcatcaaagattttcagttaaagtagcattatgtaaaggctcaaaacattaccctaacaaagtaaagttttcaatacaaattctttgccttgtggatatcaagaaatcccaaaatattttcttaccactgtaaattcaagaagcttttgaaatgctgaatatttctttggctgctacttggaggcttatctacctgtacatttttggggtcagctctttttaacttcttgctgctctttttcccaaaaggtaaaaatatagattgaaaagttaaaacattttgcatggctgcagttcctttgtttcttgagataagattccaaagaacttagattcatttcttcaacaccgaaatgctggaggtgtttgatcagttttcaagaaacttggaatataaataattttataattcaacaaaggttttcacattttataaggttgatttttcaattaaatgcaaatttgtgtggcaggatttttattgccattaacatatttttgtggctgctttttctacacatccagatggtccctctaactgggctttctctaattttgtgatgttctgtcattgtctcccaaagtatttaggagaagccctttaaaaagctgccttcctctaccactttgctggaaagcttcacaattgtcacagacaaagatttttgttccaatactcgttttgcctctatttttcttgtttgtcaaatagtaaatgatatttgcccttgcagtaattctactggtgaaaaacatgcaaagaagaggaagtcacagaaacatgtctcaattcccatgtgctgtgactgtagactgtcttaccatagactgtcttacccatcccctggatatgctcttgttttttccctctaatagctatggaaagatgcatagaaagagtataatgttttaaaacataaggcatttgtctgccatttttcaattacatgctgacttcccttacaattgagatttgcccataggttaaacatggttagaaacaactgaaagcataaaagaaaaatctaggccgggtgcagtggctcatgcctatattccctgcactttgggaggccaaagcaggaggatcgcttgagcccaggagttcaagaccaacctggtgaaaccccgtctctacaaaaaaacacaaaaaatagccaggcatggtggcgtgtacatgtggtctcagatacttgggaggctgaggtgggagggttgatcacttgaggctgagaggtcaaggttgcagtgagccataatcgtgccactgcagtccagcctaggcaacagagtgagactttgtctcaaaaaaagagaaattttccttaataagaaaagtaatttttactctgatgtgcaatacatttgttattaaatttattatttaagatggtagcactagtcttaaattgtataaaatatcccctaacatgtttaaatgtccatttttattcattatgctttgaaaaataattatggggaaatacatgtttgttattaaatttattattaaagatagtagcactagtcttaaatttgatataacatctcctaacttgtttaaatgtccatttttattctttatgtttgaaaataaattatggggatcctatttagctcttagtaccactaatcaaaagttcggcatgtagctcatgatctatgctgtttctatgtcgtggaagcactggatgggggtagtgagcaaatctgccctgctcagcagtcaccatagcagctgactgaaaatcagcactgcctgagtagttttgatcagtttaacttgaatcactaactgactgaaaattgaatgggcaaataagtgcttttgtctccagagtatgcgggagacccttccacctcaagatggatatttcttccccaaggatttcaagatgaattgaaatttttaatcaagatagtgtgctttattctgttgtattttttattattttaatatactgtaagccaaactgaaataacatttgctgttttataggtttgaagaacataggaaaaactaagaggttttgtttttatttttgctgatgaagagatatgtttaaatatgttgtattgttttgtttagttacaggacaataatgaaatggagtttatatttgttatttctattttgttatatttaataatagaattagattgaaataaaatataatgggaaataatctgcagaatgtgggttttcctggtgtttccctctgactctagtgcactgatgatctctgataaggctcagctgctttatagttctctggctaatgcagcagatactcttcctgccagtggtaatacgattttttaagaaggcagtttgtcaattttaatcttgtggatacctttatactcttagggtattattttatacaaaagccttgaggattgcattctattttctatatgaccctcttgatatttaaaaaacactatggataacaattcttcatttacctagtattatgaaagaatgaaggagttcaaacaaatgtgtttcccagttaactagggtttactgtttgagccaatataaatgtttaactgtttgtgatggcagtattcctaaagtacattgcatgttttcctaaatacagagtttaaataatttcagtaattcttagatgattcagcttcatcattaagaatatcttttgttttatgttgagttagaaatgccttcatatagacatagtctttcagacctctactgtcagttttcatttctagctgctttcagggttttatgaattttcaggcaaagctttaatttacactaagcttaggaagtatggctaatgccaacggcagtttttttcttcttaattccacatgactgaggcatatatgatctctgggtaggtgagttgttgtgacaaccacaagcactttttttttttttaaagaaaaaaaggtagtgaatttttaatcatctggactttaagaaggattctggagtatacttaggcctgaaattatatatatttggcttggaaatgtgtttttcttcaattacatctacaagtaagtacagctgaaattcagaggacccataagagttcacatgaaaaaaatcaatttatttgaaaaggcaagatgcaggagagaggaagccttgcaaacctgcagactgctttttgcccaatatagattgggtaaggctgcaaaacataagcttaattagctcacatgctctgctctcacgtggcaccagtggatagtgtgagagaattaggctgtagaacaaatggccttctctttcagcattcacaccactacaaaatcatcttttatatcaacagaagaataagcataaactaagcaaaaggtcaataagtacctgaaaccaagattggctagagatatatcttaatgcaatccattttctgatggattgttacgagttggctatataatgtatgtatggtattttgatttgtgtaaaagttttaaaaatcaagctttaagtacatggacatttttaaataaaatatttaaagacaatttagaaaattgccttaatatcattgttggctaaatagaataggggacatgcatattaaggaaaaggtcatggagaaataatattggtatcaaacaaatacattgatttgtcatgatacacattgaatttgatccaatagtttaaggaataggtaggaaaatttggtttctatttttcgatttcctgtaaatcagtgacataaataattcttagcttattttatatttccttgtcttaaatactgagctcagtaagttgtgttaggggattatttctcagttgagactttcttatatgacattttactatgttttgactacctgactattaaaaataaatagtagatacaattttcataaagtgaagaattatataatcactgctttataactgactttattatatttatttcaaagttcatttaaaggctactattcatcctctgtgatggaatggtcaggaatttgttttctcatagtttaattccaacaacaatattagtcgtatccaaaataacctttaatgctaaactttactgatgtatatccaaagcttctcattttcagacagattaatccagaagcagtcataaacagaagaataggtggtatgttcctaatgatattatttctactaatggaataaactgtaatattagaaattatgctgctaattatatcagctctgaggtaatttctgaaatgttcagactcagtcggaacaaattggaaaatttaaatttttattcttagctataaagcaagaaagtaaacacattaatttcctcaacatttttaagccaattaaaaatataaaagatacacaccaatatcttcttcaggctctgacaggcctcctggaaacttccacatatttttcaactgcagtataaagtcagaaaataaagttaacataactttcactaacacacacatatgtagatttcacaaaatccacctataattggtcaaagtggttgagaatatattttttagtaattgcatgcaaaatttttctagcttccatcctttctccctcgtttcttctttttttgggggagctggtaactgatgaaatcttttcccaccttttctcttcaggaaatataagtggttttgtttggttaacgtgatacattctgtatgaatgaaacattggagggaaacatctactgaatttctgtaatttaaaatattttgctgctagttaactatgaacagatagaagaatcttacagatgctgctataaataagtagaaaatataaatttcatcactaaaatatgctattttaaaatctatttcctatattgtatttctaatcagatgtattactcttattatttctattgtatgtgttaatgattttatgtaaaaatgtaattgcttttcatgagtagtatgaataaaattgattagtttgtgttttcttgtctccc

SEQ ID NO: 12518 - DNA, 583 bp, Homo sapiens
gaaaatatatatattcaagatgctgaaaatcctttccagagaaaatttgtttctttttaaaattttttgagagtgttaaaaaaaattttactaggcaaaatgtttgaagtatgttcagtagaatttaggggctttggttcttacagattttcaagtcatgtaagtacagtgaaaatatctctgagcataagtttcaatcagttttacctggaaatttgtggtgtggtttaaaaaacaaatgtttagctttttcatttgcgacctagtctgttcatcccatgaagcgatttctttttccagaatctgtttgagtgtctttctaaaatgccaaacatgttggcatcaattttatacagggatataaaaaagtatatgtggataaattttttgtaatctttagggatataaaaaagtgtatgtggataaattttttgtaatctttatttttgaaggccagccagtaaaatggcccaatgtgccagccaggcttatgtggccttgttttcaaatatacatatatgtgttatcattaaaattcatatatgcatttttgttttagccttcttaatctctacctatggcc

SEQ ID NO: 12519 - DNA, 1201 bp, Homo sapiens
tttttggaggtgggttgtacctcctgaacttttagctttcaagttgtggctgttttttgtttttgtttttgtttttgttttctttagaatttttccctgtttcccaccttctcttcccctgttgccaaggtctaactcatggatttttctctttcctcatggatgatcttcagcaagagtggactgggaagctgcacctggctcccactttcaacaagagcctctgccatccacttgagggtattgagagccagtgggcttttgtgtagcctttttgttctgcaagcaactttctaaagttgtgtacatgaacatacacccacatccagactacagtgatttagagttgttttgattgggtaccgtgggagcagggaaattggttttttaaaaagcaactgtttaattgcttaaataagctatgtattaaatctgtctccagttagggctatcttcctagcataggccccttaagtagcatgggggatatattttttgctataacgtaaaaattttcctttaaccactgccctctccttctttctccttcaaggttctttccccctcagttttgttgttgtcttactctggagatgccaagtgtattttttctttctatgtaattttagattcgccttacaatgtaaatcttcacattggagataatattggttggaccttgcccatcttcactctagccttcgtatttgtgaaggactcagccaccttccttcttcaccccatgcttctcaccaaatttttgttgtcattgagggcacttggataactcaagttgatatttatagctgatcaatctatatgtgtcacagaactatgctgcctaaagtgatcttggctccttaatggtccttttggccccttggatagttaacagctgagtaattctaatctcttctgtgttttccttgccttaaccacaaattgtggtgctttttgtatattttatgtataaatcacaaagttgaattctgactatttttaagacaaaagtctgttaaacttttttattgtaaagaatatttattatgcgaatctctattattttatggtatttattgcaaaagactgttgaaatgtactcatgtttgaatataacaaaatatcaatacttaacggaaaataaggtgacacgaagaaagtacatatgttaactataatgcagaaaatatattaattaatg

SEQ ID NO: 12520 - DNA, 339 bp, Homo sapiens
ctgtgctttcttgatgcgtagaaacacgtgcatggaggatcaaacactgtcagaattgctgaaatcaatacacaaagagataaagtttagcttctttttactattcaatattgaacataatattgttaaatattgagatgaaatgctgttggatttgatacattaaatcttaatgtaatattgtaagacttttgagaatatacttgattaaaatgtgaaagaagggattgttaacttattgctattttggtatataatgttaatttattgactagtttgaaataatgtgaagtgttttttatatcagattaatataggaaatgtttattcttgaaaaat

SEQ ID NO: 12521 - DNA, 717 bp, Homo sapiens
tcgggagagtaaattaagaaatacatggatttaacttgttaaacatacaaattacatagctgccatttgcatacattttgatagtgttattgtctgtattttgttaaagtgctagttctgcaataaagcatacattttttcaagaatttaaatactaaaaatcagataaatgtggattttcctcccacttagactcaaacacattttagtgtgatatttcatttattataggtagtatattttaatttgttagtttaaaattctttttatgattaaaaattaatcatataatcctagattaatgctgaaatctaggaaatgaaagtagcgtcttttaaattgctattcatttaatatacctgttttcccatcttttgaagtcatatggtatgacatatttcttaaaagcttatcaatagatgtcatcatatgtgtaggcagaaataagctttgttctatatctcttctaagacagttgttattactgtgtataatatttacagtatcagcctttgattatagatgtgatcatttaaaatttgataatgactttagtgacattataaaactgaaactggaaaataaaatggcttatctgctgatgtttatctttaaaataaataaaatcttgctagtgtgaatatatcttagaacaaaaggtatcctcttgaaaattagtttgtatattttgttgacaataaaggaagcttaactgtt

SEQ ID NO: 12522 - DNA, 493 bp, Homo sapiens
gtcttaattttaccttcacattaattcaaaccgtgcaagtaaccacggggtccatcttttacatctggtacacacaacagacgctcagttgttcttaaccacttttgtcatttgttttttggagtagttttgaaaagtgttttatattgagtgcacttctgttcatttccattgctgcttatatgcagtgttagccgaattagatttacaagacaatctaagctttccggataattttatatatcaaacatacaggatggatacatagttggcaacagtctaccttatttaaagcttctactgggataaacctcaattcctttattcaggaaaggatactttattgcattattgttgcagaagcatagatttaattgcatctttattttgaaaaacaaatgaaaattgatggggtttaaagctacagaggcactgacctttttctagttattgtattgctacaatttaaatattaaaacaaataagagctttc

SEQ ID NO: 12523 - DNA, 656 bp, Homo sapiens
ttaaaactcctttcagacatataagtttaataaataacttttttgttgactttcaagtaaagtgattttttttaatttaacataaagtcttcagaaagcctttctatgaaagaattttaacctataatgtaaaggatgtattctgagagaacaaagcagaatgaaacttgagtcacttactaaatatagtggatataaaatagaacacctgactttgctcttagaccataacccccgaacttactatgttcatatatttgtattgaacaatcttttaaaagcaaaaatgtaaatgatgtgtagtttatttgtgcttttattgttttccctgcgtctcagacatgttgagaatcatggacaaaacctgctggaattttggaatttttgaagatgtaaataatgtgtatttatgttataagtaacatatgtaaacatgtatatttgttttatatttatttttgtaacaccagtgtctgatgaaacatttttgcaaatgcattttataaaaaaataaatatagtgataagttacattatcttttgattcatttaattaaatacttatttttaaataacttaccagtaaactcactttttaaattttgttgcctgttgaggagccaattaaattttaaatattaattttgcaaatgttaa

SEQ ID NO: 12524 - DNA, 1497 bp, Homo sapiens
atttgataggaaaattaaagctaactgaaagacttttgagtcccattttgtattcatattgcctcactcacagagttacaaattaaataaggatttaagaattatgaggaaagctgtcttatgtttcttgttcttaaattatatgtgtactttgtcatgtatggagtttctatcttttatttttactaaataactatagatatgtatcgttttcccctgtaaaattggaatagtatgattggattattctaaaaaggtcttatactcaagagtggggtagtcttcctttaattttgttaccaatacgctttaatcttgtcttggaaagataaaatgacctgcattctaaattagaattggggttctgtttaatttggttgtgtttagaatttccaaaagatttaatgttaataattttttcctggatcatttttaagacattccctcttgggaaaaaatgtgtgcttaaacttttttcagtcagggtgatgatcttctgaagctcttggatgtcatttgatcggaatatgcagtggaataggtgactcactgaaatgcctttataaatactggaacaaatcctgctgcaaaaatgaaagcgatcagactgtcttctgttcaagaatgtctattcccacctcttggtggaggaagttgggccaacactgcagtggagataaccacctttgcgataatgagagacagaccagaggactgctactctttttataggagctgcctatttctgtgtaattggcctgggctgcatgggctgcttttattcatggtgggaaagttaattattattattctggaaataccgcaagattatgttttctgtttccagggttatgtacttgtgtccagatgaataaagcagaaaaagaggggattgagtagcatttcccagattcttaagtactttgctattcgatttgcctttcagtgtagtgtacattgtaaaactcagatattgtcatgatgtttcacttggacataagacttattaatgtggtcacttaaggggtaaggaatttaagaactggatgaggttatttcttcctttactcttcaaaatgtatttttgatacatcagtatgagaggacgtcccatcaacaaagcatcgatgatggacagtctcacactatttttatcatatgtttctttgtcagccttctgcttctaatcccagtaagcaacttggacaggcattttaaaagctgaagaaaagtgacattattttagctagtggtttttaatttattttttgttaagatataatgggtgattatataagttagatttatttatgatatcaacttgggtccaagatgatagttttagctagcttatgaacattgggttcacaaggcattgggtaagttagataaaatagcatatactttctctgcagggtaggtaagataggtcagtcaagttggtaatgcctgtccattaaccatttatgcatactaataaaattataagaataaaat

SEQ ID NO: 12525 - DNA, 1079 bp, Homo sapiens
acagtgctgcctgtgtcctgtggtctcaagaaatggtgaaatgcctgagaaatagactcttatgaaagttctttgtccttgaagtcaacatttacatcagtatttatttggggaaaatcttctggtgtttaattgtgataataagaaagaagaaaaagaaagaaaagtggtagcattttttctaacaagataaattctaaaaatgttttccctgatttcacaaacaaggatagtcttggtgaccttttatagagatcttctagtaatgtattttgatctcagatttctttttcaaagccatggttttacaaaaacagcattccttaaatatatttaaaaaacaatacaaggaatgcctaacatttcagctcatacttcttaaagaagatatagtatgttgtattctcttcttagagctttcttaaagaatccacaatccaattaccccactgtcaattcatatttgaacttaccaaaacaaaggaggattacgtatatgttttttaaattcaaaaaagaatatgaaattatacctttagtatccctttgagacatatagtttaaagaaaactttttttaaaacaaaagtaggaatatatagtaagattgtagttacaatgagtatatgcacttttgatgctaggttttgcttttctccccccagtcatatctcatgatttccacagttgttgtattggtgtggagttttctgaattggctataagctgattacatattagaggtttatttttatgattctatataaacgtgcacgagtaatttaaaacctgcattgggattgattggaatattgtcctaaattaattaaatcttgcactgttttgaatgcatctgctatttatacatctgcaagtgggtatgtcataaggagtcagattatctttaatttaaaatgaatacttagttttacctttttgtttattttttgtttaattttgtttttataaatgttttcaagagttatagcaaattgatttctaatttttattgctattacaactgatgtaaatggtagtttcagtttttgtgagatttaaaaaaataaagcacttattctg

SEQ ID NO: 12526 - DNA, 119 bp, Homo sapiens
ttgtatgttgctgtttatattttctcaaacttgaggctctattttatgaaatgttgaatataaatacattgtatttaacttgaaaaattcctggaaatatacctgataattaccacctg

SEQ ID NO: 12527 - DNA, 2378 bp, Homo sapiens
tgacttagagaagaagatgcaaagaggcgaacgctcgcccagagcaagaaatgatagccagtcatatactctcagacccttgtacacaccacagcatgaggttgtgttggttaaaaatatttatgggctggtaaactcattgtacatatgtgcaaaactgctactgagtggggagcttctttgtggtttttttttttttaaaaacactttcccattaatctttactgttttgtaagatcaaatggggtgtgtcttccccacccccattccttcattctagagctagagtgaatgagccccaagaaaatgacccaaggagttgactcaggatggtttacagactgatttagaaaaccagaacggatttcatttctaatggagggggccagagatgggaaaatttcttgttcagtccggggaaacacacctaggtgctggtgatgggcttatgaaggaagctaagcacggctgctcactggcccccactttgtttcttgggtaattcacaggggaattcccagtactgtcatggagcagagcaggcagtgggtgctgatgtgtgtgcatgagctgtatgtacacatgcatatatctgttacagaagatactcctggcagtgaggtgctaagtcatcactgaggctgtgtgtgtgtgtgtgtgtgcgcgtgcccgtgtccatccatgtctctgttgtgtgtctgtgtgcgggtatgggtgggattcctggtggacaggggtgtcagatctgtctgaggagccccagtcatgctcagcacgctacagatgtgttgtttgtcacactgagattgctgaatgtcgtggctgttggctgccgagcctcagctgctggcatttccttctgctgtttgctgcttttgtgcctcccccactttccatcacctctggagtcccgtctggacgtcccttcctgctacaggaataatgaggcgtgggctgcctcccgctagggcctcctgctccctgtaggtagtttctggctgaggcttgctaattggggatgcttcttagagcatcttccacatcaactcccctggctgctggctaccgattaaattcattagtgtgaaagaggtgggagtgaggttttctggcctgaagcagtctgcactgaaaggtacccaagtggcctgaaacagtgtagggaaagacctgggaaacactggaccaaaaaagcctgatctcatggagacctgcatggccctgttagagatggcgtagaagtgaaagtcttaaagggagcattagagatccttttaatacacgactgagtgccagcttatttgtgatgccccttcccagaccaggttaggattcctgggaaggccgcggattccggccctggaagaggcaggatcctggagcagttttgtgaggcttttgtgctcccatacgccccctggtggtgagtgtaaagaagactttgcctctcacaactacatgtatgtgtggcatttttgttagagatgagaaaaggattgagaaggataaactggaatcctggtaagaagcctttatgccagcccgacacctgctgtaattggggtgcatgagctatggagtcagatagttgttgggagggggaggacaagaagtctattgtttggactgtgtttgtctcacaatcaccacaaaataaaagtgtagaaaatgcttgtggtgtactaactcttttctgtacttaagttactcagattaacatgcacttctaattctaaacattttttttggagtcatcactgtcgctgtttaagtagaacaatgccaacgatgtatgagaaacagggaataaatcaggatttgtgtgtgtatgtgtgtggcattacttacatttactttattaaaaagcctaaggaactttaaagaatttgtattcagtttatttttattttttcaagacagagtctcactttgttgcccaggctggagtgcagtggcgtgatctcggctcactgcagcctccgcctcccgggttcaagtgattctcctgcctcggtctcatgagtagctgggattacaggcgtgcgccaccatgcctggctaatttttgtatttttagtagagacggtttcaccatgttggtcaggttggtcttgaactcctgacctcaagtgatctacctgtcttggcctcccagagtgttgggattacgccactgtacccagccttagactcagtttaaaatgggcttattgtaatgaaaaaaaatacgctacccaaaatttgccatgatgcctgtgatggtgaaggcattaaacaattgaaatctttgccttgcccagagagttgcagttatttgtaattataaacagtaagtgtatcagggcaggggtgacaataaaaaaccaatcattactacc

SEQ ID NO: 12528 - DNA, 2961 bp, Homo sapiens
tgcaacagagatgatgcggaagccctttgggctcgtcattgggtttgctagaggagagctctgatgtgggggagaagcagaaacccattaatcctgagctacacaaacacatttacttgcaattcagattaatttttttccagagtcatttttaaatcatttttgtgagaagtttgtgttatttgcaacttgttgaggaaacagaagagtagattgtaaccataagacactgctaagactagaacccgaactgaacactaaaataaaaatgaaatgttttaaagaaggcaaggcttaaataagcctcatgaatttttatagccctctgcattcttcccaaagcacaaactcatggttacctgaatatagggaaccagatatggttcttgagaaaccctcatggtaccattcacagcccataaagtttattttctaggactgtggtagatcttgaaatcatatttatatttggccctcaaggctatttttgttgcattatagcatataggcagcagctctgaagcttcagtaacactaagaaatttatgtgtaaatatagcagtcagggaagagaattttaaaaaaggtcattattgaagaagctgaggggacagggtagagctgctgcaatatggagatttagggtaatatggcaaggtcctgctgcttgaagcctgtgagtgggttgtggatatgggactggtggagagtgagactgttaggaaagttgtatctatgaataagggcagttgaagtagaatttttaccagtccacttgaccttcttcttccctaaccactggctcttgagccagcttgggatttccctggccattgccaatacctggccatctggcttccaatagtacagtggctactcaagttcaagcgaagaacttccagactctggtgactgttacttcccagagccaaccactagtgcatatgttagggaatctgggcttccaacatgaatggattccttaagaaaaaggaaaaaaaaaaaaaaaagaaaaaaagaaaaaaaaaagaaaaaagaaaaaaagagaaaaaagcgaaataggttatattttaaaaacaatagaaaggcaataagttgcgataagctcttactattgaccaaggttatacaggaaagagactgaagtgtacccttgaataggttttctgtagtcagagttctaaactctaatttgtaacttggactttctaattgcaaatggcaataactattaagttatcagcaataataaatttagcattaaatttgagtacaatgttttgtttttgcactccccatagtgcgtatgtattaagacagtggatagtgtttaggtcctgttaattttctttggaattcaatgtggttgtgaatcaaacttaaggaaggaacgtttaaatagcaatgagatacagaattatgggcctttggaacaagcccgacttcccctaaattctccttagtttgttaataccagtattcagattcctgattcatttatacatctgtttccatatggcagggacattatgatacttaatgaataatgctttgaggagttctgcagttaactttcaagtcttccagatgattgtcaacaacaaaaaaggcttattgaatcccatcttgctatgcaagttttatcagatgatcaaatagtagatctgatacatccccattgtatgtacgacattttcaaaccaagtcttaacttttcaaggacattttagtagctaattcaggggagggggaagaatgatgcaggtttttagattgactgactatttttgagttatggggctcattttgaaagactgctgtccagatcagcttgttgctgcagataatagaaggttcttatgaatccaagttgtatattcacttgtaggataatttaaaaattagattttttttgcatatgagcaaaaaccttttgctggatacaggagaaggttggactttatctacagttatcttttgattacagcaacagctctgggtgagagtagaatttatagagggataatttgtcaagccatagaaagaaaatctaaattaatctagtaagtgtatgacctctcaccattttaagaggtatcagattcatttgcactattaggaatgctagttttgtgcaaaaataatgccttacctgttttttccccacatttaggttgaaaagctttcaaatgttccaagttatgctgaaccaaaaaaaacaaaacaaaaacaaaacaaaaaatattaaaaaaaacccacacaaaaacaaaacacacaaaaataaaaagcccacactttttattcctgcttcgaaatgcaaatggatagagcacggtttctctgacagtataatgatagctttgtgagttagtttcatgtcatgctgggaactctctatgaggtggccataagcagcaaccagcccaaacacccacttgcgttctattagtatggaaccatttgcatttgttttttttaagctttatctttccttgtgcatcctgaccaagaaatatctttgattatgattaatgtattatgtcaaaatgtaggctagttaaacttttgtaaagttgcctggaatgtcatttgttaggttataaacacaagatctaaatgaagggttttatgtgttgtgtacaaatcttattttgaaatggacaaacttgtcattacatttgtaaccttgtacagaggatttttcactatgtgcctagcttggtgtccattcagctaaaattgaaaaaaaaaaaaaggtgcatgaagagttaaaaatcaaattaaagtatatgtagagatgactattttatattacatgacccaatcctgtatttatttctaccccctttttgaaagtatttataaaactagttgaggacagctgtatttttttgttgaactatttagtagaattgtgcctttttgtctgtatgtgaataaatgctgtacattttgcaatac

SEQ ID NO: 12529 - DNA, 897 bp, Homo sapiens
gagtaatagataaccataccgatcattttttcctctataccttttaagataaacaaaaaataaatatcaattttttaagatgtcatgcatacatttcaacaacaaatatcttcatagaagtcactgaaaatatagtatctgtggcaaattgtatatgattaacaagaaaatatatgattctttgtagatgatttcatctgtaaagtcacaatgtttctcagagtcacttagtccaggatgttgcattcccagcacacagtacagttattcttgaaaactacaagtgaaaaagggggaacaattgaggttgtccaaggccacctagaggactgtcttgcactaccttgtgattcaaccatttcattcctagatatataccccagaaaaatgactgctcatagcagctttattcataatagcacaaaattgtaaacagtgaaatttccatccataggaaaatggatagacaaactacaatatagtcagtggaatactgttcatttaaaaaaggactgctgatacatgcaacaacctgtatgaatctcaaaaacattaagttgagcaaaacaaaccaaacataacatactatctaattacttttatattaaagccacttccaggcaaaactaatatttgatgatagataccagaacagtggctgcttagagtgagggcagggaattcaaattgaatggaaaaggggcctgaggaaattttccggggtgattgaaatgttttgtattttgatctggatgatggttatgtagctgcatatatttgtcaacattcctcatgctgtatgtttagatttgtgattttactatatgtaaattaattccttaataaaatactattataaaataagctgtaaattaaatggaattaacttcaagttta

SEQ ID NO: 12530 - DNA, 1416 bp, Homo sapiens
tcaattctacaggacttacctgaagcagcatgatttgcacaaagtcgaccaacaaaagcatcaacttttcaacttcattatcttggccatccagttagtcatgtgtaactgagtattagatttcggatggagtcatcatggccaattataggacctaattgctctcagcaggcctgagaaatgagttgaaatgtgcagaactgtagaaactttagaggcaacagattttgcctccccgatcagtgtgtgcctgtttacagcactatctatctttctctctccaaatgtcactgagccctttagatgtttatattcaccacgagaagccagtcataaagataaaggaaatttgtgcattataaatgcaatatcactgttttaaacttgactgttttatattatttttgtgtgatcaagtgttccgcaagctattccaactttacaagagaaattgtgattatgttcttttcacctgtgggttataaaaaatgttgtattctgaagacccacaaaatatcaaagacattctgtagtttatacaccgtgttgcaaagtgtttactgtactatttcaaagcttctaaataaatataaaatatatatattatattatataattttcctaaaatgtggtacaactcagttggtttttaaatggatgcatacagtccacatcatacaataaaataaaaggtaattcagggtcccaaagacaaacttactaagaaaaaatcattaatagttttctcccaatttccatatcttactcaaccgtgtttttccttgtttaaaagaaaatgatgctctaagctacaaaattttgtcaaaaactcatattgaattttcaatgccaaagatgtagctattgatgttatcagacagagcactgactatgtactatcaaactatctaacaatctgcataagtctgattctatttctatgactttgaatttagaatcacttaaagcttttataaagaatcgataaattcacctgtatttgttgttagaaaaaaactgggtgtctgtacattttgtggtgtaaaatatgtaattgaagattactattttaagaagtcatcagtcatatcactcacacagaattttattttacatagttttgtgacttaattacacatgaatataaaatctataattctatatgaatatatagagatatagaaacatctgaactggtaaagaataactataaaatatgaaagctctaaatttaaaataaatttagagatagaatcatggtacattattgtttcagtattccatgtgaaaattttatagcttaaatgtagtcagtgtttgattaatgaaaaaattcttcatgagtcagccttcaaaagttaagcttgccttttacttttatgtcaacaatattaattattaaatttagtaagacgc

SEQ ID NO: 12531 - DNA, 417 bp, Homo sapiens
cccggcccttgtatctctggtgcactgtatctatttttaggatattagcttatgtgtatcgttgtgggagcagagatgggcggtcaccttctcccactccttcgtgtgtaacctaactttcgcgttgttccaccctttcacatttattttcattccgtccccttggtactttgccaccttggagctccctcctttgctcttccatcctgtcagtcctttcccttctcagtaacctgggcatgaagggaaactgcgtgaagggagagggaaatgtggaggagggacttactttctagcactggcaaaggtcttttttctttgcgtctgtcccaggcattaataaagttggctctattttgctttgtttaacgatgcttttagtcgcgtgtacaagtaagctatagattgtttaacttt

SEQ ID NO: 12532 - DNA, 463 bp, Homo sapiens
atacttgcttttgtctttttaatcacaggagtctatttttttttttttttttttttttttgagacagagtctcgctctgttgcctaggctggagtacagtggcctgatctcggctcactgcaagatccgcctcccgggttcatggcattctcctgcctcagcctccagagcaactgggacaacaggcgcccgtcaccacgcccagctaattttttgtatttttagtagagacggggtttcaccgtgttagccaggatggtctcgatctcctgaccttgaatcacaagagtcttaacagggaatgtttcaggaaacaaataggataagacaatgccagaggaaggatagaaacatgggaagtttctatcatttcattttctgcgtttccagcatgcccttggaaaagactccctttagtccctttttcaattaaaacctatggtgaaaaaggcgtttgcactcc

SEQ ID NO: 12533 - DNA, 2697 bp, Homo sapiens
acatcactaaacaagcaaatggaatgactttggaccatatctagtatataatatttttgtcacgcacctgctgcattgctctaacttacacagaatgagaggagtaaatgttcttgccttcaaatagtgttttacgttttttatcctgctgaaaaagtatatataaaatatctaacattacaggatagaggttcagtttcttaaaaaattaaagctgctaaaattgagtggttaaaaaagataccttatcctattcctccccacccacccatgtttttaaactaatttatataaaatctggaggctgttacagctaacaaagcaggtgtgtggcagaaatattactttaaatttgtcttgtgagattttactatatctcagacagcataaatgctgttttagcactggattctttcactgagcacaaagagttgttggggctttagcatctgactgattttgttacggggttgattctgaccataggaagtatgcaatgtgaatcactatttacagagaaacctacaacagatgcttgatgttgtagaaactgggacatatagataccaagcaaaattataagaaacctataaggtgttcaatacgcttgtgtttccaaaattcactgtacatgatcagtttggtgttcttgtaccacagtttttaactgaaggaaccagttgtaacagtctcaattttaactaaaacttgaagaactaaaacaacaatgcaaacctttcagcattgtttggccaaacttgttaaaactgtaatgcaagaaccaaatgcactgtgatgtggcaccaactaattagcaagcatgaatttttcacccaagagtgaaaaaaggaaaatctaccatggcttgaagttaaagagcagaactcctgactaccattctatgactgatcaaaagactaatagttaaaaacctcagcaggccttgttcacgatatgcagaaaaaaaagtgctgcagtttagatacctctggaatttttccacagtgtcacaggtttgtaatacttgaagccctacatttctaagaatatatttcttgctcagttgtttcaggcaagcccaagactttgtaatttttaaagggcccaagattttttttttttttttttttttcaaataacagaccagcttctttttcttgcagttacagatgtaatttcctttttgttgtcaaacataaggtaccaaatatgatgcaataaattgttttgaaaaacagttgtgtgaatatttcaactaatctgtgttgggcttctgtgaaatacacaggtggaaacagaggtgcaagccagaggcaatgtaatatgctgtaaggctagtgcagatgggagctttttagaaggggctaagtgctggtgtcagggaaattccataatgaagtagaatgctgctcctgcattaagatttcattgagggcaaggctggtggcaggtactatgaatgtaattcataatttaaaaggaaaactaaaaactattttgatttgggaaaatgagccttaatttgttaaacctatacactgagaactagcctcaggcttaatattctcattgcatttgcaagatctgagcaaataagattaagtaaaacaaatcaattgtatatataattgacctttttgtggaacatgtagtttatagaaagtatactctaaagggaatttgccgaagaccttttactgattgaacagttgtgctacaatcaacttttcatagtacatgacctgcattccacatctcagtctaacagtttagtagtgatgtaaagagaagtacaaaccgaactccagtgctttgttatgttttattaactggccctgtctcaggaacatcttaacagatggcaaaaaaacaaaaactttttttcaactcctatgagtggcaactgaagttcttattgttgggaaagaacactagtcctacctctgccactaatgaggtgtttggaggaggtaccagccatataatagggggtgtatgtgtgaattttgtttaaactctactgtatattgaaatgaaattcatttatttgtcttgacaatgttcaaatgatgtagattgtcttagaatgaatattcataagtactcagaactcttaagatgcagatgccacccgtgaggagctaaattcctaatgtgtattgtattccaacccaattttactggaactattgaataaatcttttattttctttcaggtttacttgatagtggatacattggtgtcagaggaccttgactgggttcattttatgtccagacatcacccctgaaacactgtactgtactatcttgctctgagtagtatcaactggatcgtctcatatttgcctcattcatcctattaatttcaaatgatactgtgggggaaaaacagggttagaaaaacaagtggaaaaaatggagtgatgttgtaatctaaacaagtgccttatgtttattgctaagaactggtgttaccaacccttttgagaagaaagggtctcttgacctgtattaacataggaaagtaaagttctttttgtttttctttatattcagctactcttgtcatttctcgttgaaaaactaaaatctgactaggttagtttactcagctttaattagatagttgagtcatatattttcaacatttttctgtatcgtatttattatgcacaaaaataaagtgtgatctct

SEQ ID NO: 12534 - DNA, 2783 bp, Homo sapiens
ataacagtctttattatattatctaattttgactaaagaaatacttttgaagtatgacagtattaagtcataagatttaatctcaactataatgggtcatcttgacactttgctgtttgtcattgtcacgcttttgtattttgtatctacttaagtttgtcactgtgacaacacaggaaaagttggttttcaggtgagattgaaaatgaagcaaagataggatgaatctgaacatctctccatctagagcccaatgaaggaagcttcaaatgagaacatgatggaatcagtaaccattcaatcttttgtcctaggattggaaaaaaatgttaaaggtttaggacacacctaatagtatgtcctttgaatgggaagtgttcttaataggataaaaactggtatttgcctctccccagagtactttttttgttttttcatagagacggggtcttgctatgttgtccaggctggccttgagctcctgggctcaagcaatcctcccacctcagcctccccagtactgggactgtaggtactcaccactgcatctggcctttctttgttttattaacatatttagttttgttattattggtatgttttagagccaagactttagttccagtgggataagaaggcatagaatgttttctggttcccagtccataaagaatgacttttccaagagttctagatgtttgattttctaattaatacttatcagatctacaaaaatcattattattttaaaagagttatttgagtttctttctttctttttttttttttttttttttgagatggagtctcgctctgtctccaggctggagtgcagtggcgtcatctcggctcactgcaacctccgcctcccaggttcaagtgattctcctgcctcagcctcccgagtagctgggattacaggcgtgcactaccacacccagctgatttttgtatttttagtatagatggggtttcaccatgttggccaggatggtctcgatctcttgacctcatgatccacccgcctcagcttcccaaagtgctgggattacaggtgtgagtcactgcacccagccgagttgctttcttactaaatcctattaaaatatgcaaaaataagtcagattttaaggcaaataaagtgacataaggtgctttatattttattttggtatatttaaacagtgaaaaactaactgaaagcacatgaagagttgtaacttgggggaaaataggtaaacatagcttctagctaacacaggagacctattcttagcctttactaatttcaagcagtgtatcccatatggtatctcttgctcttccttcaactccaataaatttaatgactaaatgccaagttaacaaatcaacttccatttggattgtaggtgtgaaggcacaactctaattgctattagtctacatgtatttctgtaatagtattgtgtcatatcaatttttaagatgtctaaattttatggtcacaagttatccctcctcagtatgaaaaataaattagatattgaaaaatgtctaaacttcagtgatggaaagaatatttcaagaagttttttaacctaaatacttttattttgaatttaagtctttgcacataaaatatagcaagcttacatattaaactatttacgtaaatggaatgtaagccatgactttaactgaagtgttcacattcactaattttgatagattgctgtccttaataattttggaggaaattaagccaaatgattattgtactacagtattttcagaatatgggaaatcaattaaaaatgtaatctaatctagtttaagatttttgtttaatcatcatggtggtcctacctggataatttaactataaagacaaagtaattctattaaatgaactaactgaaaataataattataggaagtgattattccattttaagtattagagctcaaattggctttatttgcatttagggagatcatgttttcttaatcatgctggaatttaaaaattgttttacttgtatcgaaattaaccttgatttataactatttttgtaataaaacaatgacagctgtagtaactatgatgggtgtaacaacatttttttaaagaagggaatctgtttatcgcttttcaaaatattttctaaagtgggggaagaaagtttatagactttccaagcacatttatggttttttattactattattatggttttaaaaagagtaactttatttctttttgtaaggaattaagtaatatcctttacagttctgtgaaaggacttattttttaactgtaatatttattagttttaaaatatttgtatctcatttgtaacaatttgttttaattttttatatatatgtttttatttttaaaaaacataccagttgaatggggttaaagctttcaatatcttaaaatatttataaaacatttcactgttgcaaaatcacttccaaaatgatagctatctaacaactaattactaatttttaaagaacaaatcacacatttaaaaaatctgtagaatttattttaactatgacctttaattgaaaataaataattaaaatatcagacatgttttggaaaagtcttaatttgagaacaccaaaggaaactaccccagaatctaatgtagttcgctattaataacaatgcattattgaaagtatattgcaaatacatgtttcctcatgaaatctaagtaattttgttgtggaatagtgtcactgttacatttcccccatgaagttcaataaaccagcttagccac

SEQ ID NO: 12535 - DNA, 102 bp, Homo sapiens
ctttttctcttccctttaatacttgcagaagctgttcccaccatgaaggtaatatggtatcatttgttaaataaaaataaagtctttattctgtttttcttg

SEQ ID NO: 12536 - DNA, 1446 bp, Homo sapiens
gggattgacacccttctgttttatggaattgctgctgatcattttttctttaaaacttggatagattccaaaagttacagtacctttgtggcttcattgaatatttatgaagataatgtcagatgtagacaaaaataacacaataacaggagacttccataagtttgtgtattatgttagtctatgaaaacgtgcaaatgtattgtagagactttatgattagaattgcatatatttatgaaacttaaagatgaatgttttattgaatttgtaggtttagcactgtcttttattataggattagtaagatatacaagaaaataaccaccgtgttgtgaaaaagtgaccaaaatcatgtactaaatgcacagctttatgtaccctgtccaccatcttgtgcctcttctccatttgcctcttccttcctatttcccttccgctaaggaaaaaaattggtgtcacatttgtaaaagtaattttaatagttaatcatctctgagagtaacctgtattttaattgttgaaacttaaccaaaataagatactgtctcagctagggcttgtcatttgtgtatttagtgttaagataggaatgctagtgtctctttaattaattggaaatagatggaggctaaaaatgaaggtttttctttgaaactgaattaacttgggaatatttgttgttaaaaacttctttttgcccaaaataactcattttgtattatctgaaaatatataatttctggtcatgtgtatgttaaaatagaaaattttgaggaaaaatggaaatagggtggaaaagtactcggtaaacagtagtaaccaaatattttcactccagatttgtgttttctctggcacagagtagatcttttgggaaatatatatgaaagtggattaagtttgactacccttatgttagccacatctggatgagaacagttacaaagagtttggtctctaagttgatttgtacccagtgggtcaacttctgcaaaattccgtaatggtgtattagtattagaatagtgaataaaatgggaaagttatacatgtatacttattatcttgctcagtattttatctcacttgttctagaattttctgtaaaccctgctactgggtttgaagagttttagtcatcctttaacaatttttaaaaatttagcttctagattccatttggtaaggaaatcaatattggaagtattgctaaaatcttataatatgaaaagagatccactaatgtagcttaaggttattagatttgggcttttaatcatggaataatcttatgtattggtgtaagagttgatgaatgactttagctgtgtgaatatataatagtcaaactgcaaacattttgcatcccttttgtgacctaatttacagacatttaaattgtgttgcagttctgctttgccgtttaataaaaagctatttcag

SEQ ID NO: 12537 - DNA, 314 bp, Homo sapiens
atcatccactgtatcttctatttctaccacattttgcacattcaacagaatttatatgttgtaataggaattatctgatcaattacactcttatatataatttcctacaaaaatatttcagaaattctatttaagaaagctagtggacaatcagtgtatgtttacaattgtttatacactgttctccaaaggtaccttatccttccaaagatcccctctgtagagtcatgcgaactacagtttggaacttgggacttagcccgttggtgtaaaagtataaatcaggtatttgtattaaattgattaaaatgtgt

SEQ ID NO: 12538 - DNA, 707 bp, Homo sapiens
gggagctgctctggtggccgtgtgtgagaggagcaggagtgagtgtgtgtgcttgatgaattgtgtgtggttgttcaaaagtaccttagccacttagccttgtgcagaagactagttacacttaatgggccaagcaatagggtgtagcgtttttatagaactgataatcaggcttatggcataagaaaaatgagtttcaaatttaagatgtttattgatcgaagcaattgaagtatcatggattggattgttactgatttcagtaaagtatgttttgccaattagatacatatatacaagataaaggaataggatggtaatatatttgtttgaaattaaattactgtttttattaaaaaatactgcttcattgggctgattttgtaaaatgtaatgagtaaaatgaattactgtatttttccttttatgtccacagaatgagagtcatatgttgttatattctaaattttcattaaatattcatgtcaccttgagttgtcatgataagtatgttttagtatttgacttattcttctctttcttcacaatgtatgtcctcagtggtacctattattgatgccttaaatgtattgataaggtgactagttagccatttttcagagatacagtatcagaaatagtattattacagaagctttacccaggacattttatttctctttgaataaatctattatttcacttaa

SEQ ID NO: 12539 - DNA, 610 bp, Homo sapiens
ttgcaattgattctttttaaagtgtttctgttattaacaaacatcactctgctgcttagacataacaaaacactcggcatttcaaatgtgctgtcaaaacaagtttttctgtcaagaagatgatcagaccttggatcagatgaactcttagaaatgaaggcagaaaaatgtcattgagtaatatagtgactatgaacttctctcagacttactttactcatttttttaatttattattgaaattgtacatatttgtggaataatgtaaaatgttgaataaaaatatgtacaagtgttgttttttaagttgcactgatattttacctcttattgcaaaatagcatttgtttaagggtgatagtcaaattatgtattggtggggctgggtaccaatgctgcaggtcaacagctatgctggtaggctcctgccagtgtggaaccactgactactggctctcattgacttccttactaagcatagcaaacagaggaagaatttgttatcagtaagaaaaagaagaactatatgtgaatcctcttctttatactgtaatttagttattgatgtataaagcaactgttatgaaataaagaaattgcaataactggc

SEQ ID NO: 12540 - DNA, 1030 bp, Homo sapiens
tcctgagagagtccaaaatgcactggtcacgaaacgtctaatactatgactgttaaaatgtcagactataacaaatatctatcttttatttttcattagacccttatacttcaagagaacacactcagtgcttgtttttattttcttgacacatttattaacaaaatgcatcatggaaaaaaaaatctacctcttaaaattccatttgcttttatggttagacatgcttgaccaaaaatgttcagaagaaaatatgtacctggtccctaattaagctgcgttaaatttggtagaagcatttaaatggtctatcttcagttttactgaacaaaaaatgtaatttatttagcattctttataaaagaattgatgctagaggtaaaaaaaaatacttgtttttaaaaaatcctttacgtcttgtgtaattaccccattattaaattcaagtccttgaaaatcaactagagattataaagtctctaaagaaggcaataacaaaatttatcaagatatagtacttttcagtttttgtttagtgtcttcagcatcactgtgtctgtatttcaagtacaaatgtttttaaaaaggattctttatacatatgtgctgaattgattttaagaaagttgcatgatcctgtaggagcaacatttttacctaaaaaatgctaactttatagtatttctaattgttcaaggattttaaaattctatttcagggagtatatcttctgtggttttgaaggaggtgagttctgtatgtgccttgcagtactgtaattcaaaaataggaatctttggctgcaaaattttaatgaaatgttaggaagtaattttcgtgctaacattaaaattataactttttgaaaggtaatagattttccagaagtaaaatctgatggttctaaatcaatcaatgtgatagttcatttttaactcttagaagaattcagaggaaattaacccagctaagtaaaaaatctgtcttgattttgttacttattcctcagaatattaaacattgatcacat

SEQ ID NO: 12541 - DNA, 936 bp, Homo sapiens
aaatattgccttgccatttctgaacaaaagaaaactgaattgtaaagataaatcccttttgaagaatgacttgacacttccactctaggtagatcctcaaatgagtagagttgaagtcaaaggacctttctgacataatcaagcaatttagacttaagtggtgctttgtggtatctgaacaattcataacatgtaaataatgtgggaaaatagtattgtttagctcccagagaaacatttgttccacagttaacacactcgtagtattactgtatttatgcactttttcatctaaaacattgttctgggttttcccaatgtaccttaccataattcctttgggagttcttgttttttgtcacactactttatataacaatactaagtcaactaagctacttttagatttggaaattgctgtttacagtctaacaacattaaaatgagaggtagattcacaagttagctttctacctgaagcttcaggtgataaccattagcttatacttggactcatcatttgttgccttccaaaatgctgaggataatgtatgtactggtgtcaggacctagttctctggttaatgtacatttagtttttaatggtggaactttgttatattttgttaattacagtgtttttggttcattgagtgaagattctgccgggtgggatcttgcacctttgaaagactgaataattacactaccaagtaagcctgcaaatcattgatggcatgcagtgatgatgtgctcttacacttgttaacatgtattaagtgttatttgcaaaaggtagattatgtaaccaatcaggtacgtaccaggcagtgatgtgctaatacactgatcaggtttagacaatgagctttggttgtgttcttgttagtcctaatattggttttcagtttggaattaataaagcagttgacattc

SEQ ID NO: 12542 - DNA, 229 bp, Homo sapiens
atatgtttttgtttcataatcactaactttaaaccagtagttctttaatttacgggtcttcataagatgtactgtacaatgctcaattgttatgtcatttaaagacatcaggttcatctgtttactgagctagaaacatagtatgtagtttcacttttttaaatgcaacagctgtgctgaaatttttttatcattaacacttgaagtaataaaataggcttcatttatt

SEQ ID NO: 12543 - DNA, 772 bp, Homo sapiens
tttctgggactgtttgaatattctattccaatgggcatttattttttatcctgtcattaaaaaaaaaagactgttatcctgctacacactcctgtgatttcattctcttttattaatttaaaaataatttccagaaatgtgcagatcctctgtgtgtatgtcagcatgtttgttcacatatgcacatacacatactcataacccctatatgcgttgttgcataacagatgattttttaaaatatatacttccttatgcaaagtaatttacacagaaattccattgtaaattgataatggattttttatgttactagaagagattatttgacttcccaggaattttctgtctgtaatcactaaagtcaactttaatagagttttgaaacagtactgtgcaatccgatggatctaattaaaaaaaaggcaatatttttatattaaagtactatactaggagagaatgtttcagaactccctgatgaatttctaagtgagcaacttgatataaaattgtaatcttcatttttgtcagtgtatccagttacagaatgctacacacttacctttttattggctgagaaatctggttatttcatcttaatctcaagattgttttcaagtgttttataattaaatcataatagcatattttaaaatcaatcttcctaaaaggtctgcttttattgtatattttatttaacaataggcactgggtttgtgttacatatttatatattttattttatttttataatatagacatcacctag

SEQ ID NO: 12544 - DNA, 1950 bp, Homo sapiens
actgactctgagaatattgataagccatttattaaaaggagtatttactagaattttttgtcatataaaacttgaatcaggattttatgccccacatactctggaacttgaagtataatatacttaatataacataaaaagccagttgggttctaaattgtagttgaaacacagaaaatgccacttttctgttcctgaagaggctcttttgtgcataatattctaaaatgaagacatttcaagctatacaaattacttccaagttttcatgatgtatgggaagattttcagtaggtgtattatattcacggtaccaaatgctgaccagtgttgctccattttttaaatcttgaaaagggtttctgtacttacctggtttgccaagtatgccagtgtaatgaaactgcccttattttaaaagccagtcaaagattccactgattgacatttgataaataaacatcaggattatgtttattgtttgttttcagtctttgcactatattaccagtatatggtttccgaggaagattatctactgcaaaacaccactgttggaaaaataggtatttttaaattgtttttaatcttttttggtgcttttaaacatgtttagcaaaaaccaattcagttccattccccgcaaaaaacccctaactttactctgaactttttttgtttttgcattccatgaggttctgtattcagtcattctctaggtaatgtcatttttgtacacatatatttatataatcactgattgagatttaggaaaaagcatttctaaagaatatttgcttcccttagaactacagactcgaaatctttaaagatggtgcctaagcatctatgtattttttttaagttccacagatttttctgttgggcagccaaggattataaaccacttccctaaaggcaacattaatgcaaaagtccccagatggcaatacaaagtatcccctggtaccacatatattcatttgtgagtttggatatagagcacattatctaaaccattttgtagttccaaaaacccatctaaatttcttgagttcctgaattttgaacaggattacctggagcctggagccactttaagttgtacttctgactaaactggaattatgagtgaggaagagtgtttactaaataaatgactggggcaagcaaaattgaggaggaaattagaaactgtttgacaaactttaagagctacttgaaataacagaagtcttgattaatatgcaaataatggctagaaagtatggtttaactggaccctattatgccttttaaaaataatttcagtaacccataaatacatgttgtaaaaaattcaaatatacagaatggaataaaaaaatgatctccctttattaccctcccaaaggttaccagcgtttgaatttaataatgtatattctttcatgcttttttctgtgcacttacctaagtgtgaatatgtaaagggtttgttttgtatacaaatgggattatactaaaataagtaatgcctatttttaaggataggttaaatttgtgaatgatcatttcaaatatattgaataaaataagcaaaagctattgttatttactgatcctggattgtcttaaagaaagtacttgtgatataagagcacagttctacttactgctaatgacagaatatgtattaaacgtattttcatgtaaatgaaatctttaaaatatgtatcttaaaattttacatagcaacagaaaggcctacaattgctaacacaagaaaaatacttataaaatcagtataaaatcaatgcagatgttagcaaaagaatgagactacttcatatgtcctaattggaaaaagtctcaaatacttaaaaaaacaaaaaactggaacagtttattatactaccatttttgtgaaaatatacaaaatattgaaataaaggaatactcaagaaacag

SEQ ID NO: 12545 - DNA, 1237 bp, Homo sapiens
atggccccaggcatctgcctctggaaaactattgagccttgcatgtacttgaaggatggatgagtcagacacgattgagaactgacaaaggagccttgataatacttgacctctgtgaccaactgttggattcagaaatttaaacaaaaaaaaaaaaaaacacacacaccttggtaacatactgttgatatcaagaacctgtttagtttacattgtaacattctattgtaaaatcaactaaaattcagacttttagcaggactttgtgtacagttaaaggagagatggccaagccagggacaaattgtctattagaaaacggtcctaagagattctttggtgtttggcactttaaggtcatcgttgggcagaagtttagcattaatagttgttctgaaacgtgttttatcaggtttagagcccatgttgagtcttcttttcatgggttttcataatattttaaaactatttgtttagcgatggttttgttcgtttaagtaaaggttaatcttgatgatatacataataatctttctaaaattgtatgctgaccatacttgctgtcagaataatgctaggcatatgctttttgctaaatatgtatgtacagagtatttggaagttaagaattgattagactagtgaatttaggagtatttgaggtgggtggggggaagagggaaatgacaactgcaaatgtagactatactgtaaaaattcagtttgttgctttaaagaaacaaactgatacctgaattttgctgtgtttccattttttagagatttttatcatttttttctctctcggcattcttttttctcatactcttcaaaaagcagttctgcagctggttaattcatgtaactgtgagagcaaatgaataattcctgctattctgaaattgcctacatgtttcaataccagttatatggagtgcttgaatttaataagcagtttttacggagtttacagtacagaaataggctttaattttcaagtgaattttttgccaaacttagtaactctgttaaatatttggaggatttaaagaacatcccagtttgaattcatttcaaactttttaaatttttttgtactatgtttggttttattttccttctgttaatcttttgtattcacttatgctctcgtacattgagtacttttattccaaaactagtgggttttctctactggaaattttcaataaacctgtcattattgcttactttgatt

SEQ ID NO: 12546 - DNA, 151 bp, Homo sapiens
taaaattcatcctgtataataattttacatatcatttcataaagtattttaatagaaaaatcacttgtatgcttatattttcagtaattattgtatggtgctcttgtcttctttgtttgtgacccatgcttgaaaacttgaaggaagttag

SEQ ID NO: 12547 - DNA, 405 bp, Homo sapiens
agacaccaagagagcaacgcttttcatagttggatatatttttttatgaattttttctaatttttgcttcttttgtgatacaatttgtcctctttttataatagttggtgatttttcactgacatgtgagtaagataaatgtatacaattgtggatttaattgtgaaatgttctttcacttgtaagtttcagtcattttcttttacctcgttgtcagtgtacagaatgctaaaataattaaaaaaagacaaaatatacctcttcctacaagattatttaacttaagtttcgagaagtgtcatttcatttgacttgcttttcttatccagctaaaatgatgcatatattttatatattgtatggacatataattaaaacattttggaggaatcctcctttattgca

SEQ ID NO: 12548 - DNA, 1662 bp, Homo sapiens
aagactcttggcctctccagagacgcccctttcctcgtccgctcttttctctcctctcttctgcctcttttcacttttggcgactagaaacaattccagtaaatgtgaatctcgacaaatcgaggactgaagagggagcgaacgagcgaacaactgagcccaagccggtgagaatgtgaaacagtttctcaaaggaaagaataacaaaagatggtatttgtctgttgtagcaaagttgtccctttgaaccccacctcggcttcttcagaggaagtgtggagatggctgtttgcaggaaggcagacgagacagtgtttaaaaagtccacaagaatgatcaagtaagatttgtttttattcttacagacatcacccgtgttcaagtttaaaagtacactttgcaactatttttcagaaatagaaattgattcaggactaaaactttaaactagagttgatgcttaatgtgatagagacatctctaaagtattttgaattttaaaaaaagatggcagattttctgcatttacactgtatattatatatatatttttattgtggttcttacccccttttccttctctgaagtgttaatgcttaagaaaagagttgcgcctgctgtgttcactgatcttgaaagctattattagattattgcagaacaaccctctgtaaattattaatttatctctctagcaacttaattttgtgcacattctaattaattaaacttcttccgtctaaaaaaagtgggggaaatgtatagctagtaacgttcaaaaaattttgtttgatgagtttaccgaatttttacagctttcctcctatactgtgttccttttgacccatttgtatattctcacttgaatgaagattgtttttttctttgtttttactggtagtgttctgatttgtgagtcgacactcagtaatggatgtcttaatcgtgtagacctgattcactgtctgaagtattgtttacttcgttacatatttaatggggattcccacattgtccccatgacacatgagcgctctcacttacccttacacacacacacacacacacacacacctctaacagaagggaagaagcagttggaagcatgaccgatgcaccattttctagttttaggtgcatttgccacttggtgtttgcccttcagattttagatttcaccaaggtatttcagtcttccagttttcaattgctttgttggctacatgttaatatttataggaatacttcagtttttccttttggaggtttgtttgtagaaaaactaatttgaactataagaaagacagtgcactgcttgtaaattcacattgtttggaaaaattcttttggaacaaaaaattaggtacatgataactggtaccttatctactgtaaatatttcattaaaaatgatgcacacatagatatattcttacaaattttgctgtattgctgttctctttgaggctctccaaagtcttgagttctgtatatggcctggtttcttgtttttattaatagatggtttatttactatggtaatgtattaatttatttttggtgttgttcgattgtctttcattgaagagataattttaatgttttattggcaacgtatgctgctttttcattaaaatatgctattaaaattaaatggctttt

SEQ ID NO: 12549 - DNA, 2335 bp, Homo sapiens
ccacccttagaagcactcctcggtactcccataatcctctcggagaaaaaaatcacaaggcaactgtgagtccgggaatctcttctctgatccttcttccttaattcactcccacacccaagaagaaatgctttccaaaaccgcaagggtagactggtttatccacccacaacatctacgaatcgtacttctttaattgatctaatttacatattctgcgtgttgtattcagcactaaaaaatggtgggagctgggggagaatgaagactgttaaatgaaaccagaaggatatttactacttttgcatgaaaatagagctttcaagtacatggctagcttttatggcagttctggtgaatgttcaatgggaactggtcaccatgaaactttagagattaacgacaagattttctactttttttaagtgatttttttgtccttcagccaaacacaatatgggctcaagtcacttttatttgaaatgtcatttggtgccagtattttttaactgcataatagcctaacatgattatttgaacttatttacacatagtttgaaaaaaaaaagacaaaaatagtattcaggtgagcaattagattagtattttccacgtcactgtttatttttttaaaacacaaattctaaagctacaacaaatactacaggcccttaaagcacagtctgatgacacatttggcagtttaatagatgttactcaaagaattttttaagaactgtattttattttttaaatggtgttttattacaagggaccttgaacatgttttgtatgttaaattcaaaagtaatgcttcaatcagatagttctttttcacaagttcaatctgtttttcatgtaaattttgtatgaaaaatcaatgtcaagtaccaaaatgttaatgtatgtgtcatttaactctgcctgagactttcagtgcactgtatatagaagtctaaaacacacctaagagaaaaagatcgaatttttcagatgattcagaaattttcattcaggtatttgtaatagtgacatatatatgtatatacatatcacctcctattctcttaatttttcttaaaatgttaactggcagtaagtcttttttgatcattcccttttccatataggaaacataattttgaagtggccagatgagtttatcatgtcagtgaaaaataattacccacaaatgccaccagaacttacgattcttcacttcttggggttttcagtatgaacctaactccccaccccaacatctccctcccacattgtcaccatttcaaagggcccacagtgacttttgctgggcattttcccagatgtttacagactgtgagtacagcagaaaatcttttactagtgtgtgtgtgtatatatataaacaattgtaaatttcttttagcccatttttctagactgtctctgtggaatatatttgtgtgtgtgatatatgcatgtgtgtgatggtatgtatggatttaatctaatctaataattgtgccccgcagttgtgccaaagtgcatagtctgagtaaaatctaggtgattgttcatcatgacaacctgcctcagtccattttaacctgtagcaaccttctgcattcataaatcttgtaatcatgttaccattacaaatgggatataagaggcagcgtgaaagcagatgagctgtggactagcaatatagggttttgtttggttggttggtttgataaagcagtatttggggtcatattgtttcctgtgctggagcaaaagtcattacactttgaagtattatattgttcttatcctcaattcaatgtggtgatgaaattgccaggttgtctgatatttctttcagacttcgccagacagattgctgataataaattaggtaagataatttgttgggccatattttaggacaggtaaaataacatcaggttccagttgcttgaattgcaaggctaagaagtactgcccttttgtgtgttagcagtcaaatctattattccactggcgcatcatatgcagtgatatatgcctataatataagccataggttcacaccattttgtttagacaattgtctttttttcaagatgctttgtttctttcatatgaaaaaaatgcattttataaattcagaaagtcatagatttctgaaggcgtcaacgtgcattttatttatggactggtaagtaactgtggtttactagcaggaatatttccaatttctacctttactacatcttttcaacaagtaactttgtagaaatgagccagaagccaaggccctgagttggcagtggcccataagtgtaaaataaaagtttacagaaacctt

SEQ ID NO: 12550 - DNA, 1085 bp, Homo sapiens
acagtatggaaaagcaaactgtgcaactactacattatatcattacctggtatcccatggattttgtgcttgggacagaccataaatgatggaaaatgtcaacacaaaaatagctgaaagccaggtacaactactgcatttatatatgtaagttttgtatatcaaaaataattggtctaaatttcctagacttagacttgatttcttaacattagggtatcgcatactcaaatggtagacaatgaccccaactaaatcttcctgatgttacactgctttatcaagaggatggacttttttttttttgagacagacagagtcttgctctgtcacccaggctggagtgcagtggcgcaatctcgggtcactgcaagctctgcctcccaagttcatgccattctcctgcctcagcctcccaagtagctgggactacaggcacctgccaccatgcccagctaattttttttttttcagtagagacagggtctcaccatgttagccaggatggtcttgatctgacctcgtgatccgccgacctcggcctcccaaagtgctggaattacaggcgtgagccactgcgcctggccaagaatggacattttttaaaaaaacatcagtacttcctaccactgctgcatgagtataatgctccggaattatcagaaagcataatgcagaaatacgaattagtggaacttaatcatgtgccatataagcttacctaacaaacagttatatccctattcctcaactgaatgtctttcaataaataagaatttatcatttattttctgcaacttttttatgtctcattctttaaacattaaaaacccttaatattttaacaaaaatttcttgattagaggcacagtgaaaaagaagtcaaaaaaaaaagttctacttttcatcagtgctattaaaggtggcagcaaatgtaaatcttggctgaatggtcttaattactcattaaaccacagtcagaaagacatataggtgctatttgggaaaactttttattacctaggatggggtttctctaattgctaatcacaaccccactgggtcatgtttgacattttataatg

SEQ ID NO: 12551 - DNA, 694 bp, Homo sapiens
ctcctggcctcagagcccctgctgaccctggcacccagggacctgcctgggggcagagagctgtcttcctcctccgaggctctgggctgcacccacaggtacctccacacttgggagttaccatcatcacagtcagccctgggggtggggggtggtgggcagggatgggacgcaccacacagaactgtgattgtggatcaggaggggaatgtcaggattcgcaaaatggacttttcatttgtcaagtattgggacttgtgatttttaattatccagcatatagaatgagagggagggcagccttctgccacctgtgtcgcctccactggcagtcacgccaccagagccaccctggctccctctcctccctgagcacctgctgctgcgattttaaagggaactgtactactcgcagtgataggtttgcagagtgtgtgcttggctgtggcagcctagcttggagaagctgctgttggtgcaagggagatggtctcaagtcagagggaagcagagacgcgcgtctcaagcctgcccttcctagacggccacctgcaggaccccacactcactgcactggcagcgtgcactggcgtatttgtaacaggcttctcggtgctcctcacccgtgtgctgttttccaaacaccacctttttgcctcaaggtctctgtaaatgaaataaactgtaatttact

SEQ ID NO: 12552 - DNA, 582 bp, Homo sapiens
ggtgctggggactgcttgaaaagcgacacaaacgggcgtgctctctcagacacacaactctgctataaacagcagaaactctggacacaaacttttatgtaagtcacctgaaataggaatccggcagaagaccttcattaattaagaagcaaacaaaaagagagcaacccaaccaaaacaaatcacattcttgcacaaaagtgatcgttttcttccaaacaatgtgaatttaaaaggtcacacaaaagaagcaatcgggctccgccaccacaaaatgaaacccaaggtacattttcaaatcaatgtatagtagttccccccccttttccttctttccccctatcctttttctctccaccccatccccccccccatttcgttttgcttttggttgcctgaatgttgtcaccaagtgaaaaaattatttaactatatgtaaaatttctcttttaaaaaaaagttttactgatgttaaacgttctcagtgccaatgtcagactgtgctcctccctctcctgaacctctaccctcaccctgagctgtcttgttgaaaacagtaataaaaacattactttacattgt

SEQ ID NO: 12553 - DNA, 57 bp, Homo sapiens
agttcagacttcaaatagtggcaaataaaaagtgctatttgtgatggtttgcttctg

SEQ ID NO: 12554 - DNA, 1690 bp, Homo sapiens
aatcacagcggaaaataaaaagaaagtcgcgttgttatatttctaaaccaacctaacaagaattaagcagagttgggggaagtgggaggggtgacaagcattatagtgattcttgcacaaacagctttaatttttccctttttcatactttaacaattgaactgttaagggtggttttaatgtaaacatagtttctataatctgaacacaataattttcctttttgagaaatccttttgtattgtgagggttgatggctatttctgtagtttgaaaacatctaatagagatttgcactgacaagataaaaattcaaggtttttggtcctggaaatgagggccgattgtaacttttccaaagggaggtttacatgatttgtatcaacatcagatattttatatgtgaatatattaaacatctttaagagattcattttcatgtattaaagaaaaaagaaactattttgcagagtaaagttatatggtgttcctgcagcgtccacacagaggcagcagctctaatgaatgattagcttgtggagttgtggcaaatacctttttaaaaatgaatctgtaccactgtaattttatttagacttttttttaaagacacagaaatcacactgtcatttctgtgaggcttttaagcttatgaatttgcttcacccgaagtcattggacagttacatttgcaatttcttttggttcataacaaaacctgcttaagagaatttttttttttgacaggtggacgtgggaatggaaattcttaatggtttctggagtagaaatctgtacttagaaaactagtttttgggtcagttccattttgatagaagtgaatacatagacagcttttattgacttccatatgtaacaataccgtttaagccttaaatcacagatatgtgccttctcagatacagtaattcttgttcaaccaatgtacaaaatccataaagaaacccctgttggataatgtttgatgtgtctattccttccatggaatggagcactatgtatgaatgttgggtttctttgtacttgttaagccacatttgaggtttatggtaaaaatcatcttttgagtttgctctttggtttttcttcattccttttgaggattgggaaaacagaaagattctttgatttgggtaatgaagaggtaatttgggacagtgtggtggtaccaggaagaaagaggattggaaaggccagtactgttttagttgctcggcactgttggttttgttttaatgtggttgccctgtccactacatggttctatcagtagtgtaatccattttcaatgtaaagctcttttagtttttgtcatagacataaattaatattttgagaggcatccctcacctgttcatttcttctgtgttgaaatgaagtacttaaaattaccgttatacatgaactttgtggactgtaagatttgttatatatgttcaaatgccttttagctggctttttaattaatatgcctgttttgagtgcttaatacaatgtaatgtgattgtaaatcatacctattttaaatcattccttcctgtatatttgtactcagagagccttattttattcttccagcagaattactacttgtgatagttcatttacattccccagaatgtgcctctagtgtgaattttgtattcttattaaacgtgtttgctgcagt

SEQ ID NO: 12555 - DNA, 2973 bp, Homo sapiens
tgggtgcctgtcctctcctgcctcctgggattcagacggtgaagactgacttctgggacgaggatggggaaagaggcagcatgtctttgttacagataaagcagccactggtgccactgctagtgacgctgttgggatggcacagtccaggaggcctgtggactgcagcctgctgtgctgagccctgctgcagtccagcgtccagatggatgcacgttcactactgtgacggccgcacctcccccatgcaccccaccctcccccaaagcccggatcccgagaaagatttagtaggagtgtaaagtgacattcttatgaaacaagtcaaaaaagtttttttcaggccagtttttatatatcaaagactttctttttaatataaaaattagctaggtgcagtggttcatgcctgtaatccagcactttgggaggctaagatgagtggattgcttgagcctaggagttcgagaccagcctaggcaacatggagaaaccccgtctctatcagaaatacaaaatttagccgagtgtggtggcacatgcctgtggccccagccactctgaacgctgagatgggaaggtcacttgagcccaggaccccaccactgcactccagcctggatgacagagtgagaccttgtctcaaacaaaacaaaacaaaaatgaaatgttctagttttggttccttttgcagagtgaaatgcctcccaggaaaaaaatacatatgtatttttttgcgacagggtcgtgctcttgtctcccagactggactgcagtggcacaatcatagctcactgcagctttgacctcccagacccaagtgatcctcccacctcagcctccctcagagctgggactacaggcgtgcaccaccacgcctggttaattgtttttttttaatttatcttttgtagagatgggatctcactatgttgctcaggctgatctcgagctcctgggctcaagtgatcctcccacctcagcctcccaaagtgctgggattacaggtgtgagccaccacacttggccagtatatcctcagtatgaagatatttttatcttcctgtgttctctggcttcagagtttcacctgcccacacagggtccgttgctggcaactggacttccccataagccttgggtatcctgtgatgggctgtgtctccctgaagattgtctggcttgcccacttctccgtgcatgactctgggtgtgagtctgtctaggaacaggagggaaagttggactcagacagaaatcagatgcttccatgtattcagggcgcgcattgtgagcagtggagtatgagccttgagggcctcatggttgcagggcaggcttccctgcagatgggtggcagcccctggtagaatgctggatttctctggaatctagaagtgccatattttagtggaaaggcatcagggctgtttgacagtgtgcgtctttccaatcccatgttcctccattcgtgtgtctgttataaaactgagtgaaggctgctatgacctgtgttcactctggttacagggaggtgcaaaccattctgtctcccagcctttcttctctctttgtgtgctcccagcacttccttcttttctaacatggcctggagagagtctctctctccttgtctctgtctcttaataatagtttttaacgtggacatctcttccttggtacagtggtttttaaatactgagaagaaccaagtcaggttttttaaagcagactaaaagcatgaaattgctttcagaagaatgtatatcatcgggaaaagttcgggggcagagtgggggaatcaggctttattcaaaagaaacagttgaaaacatgggactttttctacccaatgcccatttcacgactcctctgagactaattgggaaacggggaaattcttggaattttttttttaagaaacttttttgtgttttttttaattttaggtcacttattagtgaaacctcattttagatctgacattggtagatagatggatttaggcaaatatgatgcgtttgtggggaatccacgtggttgacgttagaacctcccttctgcagactgttgcctgtcatctaagcgaattggaaatgctgagcttccataagtcagctgagttttaaaggtaaacgttatggctgaaatagtaaagcacctgaccacaaaacctcttgtaaaaacagccctgagtaggtatttccagggctccacaaagttgcttatgggaatcctgagctgcttttcaccatctcaagaagcctaagaagttatatatttaatcaggtagacaaaacagttcaaagcataaggtccatggtggtggaaaatggatgcaagtgattctaagtttgtggatttgtggatagcagagggatcgggacctcttggaggaaccctgggtaccaagctcccaggcccttcctctatcatggatgctgggtgactttgggaagtcaccacctcttcccaagcctgtttcccatatcacagatgtggggccatggcctcgatgatggtctccacaggtctttccacctctgtgagtccaagtcaggtcaatcagcaaggacccatctctgccctgggtcagctcctcagaaccaacccccagcatctctaaagcaaaagcctcacctcaagggctgctcagaagagagcaccttcagcatgagttgttgctggaagatctaataagctgtgtttcctgggaagtggtgctttacttagccctgtggacaacttctctatgcatctgtgtgagcagatgatcattgtattaccttttatcggtagtaagcttggaaaaataatttaagaatacaatggagaaatgtaaataagtatctatgtaaatttgtttaaaataaactgaatgtatttaatggtccatttatatgttcttttatgtaacatgtagtttaataaagttcctgtttatgagagtcatgtttcatctcagcttcttcc

SEQ ID NO: 12556 - DNA, 4350 bp, Homo sapiens
tggtgggcaggtggatacccgcttccatggtcttgcactataaactggaatggatttctcaatgcgggaccagattatgactagagtttttatgccagaaggaatcattggtgaactttccaaggttatttctgaatgtaacaatttccttaaaaatgacttatccaatttctgtatttcacctttagggttaaaaaaaactcttctactgaatctataaaaactgcagttttacatctgtgaactatggcttaagggacaggatttatgtagctaaactaattttgcaaatcaaacagacacttaaaaaactagcatatgtaaaggtattcgttaatcctgtgaatggtagcttttgcacagaacttccaaaagcaaaacaaaaacaaaatctattgtagttatatacttcatttaacctaggtcacaagacccagggaatcttctaacctcacttttacagtaggtattactcttgtgacatttttttggttatcaacaactaaatataaattactttggaaaaagtaaggctgtcttgcaaaatgatcccagctctgattagcagccctctggagttcagaacttaagtatcagtgcaaatttctcaacctttctgggttagacaaagatccttttttgtgtgttcttttcaccacccctttggctcaccttgtatcagcaaacaaagtacttcttcagggaaacctgaaatttctaatgccttgaaaagcatattacaaaagtaatgctaccttttgggaaacaaactgccccgttaactccagatcattgcactggaatgtaatcaagaaagttagtcatgttttatgtaccatgttttcacacgtgtctcttctcttcgacttcctgaaagcgaaagctttacctcctgcaaatgtcagcacatgtagtaggacaccagtatcctaggacagagagccataagtagccctttggaggactgatggtgtcaaccaaaggcatgtgattgattaatgattcccccttagaaagcaagtgttaccaaagttgtgttatcttgaaagcattacaggtaagggcatgttatggttatttatcattgtttaatgaatagtagaggtgtcaagggactatgtatacatgattagggtaagatagaatgtattatatatatatatatatacacacacacatatatatagctgaatctttggtgtattgaaataggcagcactctgaaagacagaagcttcgtccagccactcttcagcacattcctttactaagcagtttaaagccgtcctagtggagcaagccctaaagcagatttaatttttgccattttccaagaatgacggtggtggcttttagtcagaaaatggccttctgtgctttcaaaaaaaaaaacaaaaaaaaaaccacacacacacataaaaaacccaacaggtcaaaataaaagttgaacttgagttacatttaatttaaatataaatgcattttgagaaatgttaagaacaatttagtcaatcgttcatctgtcattggtactgtaaaataagctgtggtctatttccactgtttaattttctactcagttctaccaaataggatgtcatgtttgacatttttgatagtgactttggggtcttcttcactgaaagcaccttagaactgtactataagaaaacatttcccctatgtataattatatgaatgtgatgtttattgcttattaatttataattcagtcattctctatataggacttcttaaaatttagaagggaaatctagctacttcaaattgtctgttaaatttattatgcccaaatcaacctctgaaaaaaggtttttccaggaagatttacatttaggtttaatatttttttagttaggtagagttttaaaaaatacttgagcctgtccgtgataaagctataaaattcaataactttttagaatgttaaatgaagacactgtttcctaacatcagtgagatacatctttgaatttaaacattcatatttactgagtacctactaggtaccaagtactcttttaggcactggaaatacagtgatggacaaaacaggtaaaaaatcgctgccccctcagagctgacattctggggtgggaatttcattttgccacgtactaacgttctgcacaaaagacaggctagactcttgtctagattgtttaaaagaaacttttcaaattggttacattaattttagtttattttcacaagtaaaaatggctttttatttagattctttctgtcccaggctgttgatcttaaaactagttgatttaaagagtttttttgcacaacatttcaattatatttgtgaacttagaaattaacttacaatctaaccagccatcatatcatatcctatcaggctagatatctcaatagtagactgaatacaaagctaattttttttacatgtcaatattggcacaaactggaatgaaagaatagtttgattcagacctgctccactatgtgttgctaaaacacatgctatgagcactccaggaaacactatattttttccaaaaaatatgtgattatatatgttaaagtatagataacatttcacacttggatacatatgtgcatttactgtatttcttggtaagcatatttttgggggaaagtgctgctgatatgatacaagtagacaaaatttaaatgaaattttgtcacattctatggaaaatggtttctggtaaactgagaaggatattaaaataagtggcttttttctgggctaccattattgtttgatttctctttgtcaagtgtatagaacctgtcatacattcatgataagtagcactgaaaaattactcattcaaatttcccctgggcacgtaaggcaaaatattgccggttgggatttcaaggtcagtgacgacgcatttcctcccagtacagaccccccagccccccttgctggacatggggaggcagagagtcacttgaccatccagaaatacatgactacaagtcctttatgactgtttgccattttttttaatggtacttagtattttgatcaaactttagtctccagaactaaacaagtccctaagtttccttattttaatttactgtgactagatttgaagcaaataaatactccagatccatgcagctagaacacacttgcttccactactaaatatacagggtatgtcctaacatggagttaactggaatagcagtacactagcaagtatctgtgaatccttagcactgacgggttaacagaaatgctttggtaatacctacttagttaattggaggaagtagtaaataaacattaggtaatctgcagattacttcaaatgggaaaaatctttttgtagactctatagtaccctctctattcactagcttctgaaaagggaggagtatttttagtttgacaatttaataatttaaaaacaagacatctccaggtaggaaaaaatgaaagctatttcatgcaaacattatctaatttagcttaaaagtgaaagtggtaatactgttggtttctgtaaatgttgcagggttttaaactttataattactttaatatttttgataactagaaatctagtattgccataaaggaaactaagtgcccatcaaagatttgtttggtataaataaagaattatttgttttgttttcaatgacagtaagctacaaatcatgatgcttaaaaactttctaaagatgaattgtgtggcagtgattggtctgtttgtggagaatgtatgaaagctattaatattctagaatagattaataaattggctatgttgttccaatgaatgtacagcacttccattaacttttgaaagcaacacagccttaaactcaatgcttttgctttatgacatgggaatgttctgtcatcaatggagtgtattcttgtaatagaattctttatatcgttctcaattctatagactttcaagcctatgtatgaatatgaaggggttttttttttttgctttgttttctttttagattttgtacattccatctttataggtctgtttcatatgttttatgtatagaacactaagtcttgcactctctgacattgatactgatatattctcgtcatttgttcttttatgaatcaaaatgttgactgcctatttaaagaaaagaatgaacgctgtgcatcaaagtgtttgtatgttcgtagctacatacgtaccacagtattttggatgctttagtctacaatgaaactttcaattaattctgtcttgaaacataggagaaacaggattcatgtgtatctctttaccatgcacaaaatctcaaatcattataataaagcttgttttctcc

SEQ ID NO: 12557 - DNA, 234 bp, Homo sapiens
aatattccatggtggtgaaggatgtacaagcttgtgaatatgtaaattttaaactattatctaactaagtgtactgaattgtcgtttgcctgtaactgtgtttatcattttattaatgttaaataaagtgtaaaatgcagatgttcttcaccccttttggtagaacaaaagcaggatgataaccatatccccccagtgctcatcaaagtaggacaataaaaatccatccatctc

SEQ ID NO: 12558 - DNA, 132 bp, Homo sapiens
aaataattggatttttaaacaatgtgaataaagaggcttgtgttttgattactagtgtaaactggttattgagatagattatgacattggtggatattttggcacttttatatgaaaataaattttttaatg

SEQ ID NO: 12559 - DNA, 826 bp, Homo sapiens
gttcccatatttaagaccagtctttgtctagttgggatctttatgtcactagttatagttaagttcattcagacataattatataaaaactacgtggatgtaccgtcatttgaggacttgcttactaaaactacaaaacttcaaattttgtctggggtgctgttttataaacatatgccagatttaaaaattggtttttggtttttcttttttctatgagataaccatgatcataagtctattactgatatctgaatatagtcccttggtatccaagggaattggttgcaggatcctcgtggatatcaaaattcatagatgatcaagtcccttataagagtggcatagtatttgcatataacctgtgtacattctcctgtatactttaaatcatctctagattacttatgatacccaatacaatgtaaatactatgtaaatagttgtactgtctttttatttatattattattgttattttttattttcaaaatttttaaaacatacttttgatccacagttggttgacttcatggatgcagaacccatggatatagagggccaactgtaatctgtagcaactggcttagttcattaggaaacagcacaaatgaacttaagattctcaatgactgtgtcattctttcttcctgctaagagactcctctgtggccacaaaaggcattctctgtcctacctagctgtcacttctctgtgcagctgatctcaagagcaacaaggcaaagtatttggggcactccccaaaacttgttgctattcctagaaaaaagtgctgtgtatttcctattaaactttacaggatgag

SEQ ID NO: 12560 - DNA, 434 bp, Homo sapiens
tccccaatacgtagatttttgctcttctgtatgtgacaacatttttgtacattatgttattggaattttctttcatacattatattcctctaaaactctcaagcagacgtgagtgtgactttttgaaaaaagtataggataaattacattaaaatagcacatgattttcttttgttttcttcatttctcttgctcaccaagaagtaacaaaagtatagttttgacagagttggtgttcataatttcagttctagttgattgcgagaattttcaaataaggaagaggggtcttttatccttgtcgtaggaaaaccatgacggaaaggaaaaactgatgtttaaaagtccacttttaaaactatatttatttatgtaggatctgtcaaagaaaacttccaaaaagatttattaattaaaccagactctgttgcaat

SEQ ID NO: 12561 - DNA, 3982 bp, Homo sapiens
cttcatacccccatgtcagtgtgtgtattctgtatgtaaatatgtttatatttatagagcatcaatcaatataagcattattgagaaaaatgtgacccgtaacactgtgttctggataaaaatgtgattaggaatcacgcaaagtgcttactgtgtaagcccaagaacaaaggctttctgaatcttctcaggcagttcagatttaaagcaccatccaaaccttggaaatacgacagggtgtggtagaattcagcaatatgagaaaaccagcccctaaaatgatagccacaagagattaattgtgtttttttttctcctgtaatccttgtactgttcggctgaatttgaagattggaagacttatattgagaccagtaactttactgtaaatttactttgtttcattgaaaaaacaaattgataaacatattaaactggaagaattttctttattcaaatgaaaacatgtttgatgactggtcaaaaaataagctcataatctatttttttcatgtagtatataagtcaagaatgttttattgtcattatgtgaaaccaatattggcaaatagtactttaatgatgaagtaaatgaccagaaattatagaaatctgtgttttcctgtaaaaatagcactatagtatcacttgaacaatttgatttggctttacttactaggaagcctggaattcattatttttttccttttatgtgccactgtggctactttaaatcactctgagaggtaaatggatataggattgaagttatgtgggtatttggcatgtgtgtgtgaaataaatatgtagatagtcacatatacacagactgagagataaattgttcttgattgctttattatcatcatactagtgtgttcattatagagtatctgtagaggtgaatgtaaaagtaagtccaatctattttcttatgtcattgaatttgtagtgttaacttgcatatatgttattggatgggttgtcttttaaagcatttactaatgtactctgaaatttttaaaagccttcagatttgttttctagtcacttttttccatatcatttctaattatagtttatatccttaaaagaaggatgccacagtagtatgtaaaacccaaacaagtagaacccaagcaaataaaattatttaaaataattttaaagtggcttagtactgccagtcatgtaaattgattctgctgagggtcttataagaattgagatataacaatggtaaaacaagcattcaagcacttttacaaaattaccaaattcttaaaatgaagccacagctagacttgcatttcaggtattaaaattgctttcttaactgtcaagaatcacaaaataacaaatcatattatgagtgaatatggggagggcggggccaatcagtcaatgataatctgaacaaattttaagagcagattttagattaataatgttttatcaccactaatttgcccacaacaaactcagtatttaatttttcaaattaaatattaaattatttaagtattttaaataattaaaacattaaatggcaacaccatagaatataggtgttctctggacctattctaaccacttaaaattatcttaagtatgcatacataaaagcaaccactatgagaactaccgtgttagtggtttttcacttactgtatattacccttgtaggaatagtttaaggaaattcatttcttaaaaatatagtgtcctcaaataattaatttttttgcaaactttagttattacaggcagcaaaaaccactgtctgaaactaaatctgtgttcaaagatgaagacccctcattaaaagccaaggacgttcttaagattggaactgacataattagtcttgacttacttcattaaagcaagattcaattccttgttcatttgagtgttcattatatgccaggcattgaccagttgcaattttatggtccagaattaatattattattcgtaaactagctataatagagtatatacagtgctgtgggaatacaggggaagaagcaattaaatctgctagaagggtaagagaaatctgtatgcaggaggcaatgctagcattaagccaagaaatagtgtgaggtgatcttatcacactgatgtgttcaactgtttatgggaaaaggaaactaggatggttttatttgtgaaatgttctacaacgctagaactgttgaacttcttgggagaaaaggagaatctttgttttgttgtgctgagtttgattagttgcttaaccaagtagaaagaaaagcacatcttcctgatcacagttataaaagaaaccctgaggccgggcgcggtggctcaagcctgtaaccccagcactttgggaggccaaggagggaggatcacaaggtcaggagatcgagaccatcctggctaacacggtgaaaccccatctctactaaaaatacaaaattagctgggcgtggtggccggcgcctgtagtcccagctactcatgaggttgaggcaggagaatggcgtgaaccgaggaggcggagcttgcagtgagtggaaattgcgccactgcactccagcctgggcaacaaagtgagactccatctcaaaaaaaaaaaaaaaaaaaaaaaaaaaaaaagaagaagaaaccctgagccattaatgtgtctcgtaacttgaggaagttcatgaattctctgggcttcatccattaagattcatccttatgctcctgcaagtttcttatatttatgtatttctattctgatttctgaaatgataacctagtagtgtctgatgaagttttttcatgcttattttattctttgtcacagatgaaagaagaataggactaattggggctaagatgaattaatgtaagtgtcagatactaggcaggtgttagggatgaaatgatgaatgaggcatggacctgttcctcagagtttatggcccagtagacataattgtattaggactttctgcagttgacatttgcataaagctgactgactgaaggaacagaaagtgagacagacagatatgaccaaatttatacaaaccatgtaccaacacttgaaagatgggtggatattttccaggaaacagattttgggcaggacattccatgcactggaaatagcatgaacaaatgcatgaaaattgcctacaacatgcctggcacatagctgtgaggtaccctatgagttgttgacttgaaaacatggaactgcacagggcattcaggcaagtgcaagtggttcaggggccagcgcagagcagagtgctgagtaaagatgtcagaaaaggaaagcaatggtctggtacaagtcttgtatagaacaagaagtttagacttttgaacaggcaatcgagatttggggttcagaaagataaatcccaaaagtatggagaacaaaggaactcattttaaaggactagctaagatgctcaatctctaaaaaaaaaaggatctgtattcgtgagagtagagagaaaggttgtttaggaagagtcaacagactttagcaaaatccttttatttgattcatgcataactcctgatggagtgtcaaggaagactcattcacttttctttcctgccagaaagttggttcttgcaaaatagattaacttgatgactatgtgtatattggatactcctaattttagctctgttagatatgtttctttctaaggacaagcaactatgtatagacttgttgtttgaattttttttcagtatatatatgtttcttgtttttctatttttctacttcatactgttaatgtcaaatatcaaaaatgttttccagcaatatcaagttatggcaatggcaaaagtccttgttgtagatgagaagcatataagaaatggttgccaatctttgttttgtatgatctatttagagttttaaccaacctagatctgtcagctaagctaattttatatttggtatacatgcatgtcaaataaagttaattttacatac

SEQ ID NO: 12562 - DNA, 745 bp, Homo sapiens
agaaaatactaacattagtatgaaaatttgtgtaaatttgtagtatgaaaacttgcaaattaaaatattgttttattttagaatcgggtttgcatatttggttttaaaaaggtatttattccaaagtactaaacatcagctataattcagaataacatggagttgtagaatttataaaaatgcaaagtttaaaaagttattcagtggtttctcttgataaaggtacagcaaactactattctttttaaacttctaggattttcttctactttctgagtgggcaatagaacctagtcatttatgtttttttttttttttgcataattttactaaatagtatttcacaaatattaaagcacttgaagacaatggttatagtagatttgattaccaaggatcactatctgtactggagattagaacaattatatgaccagaagcatctaaccattatgtaaaaagaaatgatgagacaaaaagattaagatacaaattttgtgcagtactaaagaaaaagcagtctaccattgtggtccttgaaaataactatagatatttttgttatttgttagacacaaattataattttgttgttaatgtatttaagcattttatagttatgctttgtgtttttgatattctttgtattgttaataacaagtgttatgggtttttaatgttgaaatcatgtgttaatttttgtacttgaattcaaattttttgacattaaatatgtgatgcttct

SEQ ID NO: 12563 - DNA, 1989 bp, Homo sapiens
ggaagctgtggtgtgaaaatgtatggatgaattctgaccagagctatgaatctggttgatggcggctcacaagtgaaaactgatttcccattttaaagaagaagtggatctaaatggaagcatctgctgtttaattcctggaaaactggctgggcagagcctgtgtgaaaatactggaattcaaagataaggcaacaaaatggtttacttaacagttggttgggtagtaggttgcattatgagtaaaagcagagagaagtacttttgattattttcctggagtgaagaaaacttgaacaagaaattggtattatcaaagcattgctgagagacggtgggaaaataagttgactttcaaatcacgttaggacctggattgaggaggtgtgcagttcgctgctccctgcttggcttatgaaaacaccactgaacagaaatttctccagggagccacaggctctccttcatcgcattttgatttttttgttcattctctagacaaaatccatcagggaatgctgcaggaaacgattgccaactatacgaatggcttcgaggagataaactgaaatttgctatataattaatattttggcagatgataggggaactcctcaacactcagtgggccaattgttcttaaaaccaattgcacgtttggtgaaagtttcttcaactctgaatcaaaagctgaaattctcagaattacaggaaatgcaaaccatcatttaatttctaatttcaagttacatccgctttatggagatactatttagataacaagaatacaacttgatacttttattgttatacctttttgaacatgtatgatttctgttgttattcctattggagctaagtttgtctacactaaaatttaaatcagactagagaataatttttgtggcatgttgtaacatttcacagtatttacaagctatttttgcacaggtacatagctctcatgtatttaaagaacactgcagtgttattttctttgaaattcatcctccacggacccattcatactaaataaaacaatgtaattacattaaaatggacctatctgtaagaggtactaaaaacactggattcatttcatcttgcaaatgttgtatttcaaaccagtttcacataagttatttgtcttcttttcaaaataattagctatatttttatataatatgaatatatacataaaaattgtttctataaattgtagaacatagatgctacagtattttttatttaattatattatgaataaaattgttatttcaatagtacccaaccaaagatgcttaaaaaccttctatgttcataaaaaataacaactgagatgttaaaatagtcatacgtctttagatgctattaaagtttcattagtcatatttttgtaaatatgacagaatttgtgaatatatttttaaagcaaaaaacttcaacatgcatatgatatatagttacaacattaattttatgaactggagagctttactttgtggatatatttaaaattcatattatagctcctattaaattccttccatgatagatataaaggactggtttttaagtgcactgcacttctggaatactgaaaaagaatgaaaacaatatgttagattaggtgtaagactttaagaagcgaacaaaaagtaatgtatatctgtaatatataatcaaatgattcatttttctgttagactaggcaaattgttcaaaaataacctttttgtcttttaagtagcagtcactttgcttaagatgctaatagaaaactgtggttaaagatttaccctccctcttggtgaattattacactgtaagaaatgtatatgctactgtgttacatgttgtattagtaaattattagaatccaattaatgattcaattaacatatatcttatccaattcattatgtcaattcattaataaaataccttttatgtagaggctttatgttgcaattaaaaagttgggaaaat

SEQ ID NO: 12564 - DNA, 393 bp, Homo sapiens
caacctatatacctatttataagtctttggggtttgactcattgaagatgtgtagagcctctgaaagcactttagggattgtagatggctaacaagcagtattaaaatttcaggagccaagtcacaatctttctcctgtttaacatgacaaaatgtatgtactcacttcagtacttcagctcttcaagaaaaaaaaaaaaaaccttaaaaagctacttttgtgggagtatttctattatataaccagcacttactacctgtactcaaaattcagcaccttgtacatatatcagataattgtagtcaattgtacaaactgatggagtcacctgcaatctcatatcctggtggaatgccatggttattaaagtgtgtttgtgatagtgtcgtcaa

SEQ ID NO: 12565 - DNA, 495 bp, Homo sapiens
atcttggattatggggtgaagaggagtacagactaggttccagttttctcctaacacgtgccaagcccaggagcagttcttccctatggatacagattttcttttgtccttgtccattaccccaagactttcttctagatatatctctcactatccgttattcaaccttagctctgctttctattactttttaggctttagtatattatctaaagtttggcttttgatgtggatgatgtgagcttcatgtgtcttaaaatctactacaagcattacctaacatggtgatctgcaagtagtaggcacccaataaatatttgttgaatttagttaaatgaaactgaacagtgtttggccatgtgtatatttatatcatgtttaccaaatctgtttagtgttccacatatatgtatatgtatattttaatgactataatgtaataaagtttatatcatgttggtgtatatcattatagaaatcattttctaaaggagt

SEQ ID NO: 12566 - DNA, 408 bp, Homo sapiens
aatcgtctgcaaaatctatgaagaatactggtttcacagcctattttttattttctatggattttcataaatacagtttgaatatatgtatgcatatattgttcagcaccacgatgctctgatttaattctagaaacaatttgattacctcttgtttgtgacaagactaagcattaagatgagaaagaatacatttaaatagtaacattgtacatagggtgttttcctattaaaaattcagtttcccctgagacttaatgtaaccacttaatgtaatcactatctcattgtttcatctttataaacttgtaaacttcatctatttcaaatattttatgcagtacattatattattctgtacaaaggctttcaaacaaaatttttaaaataataaagtattaatctttc

SEQ ID NO: 12567 - DNA, 968 bp, Homo sapiens
taaatcttttccatttgtacaaaataaaattccatttcattgtgacctactcctttcataaatgccaatctgtgagaacttttgaattttcatagcaacattgcattttggatgccatttgattgtaataaaactgtggcaccttaattttgaatggcagcatgatcatgtaatatctgtgctctaataacgatgtatatatgtatagtgaacatattgcttagtaacaaatgaaggacaagcatactacataatataatccatacaattctcttcagttagtgtaaactgcaaatactacagataattctgataataaaatgatatgcacgctgaatcctgctatggtcaccattctaatgtatgtagtatttcaaatttccttccttgtaactttcaaagaaagccatcttattcttgtaaaattttagatggtattatcacagatttaaaaaggttgtattacatattgtttaaactttgtaagtagaaatatatctgttataattatacaggctctgtggagaaataaagttcaaaatatattaatttgtaaaatcagctcgttttaaagtgtgcttgtgttgtcaaaaatatcagatagtaatacacagtgagcatttttaaacaaagggaaacctatatttatgtaactgtatactgaattctgacaaaataaaaaaagataccttattgacgaaatatttaggataaacaaaattctatttaatccaccttaaaacctaaatgtattttcatggatttcatttgttggtacatattacacaaaacattgtgccttaaaatgagtcatacatcttttaaattggaatgcagtaatagatatgtgattttacatcatttttaagaaaccaaggggaagtaataagttgaaaaagaaatccataactattaaaagattttaacttttttattttattaaaatgcttgcatattttaagtaaaat

SEQ ID NO: 12568 - DNA, 2640 bp, Homo sapiens
atgaccttgaatgatgccatgaggaacaaggcaaggctgtcaattacaggaagtactggagaaaatggacgtgttatgactccagaatttcccaaagcagtgcatgctgtcccttacgtgagtcctggcatgggaatgaatgtcagtgtgactgatctctcgtgattgataagaaccttttgagtgccttacacaatggttttcttgtgtgtttattgtcaaagtggtgagaggcatccagtatcttgaagacttttctttcagccaagaattcttaaatatgtggagttcatcttgaattgtaaggaatgattaattaaaacacaacatctttttctactcgagttacagacaaagcgtggtggacatgcacagctaacatggaagtactataatttacctgaagtctttgtacagacaacaaacctgtttctgcagccactattgttagtctcttgattcataatgacttaagcacacttgacatcaactgcatcaagatgtgacatgttttataaaaaaaggaaaaaaaacatttaaaactaaaaaatatttttaggtattttcacaaacaaactggcttttaaataaatttgcttccatattggttgaataagacaaaaacaattaaactgagtgggaagtgaataaaaaaaggctttaggtatcgattccatatttttcaaagccaaatatgtaaatgctaaggaaagtaaacaaagaggagattccaatcttgtaatttaatattgttattaaaactttaatgtatcctattctttaacatttggtgttaatataaaattacttggcaatgcttgacatttgaaataaacatttttctattgttttattgcaagtggtccaattaattttgcttagctacagtttggtcataaatcaagtgagtttaaagacactaccaagttgttaggtgcccagagaaaatttctcccttttaaaaaggccaggtgatttttcaaatgtaatcttgcccccaaagtaatatctgaatatctttttgacatgtctaaatatatatatatataaagaaatatttgttaacacaaaagcatttgatctatgtagataaatgctaatagatttaaaaagctaatattaacaaataccagaatacgtgaagttccatttttaaagtgtttgagcttacagaagagaaacattcattttaaatgaagtaaaaaatgccttgaaagtaattctttagatagttgcccattgattaaattccaaaaactaaatatgtttttagctttaaaattataaaagctgtcataaactttatatattatgaattttaaaatatgtttgagtctcctgcaatatagtttcatcccattgacatcaattaaaaataaccctaatatattatttttatatttattcctcaggtggaatggctattttaatatgcccagtgtggataaaatgtcacatttctgtaacttttgactaaagagcctatatttatctagttaatgaatttaaaggatctatctttcccttcataaaatacctcttatttccattaaagccccccaagtttaattaatttaggattttgaatgattattgacatccaatagttatttttaatatttgtattcttgttatttctggaagaaagcctttgtgtagcacttggtattttgcaaagtgcttttaaaacattcttacttaccgtatttcatagaagggaaggaaaaatgtaaggtttaacagtaagcacttgcattgaacatggaggcatgtggtatcatgatattcttcactaaatttagctgtccctaatcacagatcctaaggtaatataatataattttagtgcatttctcctcatcaggaatgctggaggtgcattttaagttttaataataagtgctagaatgaccaaattgcagactaattgtttccatattgtacttaaaatgagtttttaaaagtgaaaaagaaatgactatatacaatcaatgctatttattgtacctctgggcctactcttctaaaaattgtagcttatcgatttttctctgtcaagcttgaactaatgtaaataattgaaataatgtaaagttatattttcatgtttttatagatacaacatgacaagaatacataatgtaagagtatttcaactatggataatgttgattggataatgcacatctcagttacaagcagtactcatagtttaatatccatgtaacggtgcatcaatatattgctatataaatatgtctgtgtgcatataagtgaaaagtggtcaaacaagagtgatgacagctgtctaaaggtttttttattcattttatataaaaactgttatggaaagaccaaaatgtttatgaactattcttatgtaaatttacaattgtcctttactgtacttttttgtttacagtatagtaccttattttctgctgtgttaagtgggtgtcaaactccaagaagacatacactttctataacttctattgaagatattggaatttccaatttttcatgtgtactatgtcagaaaatgctttcgattttatttttaaatctaacatcggatggcttttccggagtgttgtaaaaacttcaatcatacataaaacatgttcttacaaaaggcaa

SEQ ID NO: 12569 - DNA, 1757 bp, Homo sapiens
caatgacaaaaccagcaggtggcagcagtagttaagagaacgcgtctatcggacagcggagagatcatgctgagaaaagagtgcattttcatatagcaaatggatctcagccactgttggagtgggtaaatgatttttttccccaaaaatgtgagaatgaaggaagattgagtttcattcaagtataaaaatgaaaatttcttctgatgaactgtttatgaaggtagtactttactgggtgactaaaatgtctacattattatagcattacatacgaggatgctctttttaccacagtatgtacctagtgttgcataatctagaacacagtatagagtccatatacaaagaagttacagtccatatttctcacctattaccccagtgaagtgaggcagaaataccttgggcgaggagggagagccttaccttctaatggaattagattccaaagatatttggatcctttgtttcataaagtaaatgcatagttggtaactaaatgttaaaaaggccattttattattgttagccaaaacttctgtttatttcaagttaatatcgcccaactctacatcatctacccattttagctcataatgcttttgattatcgccagataaagtccattctcagagaacaaaaatttttcatcattgagaaaatgtgcataacataatacatacatacacaagtatattcacgtacataaatacacacagatatgttgctaaagtgagattgtaggttatcagtaacaatttaaaggaaacaaccactcttttgaatgtacaacttttttttctgaaatacacttttctaaaaccctcttaactggaggtttcctgttttcttcttgttttaactggtggtttccagtaggcaaaataaaatgacaggcatgctagttttttttttttttttttttttttaagaaaactgaaattaagccaggcagggtggcgcactactataatcccagctgctggggcggctgaagtaggagggtcacttagcccaagagtgcaaatctgccagcctaggcaacatagcaaggtcccatctctaaaaaagaaatttaatttaaatttgtaagaaaaaagaaaactgaaacagaactgccagtacaatgtttgttgcaattgtttccaaaactttgagataacgaaacccctattcaaatgtaaattttacccattcccacctgatagtactgtttattactttgctatgcaggagaaacaaaacagctttttatttgtgtgtatactctgaagtcaatgtgcatgggttaaatcccacctctgcttcattttatttgtgtggctttggacaagttcctaagccctctgtgtcaggcccctcattaacaaaatggagtttatgatggcatctacctcacatggttattgtgtggttgaaattagttcaaatctgtaaagtatgttgatgagtatctggtacttggcaaacactatataattgttagctttattattatgtgttgtttgaaggggaaaaaagtttttgtagattggagaacaccatgtaagagctactaagctcaccaccttcccatccaaacaattattactcctctaaatgaatactacttaaaagtgatggagcttctgtttgtttattgaattgctaatacaaataaatatttgactataacttcttatactcattttaattttaacctgaaatgtcattaaattatgctgataaactttgaataaattgtgatacaaaag

SEQ ID NO: 12570 - DNA, 55 bp, Homo sapiens
ctgactctgaaattcatttcttcgcagagaatactgtgggggtgcttcatgaggg

SEQ ID NO: 12571 - DNA, 162 bp, Homo sapiens
actgcagctagccagtttctttcaagtatggcaagctaacgttaaaatgtttagagattaacagatttcagaatgtctttctgcatattactgaacagaatagtcacaaaatgattatcaaataaaaattttatactatatgtaagattgtcccataaagaa

SEQ ID NO: 12572 - DNA, 321 bp, Homo sapiens
taattctcactgtttaccaaggaaagaacaaatgctggggtcatataaaatatatttatgataactatttacatataataaatagaaattttgttaacatggaatttaatttatgtgaaagagttctggattcaaatgtcagttcataatatatggaagataattttatgtgttatagtaggattaatttatttagttgtgcagtcagtgtcaatccaatctgtaatttcactttagaaggttgtattaccttccacttccatgttgtcttataaacaaatgaattgtattttttgttgaaagtaaaagttatatctaacc

SEQ ID NO: 12573 - DNA, 1025 bp, Homo sapiens
ttgtcttcacttgaattgaaaataaataatttgagagcttcaaattatattcattgattatggtacctaattgtcatgatacaaaaatttgatactgacattctcttatatgatgagagtttcatttgcgtttcaaaaatggtgttatgatacttattttaaaatgaagattgcttttcatttccattaagttgctaaaatagatagatgtgatctgcagaagttgtttagtcttcatctgaatttcaggctgggagggagcaatataactaaggacaaaaaatgttttgtttttcttgtgtatttatgatcacctaatttcacgttttgtgaaatggacagtaacctgtttcctgaaagattcctgtgggtactttttgagctgtgataatagcaaaattgtttttcggtaataatatcacactaatgcttcttttaaacattaaacctattttccttttttacagaataagggaaaatgtgataagaagtttgtatacatttctggattatagattattatttatcttttgaaccagagctaaatggtaaaagaaaaaaaatcagtgatgattgttatgttgatctcccacaattaatttatcttttgacaaaggggataaagagtttcagtttagctccttttgattgtatattattttttgcttttttattgtgaaaagaggtaggttttatttgtggagagagagttgaagattagggaaccagtgattttaattatgctactttttcttctaagagataaattgatatatcattcagtgtcatgaaaaacatgaatgttgtacaattttcttcctcaaaaaactttttaaatgtaagtatccttattttttttttaaaagagcacaatgtaggtgtatttgagtattttcaagaaaagaataaaaacattaatgcagtattaggttaactggatatcaactaagccttgttaacagttaaagtattataactttttttacttctgaaaattaaaaataaaatttatttctgcaatttca

SEQ ID NO: 12574 - DNA, 1625 bp, Homo sapiens
agcaggctgcctcaaggaagaagctcacaggggacatctgacatctgaaacagcaagtgtaaaatgctttaaataagccaaaactaaaccaatcgttatgttaactaaaaatacatgaatgctaccgaagatagtcgaatattagaggaagagattaaactctgattttgagcactttgtgctttattcggaaaatgaataagatgcagttctgaaaacctgaaaatataaagaataggatatgatacgcacactagatgaaaacaaaactttcagaccatattttcttatttaaagctctaataagtgagatagcagagtaaactattcactcaaataattagtaactgatataagggtatgtatcaataacaggtattaagacaaaaactttatgagcttttccattttaacaagggatgatgattctagacttctgccacaacattatggtcgacaaaacattcttaattcattttacatagatctgactctagattctgaaacagcaagtcataatcttgtatctctaaagatagaatacagtgcgatttggaaagacaccacaaaaactcatgatccaaaaaagattaaggctgttattaccaggaggaagagaaagaggacaaaatcaaactggatagatataatagagttgtttgttagaattgtcttcccaggagatggaaaaagacgccatcacaataggattcatgctttagttttcagctatagaaatgtaataactttgccaaagtaattacactacatagagtggcaatcgttctattaaaagtaagacccagtaatgttaggatttgttctggacaatgaaggggatgaggtttaatcttatgacttgaatgccaggtctgaaatcttttcttcaagtgatatttttatgaaactacttaggctgtgtttcacactgggtatgatttctaacctcttataacctgtacagtaatagattatgaaggatgaattatttgaaagctattttgtattatttaggagaggagctcttcaattctgaattgtctgccacttacaagcagaagaaagtttttttctttcattattttagcaactatcaataaaacagtattagaaatgcctactcttcagagatgtaatgggaataaattgtaaagtacttttgatattctaagatgaaagatggtattacacagtcaataattcaatgcttcccacattatgaattttatcaaaattatgtagagagctattagttcattccagcaacaaaacaggcttatataaaaacaaaaacctcctgggtcatgccatcctacaccaaattcctgttaaacagaggcatgatttattccagtgaccttgctatttcttcataactgtaatatgtctaatgttagacattttaaattaacattctattagataaactgagaatttaggtctctcgcaccacccaggcacatactctatctttccccacaaatatccaaatatggtaatataattggattaatacgttcatatgactatataattgttcacagctgagccacttaggtgctataattataatttctttgatacacaaattttgttttattgtgattaaaattgcctgatttctt

SEQ ID NO: 12575 - DNA, 256 bp, Homo sapiens
ggaactggtaaatgggtctgtttcagtttttgtaggtaacttagccagtaaatttaatctcatttctggactctttaagttttaccactgaaaaccagagtcgatttttctcctaaatttttggcaactataagatgttcataatgccactttcatatattctatgaatatcaattgtcaggtgctttgatttctaagataaaatattttagaattatgttacttaacatgtccaataaaatgttttcaaattgcc

SEQ ID NO: 12576 - DNA, 1086 bp, Homo sapiens
gcctgaaggacattttcagcatatttatacatgagaaacagccttcaacaagtatttgtgaagtgactgagaatctagcacttctccacttgtagctgcactttaagtctcagcagaagatacgatcgtctgcctttataggcctcagatactgaagattatttttggtagaagcaccgtgtaggctttttctgcaatgagcagcagctgactgaattttcataagaaacttggactgcaggacttaatctgtagtctttagacaacagttgctttcataaagactagttcttatcaaccttgaatgactacagattattttgtgaaggaggatgaagtaatgtgtgttcttgtaaaattaaattttatctttatttcttctaaaaatctgtataccaggaactgaaaatctttgaacagatattaaaatctacgtaagtatacaaactagttgagggatacactgtttgcttttataaaataactttgattacatgaatataataaattatgtgcatataaatgtgtgtctatatgctttcctttaaatatgtttgaaaagatgtttgaaacttgattatactatttataattggcacagtactttgaattatgccagtactacattgtaaaacagagttgtattttttgatatttaacaatgcttaacactttaaatgccacttctgaggaatggacctggtgtaacacacttgaatatgtgtgatgccaaactttttaaaatacaatataaattatgcttatttattattttctttagtttaatcttggtcatgttttggtgtgtatttttaatttttttcttaaattaacactttggcatgaacattactgcaggtttttgatgaatataatgaatgtatggaattcaattgaatttgcatggtcttcggaattttttctgtgtgtataaatttagctgctattaacagaagagagaactttctgtgagtagccatgtgtgttgatcagatacagtttttctgagatcttcaattaatctcactttaaaaatgaccaaaacatgtctttcttgaattaactttgaataaaagtttgtatatt

SEQ ID NO: 12577 - DNA, 1126 bp, Homo sapiens
atatctcacgtaaaccttcctgaaagataaacgttttcctgaattcagaaactagtagctaacattgcttctggagagcagaaataagcatgtcttctggctactaagtgataaaaagaacattaacaacctttaattaccttcctagtgggaactttttctactttacctacaagttctatatatgtagaaatgaataaatatatatttaagtacagttttcatgaggaagttttaaaagaccatgttcctaagcttccaagaaggttttggatactagaagtattaatctatggcttttctcccagtaaaaccataggcctgaagttcacattgggtctttaaatcttttagatatatactggtcatttcagaaaattcttcatagtggtattggccttatatttaactttttttttattttttttttgagacaaagccacactctgtctccttggctggagtgtggtggcacagtctcagctcactgcaacctctgcctcccagttcaagcaattcttctgcctcagcctcccaagtagctgggattacaggcacccgccaccacgcccagctaatttttgtatttttgtagagatggggtttcacgatgttggccaggctggtctcaaacttctgacctcaagtgatctgcccaccttggcctcccaaagtgctgggattacaggtgtaagccactgcgcccggcctttttaactttaaacatgttttagaattcacctaaagatcaaaatatcatggattgaacctcatcaattgatagcagtgagtgactgaagcttccaaatcaagaaaagccggcaccaagaacttccattctaatctagagctgaccagtttgagctgattctctctttgaagagtccttcttgattgcagtgcagtactggcatttctgaatggatgtaagtggagtattttagtctaaaggcttttcaaattacttgaatttttttaaaaattgaggagctttatttctatttacccttccatttttgtatatcaaatttccattgtcattaaaaactgtatcttgaaactttgtgaactgacttgctgtatttgcactttgagctcttgaaataaatgtgatttttgtgtgatt

SEQ ID NO: 12578 - DNA, 714 bp, Homo sapiens
aaaggcttctagttagctgctttaaatctatctatataatgtagtatgatgtaatgtggtcttttttttagattttgtgcagttaatacttaacattgatttattttttaatcatttaaatattaatcaactttccttaaaataaatagcctcttaggtaaaaatataagaacttgatatatttcattctcttatatagtattcattttcctacctatattacacaaaaaagtatagaaaagatttaagtaattttgccatcctaggcttaaatgcaatattcctggtattatttacaatgcagaattttttgagtaattctagctttcaaaaattagtgaagttcttttactgtaattggtgacaatgtcacataatgaatgctattgaaaaggttaacagatacagctcggagttgtgagcactctactgcaagacttaaatagttcagtataaattgtcgtttttttcttgtgctgactaactataagcatgatcttgttaatgcatttttgatgggaagaaaaggtacatgtttacaaagaggttttatgaaaagaataaaaattgacttcttgcttgtacatataggagcaatactattatattatgtagtccgttaacactacttaaaagtttagggttttctcttggttgtagagtggcccagaattgcattctgaatgaataaaggttaaaaaaaaatccccagtg

SEQ ID NO: 12579 - DNA, 2965 bp, Homo sapiens
caccaaaacctctgtcagaacacaaaggaatgtgcataatggagagaagacatattttttttaaaactgaagatattggcacaaatgttttatacaaagagtttgaacaaaaaatccctgtaagaccagaattatctttgtactaaaagagaagtttccagcaaaaccctcatcagcattacaaggatatttgaactccatgcttgatggtattaataaagctggtgaaagggcatcatatacttcaaggaagactctacaagcttttgttcacagcttgaaatagatgcctcacaattcagacagtttaattcaggaactgtgaccctgcagtgttctttttgacaatttgtcaagatttagggacataaaatgatcttgcaggtcgtaaactggaaaacagtattttggttgtcttaggataattgctgactttgtatcttggatacagtgtaaaccagatccatataaggtgaatgtgaaatgggagtcttctgagggtgatttgtactttccatgtgtatgtgtgtgtctggtgtttggaaactgggatatttcagcttcattatttccacttgcaggccagcttaacctctgaaacacaaatgatcttgagaccactttagtgtacttacatttagatgagtttgaaatctcaatggtgtctaattattgcagttaaattctagacatcagttctttaagtctcagaaaacgcccagtgaattggtaaacttagttcttttttttggaagtgctgccttttcacaccaaatccaagaagcctgtgatgtcttatgaaccttatgagaaaactccgaagaggtgtgagcaggattcttctgaatgactgtctggatggttcattactcaagttactgctgctgctattgtctttcctttgttgtcgatctgttattgttgtattattattgttgatgttgtcatggttaatctattttttaaaattgaaatgaagcagaagtaggccttgtgagaactgaaaggtctctttcatttttctcttcctgggattcattttttcaaaacacaatgctggaaaaaaaagatttgtttctgaaagacttcttatggtgctattccataaactttttttcaaacaagtttttgacctttgagccaacccacccgtagactacgaatgtctccctatggctggtagcatttgaagactaaagacttgtcaaatatatcaagagtatatcattgcaagggcagcacttgtcctgtggaacaactacttataatgccttagaattcctgcacatgatcaaacagatcctcctaaaacacaccttttgaaatgttgaacataatagtgtatgttaattaacagctctatgaagaaaatccatttccatgactgaagcattggatataaatatggtgtcctgctttttttgtagaaaatgtaatttgaggatgaattttctgctttaaaggcatgtgtgtttttaaaattaatgaatgtagatgtgtgattgtctgagtgagtgaaactacaagaggtaaaaaataatgggtggttgaaaagttaaaatgtatgtgccaagttctactagaattccatttgaaatagcaccttccttaggtttcatggacaaataatgggaacttctaattttgatcaatcccattaaaaaaaggctctttcctttagagaaactctattttgatgtcaatatagattactgtatgaagtagctttgtgtctgttacctgtccatgagcatacaacattgaatacaattgggtgtattctttcagttttacacaattaaagtatacacacagatgtagcttatctgtttttttcttaaattgttgccctgaaaaaatttcttgcatatgaattgtaaaatgtaaatacatttttataaccaatgttttgatcttattgaatgttactttgaaaatgtataactattgcctgcaatgtagatgagccttttagtagagctgatttattccagtaacttcttccatattttctcactaatctcccgttagccaaaatatgccagaaatgggaaagagaggagaaaaagtcattaacattaacacctatactgttctatactactcctacccgtgtgctaggaatgtgcactagctctttttaaattccatgctacactttgaggactgtcatcatgttctcgttttgtagttcagaaagtgaggctcaaagaatttatgtaaccttcccagagtcacagtgtaaagttagatgttgaaacccagtttatcttatacaaatgagcctctgcttgttctacaaaggtagtagaatcaatctcgacctatataaatagtagattttttatggtgaaactttcccacataaagtaaattttaggggtgaattagagtaaaacttacaggataagcattttgctctttttaagaacagcatgaaatttagaataccaatgatagctatctttaagaatcagaattagtactagaaatttaaaaaaccctatagtttggagttagtatgagccttttgtgaaaataaatatattaaattattttgcctgatgtggtaggggaaatgtattgctctatattaagaaatattctggatattctgattgacatcttattaggccatagtgagctatgctctgcacaactgagaaattaggtatttagaaggcatatagagatgttgtcataactaggtcttcaacgtgaaaattaatttttattgtatcatgtcaagtatcagtttaccacatattatttttatattaattcaacatttgccttaagtgtgttgttaaatgaaagtacagacagcttcattgttgtattgttaataattgttacttactgctccaggcattttattaaattaattttttaaattattttccaccctacatcagtatattggttgtgctttatatttgccaaagtcctaactgactatacatag

SEQ ID NO: 12580 - DNA, 306 bp, Homo sapiens
aatgaagaggacttggagtactgtgcactcctctttctagacacttccaaatagagattttctcacaaatttgtactgttcatggcactattaacaaaactatacaatcatattttctcttctatctttgaaattattctaagccaaagaaaactatgaatgaaagtatatgatactgaatttgcctactatcctgaatttgcctactatctaatcagcaattaaataaattgtgcatgatggaataatagaaaaattgcattggaatagattttatttaaatgtgaaccatcaacaacctacaac

SEQ ID NO: 12581 - DNA, 2244 bp, Homo sapiens
cccagtggcatcagcagtcacagagcaccaagccaaaaaaagtacggccctcagccagtcgctatgcagcactttcggaccagggactagacatcaaagcagcgttccaacctgaggccaacccatctcacctgacactgaatactgccttggtagaaagtgaggacctgtaatccagcattcttgttaaagctgaaacactgaaacagccattgccttgaccaacatattcctttgtcacattatgtaaaaggcagaaacatacctttgactataagaaattaaaaaaaaaacaccaaaataatatttttcttacttgatataccaaacttagtttaagtagataatgctaatacaaatatacacattgcacagaaaatacacatttactgtccaatttaaaactttggaattgctgtgattaaagtgatcaaaatgccaaaatactaaaggaaatcaattgttcacaggtaactacaatttgtattatctacaagtgcctttaaacacaagatataggtgctgtgtagcctgatagtgtgaaatgtttaatgagggagttgtaccacaaacagtactacaatgattctgaagcacagtgtattcagacagatacagtgaaccaagtgcaatatgtaaggatgaaagaagaagagatgacaaagaaatccaagtaaatgccttgtctttgcaaatgtttttatattaaatcataaggaaggaactacttgccttaaatgttaatatcaaaagagttttctaacaaggttaataccttagttcttaacattttttttctttatgtgtagtgttttcatgctaccttggtaggaaacttatttacaaaccatattaaaaggctaatttaaatataaataatataaagtgctctgaataaagcagaaatatattacagttcattccacagaaagcatccaaaccacccaaatgaccaaggcatatatagtatttggaggaatcaggggtttggaaggagtagggaggagaatgaaggaaaatgcaaccagcatgattatagtgtgttcatttagataaaagtagaaggcacaggagaggtagcaaaggccaggcttttctttggttttcttcaaacataggtgaaaaaaacactgccattcacaagtcaaggaacccagggccagctggaagtgtggagcacacatgctgtggagcacacatgctgtggagattgcagtgtgtctgaggtttgtgtagtagtggaagattttaggtatgtagagcaagttgaaaatggattgagactgcatggtggcataaatgagaaattgcctgtagcatctagtctacttgaaggaagtggagacataaggagagacaaaaacaggtttgtgccataaagtattttttcaaagacaccaagatgtggtaaatgaaaattattagttcacttccctgctgccatgaaactttgccttaagaaggtgctggattccaaggtttgtaaaggcatctcggtaaagactgctttttgaatgcatatgattttgcatcagctagactgagttgattctgaccagacttgatggttttaagtcggaaccgataaattttaaaaaggagaaaaaataatttgacctagtagtataaaacatgaggctttaatggtactttgctatgaaaagaaaacactgtattccttatgcaaaacacatgtatctttcattatttataagtggcctctcttagctcagttactcaattcatacgtagtattttttaaaataattttatatctgtgtaccaccccatatatttcatattactgtttcacatgtacagctttctacttctttgtaagaacaccaaccaaccaaggtttaagtgattaataggcttgagcaccgggtggcagatgttctatgcagtgtggttcaagtttctttgaccgcacttatatgcattgctaatatggaatttaagataccatacacagtctctcatggacctatctctattgtagaattatgacttatgtcttacttgccaaatttttctgaatgtgacctttttttgctgatttgctgggtttgggattaactagcattattttgccacctttatattgtatttataaaaaaaaaagtactatcaatcaatcatactactttggattgttgtgctggtgtaatgtggatttaacatcaataaatatttgacaaataatagttgcagttttgtgaagcaaaataaatattcagtttt

SEQ ID NO: 12582 - DNA, 1008 bp, Homo sapiens
atctcacagatgaggagagagaagaaacggaagaggaagtttatttgttgaatagcacaactctttaacctgagggagtcatctacttttttttcctcctttacaaaaaaagaaaggaaatataaaagccgggtttttgcaacatggtttgcaaataatgctggtggaatggaggagttgtttggggagggaaaggagagagaaggaaaggagtgaggtatttcccgtctaacagaaagcagcgtatcaactcctattgttctgcactggatgcattcagctgaggatgtgcctgatagtgcaggcttgcgcctcaacagagatgacagcagagtcctcgagcacctggcctgttgctccaacattgcaaagacacattatcagtccctatttctagagggattactttgaattgagccatctataaaactgcaaggtcttgcccttttttttaatcaaaactgttctgtttaattcatgaattgtatagttaagcattacctttctacattccagaagagcctttatttctctctctctctctctctctctctctctctctactgagctgtaacaaagcctctttaaatcggtgtatccttttgaagcagtcctttctcatattgagatgtactgtgattttactgaggtttcatcacaagaagggagtgtttcttgtgccattaaccatgtagtttgtaccatcactaaatgcttggaacagtacacatgcaccacaacaaaggctcatcaaacaggtaaagtctcgaaggaagcgagaacgaaatctctcattgtgtgccgtgtggctcaaaaccgaaaacaatgaagcttggttttaaaggataaagttttcttttttgttttcctctcagactttatggataatgtgaccgggtcttatgcaaattttctatttctaaaactactactatgatatacaagtgctgttgagcataattaaataaaatgctgctgctttgacagtaaagagaaggaagtattctg

SEQ ID NO: 12583 - DNA, 1458 bp, Homo sapiens
aaagaagaaaggaagaaagagtgattacctacaggttataaattaaattttagccagcatctgggtcgaaggagtcaggaataacatttcctcgatccaggaaggctggtttaaaaatttgcaaatgccatgtcaaagtaggttgttttgaagaacttcctgcatctgaagaacttggctgagaatctcaccagctgcttctgagaactcgagactagcagttcccttgctggccaagggcaaagataatttagggacttttcaaaacaactgctgagctaataaatcctagcatttctcaggtcaaatcctgcagtagtgagtagctatgaatggatcctattaactgggtgggaggggggtgaaaatggagtgcatgactgctctgacaacctgaggatatcacaggtttagaactagccaagcttaaggggtgagctgtactctttggtgccattctctgactaagaatgggttcagcaggtttaacccttaaaagtgctgcagatgatttcagagtgctcacactattctgttttttttatttttatttttaaatgagggtgcaatatctaatgtaagacttaaattacataatgaaatggacatccagtgttcccattctttcgtttatatttgccatttttttttcagagcaaagtttcttttttatgaaagttcatgctccatgaatccactgaatttctaattcagtgcccttctatgaatccagttaaaaacaaaagcaaaagcaaaaatctatgctatcaagttactccaaagaaagatttcacagaagcagcaaaaccatataagatttaggagagggacttccctgggaaatctatttttacttttctattatttttaaaatcttaaaagtctgatatttgtccagtcataatttttattaagcaaggaaatggagtgagtttgatgtaatttgtttaggagattcttaaacccaaataaatctacactccaagtgatatgtgaaaatggcttagttcacttcaattctgtttagtcagtggtgggagcttagaagtggttttatttgttcgtttgtttgggttttgcttttgttttttatttttttcttgttttttttttgtagtgttgaattaatgatgttcttttatttggaagctcataaaaggaattaccattaataaagtgtttctgacaccattttctgttaatgggacaatatttcggggatgaagaaaggaatgctccgaaaactaaatggaacacttaatccttaaagcaattttttactgttcaataatatcacattgggggaagaaaacacaggtatcaaggtggttcttgggaaaaaagaatcatgtttattatatatctctcaagtttttttggtataaaaatgttttaactttgctttctttttggtttttgtttgaagttggttttcctgttaataaaaatttatataac

SEQ ID NO: 12584 - DNA, 2249 bp, Homo sapiens
agagaaaaaaataaaccaataacctacctactgacaagtaaatttatacaggactgaaaaccgcctgaaacctgctgcaactattgttattaactctgtatagctccaaacctggaacctcctgatcagtttgaaggacattgataaactgtgattttacaataacattatcatctgcagttactgtttacaagactgcttttaccttaaactttgtagatgtttacatctttttgttgtgttttaagatgatgttggtaatttgtgcctttagctctgttttattagacagagttaaagcatgttgtcttctttgggattacactcaggggtctgaaaggcagtttgatttttatttttaacacacttgaaaaaaggttggagtagccagactttcatatataacttggtgattatcaacctgttgtgtctttatttaattttacatctttttgaagcactgccacaggttattagccaaggtggccttccttcacagtcatgctgcttttttgaaaggtgaatttcaacacatttagtgcctctttcatttctcagtatatatttcaagagcttgtgatgaaatctataggatggtaatgatggacttgtcacctgtatggggaatacttttactactcagaaatgaatttatgtgctgccatttgctataaagttgaactttgtatggcttgaaaaagaaatgacaatatggaacatcccaaggctgtcccatagggttggaagttgtgtagcattcactcccttacctactggcattcccagtgccctctgtccatacctacttctaggattgcaaaggagtcttccaactagagaaaaattgtccactgacatttgggatttacttttctccaatacctgccaatacagaaaactattatcagttgttattgttatcccttgaaagcgagggtgacaaaaacaacaaaacaccgttataaacacatcaaaggttcattctgactgaggtaagactttccaagcccttgttagattaggccttataaaacttgtgtgcattataacctaagctgtgcaacctgtgaagccaagagtgaactgatgtttcatttatattttcatccaaatgacattatctgcacgtttttaaaatttaaaaacaaaggactatttaaaaatacagtttattaacaaacgtgaactactttctgttacattaggtgttccctagtgtttcttaatttctttttagaaagtgtatttttattagtatttttccggtgaacagaagatttgtttggatttaaacatttactaagacagtacctattaggaaaaccaaatattgcaaatggtcaattcgattttaatttctcaaaagatactctgttatccagaagattaaaatgcctacattgagtgcttaaaaaaaaaaaaacaactgtgatgatgtgagcagaatggcaagtaagttaagcatttttgatcctgtaatcatggtatcattacaatgaaaggaattcacaaactactgccagaggaagtttgttttttaatttaagagggaaatataacctataaatttgtttcttccaagcttagctcttaaatttggagactcaaagttaaacatcctcaacagagttttatttataattttgaattgtcaatttgtattttgctactgatctgtgatcaaccattttaactttcatctctagggatgtttaacatttataattgcaaaataaaccaactataaaaaaagaaactaagagagaattggtactttaattacttgtgtgtttgcaaataggctccattttccatgttgagtagattataaccttattaactatgcataggcctaagaaaggtggcaatgaactgtgcatgtaaattttaaatgggtactttgtgcaattcgttaaaagaagatactctatgaatatgattctatatattgaaatcagaaaacctaccaaacaaaaacatcagaagctgctgccataatgactattttctactgtaggctgctttggaaataattcccatatccttgctttgtaagttggtaatatcactatgcatttctacacattttataaatttgatttatgcagattttgatacactgtatgtttctgtagaaattgtataaatattcaaaattttattaggataaatttgagaaacttacgtatatcttaattctgggttgcttgttttttaggtgacaaaaataaaatattgtattttaattc

SEQ ID NO: 12585 - DNA, 204 bp, Homo sapiens
gagacgtggaattgagactaataacttggatgttaacactgtttactgttttttcacatgtagaaatgttctttgtgtattttttctacagaggattttctctgattttattttctttgtttctgactctaataattagttggaaactcatataaaatgagctttcctaaattaaatctattttaaataaaggttattactatt

SEQ ID NO: 12586 - DNA, 191 bp, Homo sapiens
agccaacctcagttgatgccttcccagagtcaacctcctgtgacgccctcccagagccaacctcgggtgacaccctcccagagtcaacctcatgtgacaccttaccggagtaaaagtggtaaacaaaagcaatcagtaccaattccaaaaactgtatccagaaaaggtacattaaaaaaataattcctagt

SEQ ID NO: 12587 - DNA, 3235 bp, Homo sapiens
tagaagatttttgtccatgcttgatttttttttttaaagaaaaactttcatgggttagcattaccttaatctttgttgctcaagtgccagaggttgggagaaggattgcaggttgggagaggtgggaaatagcagtgaattttagtcattaacttcaaaatatatatatatatataatttaaaggaaaaataggtgcctcctttataaacagtaatagctacgtttgggaaggaggaaacatttaaattataaaggactgaataatctaaaaagcatataaaagtttcacacagcataaaagataccaaaatatcatatggttgaaatattgaaacatattaaattgtgcaacacctagaatagtgctagacatacagtaagtacttaatggatatttgaatgattgaatatcttgaaatgttgaaatgtaaggtgtgcacagtgatcttcaacttaacaaacacttacgttctcctttataaaatgcatagtaaaccactaacgttagctgttttaataaaagttttcagttataagtttagtaaatattaataaatggatacacattcaaaatacttttaaaaaaaagaaaatgttaccagtttttttatctgaagtttaactgtcccattgtaaaggtgtaagttatataggcttgaaaaaaattggcgggtaaaaatcacaaaatgcagtcgaatatatatatgaaaacttgcattaggtgataaagtgactattttaagagattcagcatgcatggatattagttttgattaatgtgtacaataatttacacagtatactctagtcaatttatgttaactttatttaaaacacaatttatttggccgggcacggtggctcacacctgtaatctcagcactttggcaggccaaggcaggtggatcacctgaggtcaggagttcatgaccagcctggccagcatggtaaaaccctgtctccactaaaaatacaaaaattagccaggcatggtggcgggcacctgtaatcccagttacttgggaagctgaggcaggagaatcccttgaacctgggaggcagaggttccagtgagccaagatcgcaccactgcactccagcctgggcaacaaagagcgaaactctgtctcaaaaaacaaaccaacaaaaaccacaattgatttgatgaaaattagttttaagtaaatgtttgtaaatagatattggttgaatttttggatatattatgttgatttaacttttaaaatgttgtttaaaagtgtgaagctatgaaaagcctgataatgtgactacagatatttcagttggactagaattctgactttgaaacttattaaattaatgcatactggaagtactttgatactcaagttgtttcacaagatttataatatagatggttttgtttgactaaagaataatctcatataactagaatacttgtggcttttattatctttaaacttgttgcatttaaaatatttttaaaaccttcttaacaaaacttcttaaaactggaaaaaatatatattatgtatctatgtatcatatttatcacatgaccacttttgattccttaaaaagacattacaggcttaaattccattttattaaaaaaaaaaaattgcctgtaatcccagcacttcaggaggccgagatgggcagatcttgaggtcggtagatggagaccatcctggccaacatggtgaaaccctgtctctactaaaaatacaaaaattagctgggtgtggtggtgtgtacctgtagtcccagctacccaggaagctaaggcaggagaatcgcttgaatccaggaggcggaggttgcagtgagctgagatcgcactactgcactccagcctgggcgacagagcaagaccaccatctccaaaaattatatatataaaaataattaatattatagaagagaatatacacaactcagagatgcaatggataatataaaaagagtacctgagatgtatttttttaaactcttagagatatctgtaactcaaatttttcttaggtgaggaggattattaactggcacatatgtactaaaaacccctcacttaaaaatggcagtctcaatcctactgtcattctttttattttaaaataaataaataagcctatctttttgtgcttacatacttaaaaggatatcattaagtatataaacaatcattacttctgtatttttaatgaatgcaggaaaataatatttttatgtataaaagatgaagaaaaaattttgcaagtctttaagcacataaatacaacagaatagccacccaatttctgtctgaaatctaaattggatggatttgaccatcattctattatctttgatttctacaatgtctatatcttattacctataactattaatttttcatagaattataaatgtcatttgactatgtcaatctgtatatattgtaccttaatatgaaaaacaaattttttaattcataaaagtatttttattagatttcatatgcatgaaacccaagcaaattatatgaatttattttactatttgaaaatgttcatattaccaataatgtggacaaattactttgcaggtttaaatatgcctctgtaaaggaagagtctcattagacaatgatttttaaagcattggaaaaatattttgcctgtaaaagttagtaactaggtggttcacaaaattacaacatcaaaatagttacatcttgtgaaaatatatgatttttatgtcaatcaagacaaatgaaatatatatgtatgtgtatatatatacatgtatgtatgaaatatatatatgtgcgtgtgtgtgtgtatatatatatatatatatatatatttctatgaaattgtccagatgtgttcaggaacatgattgcattagagcaatgactgtattttgttgtccttataacatttatattatttcagttttaagtcaaaaggtattctgaatataataaaagcctcacaaattatttgtaaaatttagtagttcatatttagtatatcagtaatatagaagacatctttatagtcaactcttaattaatgcttattgtaccaaatctttgagatatttgtacataaatgaaatatgtactttcatgctaaaattatatatcatgactgtgctataatttggcatgtcattatctagatttatatgtatgtacgtatttcaggtccttgaaattttaataaatattacagttaaatcctg

SEQ ID NO: 12588 - DNA, 868 bp, Homo sapiens
attattctgaatttgaaacaacatatttttatacttaatgaattgtatctcattaatctcttcccttacatcttcatgtattgttggtttgttttttggttttgggtttttttttttttttttttggtataagaactaacatcaaaaggcctgtttaaagggaaaggttaatgggctacttaatattatgaacaaaacaaaaaaacaaggctgccacagtggaatattatcttacaagaataagaactacataaaacagatttgtaaaaaatacatatttgaagtattccctgtatttccattattctttatggaatataaagtaagcatgaaaggtagttaaaactttcaggtgcctgtagagtcataataactgtattttatgccttgcattcacgcaaattcacattggatgtgatttaaaagtagacattctctttttcctcttttaggatatgtttgattactggaaaattaatatggttatttgttagaagtctggtttataaaaaagccaaaagtgatggaatttattccatttgtcttaggaaggcccataatacttgtttttcttacatgtgactagcaactttctccacttaaagactaaatacctctttatatgatgtaaattattctaattcattttaaaatcttttaggtcagcaaaatgtgtgtcttcagtgctttctctaaaaacgttcctttatagctttgtacttttttttttagcgttgccattgaaagttaaaatgtttgcatggtttaccctctgagttatgtttcttctagtgagcatgcctgctgtcactaagtgaattatttactactttttgtaggtctatattttaataattattgggataat

SEQ ID NO: 12589 - DNA, 375 bp, Homo sapiens
tatctgtagattctctggcatttagtctcttcaaactgtgtataatgtttggtcctcctctgtttcatagaaaagtcatagaatatctatgatacattgaaaagttactgcaatatttgagaactgttctttttttttcttgtgtgtgccatctttccattgttggctacgtcttttcttttgccttgatgaacgttctatgtatttcatcggatatacagcatattccatttaggatgtgtatttaatgcatttagtaatgacgataaagtgtttttagtatgcttttagtctcttgtaactggggagaagcagtgttttttttttaggaaaggattatgcgacacaataaaataagatattctgtctgtagtg

SEQ ID NO: 12590 - DNA, 3019 bp, Homo sapiens
ttacatgacttaagaaattattttttcatctgttcactttcttagggagggtaaaagactgaagatttgtgtttttgttttggtgtttggttttttttggtaacgtaactgtcaactcttgaagaacttttatttcacatcagattttcaacacattaatttgtaaagtaccttgagtgtaatttttatatgcttaaaaaagaaaaaatcatataagaaagatgggataacctggtacacaaatgttgcccagtatgtgcgcattgccagtggacttcattttgtaaaaatggaatagaggcagtaccccacatgtgtactgttgagccggctgttgagaaacaacttggttcagccggtggttttgcttctcctttgtgttcctgtgagtaggctgtgccgatggcagcagcgccacgtggtatctgtgcgctggcgaggagaggagcgctttccatttggaggcagtgtgagcacacgctggagtgcagcgttccaaagtccgcccgaaatggatgctgcgtccacggccatcacctgtgcgggaacacctggtttccttaagacaatttcctttttgtccttttatatttttctaaagaaaactaagatataaactaccaagtgctcttaagaataaaaataagaataagaatacaaaggagcactactcttggctacacgaaagatcttgggattcatgacactgagggcagggagaagaaagaacaccagccacgcagagatacaaataagctcatcaaatgagcagctggtttgtctcactcagcctgaatttgcattaagtgttcaaaagtgagtttctggcttgcactagtgttttgccctaaatctaaggatggtgcctagtggtggccctgtgttctgaggacagagagagctggaggggtggagggaaatgcatcggcactcatttggtgtaaccaagaagagggggaaagatgtcttgatagaatcaaagttgccaaaaacaaagaagagtttatcaagcagatttctaacatttagtagaaactacttcatagctctcatttttagggggttctatctataatttatggtaaatagttgggaggcaaagggaagaatgtgtgtggggggattattaatttgaagtataagctaaattgtttattaaaaagcctattttggatgaacaagtttagagagataaactgactaatgtgtcctccagtttagaatttcaccttacccgacccaggcacttcttaaaaacacagatcctcagtgcagctctgccagcatcaaggcttttaaaatatgtagtatttaggccatttaaaccatacttattactcaataacccaagaaacaattttgggttagccatctaatatagcaaataaaatagattttttaaagaaatccaaaattgtcttaaaggaatggaccccttgaagaaaaaaaaaaaaagttttgttcctcagttagaatgctcactagctcactagcaagaatttttattttcttgaaagcaattatatatattttggaaagttcatgttattggaattgaagttcaaattaagcaacttctgagcctagaactttaattactttttcctaaatgtcccaacacttacatacaaatttctttgaagacataactggacatggcagacactgctttgaacaaaaaccagcctagtgaattgactgagtacagtcctttaaggctgcccagttcattctattagatgactaaggaaaactagaaaaagaatacagttcacccttgtcaaggtcaaatgtgaaagacagaagtttatttaatgtagaggtaaatgaaggtgagctgttttcagcatcttagtttgaccatgaaaatgtctatagaattatgtgtagttgttccgtacgattttattttcttcatttatttatttacagtcttatttatgttctgtttaatatatagtttgattctggccattttaaatatttgacacagaagagactatattggaatatttacagctttataagtctttcatcagattagctgttgactttttgtaatacaaaaagtttcagacaagtattaaagaataaaatctgtctcaggctggtagttagcagttgtgaccaagatgcttttggttgttgtatttcacaaaatttcctcatttctaacatgagagatgaacttattttaatataatcctttttctacactttaaaagtcagcaatagtgttatgtatttataggcagcttttaataatcttgtcatatttgtactaacccaaatgattcacagtgacaaaacattttaataacttgatcacaaaaccatatggacaaatatgaattttaatattataaatactatttttaaaaggtagaatttattcgcacagggtaaaaagaatgtaatatttagttctcaagtttgaattatcagtatattattacaattttgtatatcagaatcttaagtgttacaggtacaaaaagaatattgctagccaaatgaacaaagtttagctaaatctctgtagcatgcaaatcaaataaattaaaattttttgctattgctttatctatattgtcttaaatatcaaaagctcaggactgaacttaatatttaatcaggttaaattctgaacatgtttctgttttaatttgtcttgtttgtaaacgtatgcaaatacatcacatagattaactggtttctgcactttccatgtgtttgtgggtggaaaaaaattcagtggttttttttaaaaaaaaaagcaaaaacaaagctacatattgcctaatactctatttcagtgtcgtttattgttcagtttatttccctgattggcacaaacacaagagtttccttgaaccatgtaccaagcaaatacaaaatatttcatgaagaaatccccaggctggcagtttgtgatgaatagttcttgttggaactatatgtattgctgataaaaaaggacgaagtattttcattgagcaaataaaatgaagggctccag

SEQ ID NO: 12591 - DNA, 469 bp, Homo sapiens
tgtgtccaaaatatcactgcatacaatatctggtatttgaagagaaaaactgacttttgtatagtataaaacacaggctttcacaaattttgtattgctttttttccagttttgcagaaaatttacattctagttctcttcacacagtagcagttgtaaataatttatgaatgacagtacacattaaaaggtatgcattagcagcatattagtatgctgttttatttgctgaagaaaatactgtcttctatttttaatgatacattaggtacgatgtgtagttcggtagagtcctaaaatttttgtactactttcaatttggtgaaaatgtattaagttgtctaccatgttttcttttctagctgaataaaccacatcaaaggaaagggaccacagtatttgaatgtttgaaagtctgtaaagcttaaggttttaaaaatgttgcccgtaatgttgaacgtgtctgtta

SEQ ID NO: 12592 - DNA, 144 bp, Homo sapiens
taaaggccatccacattttaaagggttatttgtcttttatataattcgtttgctttcagaaaatgttttagggtaaatgcataagactatgcaataatttttaatcattagtattaatggtgtattaaaagttgttgtactttg

SEQ ID NO: 12593 - DNA, 969 bp, Homo sapiens
tacctctattgctgctgcatgatgttcaagaccggcccttggctgttgttacagagatgttgggcagagctatgcaggtgtttcattgtgaactctagctttgatcatggtaaaaagttaaccttttctattttttaatggatgttataccaactattcagaggaactcatacttcaaaaatattaggaaaatctgtcttatagtttctctaataaatatctgaaatctcagtacgacatgaaagaatgtcagaccattgttattgttgaaagtcatttgatgaatggtaaattctatgaaaagtaagtgatttgcatgtataatatcaggaaaattaagcatcccaagtgtgactggacaaagagagcagatgcaccagtgcctgtgccataaagttccgaatcccccatgtgtctctttcagagctggccagaccggaaataaatcattctcataaattcagtgtgtactcagaacacatacacaacaacatagggagttgtatgactgatacggaaaacttccagaaagttttaatcaaagcagtttaattaaggtatcaaaaatatctttgcttactatcaagaagtgtcaaataggttcagcttgctgccaaaatatggatcatttatgaagcaggttcatattttagaggtgttaataaaatcctcatcggaaaagatccaaagtgcaaggatttgattataaacataatttcctagactgaaagtttttggaaaagatgcagggtctgagtcaggccttctggttatattgtgcagtttcaaaagaactatttaaaactcttgaaaactcatgtaaataaaaatcatagggtgaaaattgtatttgttaaaataccttaataatttaaaatgacctgatttcctggaaaattttattattcaaaaggtggaggcattgtaaaaaggaaatagtgatgtaaataaacatgttctctttcaagt

SEQ ID NO: 12594 - DNA, 438 bp, Homo sapiens
ttgtccttctgcctcagatcttctgtctcattcgatacagcaaagtttacgacactgggactgatgtttacatctttggaaagacaagcatctcaaccacagtttttgtgtttacttaaactgtgctgctaagtagggctagggcaaaaaaacaaaaaatctttatttcagagtattgcttttcacatttatggctctgtagcaactgagtaacagtaggggtgatatgtatacttttgcttcactaattgtatctgagcacacataggaaagtctagacactgtaagtgtaatacgcattttcaatgtcatgcagttgccaattccattttaaaatgccacagatgcgtgttgctcccagtctgtggttaaacggtgccacagaactgatccttgacacttccaaaaaaaaaaaaacaaaacaaaacaaaaaaaatt

SEQ ID NO: 12595 - DNA, 179 bp, Homo sapiens
ctaattcactatgaacacttttgtcaccaggctataatttgcctgatgtctgtgagatttgataaatatatcattcaacctgtttatataaactaagttttattactttgctttccaatttttgttttttacttctgtaaaccaatttcattaaaaattagctttggtgtaaattcagg

SEQ ID NO: 12596 - DNA, 299 bp, Homo sapiens
tgtaattaaaacacaagttcacagatttacagtgaacttgatctacaagttcacagatccattgtgtggtttaatagactattcctaggggaagtaaaaagatctgggataaaaccagactgaaaggaatacctcagaagagatgcttcattgagtgttcattaaaccacacatgtattttgtatttattttacatttaaattcccacagcaaatagaaaataatttatcatacttgtacaattaactgaagaattgataataactgaatgtgaaacatcaataaagaccacttaatgc

SEQ ID NO: 12597 - DNA, 492 bp, Homo sapiens
gactacacaaataaaccaccagaaaaatgtctgtgtaataatagacatgaaacattttcctcttttccacagagggcttaactgagaaccgtattgatttttattttagttacctccctctagttttatgtgaaattagtagaatcagggaggacgggacttatgctgtggtaggcaacagaaaaaaacttctattgattttaatttaatatgaatactttaaagatcaacataccgattgaaatacaaatgttaatatgtgagaacctaggaagtattttaaatatttatgaaaatattttgttttaaaatgaactatgaatattgtacagttaatttcctcactgaggactgtgaacattcttatattatttcatgtatattgaagaacattgttatgcaatgctttgtgtaaagttattgtgaagattttattgtctttatttttaccaaagatttcccatagtttgagcattcaaagcaataaaatat

SEQ ID NO: 12598 - DNA, 219 bp, Homo sapiens
tgtcacgtgggttatgaagaagtctgaagaacgccttcatttcatgcaaatctataagctcctgcttttggctttaccatatgttgtgtctaatctccttctgagaaggacgaaaaactttcttccaagtgaagatccatttaagaacacatgtatttacatgcctataatatgctggttgtgtatgctttgtcttttaagttattaaaggaacgtcta

SEQ ID NO: 12599 - DNA, 223 bp, Homo sapiens
atttatttaaatattcaattagcaaaggagaaactttctcaatttaaaaagttctatggcaaatttaagttttccataaaggtgttataatttgtttattcatatttgtaaatgattatattctatcacaattacatctcttctaggaaaatgtgtctccttatttcaggcctatttttgacaattgacttaattttacccaaaataaaacatataagcacgt

SEQ ID NO: 12600 - DNA, 676 bp, Homo sapiens
aaccacctcaccagaaccattggagcacctgtggcctcggcacactgcttatcacttgaaaaatggaggaacaagtgttatatttatctgtgtgtctgacagtgtgagatgttagaccgagagaaaagcaaacaaataaatcacttaatcttgaacactttgcactgtaaagagagtgaaagtcaaacccaccaagctgccttgctgaaagcatctccaaggttctgtaggctttgttcagaagcccctgatgtgtgtttgcagtccgtcattttatcaatgatacgcaaacataattagcatgtgtatgtactcacacactaattacatgtaagaatatattatctaggaatatgtcatttgtaactttgtactctgacgtattttctagtctcaccctattagtaattctgtcaaaatcctagacgctagtagatattagtatttgagacaatatgtcagagtctgaataagactcagcttgttctagtcatgctgagtttctcatatattttttaaaagtgcttccgccatgaacctctttgagaaatgtcagtggcaaaatctcccaagctaattttctttttctatgttccatcttcaaattcagacagttcacgtgaagtaccccacatttattgatcttagggttgaatataaacgcaattaaaagcta

SEQ ID NO: 12601 - DNA, 2816 bp, Homo sapiens
ctatattattgggttgtgcctttatcatgagaaaggtctttattttaagagatccttgtcatttacaatttacagatcatgagttcaatatgcttgaatcccctagacctaatttttccttgatcccactgatcttgacatcaagtctaacaaagaaaaagttttgagttttgtattttcttttttcttttttctttattttttttttttgaaaccgtgtctcactctgtcgcccaggctggaggagtgcagtggtgtgatctcagctcactgcaacctccacctcccaggttcaagcaattcttctgcctcagcctcccaagtagctgggattacaggtgcctgccaccatgcctggctaatttttttgtatttttagtagaaacagggtgtcaccatgttggccagactggtctcaaactcctgacctcaagtgatccacctgcctcagcctcccaaagtgctgggattatagtcgtgagccaccacgcctggccagagttttttatttttatcaccaccatagatgttacagttggctgtggtcacaaaagtagttaattgtgtcagcacccaaataaacatctaacaggtttctcaacagaggaatccacagtccaattccacttcaattgatagacccaaaaaatataatttaatcaaagttctagagtttttgtttgtttgtttgagatggagtcttgctctgtcgcccaggctggaacgcagtggtgacatctcggctcactgcaacctccacctcccaggttcaagtgattctcctgcctcagcctcctgagtagctgggactacaggcgcctgccaccacgcccagctaatttttgtatttttagtagagatggggtttcaccatgttggccaggatggtcttgatctcttgacctcgtgatctgcctgcctcggcctcccaaagtgctggcattacaggcatgagccaccatgcctggcccaaagttctagaattttttaaaggtattcatggtgactcaggaatacacacatacacacacacacacacacacacacacacacacatacacacatataatttgaaagaggtgagtatgtactctgacttcagctctcaggttttaaaaattatattagtgggaccagttatgacaagaataatcattatagtacttttcagattttataacctggagcagattattttaagttgattagtaggttctgttacagtttttcttttgatcgtgcacttatagtcttcatttaattcctcatagaatcccagtcacctttatatatcatattattggaagagattcatcttcataatctccagttttttcacagtgcctcacagagttaatcatgccttttggagctagaaggactttagaacttatctagttatgctcctttatattataagtaagggaatagaatcaataagacagtttctgcccaaagtcatgttaccagttggtgacagagctggaaatacgtagagatctatacccttaaatctctccactcacatgctgatatactttctactacaatatgctatagctttatggaactcagggtgatgatcagacgtgtcattagaacatgagtcctctgcttctgattcaggcatacttttgggattcttccatctttaaaggaaaaaggaagccattcatctatatttagtaacccagtaatatctcacttagtttagggttagatctttagttaattcaaccttatagatcatacttatgaaggtgataactgacacgtgttcactgaattttaatttgataggcaatacatctacccactccattattttttaaaacttcatttaatagtttaaacaagattggttttgttttcaatttttattcactcttcatagaatcacaattacctttatatatcatatgttattggaagagattcctcagtaatctccaatctctcatagtgcctcacagggttggtcaatggcttttggaactggaaggaccttagaacttatctgttatgctcctgatagccaatagcagatagaagcttgcaatcaagagggtaggacatgtgttcttcaatggatatcaaaggaagaggttgcaaaccaaagccatttggcaagccctgtagcctgggccatttaagacaggggcggtctcagccaaattgcacccatttaactatcccaaagagccacagtgcctacaacccaggccctaagttgatgaagaaaaagtcaaggaaggaggtgatacaattggaaatattcccatcaaatggttaatcttatttagaaaatgggcatattagaaaaagtccttccaagatgattttggataataaaagttgtatttgtggaaattggtattatctctgttttatgcacttacatttatcccttacattttgtttttagtgaccctacatgacattaaatttaaagtaaaacattgtttaatgttaccttttggcttgagaatgtctttcagctccagaattattgttactcatattttaatcagtaagtcatttaagctatgacagagtaggaattgagaaattatttcatatgctacagtattgaaatgtggatgctgccttgttttataagaagatgatcaaggtttgtgtgcccattacctttcctctgcctgaaagacgtgtctcaagaaaaataaattctattttagatgcaggtactgcattttattctaagaattgatatcaattcaaaacatagaaaactgtaaaagataaatcaggagatggctgattcataatgggtaataaaataaatagcactttcg

SEQ ID NO: 12602 - DNA, 258 bp, Homo sapiens
gaagcagtccagagtctaggcaatttttacaacctgagttcaagtcaaattctgagcctggggggtcctcatctgcaaagcatggagagtggcatcttctttgcatcctaaggacgaaaaacacagtgcactcagagctgctgaggacaatgtctggctgaagcccgctttcagcacgccgtaaccaggggctgacaatgcgaggtcgcaactgagatctccatgactgtgtgttgtgaaataaaatggtgaaagatc

SEQ ID NO: 12603 - DNA, 1067 bp, Homo sapiens
atgggttcccaggggccattggagtccctgaaggacccaggatttgctgggagagggtgttgagttcactgtgccagcatgcttcctccacagtaacacgctgaaggggcttggtgtttgtaagaaaatgctagaagaaaacaaactgtcacaagttgttatgtccaaaactcccgttctatgatcgttgtagtttgtttgagcattcagtctctttgtttttgatcacgcttctatggagtccaagaattaccataaggcaatatttctgaagattactatataggcagatatagcagaaaataaccaagtagtggcagtggggatcaggcagaagaactggtaaaagaagccaccataaatagatttgttcgatgaaagatgaaaactggaagaaaggagaacaaagacagtcttcaccattttgcaggaatctacactctgcctatgtgaacacatttcttttgtaaagaaagaaattgattgcatttaatggcagattttcagaatagtcaggaattcttgtcatttccattttaaaatatatattaaaaaaaatcagttcgagtagacacgagctaagagtgaatgtgaagataacagaatttctgtgtggaagaggattacaagcagcaatttacctggaagtgataccttaggggcaatcttgaagatacactttcctgaaaaatgatttgtgatggattgtatatttatttaaaatatcttgggaggggaggctgatggagatagggagcatgctcaaacctccctaagacaagctgctgctgtgactatgggctcccaaagagctagatcgtatatttatttgacaaaaatcaccatagactgcatccatactacagagaaaaaacaattagggcgcaaatggatagttacagtaaagtcttcagcaagcagctgcctgtattctaagcactgggattttctgtttcgtgcaaatatttatctcattattgttgtgatctagttcaataacctagaatttgaattgtcaccacatagctttcaatctgtgccaacaactatacaattcatcaagtgtg

SEQ ID NO: 12604 - DNA, 1305 bp, Homo sapiens
tcctccaacaggatgaagcagattaacagaagagtgatcagtgacaaacatgcctcattgattattgtttctaggaaggaatttctaaatcaatattgcaaccccaaaagcggttataatttggtgttactaagatgctcctacactttgtgataccgttttaaggacatggtgcatttttttttcttttatttgttttatttagaactttttttatttgttttatttagaactttgtgtgttcttaaagtgtgcttccaacaggaaggtcagtgataaattttcaaaagcataaccttcaatatattatctgttggattattggatataagacttattttcatgtactataaatatgaaaataactttgatttttaattgtgtagtttccatttcttagcttttgccttttaaatttatacttcagccaggcatagtgactgatgcctgtaatcccaacactttgttgggaggccaaagcaggaggatagcttgaggccaggagttccagaccagcctgggcaacatagtgagatcctgtctctacaaaaaaatttgtttttatttgtatttatatatttttatttttgtttttgttggtaggcgtctcgctctgtcacccaggctggagtctagtgtcgtgatcttggctcactgcaacctccacctcccgggttcaagtgattctctggcctcagcctcccaagtagctgggactacaggtgtgtgtcaccacgcccggctaatttttgtatttttagtagagatggggtttcaccatgttggccaggctagtctcaaactcctgacctccagtgatctgcccacctcggcctcccaaagtgctgggattacaggtgtgagccactgtgcctggccccccacaacatgtttaaacttagctaggcctggttgcatacgcctgtgttcccagctactcaggaggctgaagcaggaggatagcttgagcccaggagtttgaggctacagtgagctgtgattgcaccactgtactccagactggataacagcaagagcccatcttttaaaaaaagtaaaaattaaaaatatacttcatggttcatgtcatagccctagagaatgaaaaatttgcagtagatagtcaataaatgaatcagtagttaaatattccttaaagtcaactgtatttcattgtgatttttgttttctttttatcattgtatcaaactatatggaaatcatatggttagatgtgattatttgataatgttagtccatttgaatccattttagatatttcacaattaaagaatatgaaacttc

SEQ ID NO: 12605 - DNA, 123 bp, Homo sapiens
ggggcgtgccctgagccgtcacagcgggcgatgtctgagaccaagacacaactattaagacgatgaaggcatcgacagtattaatgtcaggtgatctgaaataaactcccgtaaccccacccc

SEQ ID NO: 12606 - DNA, 74 bp, Homo sapiens
ctgggatttttgtttctgccttatctttctgtgtttttttctgaataaaatattcagaggaaatgcttttacag

SEQ ID NO: 12607 - DNA, 42 bp, Homo sapiens
gacgcggggttgggacggggtcgggtggttcggggcagggcg

SEQ ID NO: 12608 - DNA, 42 bp, Homo sapiens; identical to SEQ ID NO: 12607

SEQ ID NO: 12609 - DNA, 1703 bp, Homo sapiens
agaatgtggcaaagcctttaagtcatactacagcattcttaaacataagagaactcataccaggggaatgtcttacgaaggtgacgaatgtcgcggtctttaaatgctcctcaatcctttctaatcataagataattcataatgaagagaaactctaaaatgtgaaaaatgtgagaaggcttttaatcacacctcaatctgttgtagacataagagtaattatattgatgagaagccaaattaaaattaaaaatgtggcaaagacttccaattctagtcagttcttaatgtaattcctactgaagaaaacacctggaaatacaaaaaatgtggcaaaacttgtaaccaatgcttagcatttttgcacatgatagtatttatatgtgagactacttgtacaaacataaaaatatacaaaagctattgtctacttgaaatttatagttaataaaagcattataaatgtaatttctgttgaaagaccttttagaaaatataggccattaaagtgaagaatagtcttaagacagagaatacaaagataaagagggctctagtacctgtacttgtatcccagaacttactatatgcattttgtactagaggaaaactctgaagcagttgcttaaactttgttcaacatcagagaatttatattggagagaaatcctacaaatgtaataaatgtggaaaaacctctgttcagaaactgcaggttaagaaaccagaggccaggcgcggtggctcacgcctgtaatcccaacactttgggaggccaaggagggtggatcacctgaggtcgggagttcaaggacagcctgaccaatatggagaaacctcgtctgtactaaaaatacaaaaattagcaggacatggtggtgcatggctgtaatcccagctactcaggaggctgagacaggagaatggcttgaacccaggaggtggaggttgcggtgagctgagatcgtgccattgcactccagcctgggtaacaagagtgaaactctgtctcaaaacaagataaaaagaaaagaaacaccagagaatttttactagaatataatttgtaggtgcagtaaatgtgaagaaatatttaggctaaaattaagactatgtaaacatcagaggatttacagtagaaagaactaaggaactaacacttcagactttaaaataaatcagagtattaagtataacaaaagttgaacctgttagaaaatttccttgtatataagttgaaaagtaggtttttgaagagatatattcgaaatatattttttcacttgaaaaaagtaaaaatttttttcaaaagcaaataattcaactctaaaattatactatttcaacattctcatttatgtgaaagcatgtgataaattgttgctgcgtcagagatatgagaaactcctttgcattaggtgggcattattcatagacttctacatgaaagagaagagaaataaaagatgcaccaggaaaatctgagcagagaggcttttagtggttgacttactgagtgatgcctgaagtaggtgttcagagtaatactttgcgttatactgagagagaatctgaattttagtagtaaattgttttgccaactgtatatttatgtaataagtgcaataaaatgcagtaaattttaaaattctcttaagataatgtgtgaacttaatttttgaaataaaaattgttattgtgtt

SEQ ID NO: 12610 - DNA, 63 bp, Homo sapiens
gtgaccctgcgacccactctttggaccagcagcggatgaataaagcttcctgtgttgtgtgat

SEQ ID NO: 12611 - DNA, 128 bp, Homo sapiens
ctgagcgccttgtagtccaggttgcccgccacatcgatggaggcgaactggaacatctggtccacctgcgggcgggggcgaaagggctccttgcgggctccgggagcgaattacaagcgcgcacctgc

SEQ ID NO: 12612 - DNA, 1543 bp, Homo sapiens
ccgcgcgcgggacagcggccccgcggagcccccgcccctccccctacagatcctccgcggaggcccctgagggacgagcagagcgcagcccccacgccgatataagccatagccccaggcccgccctgcccgcgcccgccgcctccctcacccggcaaggggcgcgcgcccccaggacccccccagtccgccccgtgctcctctgcccgcgggtggctggagccccatcgcctgggacgcccctttctcttgctgtttaccgcccacccagcagcgcccgaggccagggccgccgaagggcagccccgcgaccacccctgtgcgcgcgttcgcggcggtgggcgcctgtcgggcccgcactcaggagcacagccatagcagacggggggctgcgggcggggcgagggcggcggggcctgggtccccctcctgcacgcggactccggggttcggatcgctccgccgtgagtatttgcgtccgcacgcggccgctctccgccccccggcctggccccctcgcgcccctgtccatccgtctctgtccgcgtcctttcctctcctctctggaaggttttgcttcttacgaacgccacggccgtgttcacttctaaactaaaggaaacaaagcaataggtttgggggacgcccagcccccacccccgtcaccccgctcttcccaagtcctcgccccccgcccggcctcctagcctctccgcccacgcggctgctgcttctccctggggaggacccctgccctcggccattgaacactgcaccctccacaggagccgcagaggcccgaggcaccggacgctggagaccctgcgcccctgcccagcacctcctccgtgggcagctcctcgggtggggcctgcggggttccctgcgcgcagctggcgcgtgtgtggcctaatccacctggtggccctgcggggcggcatccgagcccctgtttctcctccattcatgtttaatttgcatcacaatttgttgaatctcaggtaaatgaggtctttgcatttaatgagttttatcttgacaggcgccgcctcgcccccgggccctttcgtccacatcaaaaatgcatcaagtctccacgtgtttcgggccagggcgtggcttggcattgaccttcatgaccttacatagctttagagaagccataacgttagactgcaatactaacgaccgacgcccctccgggcagagaccaccgcgcccctctgcgccccagcgacgcggcccgcggggacgtcgctgtccgtcctgctcgccctgtgccctctcactgacttctcccgggtcgtgtcttttaaaaactcctgttttcacaccttacaaagccagctctgagcagacagggcgtcctctcgtagaacctgcgcaccccgttcccagcgcatggcgccccgggccgcgagcttagcttagaccgtggtgtcctctgtccgtctgtcctgcgcctgcgcctcctcctgcatgtcggggcccctgcgtgtgttctctccggatggaatcacagccaataaacaccagtgatttc

SEQ ID NO: 12613 - DNA, 395 bp, Homo sapiens
ggccgcagtggtggtggctgcgcacacagctccacaggttgggagccgtcgtgggacctgggtccccaccgtgaggaccccgtgggcgacagcaggtgtggccagggtggggctccgagccccgggtcaccgcccgcccagcgttccaggcacatgaagagaaagcattccaaagcctctgattgttgtttcctttttctcctcccgaaggaacagctgattcatgctcctcccgcaattgtcacgtctgtgatttatttggtgtttcgggcgtggcctctggagccccggcacgtggtgggccacgctgctggcgctcatgggccctggtgtttgcaccgcactttgtaatcagtcccgtggttgtctgtacagaattaaactattttccgatg

SEQ ID NO: 12614 - DNA, 1732 bp, Homo sapiens
gggtggctggggcagcccaagggctcgagccatctctgctcccgccagccttgttttcaggtggtctggaggcagctccacgtccacacagtggccggccctgtggtcggacctggctacagccctgaccacagcatcttcccagtgacggagcgggacccgccctcatcccattggtgacacatgttggtgtcacagccctcatcccactggagactggtgtgcgggtggcagtgttaccccgtgtcccgggtgggcgcagggctctggatggtgagccctctgccctgtgggggcctggtcctctcctcaggggtgggcacccatccctctccccactgagccccttgagctggacagtgctggatgcaggccgtccaggtgggtctgatctcactttgtgcccctcgggccgtccccctggccagtccttaagagcagcaggctccctggtgtgtccctgccccagcagacacaggctgccagtccctccagcctcacctccccgccctgggcagcaggtgtgggcagcgtgtgaggctgccgggtggtggtgactggtgacttccttgtgttcagggaagggagaaggtgccttcccttgttttctggccttgttatatacagatggcagcttggatctcaggtacagctccaggggcaggcagtgcccagctggacctggtggccctttcctagtgcctctgcttggggaggagaacctctgtccacgtggaggctaggaggtctcaggtgctgccctggcagcaccagagtgtgggccgggcccgagtgtctgcccctcggccctcagggtggggcacttagcacccagaagggaccaaaagcagggcatggcggtgcagaggagtttgggaggtgtaaacagcccatgcacgtggaggaggagctggctttcagccccagaccccacgctagcactttccacgctgcttgcccgctgttgatgtgcagttcccagtgcctgtgtgagccgacatctgctcagtcctatccctcgtcagcgtgtggagacccagctcctgcagccctcctgctcccacgcccccagacagcttggtggagggtcctgcatctgggccaggctggggtgcacccagccaaagacaaagctgcctccacgtgcccaaggattcagatggtgcactggccccgggaggagtctgaccaaaaatggagcccgctctgtggggaagccccgactcccccacgagaaacggtcccacggtgcggatctcccccttcccttgtggggcacagctggcctgggcctccaatcctgcggagctttcctgggtgtggctttgacctcagaagtggctctggtttggcctcaggagtgtggcctggcccagcctgctgcagcctcctggggggcccttgatgccactaatcccccgaccccccgcatctgccaaactgcacagacacacgcattgtaaggccgcttgtggcctccagcgtgcactcttgtttacgtcattgtcatcttcaagaccagtcctttgtgattagttttgcttcgcgagccctggtgtggactgtggtctgtatgaatcgtgtgtaactgtggtgaggggcttgtcctgtatgtgagtctgtacccaggtggggtctgtgccctgcacaccgggcccctctgtatttatcgctgcctgaatgcaacagtaatttatatccaggacaaatacagtctgggcgtcactatcct

SEQ ID NO: 12615 - DNA, 1174 bp, Homo sapiens
cagggccaggcctgcccagcagcctctgctccctcctggggacccacagcagacgtctgcaagccactgctgagacccttcccagggaggagccacccaagagctgcactcttgtgccacagctgccctggggaaaccggggaaccccaactgggaaaggaggccctctgatcacacgcaggacccaaacactcagaaatcaagaacctctgcctccgagacaggctggcccacagtgctggctgggccccaatgcaccgtccctcagctcaggagggatgggcctgacctgacgctcagggttgacatcttatttgaacaagggtcccccgccatcatgcagcctccaaggtgccaagaggactccctatgcccaggcctgcccggtgcccaccctgctggtaggagccagcggctctggccaagtgcacgagggtctctgtgtttccagaaggccccacacacccaagtgcccctcacacctcgtgcctccccctcacagggtggccacctgcaccagcgtcagggcccagggtgctgtgaccgatgagacctcagctcagccctcaggtgcagtggccctacccagcctggccagcagacacacacagggatgctcacgggtgcaccaggagccaggtgcggcgcagccaaccctgagcctgcagggagacctgcaggaagcccaccgtgccccatgcaggggctccctccagcacacagccctcaccccagcacagccagcaaggacacgctctccccaacagggtgcttcggcgggaggtgggggaacaaggggtcttccgagcagcccccagccctcccctcccatctgtgcctctgtaaggggctctgggacgcccagaccctgcccgccgcccacctggtggtgacaagctccagcagccagtgggtccggacctgcttgatgccgcggtgagggacggcgcccacataggcgaggttgagctgctggtcccagctgaggacgtactggtcagcctggctgtgtggcagcggggggctggggacaacaaaggggcggctcagtcccgagcctcagcatggctggcagcgcggctgacacacacgttcaagcccaggactgcccgggcgcaggatccaggcgctgcccgtgcgttcagtgactaataaaatgacccttagggccagg

SEQ ID NO: 12616 - DNA, 329 bp, Homo sapiens
tttaacaggaaatgccgacatcaacgacatcgagaatgcgggaccctcacaccagcctcacgagaagccggtggatacagcttattccagagggaggcttggatcagcacctggggaaaaaaggcagcccctcaacctggccagcctgcagaggagagaagcctgagcaagcgtcctccaaatttcacaacaggctttaccatgtggatgatgtaaccagtcatcagtacatttctgtaaagcaaagcacacttttaaaaaccagccatgctagtgggcctgaggattacctttcgtcttcctctttcctctgtggaagatgatattgc

SEQ ID NO: 12617 - DNA, 1535 bp, Homo sapiens
aacacttccaatatatgctgaggtacaaagggccgtcttgtttccgttccagcaggctgagggcaccctggacacgttcagaacacccgctgtgtctgttgtgtttcctctttgccaatttgaaaggaaaaagtcattttgatttgcatttatgtgactattaatgattctgagtgttttcaatttattcctctgtgttttttctacaaattatctgctttattcctttgtcatttatgtggaagccctcagtgtgcaggatattaaccttttacccaatttgctttgtaattttatatttgacctttgaattttagagacaatatttttatgtactcatatatattgttattatcccttttattttataggttctcatgcttagggagtttttttttcacatacttaaatcatttttttctaactgggtggtttttaaaactttttcttagagcagttttaggttcacagaaaaattgaaaggaaggtacagatttcccatatacaccatgactccacacacgcacagctcccccatcatcctcatcctccaccagagcagtccatgtgttaaaactgatgatcctacttgaatacatcattatcacccaacgtccatggtttacattagggttcactctaggtgtcgaatgttctatgggtttgaacaaatatctagtgacatgtgtccccatcgtagcagcatatggaatagtgccacaccctaaaaatcctctgtgcgccacctgttcatccttcccccacctcccaccaacccttgacagccactgatctttttacggtccctttttcagactctcctggagttggaattgtacagtatgtggcttctcagattgactcctttcacttagcaatacacacttatggttcccccatctcttctcatggtttgctagctcattttttcagtcactgaataatattccattatctggatgtatcatagttcatccattcacctactgaagggcatcttggttgcttccaagttttggcaattatgaattaagctgctatagatgtccatgtgccagggttttgtgtagacatgttttcagctcctttgggtaaatactaaggagtgtgaatgctggatcagatggtgagagggtgtttagttttgaaagaaattgccaaactaccttccaaagtggcagcagcttttcgcattcccactagcaacgaatgagagttcctgttgctccacgtcctcacatttgatgatgtcagtgttctggattttggccagctgataggtatgtagtggtatcttgctgttttattttgcatttcattgataacatatgactaggagcatcttatgctgatttttcatctgcatatcttctttgctgaagtgtctgttaaggtatttggcccattttttaattggattgttttcttattgttgagttttaagagtcctgtgtatattttggatgacatttcttttttgtgtgtcttttttttggatgacatttccttatcagataaatatgtatcttgaaaat

SEQ ID NO: 12618 - DNA, 537 bp, Homo sapiens
gaccagagccccgcagcccctggggccccccggagccatggggtgtcgggggctcctgtgcaggctcatgctgcaggcggccgagggcacagggggtttcgcgctgctcctgaccgcggtgaggccgcgccgaccatctctgcactgaagggccctctggtggccggcacgggcattgggaaacagcctcctcctttcccaaccttgcttcttaggggcccccgtgtcccgtctgctctcagcctcctcctcctgcaggataaagtcatccccaaggctccagctactctaaattatgtctccttataagttattgctgctccaggagattgtccttcatcgtccaggggcctggctcccacgtggttgcagatacctcagacctggtgctctaggctgtgctgagcccactctcccgagggcgcatccaagcgggggccacttgagaagtgaataaatggggcggtttcggaagcgtcagtgtttccatgttatggatctctctgcgtttgaataaagactatctctgttgctcac

SEQ ID NO: 12619 - DNA, 800 bp, Homo sapiens
cccgggaggagctctccagcctcggcgcctgggcagagggcccggaaaccctcggaccagagtgtgtggaggaggcatctgtgtggtggccctggcactgcagagactggtccgggctgtcaggaggcgggagggggcagcgctgggcctcgtgtcgcttgtcgtcgtccgtcctgtgggcgctctgccctgtgtccttcgcgttcctcgttaagcagaagaagtcagtagttattctcccatgaacgttcttgtctgtgtacagtttttagaacattacaaaggatctgtttgcttagctgtcaacaaaaagaaaacctgaaggagcatttggaagtcaatttgaggtttttttttttgttttttttttttttgtatgttggaacgtgccccagaatgaggcagttggcaaacttctcaggacaatgaatccttcccgtttttctttttatgccacacagtgcattgttttttctacctgcttgtcttatttttagaataatttagaaaaacaaaacaaaggctgtttttcctaattttggcatgaacccccccttgttccaaatgaagacggcatcacgaagcagctccaaaaggaaaagcttgggcggtgcccagcgtgcccgctgcccatcgacgtctgtcctggggacgtggagggtggcagcgtccccgcctgcaccagtgccgtcctgctgatgtggtaggctagcaatattttggttaaaatcatgtttgtgactgtaaccatttgtatgaattattttaaagaaataaaaatcctggaaagagccagcgtg

SEQ ID NO: 12620 - DNA, 1229 bp, Homo sapiens
ggctggtgggggctggtcggggccacggctgccgccggcacctgccctggggcacagagtaggtttcctgtgagctggtcggggccacggctgcctccggcacctgccctggggcacagagtaggtttcctgtgagctggtcggggccacggctgccgcctgcactgccctggggcacagactaggtttcctgtgagctggtcggggccatggctgctgcctgcacctgccccagggcacagagtaggtttcctgtgagctggtcggggccatggctgccgcctgcacctgacccggggcacagagtaggtttcctgtgagctggtcggggccatggctgccaccggcacctgccctggggcacagagtaggtttcctgtgagctggtcggggccacggctgccgcctgcactgccctggggcacagactaggtttcatgtgagctggtcggggccatggctgccgccggcacctgccctggggcacagagtaggtttcgtgttgcttggaacattaaggcgtaattttgattcagtttttcctaaagaagcattttgcatttttatggcttttgcagttcgggagaaagcttctctattttggatgcatttcagaagggcgttctattaaacatgaatctgcaaacagattaacatgcgtctgtgttccccacgaaaggcctgctgtgcagggcgccttgtgtgctttagttgctaggaaaccccgggcgttggtggtcagagtcccactggccccgtgtgtccccccctcccgacgggtcacggtgcttggggcttgcgcatgggcatctgtgcccatgaaccttgtcacccacgtgccagtgaaccgccagcttgtggccgcctggttttccaccggtggcagtgatggcctttggggcagaccaaggtgccatgagtccctgcttcccgtggcctgggagggcccttgcaccttcaggtggggtgtagtgccagacctctgggaaggctgtcctgccggcagcacccgtcagcacccactctgtgaatttaatacaaggcctttgctttgtgcatacgacttctgattaattttcgtttccaccatctgaagtgggcctggctgcgcctcaggcctctggtctctggctcagaaccagacaaggcaagggatttcctgtttttcattcttgcacttttaataaaatcgtaggggtttcgagtttgcgatagcaaaagaaaacatt

SEQ ID NO: 12621 - DNA, 797 bp, Homo sapiens
ctgccccctggcggccaggaagagaaacagctcctccccgactaggtggaaggctggccaggcaccaagcatgtgtgtgcacttgtacctggtggtttctctgttagcagtccattagctcatgctgaattatttttgccttactttcttaagaaacattaattttatgtatagtgagtatattttgcatgttttaaattgtaaatggagctaagtccaagaaagtacttgaagctctcttccagcgagcttaattgcgtaatccctgttgtcctccagggtaagctgacacgtctacataactggttttccacaggcatcttcagttattgcttgtcaggtggactgttttggatttaaccatgtaatccatgggaccaattgagagtcagctacttttataggcatcaaagtattctcagacacctttaatatctttatggaaacttaatttttggccttttatcaatatgtcataacagcattctgaagtcagacattgttaaattgagctattaaactaatgagttttatgtaagttatatggtcttaatttggtacttgtaaatagcactagttagactctttagaatactccaagagttagggcagcagagtggagcgatttagaaagaacattttaaaacaatcagttaatttaccatgtaaaattgctgtaaatgataatgtgtacagattttctgttcaaatattcaattgtaaacttcttgttaagactgttacgtttctattgcttttgtatgggatattgcaaaaataaaaaggaaagaaccctc

SEQ ID NO: 12622 - DNA, 1457 bp, Homo sapiens
gctgcatgcagacacgtgccagcgtgaagctggtgaagacctgccaggaggcagccacaggcgagtgccagcagtgttactgccgccccatgtggtgcctcacctgcatgggcaagtggttcgccagccgccaggaccccctgcgccctgacacctggctggccagccgcgtgccctgccccacctgccgcgcacgcttctgcatcctggatgtgtgcaccgtgcgctgagtgggctggggccttgaggtgactctgtgtctccccccaaagccacagggcagggaagggggtggctgggcctcctggctggcaaagggctctacttaaagcacatgatgtagagcaactcgcctctgccctgggtctgcagaaggctgaggacttttggttaaaagcaatcctcatgaaaacaccccaccctgcttggcagccagggtacaagtcctgggcacctcctctttgcctccctcctgcccctttcctgctggtgggggcagatcctgcacacacagacacagcgtctgcccccgagccattccctggagaccctgggtctaccccaggtggtcgtcatctgggccatttgccttacttctctggagcatacccaccctcagttacgtgccagacctggaccgcattctcctgccctgtcctggagctggcccctggctgcctggaggaccctgggtaggtcctgagggtgggatggagaagagggcactgctgtggtgtgggagcagtcctggggcttcctggtggctgtgaccagttgaggggctgttcctgggtggggtggcaatgggaggacaggtcagagcgccctcatttgtggggctgcccctccgggtttctcatcctgtccttggtgcctttttctgcccaacaagtccagggaaggccgaggtctcagactcctgggtaggggtgggggtttgagttgaggaccaaagtgccatagcgacatccagaacacaagcccaccaggggtccagcccaggctacccactcccctagggtctcccaggctcagaaggggatgcacgccccctgtggtcaagcctctggtgggcgtcttgcccagttcctgatggttcaaggggaggggggatgttggccaggccccagggcacagccctgacacaggtgtggctactggaggggccttcatacctgcggccccaaagcccctgggcttggctgtttgaggcagaggtgatggactccgggggcctgacacttgggatttgggaggcttcctagagcgctcagcaggtgaaggcagcaggggccatggccgggagccaggcctagctttgaactgagtttcaagggctgccaaagaggggcagtgggttggggttgtttttactacaaaataagttacttagttttataaagacaaaccgattgtagccaaatgacaccatatttaataaaatttagtctgaagtg

SEQ ID NO: 12623 - DNA, 1391 bp, Homo sapiens
aaccactggcctgggcacctgtcctcctgctgtgccgtcaccctggcaagggccgtgagggcgattgctttgtggtgattctcagtggctcatctaatattttggctggaataaatcagagacttccataatcaagtaaattttaattttcatcattccacggagattcagtctgtctggaatcccggaacccctccacagaatcgtgtctggatccacactgtggtgtggctgccacggcctcctggctccagaggcagctgggctgggccaaggcaggaaggcgcccccatgtgtgtggcctcagtctcagcatctgactgtgctgccctgtccccagggaagagaatgaggaccacgtggactccgcccacacagagctggctgctgtgcccaccctcaggggcgtcaggagacacagcctggcctcctcagggctgaagatgcctccattcgcctgtggaccttgatttctagatttcagtgtcaatagacctgtcttcctgcacactttcagttggatgtgggtcattgtggagacagaggtgtctgccatctctgtggcctctggagagtgacgtctccctgctgggagtgctggttctcacgtgcggtttcccttgtgtatcggagctctttctcggctttctatttcccccagttctttaagcagtcaattggcacagagtttcccacgggggctgcagtggattcactgtgtcagggatgagcctggcttgggggttggtggggctctgaagcgcatttggggttctttgtagcttctaatgtgaggtttgagtccagtgcgcccacagcagcatgcccttctcaccccttgcagtgttgcaggctcaggcccctgggctccttcagcaagcaggctagtcaatgaggcatgaggatccggcacagggcatcccctggggcttcaagggcaatacccccgtgcttagggtttgccctgtgccctctgggtggggtggcctccccgcactcggcagcatggccaggctggccagggcgtgggcaggtggtgtcctgtggcacctccatcctcctgcccagccggctgtgtcacactcatctttttaaggtcaggttggttcctggcaaaaatgtacctccaggggcctccaagcataggatttggaagacaggaacggcacaggcgtccaggaaagcagctgcactcagacaatgccttctccattacttgaagcttctttctgttcagccattaaagaaacttgacaaaataggaacaggagatatttctcaattgtaaacctttgtgcagggacagttggcttccagaggctttcagctttcagttatttgagaagtttgttttagatccttaactaatatttatgaattctctcaccctg

SEQ ID NO: 12624 - DNA, 593 bp, Homo sapiens
aaccacctgcctcacagctggccgtcacttgtgggggtccacgggacgatggctttgccagcttaaagtaaccggatggcggacacctggcccccgaggtcccccggccgccgccctgctgctgacccagcctgttttaagttctggatgcatttctctggggtatttggggcttatttttaaaattttaatatgggttcttttttgtgtgatttaagacactttttggactcaacgttacatttttgaatgtagtaagtaaattaaccaaaaaagttacaacttcctaattttagtgacagctctgcctgttagactcttactttttaaaatcttttctattttccctcgctggggcagtgccctcctacccccagggttgaggggaccaaggtggcacggtggtactgggggtgcggcagggacacccgaccacaccagagcgtgggagacggtgggccttgtcccctgcctgtgcctgcctgggagttttgtattcatcttttgtatagttgtggacatttaagacagtctttgggtacctattttcattgtaaaactatctgaaccattaaagtcgagcttttctaaag

SEQ ID NO: 12625 - DNA, 3111 bp, Homo sapiens
gcccgtgccctctgctccttggcctgcctgcccgccagccacgcgtgtcagccctccagttctccttcagttgacgccagcctctccacaggcccactgctgtgccattctggaagctccagctgctgctgggctgcctggcactgcccgcttgccggtcagggcctgccgagctgcctgccccttccagctgggcagagtcccctgcaaggaggcagggcccagcttccacatccggagccctggtcagcatagccgcccacggtctgttctcagattcctaatcattccagaagtattaaacgtcattgctgcaaacctcggcaggtgccgtgtgaggggcttaatgaccaccacagggagctcagaccccaaccctggatcccaggagaaaggagtggaccgaggaaggaaggaaggcaaggctgtctgtccatccgtccgtctgtccacctacctgtcagtccacataggctcctggcgtggacaaggggtctgtgaagggcgggaactgggtgagcacctggggcaggtgggtggttaaggtccttcccacttcgcaggtgtcagaacctagggctgggctctcggggccaggcaggccagcccagcccacgccgagctgggcagcgtctgctctggtaggactgtcagacgcacacgcgcacgcacctagacacacccactcatgtacatgctcacacatgcagacacacctgggcgtcccgaggtcacatgttctggggatgatggccttcaggggtcatctggcaaacagcccctgggctgtgcctggatccccctctagctcctgctcacccacgcccacccagtagtcctgcctgtctgcacaggagaggggcttctcttcctggctggggctggggtgaactggaggctggttaagttgcagccgctgggtcctcgggggcttactcatctcccttttttaaacaaaaagcaaaaaagtaaaatgctgcactgcccagcagcccggttagggctcctggagccaccttaggaaagggcttctcatgagctctgctgcggcagcttcagctggcagagaggctttcccagaaaaaaaaaaaaaaccatttttaaaaagaagaaagcctaaagactctcggcctagggacgtccgtgtgtgccgcctctgtttcctgtaccagatttttgtattctattttcctagctgttgttgcgtccttgtttgctgaggggtgggagccacccagcgtctcagggacctgtccctccgtcacgtcgtcaaagtgtgccttgtgtcttgtgtcaggccttgcccttcccaccagcatgtccctcgtggctcagggtgccccaggcctgcccagctagtgctgtcctcccatctcctgtgggcagcccctcccggcagccagggcttcctggaggcgatgcagccaggcccctgtgggtggcacggaggggctgtgacctggtccccagtgttgccctccccagtggctggcaggggcctgcttgctcactagagagatggattctcacctgtcacctgactcgagccccctgcttcctggcctaggcgagggttccaggtttcagacactggcagccaatgaagactgtgctcgctgggtggtgcaggcctggcaccaggaggcttgcacccgcctttccttcctgacgtcctctgtccttggggctggcccatagcagtgcctgccgtgcctctggtacatctgtagccaattcccatatcatggggaaaattcgtgtctattttcagtcgtacgcatagacgccccaggatggggggcccactgtggcggaagggggtccctggaaacaactctggcacagaacctgccctgcaggctgtagggggcatggtgcctggagctgaggggcatccgaacgcgttgcgggtggttgtgaggaggcctgtctgcatctccttccggccccactggggtccaggggtgcccagaaaggagcttcccctgcctgcctgagtctgtccccccaggcttcatttcaaacaccgtggcacctccgagcaaggcgggccgtgtgtaaaagcttgcttccccagccagcactgcagggccctgaggtggtcgtgtccctgccctcaattcttgaagcaccagctccctgccccaccctccagtgcctgaggcagctaggggcttctgctctcatctctgaccagcagaatccacccggtgaccagtggtggcccctcagcccaccctcccggcagctcagcctgtggctcttgaggccgtggttcccacgtggactgggaggcagtctcagccacccggggtgctgttcagctgcccctccctgccatcagcaggtgggtgaggggttgcccactgggtgggggcccgtgctaggagtcaccacatgctccaacctcccactgctccctgtcaggggcccaggctgccatcactggaggctgcagggaccaagaggccatcaccgtgtctatagagagcagacagaagcagaacagagcccggggctcctgagcctctgcgtgtgccctcccagcccacaccagtgctctcggccactgagcacccagactcaggcttgggttccccagccttattggaaggcagctcccgcataccaggataacccccgcaaaccacatagcagacccccgccatcctcgcagagtgggagaggctgcagcaaggctttgcctctgcagaccccatcttagtggcacggtgcttgggcctgtgtccccgggtggtggaaccctgtaccggtctgtggccctagggtccctgctctgtctgccccggcccgtgctgtccgctgggtgaggcaggctcccccgtgccctgcctccctctgtcagggaacctgggaccccctccccactgcctgcacagaggaccctgaccctcggccagcagggtggccccaggtccatgttgggcactagggcaggttccgtgccagagtcgggggccacacgagggcctggtgccggtgaggggggcgtgcgctagagggggaaaggggcccccggccacctgtccaccgtgtgggccgtgctgtgtccttatgtcattgtaatataaatacagatttttatatctc

SEQ ID NO: 12626 - DNA, 196 bp, Homo sapiens
ccccaggcaacagtgggaggagagaactggtttccagcagtccattgtgtggccttccccaaggtcaccagctctgtacgccccaggacgcattaaccctttggggctggggtggcccgccatcccctggagtaaatgcctgtgcaaagccctcctcatccttgtctgagtgaattcttcctgtgagtgggaagtg

SEQ ID NO: 12627 - DNA, 3558 bp, Homo sapiens
aaattactgaaaactgaatctttattacgtgtcctcttttatttattagaagactgtgtataataaacactactaaatttttaaaatttgaggtcaatggaacatttaatttgatgaattgaactattatattaatttgtcttttttctcatgtagtacattcagaataccagtgctttttatgacttgagcatgtgtttagtggtacttagtcctggtaattttttacttacagggaaaaagcattattacataatgcaaatattttttaatatagttatctctctcctttttagaaatagaaattttctgccgttaaatttttttttgagatagagtctcactctgtctccaggctggaatgcagtggcacgatcttggctcactgcaacctctgcctcccgggttcaagtgattctcctgcctcagcctcccaagtagctgggactacaggcgcacaccgccacacccagctaatttttttgtattttagtagaaaaggggtttcaccatgttggccaggatggtctcaatctcttgacctcttgatcccctctcccggcctcccaaagtgccggaattacaggcatgagccaccacgctcagccgctattaaatattttaaaatgtgtagaacttctagtcagcatttttaaatctgtagaccttaatatgtgaaatagccaagtcccctcatgtttgactgtcaaataaaattctgctgctcaaattgtattcctccataattccctgctatagacctttaggctgttttaatgtccctacttgtaccacagagtattaggacttccttggcctgcctgcattcattttagagtctgaattctggggactcaaaagtttctacaagacagctgagcagtgctttgactttaatgtgacttacacatcataaatgactttcaaatgaaatttgaatttcaaaattctgtaaaagtggttgctcaaaagatgtatgatactattttaatcagtttaagagcaaaaatgtctaattgtatttaacaatggtatttgggcagccagaaaatattttaagcgttgctctaaaataatttgaagtagctcatctgttattacatcagatgcttcttgagtgcccaatttatacatggcctgtggtaaataccatgtgagctttgtaggaatacctttaagaatattcctcacctgttcgtaatatggaatgccaatctaaaaactacatgttttgggtggtctttatggaattttttagctataaccatcagaaaacaggcatacctagatgacagatgaaccttcttgatttttgaaacccattgaacaaaaatattttgccaattattgtgtttatgttatttaaaattttatgtaaaccttaattttgtagcagtaaattttgtttaagattttgctatcagctccctatcacctgagcaactttttttttgttgtatatgtttttttctattctatttcggaatagagaatttacttaaaatttttattttctccaaaaatgtggaaaatatgtcacctggtttcctggtttatggtagcatattctgtttaaattagtgtcacatatttagatgtgtggccagacgcttgatttattagttaatttttgagacagagtctaactgtgtcactcaggctggagttcagtggaatgatctcggctcactgcaacctccgcctcccaggttcaagtgattctcctgcttcagcctcctgagtagatgggattgtaggcgtgcaccactgcacctggctaatttttgtattttcagtagagacggggtttcaccatgttggtcaggctggtctcaaactcctgacctcaagtgatctacccgccttggccttccatagtgctggcattacaggtgtaagccaccatgcccctgcccagatgcttgatttatactgtccccacccaaaccttgacttgctcagcccagggggccagcagggcagatcaaggcacggatggtagttgtgtgtctgccgtaattacccaagttacttataatcgttgtgttactaggtaggtttatttgaagatttatttatttatttatttattttttattttttgagacggagtttcactcttgttgcccaggctggagtgcagtggcatgatctcagctcactgcaacctctgccttctgggttcacgtgattctcctgcctcaggcctcccgagtagctgggattacaggtgccaccatgcctggttaattttttgtatttttagtagagacggggtttcatcatgttggccaggttggtctcgaactcctgacctcaggtgatccacccgcctcagtctaccaaagtgcagggatcacaggcatgagcttccgcgctcagcctatttgaagatttaataacatttttcaaacctcaggatgtatttgagtagattgcttctaaattggtcacctagaaaataagttatctatttactatgatacctggattaagcctctagctattttgcttttttctttctatctatattattggatgattgatgcctattttctgtggttatgaatatagacattttaaatgaaagttggtatataaatttttgaaaataattgtatttcctgttttatagtcttaggattaatatatgggatttatcttatgttaatcttacatttaggattttgtgaaaatggaaaattatgaggcattggtaggctttgatctctgtaatacaccgctctccagtgttgctcagaagattatgtctgctatgcattcaggtgatttagtggattctaagacttggggaaagagtacagagagtaagtaatttttatgaacctttctttctcttgatactttgaatgttaattgttctaaagactaagaattgaaaatggaatgcatgtagacagatgaagcccagctcccgccccttttacactcattcagtgcagactgagcttctgcttgctaactttcgtgttcccttaaccttcattgctttaaaaatgtaacactctcttccttattccaggtatttctgtcaaacattcccttagaatctggatcaggtattttagtattttcaaaagagatgctttaatcttggttctcaggtcatcaaacctgtacatagtatttgctattttgtgtggtgaacaagagatatgtttttgacaatatgtgtattgtgctgctatagaaatgtaaactcttaggtggcaaggattattggatcagtgtatatggatttatgatgtggtataatagtaaaagcagtggggccgggtgcggtggctcacgcctgtaatcccagcactttgggaggccgaggtcggcgatcatgaggtcaggagatcgagaccatcctggctaacacggtaaaacactgtctctactaaaaatacaaaaaattagctgggagtggtggtaggcgcctgtagtccagctacttgggaggctgaggcaggagaatggcatgaacccaggaggcggggcttgcagtgagctgaggtctccagcgtgggcgacagagtgagactctatctc

SEQ ID NO: 12628 - DNA, 1127 bp, Homo sapiens
cgtggtgccaggggcagccccaacccacccgggccaggaacccccaggaaggtggggccacgctgcaggcaggtctcactgcgtctcatgaggccgctgccgctgctgcaggggcacccagacctccagagcatccagagcctctgtcctgcccacgctagcctccctgcagggaccccgggccggctgcaggggccaacaagaggtcagctttgcccagcaggggacccggaggagcctggtggctgcctcagggcagggtgcctggcggagaaggcctgggccctcccactggtccctcggagatctgctggggctatgggaatcggggcgggtgatggaggtggacaagagtggggccactctgcgcctctgctgttgcggtgaatctggaagccggagcaagggccactccacaggctctttggcacagcagggctccctatgtgcctcccaaacgtcaaatgcaggctacccattctccccatcagctgcccacctcgttccccagccctcacccctcacccctcaccatccttcctcaggacttggctaaacaacatgcatctcatttcttcttggagtggggagatgcgggaagctgacccagtggtcctctaggcaggcagggtgctcctggtgtctgcccaccactgtccccttgctgatggcatgggggtccgaccaggcactgacaccgcaggcagaggttgctcggggccttgggtcgggtttaccaatcagccaggacgcccggggccaccagctcagctaccacttccccttccctctgcaccctctggaaccctggcccaattcctcagaccccagagtggcctgggacccaagctgccgcagctgagtggccccagcggacacctcctcaggcttaaatctcaggcttcacattgcaatgacgattgcagttttatttttggagatgacacacctactgcttcttttctaggataaatctaattactgtttactggtggagtacatatgcatagaaacggcttctgtcggggggagagtatataatggaggaaatattatgtattgagattatatttattttctaaatgctgtaatttgaagccatttccataaatctatttaaggattgc

SEQ ID NO: 12629 - DNA, 597 bp, Homo sapiens
ccgagactcacccgtgcccttgcggcctcctggcccggtgcagctgccctcagggacagggtgggtgctctcagatgccatgggttgagctctactgagagccaaggcccctagaatagttgcggggcactctgatcgttcactttggtccctttggctatggaacaggctgggtcacagggaactgccagtgaggctggaggctggaggtggagatggggtcaggaacatctggcagagggaggtcccagtctgtgtctccatcaggcttaagccagagctatctggtgctggtgtgccagcccctcccccagcctgcctagaaaggggtggctgcctgagggagtcacttgtatggtccccagggtgggagccccatcctgttctatggaataaagcgtcgcctctctgcctcgaaccagtcaaatggagtattgcggctgcacgtcacactagggtggccacccccgccattgcgagccacatgtctgcactgagaaactgcatttcagtagcatttgtcatccagccggaagttaaagcacacttactttattcacctatttttataataaacgttcttgctgctgtgactgc

SEQ ID NO: 12630 - DNA, 250 bp, Homo sapiens
ctccccccacccgctgcctgcggttttgtttctgttaaaacgtcacctgatgaaatagaatgaatcctgaaatgcacctctgggatcgggaatggtctgtgtgttatcagctgcgactggttcactgcgtctggacaagcctcatggggactggggattctggccagtgtaatttctgtcaaccacggacgtttgccttcatgtgtagaatttactgttgttatgcaaattatattttcaattataaatg

SEQ ID NO: 12631 - DNA, 270 bp, Homo sapiens
ctgagccactgtgcccaggctgtgggcaccaggcagagtgggagcctaggtcaggcccctgcccactgcctgacccccaccccccgccagtccagggagaccctgtgggtgggggccggcccctaagcaggaagctcaggcagctcctccagacttacttactccttcagtgactccgagctgcagcactccaaggctgtcagggcttctgtttgttttttaaactatgcaccaggtttctgatgatgaaataaagcacctgtttgtttt

SEQ ID NO: 12632 - DNA, 406 bp, Homo sapiens
aggcattggggagcccagcccggcagggaagaggccagcgtgaaggacctgggctcttggccgtggcatttccgtggacagcccgccgtcagggtggctggggctggcacgggtgtcgaggcaggaaggattgtttctggtgactgcagccgctgccgtcgcgacacagggcttggtggtggtagcatttgggtctgagatcggcccagctctgactgaaggggcttggcttccactcagcatcagcgtggcagtcaccaccccagtgaggacctcgatgtccagctgctgtcaggtctgatagtcctctgctaaaacaacacgatttacataaaaaatcttacacatctgccaccggaaataccatgcacagagtccttaaaaaatagagtgcagtatttaaacc

SEQ ID NO: 12633 - DNA, 715 bp, Homo sapiens
agacagggtcttctatgttgcccaggctgtctttgaactcctgggatcaagtgatcctcctgcctcagccttcgaagtagttgggactacaggcccacgccaccgtgcctggctggacatgtaaatttgaagtgaatggttaaacatccagctagctgaaagcatggcagaccctaacagaaaagctacagtgtgtttttgcagctatgaagtgaatggtttcctggggaaaattgtgactttgtataactgttgttgaaaccagaataaattatatttcacttgcatatgcataaattattaaaattttcagaagtcagtgatacagaagtactattttgcaatgttaatctgtttgagtctttggagaaagtggtttcattgtaggtacatagtgcactgttaatattttaaacaagtagttcactcttccatttaagggatagcagttccttgtataaaatgactggatgtgtataaaggaattatgttgtcatgtgcctttaaccagctttagtaattactataatctcatatttatgatagttttgttaggtgacaggaccaaatgaaaatattttatgttttctcatcactttagattttatcattatgtacattactgggtttttagcatttcctaatgtgaagttttaatcacttttaagtatacatttttttctgtatcatttaaataaaatatttttataacttt

SEQ ID NO: 12634 - DNA, 177 bp, Homo sapiens
acatttgtgtatttaaaaattgaatccattctgctgacttcttcctttcactgctgtttataaaatgtgtaatgaattctaacaactcaaattttgctttttgaagctgtatttttaagttaagaaaatatatttttggtataacttttatgagaaaaataaaatatattctggtcc

SEQ ID NO: 12635 - DNA, 1063 bp, Homo sapiens
ccagggccacgggggcccagcacgagagtcctcatgggcactcacagactgcgtgctttcatgtacttccagtgctggagcatggtatgaccagattttatcacagtgccatttgaagggaaaggagttcagacagacagacgtattccccaaaaagggataccccaggccgatggtgttcagccatttagcagctgaaaaaggaaacagtgcacaccaatgggaggcagcctgcgtagccctcatcaggcaagacagactgaatgcaggagtgggtgattagctgctccttgaacttgaggctgccttggcagcaggggcacagcaggcctcaagagcccctaattgtctcagggttcaaaggaagacactgacctttcccatcccggtagcttcagggaagatcatagttaataacgtctctcaacaaatgattacttctttgtttccttgtggcttcttgtctgtctgagtcaacgaatacacagacttactggattatagaagagaaaattcacatctgccttgttaatctaataaatataattacagccccttaatgtgttgtcaatgagtctaagttgacaaattcagtggcagcccagccacctcctatcaatcaatcagggaagaaatgcaggggagactggggccctcagtgaggggctgcctggcattactcctccaaagactgctgcccccagaacaggcagggggtgtgggagggccagtttcccgccactgggtccaaggagcctttgttcaaaggaagaagtgggccacggaagaacgggcctgcttctctcgtgcctgtgcttctgacctccaggaactgtaaacaggaacacctatgtgtaactgaaggcatgagacatctgtacaggaagcatcccagcgcccacatgggcatgagacagtctgcactgcgcctggtgaaatgcgtgtgtgtacagacagtccactgggcagcacaggtatcctcatgttctttatttgcacagagtgaaatgtcagaagttacatgtaaatgaattcacagtcaataaagtccacgtctacctgg

SEQ ID NO: 12636 - DNA, 562 bp, Homo sapiens
gggaactgagaccagagaaagaacccaagagaactacagttatgtcagctacccagacttaatgggccagagccatgaccctcacaggtcttgtgttagttgtatctgaaactgttatgtatctctctaccttctggaaaacagggctggtattcctacccaggaacctcctttgagcatagagttagcaaccatgcttctcattcccttgactcatgtcttgccaggatggttagatacacagcatgttgatttggtcactaaaaagaagaaaaggactaacaagcttcacttttatgaacaactattttgagaacttgcacaatagtatgtttttattactggtttaatggagtaatggtacttttattctttcttgatagaaacctgcttacatttaaccaagcttctattatgcctttttctaacacagactttcttcactgtctttcatttaaaaagaaattaatgctcttaagatatatattttacgtagtgctgacaggacccactctttcattgaaaggtgatgaaaatcaaataaagaatctcttcacatgag

SEQ ID NO: 12637 - DNA, 421 bp, Homo sapiens
cccaagggaaagacctgcgggagcatctgaagagagaagggatgattttctcctgcccgccggtgtttgtgtgtttataatgcacaactcgcaaatataaattgcacatgcagaaggcacagaccccgtagcgcatgccaacttgcagggactcggtttaatcttgtctcatgaatttccagatggcccactctcttccatatcacaaggacataaacactccttctttcagccccacctccccagggccctggaggagacccccaccctgcaatccacaccccatcctctgctgcagaagctatggtctgtgtggtgacagccagattctctactcttatgttttgtatttgttacatattctatttttataaagggaattttaaaaaataaatgtgttttgcacaaagctgtttattac

SEQ ID NO: 12638 - DNA, 995 bp, Homo sapiens
acgtggatgcgcggaggagctagcctgaaggattctgggaatcatgtccatcccttttcctgtcagtgtttttgaaacccacagttttagttggtgctgatggagggagggggaagtcgaaggatgctctttcccttttctgtttaggaagaagtggtactagtgtggtgtgtttgcttggaaattccttgccccacagttgtgttcatgctgaatccacctcggagcatggtgttttcattcccccttcctagtgaaccacaggttttagcattgtcttgttctgtcccttccacttctaactccactggctccatgattctctgagtggtggttcctttgcaccctgtagatgttctaggatagttgatgcatgttactaaattacgtatgcaagtctgtgagtgcgtctgaggggacatcgccaaggactgactgagacacgatgccgagacctcaagccctgaggggcagtcccaaaacccttacagtgaagatgtttactcattgcccccacctctggtccacactagaaagaagctcgccccacctccacctgtgagatccgtgaattctcggaatggcaggggaagccttgcactaggttgcagagaagcatcctccacatcctgtgtcagaaaccctggtctccgtggcacttgtaactcaccgtgctgtcttctggtctgtgtgtgttcttcaagccagctctaggcttcaggccgagccaggttcacactcagaaagaggtctccccatccccattcggggctgacgatggggggctgatggctgcccctgcgtggcctgagtcctggtccctctgaggcagttgacggggcagtcagatttttaaagttttgtacaaagttttcctttgtaatcactcccatttttacttaacaaccaacttgttgtggctcttatttctgaattcaaagcttgtgaaaaaataaagaaaatgaactgcccactgacctgactagggcactttc

SEQ ID NO: 12639 - DNA, 2257 bp, Homo sapiens
tagggccactcattctccggagccatttcatagactccataaatatttgaagcagaaccttcagagagtgctttaagaaattggtagcaatcagagccctcatttagtggcaagtggttttgccttcggctttgggattttgtgttcattgtcagagcttgagagaaacgctggcctgtgcctggcaaattctgaggagtttggctttggcaatgtcaaggcagcataggaaatatttactgtaccaaaacctattgaatgattggtccagaggttctcaactgggcacagttttagccccccagggaaaatctggccatgtctggagacatttttggttgtcacagctgggacactgctactggcatctggtgggtagaggccagggatgctatgaaatgtcctacaatacccaggccagcctcctacagcaaagaattacagcccgagggtcgccagtgctgaggtcgagagtccaggacggatctcatagctcccaacaagatcagccatggagaattgttttgttttgttttttctctgcccccggggtccttcccatgttttaaaagattttttgtctactaagtgaaacgcctaagtcaccatatattttacatttaaaaacattaaaactaaccagaactttctaatcagtccatccactccaaaaacgtctgttgatatccactggatgccaggcaatgtggcatgaaggagaagagacaagtcaatgttgatcctggcgccggggacctcacaggacaatgggagagatactcctgtgagtaaatcagcacgcacgcaagtgtcacatgtgccctgagcaacgggatgaaggtaagggtccgttctacttggcttgggacaactggaagtcagccacaaaggaatggctgggcagtgtccggtgggtgaggtgggaagggtgctgctgtacgagggaacgcatgtgcaaaggccctgaggcataaaactgaactgtggatgtgcccctggaggggaagtgggcaaagcatgctcttgtcaagccagctgcaagcagtcactgcatcgttcccatccagcaccccttccttccaccgagaacagagactcgtgccccgaatcaggtgggcgacccaggagaagagcacttctatcctgagggcagccccccaaaaagagagtctagggggcttggacgacacacaccagaccctgacccaggctcacccaccagagatgtcacctctctctttgggaaggggctgaggaggggcttaagggaaaggccaaagccgctacctgtccaattctgtcctctcctggaagtgactgtcccttcatggaaggacaaacaaggacaaggacaaggaactgacggctccccaggaagtgtcaaagtgtatagatttattttaacgtagtttagctttttgtttgaaatgaaaattacacagagttcccgtagactcttccccgggcttcccttgatgttaacatctcatgtgacttatgttgtacaattatagaaactagtgggttttatttcgaggaaaattggggagccattgagacgtaagaaaggcagcctcagcacattgagttccaccctttaaattcgtttatggggttttctgatgggttagcacattcatccatgtattcctggattgatttacccacagatctgtctatttatttatttattcaatatgcatttagtgactgctgtgcgagtgtctggctggatgctgctggggaagaagtgaagatgatgctgtccacctaggttttcagggacccccctggagaccctgtggccccgttaccacccctcaagaatccccagattggaaaccactgcggtgatccctttgttggttcaaccaccccagggcttccctataatttccaagcaggaagtgacctgcagcactggtttggtgatccgccttctgcctccctctgtattttgggacaatgtcattagctttgagcatcaggaacatgacagagagaggacagaaacccggtgcagccgaggacagccagctgagcccttgctgagccagcgagatgcagcgtggtgccaccacatctggtctccaggagtcccaggagctcagacgtccgtcgtcttgtgacttcatgctcccctctgccgcgctcacgtgctgggcctgggcagaaaggcaacccaggaaatccattaaagcaagccaagacgacctttgcagcgtaacccaacgattccctaataaatcatgtttcc

SEQ ID NO: 12640 - DNA, 220 bp, Homo sapiens
agctctcagatgttttcaagcatgtgtaaaggggacatgttatagtttctttctttctttctttctttttttttttaaatctgtatgttcagaataatttcactgccttaatgtgttctggagagcgtgctcacccaagtctatggacatgtaccagagctaatatatttattgcctatggcttgttttgcacttaataaaataatttgtttttgcaata

SEQ ID NO: 12641 - DNA, 2723 bp, Homo sapiens
gtatgtgcagttcccggcccctgccacccagcctcatgcaagtcatccccgacatgaccttcacgaccgcaatgcaaggaggggaagaaagtcacagcactgatgaggacagctgcagaggtggcagtgtgtggacacaggaagtttgggccccctccctgccccagctttcctaggccagaattgtgtttggcagtaattgtctgtttaaaaaaataaaaaggaaaggaagcgttcaccgccacaaatcataaaatggacatgactgtggagtcttacagttcagggttctttcattcacgtcccttcctgtctcggtctgcggtctttaccacatcaataggactttttatgcgtccgggttaatttttcactccagtgcgtcctgttgcagggaccggagctgatgggagctgcttctcccccatgcctcactggtcccagatcagggctccagggacagatgatgagtctcaaacgagccagccaggggttcttttggttataaatggggcaattcgccctgtctcagagctgatgacctcaccgttgttttttggatggtgaattcatgctgagaatttgcagatgcaagctcctctcctaggtcttctgaatgtcttgaaacatcccaggtcccaggtctggtgcggtttcccgagaggagcggagtggggtttgtcttctgtgtgcctgtgtcctcatctgattcacctgccatttgctgagcctctgctgtgtaccaggcgtggtgctcagccctagaggcagttgacttaccctctgcagccctccctgccgcctcacccttcagcattcactgggcaccttcccggagcggacactgactcccatgcacgattttttggaatcttcctcctgactgtgaggtgggtgttcattcatttcctccataaacaccaacttctcgaagcgtgccaggctctgggctggatgctggggataagcgggaacccttaggatcccctctgtccacgagaagaagctgaggctctgagcggatgcacaggtcacccatggcaggtgccgtgcagtggtgtcaggaacccgtccgggtcttcacacaaggttctctccagtccatctcgtgggcggctcatgttagagcgacattcaaatggaaggtttggaaaggaatgcctctgtcttgtgaagtaggacatggcagacttggcgacgacaagggtccaggagaactgagacgcaggatggaagacagagaagaccccccggagctcctcgctctgcttggtggcttcaggagtgtggccctccccaggactccacttcatcctgggcttgcaccctccttgagccaatgcactgaactgcctttgaaaggaaattgcatgttctgaccattttaggatacctttactttaaggaccacacagtcccagaggacacatccctcgggaactctgcccctctgacaatgagggccacagagaaggtggtgtttccatggtagatgctcctgttctggtgataccaaacctgcccacccctctgagtcgtctttgctcatggacttgcagcagagccacgtagtttggcattttgattcagaaagtggggagcagagacccagccaaatccaaactttttttttggttttgttttgttttgttttttacaagatataacataacccaggaaacagacccagctgaggttattctcagtggattacagtatacttttgtgtgtgtaaaagcacaaagtgcatgtgtactcacttctggccatataacatttacacagggaaatggatcattgatttttttttaatcaacgtgaatgaagaatgtttgtttatatatcactataaaatccagttgacctggacagtattatatgtacatatctattctaattaaatttaacaatcaaaggattggattacttttttcccccttgtaaagaggttcgagaatgtggtcaattgtatagatagcgtgttaaagccaaaacccagctctgagggccttacccattacttggatatttgctacgatccatctccctttgtgagtcaaatgttaagagaagaaacttgtatttgcagctagaggttactgtcacatcatagatttaacatttaccatcttcaaagtacaaatcttacatgtccttcaaaaggaggtcttaatacagttcctagttccttacttctgttttaaactttgggtaccaaaccaaaaagaagaaaaaagaaaggaaaagatcttctttgaagaaaagtatgtctctggatccctggaaaataatgatgtccaaagcaaattgtgaagatcaaatgtgtgttaagaaaaggtgtcgaggggagggacaaaaccagaaacggtggaaggaccagtgtaatagtcacagacttgcatcctggctctgcttacatttcctggtactctcgaatgtacgggcgttcacatagtcattgtgaagttgttggggtttttttggttttgtttttaatttagctcttctctgaggacgaagctgttggtggtggtggtggtgggggtggtggtgtgggatacatggtggtcaagttgtcagccctgatcagtttggactctgtaactcataggtgcattctttttttctttggtgtctcacaaattacccaattgttgaataaaactataaatatgttaataccagctttttccaataaaataacaaatgttacatcaaaaacg

SEQ ID NO: 12642 - DNA, 1538 bp, Homo sapiens
aggaggagatcggtggtaaggtcggaaactagctggagcttggatgaaactcagtagtcgccctaagcatggttaaaccgcgccctgtaaaaagttatgttctaggcctgcatcccccattttattgcatcaaaaattgagcattgggaacaaagttggggtcaagaggaaagaatgcgtgctggttttgttaggcgttagtataccgtttttttgtggcctctccctcccacgctgttaattagagaaagataacagtaacttcggttttgtttttgtgaaacataaaagtcaattctaatagggcagtcgccagaagtagacctgtctaggcactaagggagtttggggaaagccaaagaagacctaggccatagagcacagtggaacgcaggctgagaacgcagggaaggagaaataaagagtaaagccagaggccattacctgaaatttccagattgttctatgagacaggtatgtcagaggaccgtgtctcaaagaagtggcattcttctgggtggttcacatttatttttaacatcaggatatggaactttgagagtcaatgtcttcatggtaaatttctcccaattgtgctttaggttcacagctgaggactgtagtcaactggtaaggatgaactgacaccttgaggaaactgaaacagcttgtcattttctctgttttgtttttgtatgttttttaccccgatgtaacagtctcccttatggtcagtgattgatgacctcgatatggatttagattatcaaatgtgtttggttttggaaatataacttttgtcaaagaaatactctcagaagagaaatggggcttaattaagttgtttttgtggtcacgtttattcttgttacttcgctgtgtttttgaaatgttgggcatggcctcgtattttgctgttacctttgtgacctgattgttttttggaacacgtcaagacgtgggatcagaatcttccaactttagaggtgcaatggaagacactacgctacttggttgagcctggtgaagaatgtattaatgagactgctttgcataaaactgggaagaaagagaagacagttggagatggaagatggttttgtatatattttggaactttagttcctctgtgagacgaaagaggagagctatgttttgtggcacattgtctgatatatattgtgtaacctgtcaggtgagttgatttagacaacatagctgaccttttatgacaaggcagtttgaatagggactattgtaataccctcacacattataggggcatcagagaatggcatggaagagacagtctacagagagctttaagaggccggagaaaggaaaagacattatcagggcctggaaagtctcttccagttcatcagggtagtagacctgtcagattggaggtcaaagtcaaaagtataataagtgttaatttgccttgaaaaacaaagacctaaaaagccttttttaagaaataaattttttgttcacatgaccaaagcccctcctgtgtgtgttaataaaagaatcat

SEQ ID NO: 12643 - DNA, 421 bp, Homo sapiens
ccagatcgatgagaagagtctgcaaaacacttcatcctcaggacgtgctgtcctgctttattttaccttcgttgctattaaaaaggcctgtgtcatttgggacgggactctattttgtatttatctcaaaacgttttagcttccaaatcagtgctgagcccaaacctgggttaggagttttatctgggattgagcaaaaataggtccagaaaagcaaacaaagggtgatttaatgtaactgacttctcatgaaaaactgtcaaaagtctcaagtctgagcaattctataatttcagtgatgtaatactaaagagtactgttcctctttcatatgtaggagggtttaaaagttcagcgaatgggcaaggtacaaaaaaaccctgtgcattaagctaattattaaattctttggatttattaa

SEQ ID NO: 12644 - DNA, 809 bp, Homo sapiens
ctgctgttgatggggtgggtgtttttaaactcacttgatgtaactctcaaggctggttcattgtttctcatctatgagtacgtgtgaccttttcccaaaccttattggaaaccttaagtaaccagtggctaaacagaaaagccggttgcccaactgcattaatgaactctaattcgggagtctgttcccttttagtgccacgcgttgaatagttccacatactttcagaagagctcagcagggccctgcctggtctcccgagcatcatgagtaacgtgtctgctcagactctgctgacaccaaagtattttaaacaaataaaaggtcttggggaattctgtttggctacctgggcacgccagtctgcaccatgtgtccctgcggcgcatgagtgactggcgtatttagcccgtcacatttcattcgctgaaggaaaggcaagagagttgaaacatttttcttacttaaaaaaaatgatctttgtgaagaacatagtgagttcgtttgtcttcagtcaacagcggctgaaactgaccactgagaaatgggtgtgggcactgacagttctcccccattatttggccaggaattgagcttggcttggcaaagttccttttaccctgttctgttcatctaaatgcagacatatttaaatcatattcaactagttactaatgacctcaagttgtattccctggcaaaatggactttctcaaaataggactgcacgcttggtgtactttaaatgttaatgtttaatttaaaatttttatttaagaggattaaagccctaatgtttattttcctac

SEQ ID NO: 12645 - DNA, 5052 bp, Homo sapiens
gggacagcagcaccactccagcctcagagactgcacacccccttgcctgtatcctcatctgtgtgacggcaggaagctctgcccagagtggcctcagctgcacgactccagaggctccacgactgagctctgaggccagtgcctgtcccccaggcccacttgtattctttctactgtaaaatggcgcctttaaaaaagatgtaagactttggttcccaactttgttaaaaaacaaaaaaagtgatggaaaggtgtttgaaaggatgctatcaggcgaagtgacatctttctaaccagataggccattgctttcaccgattccaacccagccctggactgaggatggatggttccatgagcccccagatgaaaacctggattcgacagggaagagcttggatccccggctgccccgggcatgagtgtggctggccatgggcactgggctcgccttgcacgcccaccaggagggccaggggcatacgcagtcctgacgtggactttgtgtcttggcgtaccctctccacgtgcccgtccccctcgtcatcagaggtaaaggcatgagaaaatcgcgctgtgaaacgttttttaccttttattattattttttggacagatgcttttgtcaccaagacatgaaaagctgccattcttcttaacctgttttttaggaatgtctttttactgtgtgtcacacttagatcaaggagttttcagaggttccttattttattaattaattatttgtgctgcttttgacaggtagcagagggttttaatacttcactaacagtacaccctcctcccccttgggctagcatccccagcccttaatccacgtcggagccggcaggtgcttctcacaccaggagcctctgggggcaggggctggctcctcgccgctgtacaggacgtttactgctgcttggggccagggcagtcctttgaaagggaagcaagttccggaatttgttcgctcatggaactataacaccttagagcaagaggcaggaattccagggcctcctgcccctccccttcctccagcttgtcaagttaaaccactaatgtgttggtgggcctggccgtgctgcctctcctgagtagggtgggtgcaagtagggcctctttcccagctttcttgcttgccttctgtgcaatatttcttggagaatttggatgcctaaggcataaaggaaaaaaacagagttcatagtttgagctggtatttaccccctgggtttaaaaatcagattaacttcttggtctcccggaggctgctgtcaggaattctccagtacgggaagatgcagtcacttatgacgaaataagtcacccctgaacgcctccgcaggcagattcatggagaccagtcccagtagcaaccgccccttccccaagcatagaatacagaggtgccatacttggtgtaagccttccttctgtccactgtccagaatgtcctttttcacacagaggaagagatggcgggaaaacactgactgactccttgggtttcccccagacatactttcagagcgctagctgtgtggtgcacgggactttacagttaggattcatgtttaaggtggtggcgcttgaggcctgcaagggccacgttggattactgaagcggaaagcggtctcccatgtataagaaaaagttttacaacacgaattggaagctgcttgagtccacctgaacttgaattgattgcaaagccatctgctgggaacggttttgggttcctgagccatcagccagcctttctttcccctctgatgcacgttcctcccggcctagtccgtggaggcccatcacaccagcatccgtgacgccagcttcccactaggacatccaggcaggtcgggcggggacgccacacacctcagggccgtccgctgcattgccatagaggagccctccctccagtggtcacttcccaccattgcaggcagacttcccaccattgcaggcagctgggcccacttcatatcacacaaaatgaattttctataaagggaaaaaagtttgctcctccatagatttttgctgccttcgggtcaaatagtttccctggttgacactcttgggccactctgattggcagcctgctttgccaaagagaactgtgtgaggttttggtggttagtaagagaagggggagatggccagcctgaagtcacggtcctggcccagcacaggtgggcagcagcgagctggcaggtgaagtgtgagcagcacgcaaagtgtcacgtgggccttagccgtcacccaccagcttcctcaccaggcaaggaggccccggagccttagcagggacttgcccaacggcacagctgattggtgctcgactcccagcatgcatattttgttgtaaaaacccaggtttgtaattcacatccacaaccctaagccttttaaagcggaggcaaacgttaacaaaccccatcgtggtccatggagcctttcaaaatgggtgccctggaggggcctgacagtgggttccttccatggcggatactcccttgaaatttcacattccatcaaagtttaaagcatttacttcagaataagttatttatgtgtatatgttcaataaatatagtttttaatttatatctgtacatattagacacacgcgagccatcttgccagaattctgacagtgatgtcattttattcccctcccaaaacatgccccaggaacaagcaccccttgcctctgtggcagctgcgagtgtgtctgatttcataacgaagccaggctgagggcaagaggcccgacaggcaggccagggtccccggagaagccggatttcttcgcaatgtcactggtacttagcagatggtcgtgttcacaggggctagccacctgtactacggtgccgaccgcaatgcgaggaatgtggtggccacgcgatggagctggccggaggacaggtcaggtgagggggccgacccctgcggggctcagggctccttccattctaaccttgagccacagtgtcactcttcagggctctgctcctggctctattttgttaaggtgtcatcagccttcaacctccatttatatatttttataatgttaagccactgaccaactttttcatagaaacaactatcagattcgagggctccctttgtccccctgacctgggcacaggcatgggcgatggctccctcttcccagaatctgcggggaactggggcaaggcccatctgtctgcaaggctggtagctctctccctcggcttccagagtccacggcagttgcaaggtaaccagtgtggatctgctgagtcaccccaggcaccagacttaccccaggagcatgggccactgtccatggggccttccttgagaccttcccttggggctggcgggcggcggcttaccagctgggtcagtcccatctcgcccctctgtgcctatgccctggcgttgccaggcttaaccttcccctgtatcttactcatcccagaattattactggccatttctaaatagacaaaaactaccctaaaatgtggagatttactccttttgaaaagtctgtttcaaaaagtgtggcctcagctctggaggccacccccaggaaggagtttgaggttcattgtcattatggccacagtttggtgcttgtgcacgggactcaaagggcagcgtcgaagctggggttaggtgtagggttgtgagcaaagctcccctgtttgtggccacaccttccctttccaaaaaggctattaattctactcacccactatttggggggatgtaaattttgcccacagactttgccacccaggtgaggtgctgtgttcatgcacggaactgatgtcattagacaccatccaaggatgggcagcctgcagtgtggccggcgactgccatccagagaaaaggcaccttgtgccacagggcggggccgacaccctgagctcacaggtggcccctgcattcaggtggatgtccatccttgaaacagcctcttctgggaacacagcactggaggtctccaggcatcagggttggccggcagggtgccctgcagcttacataaaggtcgtggcaatgtttcaatgttaaactaaactattgccttcctcttacttttcctaaaatgattttctaatgggaacagtcacttcaagttcatgacatagtttgaaggaggataattcattttttcctggttgtcactgtcttcttatccccttggtgggctgggttcatactgtgaaataaactaaaatgaaaccaaaacgttcctgccgtaaatacgtggcacagcactgcagaaaaagcagtcacctctattcgtgagtccccaagccatagcagggcgtctgtaaaagaagggaaactgcacccaggaagtggtgggcgtcagacgcatcctttcgcccgtagttcatgaaatagttccggctttggtcttccagaaaatctcaacttcaccgtgcacaagtgttaccgggtctttttagtgtagccatggaagatactttcaaaaggacatcttcagatcataagtcttaggaccaaaggtgtttttaatgagataatctttttgattttctaacaagaaaggaaatattcactttacattttaacatcaacttttaagtgatattcagaattaattgaccatggtgatacgttgtaaaatgttttcatattaagaatgtaattatttccttattgtattttttaaaagctaaagtcatatttaaaattctctttgaaagaaacaggcaaagaaacagcaaagatttttttaaattaaatatgttagtagtgcccacttcaaatgactgtaaatatattttcactgtttctcaatgtatttaattcataaagtaaaaattttatgaaaagaaacttgcaaggaaaatcctagttttcagtccactcgccccactttgtagtagcttcactgaatttcctgctttcctggttgaattttctactgtttcacgtggtgtaaccctagactggcgcccttggcgtgcccctttgtgtatgaataaacttctctcccccag

SEQ ID NO: 12646 - DNA, 1679 bp, Homo sapiens
cggctgccagcctgccccactggtgtgtgccgggcgccgaggccaggggcccctggcgagaaccgcacacacccctcccacacaccttgctctggcttctctgtgtccatggggtgggcgggagggggtcccccagcaggtgcggcccctgcacctgccggcgacactcctgccggtagtttagggccgagacggctagcttcacgccacccttccccgctgtggcttggtgtcagggagaggctgtagagtggctgtgtcgggcatcagatggagcacacaggtggctgcagcccagcccaccttcccagcgttctcgaggtgccctggccccggtgctgggcacgtgggggacagaggtggccgggacgtgagctgtgaggcttgttgatgatggttgctgacaccatcatcgggggtgggcacacggcccttcggagcctgggcagcctggcctcacaggcagactcgcagacggggcagtgagcgtctgggacagtgccaagagtggggtgtgtgatttttgcaggcgtctgtgatgggtctctttagggacaaatgtcaacaagggacaagacagggcaccttccgccagcgcccctccatgcgctgcgttcctcctccagatcgacccctagatgcctacacaatatctttaaagtaacacagaagtttttattttattaaaaagtatagcctacttaaacgcgagatgacatatatagagtttaattttacggtccctccgcaggggagcggcctccagccttattctccaccgctcggatctgtgtggtttcagtctgttcttggtgtggtcctcatacacagagctccctgtctagtttcttttctttttcttttttctttttctcgtcacacaggtaaccttaaagacagacccctctaaagaacgctttgtaaatacatgtgaggtatagccaccactgttttccttgctgttatttttccaagtcttggggagaaaacatcctcctctgatggccaaagccctggaatcaagggtttccacgtaccctgcctaatacccgacgtagctcttgatgcaccgtccttgtgctgtggctggcggtgtctcagcctgaaacataaaccccacatgccccaggagcgatgtgctccctgaaacagacaaccacacgctgttggggagagaaggatggagataggatggagataggatggagatgtggctcttctcatctttgaagccagcagggcatcccggagcaggaggctggccgggctccccaagcgaaggcgttggtgtctgtcattaggtgtgtgttagggtgcagcaccggccgtcacaggatgctgataagcgcgctgagaggtggatgaaacaccaaagtctgtttccccgtccgcagtgggtgttgcctctttgtgtgtgtcccgatgttcctgcctgtgagtcggccttactccgtttccttagcgcccatgacacgccaagtcccgtttcgcactcggcttctcacccgcccagctcggctagggagggggagtttttagcacctaatatgcttcctgccattgcgcaatctgagcctgagcaactggaaacccccatttctcattagtgcaatgtcatatctgatcccaggaagcctggaaaataaaagacgatgcattataacttgcggaagtacaag

SEQ ID NO: 12647 - DNA, 679 bp, Homo sapiens
tgggactggcacacattcagccaagtctaatgaaacgaagggaactaatcagacgtggacctcaacttctgattccagaacacgccggagattgctgctgctttctgagcccgcacctgtgcgcctaaactgctgattggcctcaactgcccaggcggacgggagggaggcacccggccggctggactaatctgggatcgcggtgatttgcagcgtggaaaagaaatgcagatgatcatgtctacctgatgcgccgtgggttttttgataattagaatttcgcacattcagttttcagggttcagctcctttctctaaagtaaacagcccattgtcagggatcttctggtcagacaacctgtgattcatctagattttttaccgagctccacttcattgagaagtcaatgatgccagtctggttctttgtcaactctccctcggctttgtcacataattgaattatgtcataaccttattaatttgcacatagatcatctgaatgtcgtggtttaagacttaaggaggaacatctgtttgattactttcttttgtggaactggaaatttccatcgaggaaatgtttttttaaaaagtctaatgatttgaatgggcaattcagtctccaaccgcccccctccccctgccgccagttatatacaaatcactttattggtaa

SEQ ID NO: 12648 - DNA, 171 bp, Homo sapiens
caagtttcctcctccacgttggacaattatgtcaaaaacaggattgtctacatggatgatctcacttttcaggaaacttaaaatttacccattattgggaagcttaaatgaattgaagctatgcaagtcttttatattattaaatatttaaaagtaaacctgtactaatct

SEQ ID NO: 12649 - DNA, 1038 bp, Homo sapiens
ggagccccacccccgcctctggatggaccgaatcagggactagagtttaactgcagcggaacatgtcatttctctatttctgtgacgcgcccccatgcccccaccccaccacaagaggcaggagggcccagtcatgaccctcgtctctgcagggtgtctgtacacgttcttctgaaagctttagacagtaacagtttgcacatgaaaaataaagcgagcacctaaacaatgtgtggagcataactaaaacccacagcccaaccaaaccttgagaatgcgaaacattccagaggcagtagcctccaaagcacacagagcccctggccccgccgcggctctcactatctgtcaggggaggttgtacaggtgaatgagccggggggctcatgttcctgcctgcagaacatttctgtactagtgagaagagggaatatgcattgcagttcagcaaagccggaattctgtgttgaacagatgtctgtctccctagtgtgtgactcacaccttgtggctgccttcagagcgccacctccagatcagatggggacacacaacccctggatatgtttcattgtcagattttgtgcttgattttaagaatggaattgtgggtatctttcctttttttttaatgtatcttaactgttgcctgtcagtgtttacaaactagtgcgttgacggcaccgtgtccaagtttttagaacccttgttagccagaccgaggtgtcctggtcaccgtttcaccatcatgctttgatgttcccctgtctttccctcttctgctctcaagagcaaaggttaatttaaggacaaagatgaagtcactgtaaactaatctgtcattgtttttaccttccttttctttttcagtgcagaaattaaaagtaagtataaagcaccgtgattgggagtgtttttgcgtgtgtcggaatcactggtaaatgttggctgagaacaatccctccccttgcacttgtgaaaacactttgagcgctttaagagattagcctgagaaataattaaatatcttttctcttc

SEQ ID NO: 12650 - DNA, 252 bp, Homo sapiens
cctggtctttgtgttatctttggtttactggattcagcgcttccattgttttcattgatttcaaaagtttattttctgtgccttcaagggacaacttttttaactttggagaaaagaaaaacactctataacagagagtggaaaatcactcacggttttgaaagttcaaaccacagagaaaatatttataacatgcaaaaaataaaaacattctagtaactggccactggaaaataaataaaaataaaaact

SEQ ID NO: 12651 - DNA, 3223 bp, Homo sapiens
gtaaacagttactctttaaagcaagttatcttttagtttattctggtttggagtccctccaccaagattcagtagaagaaatacagactgtagaaatgagaggactgctaattcttcagaactgtaggaatattgggagctaggagtctgaacctgaagtatgtgattggaccccagaatgtatttgaaggctctgaaattgtacatgcaaattggtacatatgcatttttctggagagagcctgtgaaactgaacagattttcagtgggatctgagacttttctttgtttagcaccccgttttctgagtacatactgatctttcataatccattcagaggggcagattgagaatgttttacacatgctcttcatataaatgctacagaaaaacctttgttttggtgtgcacatccattttgtttttgctttaatttgtgttctgagtatttggtgcacaatggaaattatattttctactttactgtcttcaatttggttatagagaaatggccattcttttactccctccctggttttgtaatactcccgagtgttccgtatagcacaaagagttttgcttttactggccattttaaagaatgttttcaactgcttgcctgaatttactcctttcacagcaagtgttagaagaaagataacattttcaaatacttagcttttgctttctttaaaatacattggtttatgacatatgggaagggaacgtacctttttgcaaagacaaaaagagattacaaaaggaaaatatctaaaactattttctctttgcccttaccactcccagaaacataagtgaccaatttaaaatgctagggaacaggcttacaacataggtaaaactcgcaaacacagttcaaggtaggctcataaagttgtgaaaagggtttcatatgccctttagttttcatttgggattcatccaaagaccatgggtggatgctgtcttctctcttcttgatccctttgattcatggacactagactccctttgccatttcttctgaaccggccctcctgtggactagcacaacttccttgcccactgtttcttcctttctgtgcctttgagaccccttaaggttttccctcatgcgattactagaaaatggcaggaatcaacaaaatggagacctcccactgtttttgctaaagttacaggaacacgatccctagttttcattgatagtaacgctgtttctaatttgtcttaaccacattcatgcttaccctgctgctcagctttctcagggaagcaactccaggaacactccttccactcccctctctaccaacagatgtcaggactgtcatttatctacacatttgtgttctttagaaaaaggcccaccccctgcacaagcacagcctcttgggcagataggtggctgggtcagtgcttaagacaggattctagtcttcacttgcctgtgcagctgggcgctgaccttccaggtagagcacagatggcacaaccccgaggcagccccaacttgcatttccctccctccaggggctattcctgtcttaggcgatttgtggggtgcagtgaatgaaactaaagagttgttgcacctgaaaaagacaccagtgattgtttattgggtagtcgattggagactttgatttttttttttttttttcacatgggaaagtcttagattccagtagatggaattgcaatcctttgcagtttgttctcattacagataatcaacatttcttttgtataattcaatacatgatcatcaagttaattggtaaatttttattgaaatttaaaacttgcatttttatatatgtgtatgtgtacacataaaaatattttttaccatatgaaaattgcagtagctaattttctgatttcctattttataatgatacatgggctggaaaaatgtagaacgtttttatattctagaaatttattttggaagtacatttttataagggtctaatctcacttttggaaaatgaaagcacaggaatgatggggtctggtttatgtgaacaagtgagtagaaacccctttggatcattttattactgcatttttatttggtgctttttaggaagtagatctttggtaccacttcactacgtagagcattcgaagttttatccatgttatatattgtactcctgtggcatgaaaaatagctcccaagatatagagaggagaggagtgaagaaaaggctgtggtttttttttgttttgttttgtttgccacttttttatctcctattcctcaccacatagtgctttttcctgaaaagctggactgagaattggccttgaatcaggtcagagtgttaactgtcaacatgaagtattttcacttcgcagcatcaactttcaagcataagtaaaaacacaacttgcatactttgatggagcttaattgtgtgagtagaatatgtagcaaagctttttaggattttcagaactagaatactttttaaggaattaaaagtgtttctggaagtcaaaaatgggaaagcaaaaagtagctgtcctccctaaagagctttagaagatagcttaacctgtaggtacatgttatgaaataaacacatttctaacaatacaagggagtaggggcagacctgtgttgagtatttgtgtgggttcttaattttgaaggacctccaatcactacattttgttaatactgccaataaaatcattttcaacttattttttaaagtaggttttcttactttggtggaccagaagtgagagattgttatatttaggatataggcaaatacagtaaaagttaaaaaaaaaaaacctgacccaaagtatactctgatagactatattatattcaattttgtatccccagtcgagaacatcttgtaagccttcattaagggccacctgctgtctgttgaactagactgaacaaaatatattttctcacaagctccatccctttttctttaggacatgttatatataatccatctcagaagttgaagatgtgatgttgctcggcctttggaataatttttaaatctgtaaatgtctatatgagcagaaacaaaacattgtgtaacatgttttaagcattattgtaattcctgtgttaacagtttgtgtgtctgctgctctggttttgaaacatgtttgtatatagatacaggagttggcataaattttgttaaataaagcaacaaaaattttctttgccctttg

SEQ ID NO: 12652 - DNA, 717 bp, Homo sapiens
tttgcaataagctaagctcagaaactttcctactgtaagttctggtgtacatctgaggggaaaaagaattttaaaaaagcatttaaggtataatttatttgtaaaatccataaagtacttctgtacagtattagattcacaattgccatatatactagttatatttttctacttgttaaatggagggcattttgtattgtttttcatggttgttaacattgtgtaatatgtctctatatgaaggaactaaactatttcactgaaaaaaaaaaaaagattttttctggagacgctatgtttttttgaatataattaacttgcccccaactcaaaatagctgtctgtgttgcaatcattgcaaaatctaaattcttttgttacttaaaaaaacatgtttttcatggctattacaatcctctctctcccctctcctttctgcattgctctttttaatttttaatgtctcattgtgatcatcagatttatttttacttggattgtaagatttatctcctcggcgattccttgtcatttttggaggtcacagttttactcattcccatgtgtaaacttcaagtaaacaaagcaatattcaggatggagaagcagttagtgactggctagaggtctcttgggatccatcttgacctcaaagaatatttgcacatgcttctgatctcagcagttataataaagaggattaaacccttggccttc

SEQ ID NO: 12653 - DNA, 892 bp, Homo sapiens
agggtggtgaaggcagatattgtaaactacaaccaggaacctatgtcaaggactgttaaccctcctagaagctctatgtgtgcagttcagtgagcgcatttttcttttgtgttgatagttctggctgcccttcacctctgggtgggcccgaggacttctaggaacttgttttatcagtgaccatctctgtagttcagttaacactttactcccaacttgcttcatcattgctattgcctcacagtggcaggcagctccttggatttgaaagaattcaactttgggaccacacactttgaattcaaaatggaaaacccattccctggaattagactgcttcattgcaaaagaatgatgttgtttctttgtatgtccttgcttcttttttcattgatgtaaatttttttaacttaatatgaaaactctccaagtcttgatcatcagccaggattttgccacagcaatttcattctcttatcggaacttgtatgtgtcaaagtatacttcagagtgcaaacattaagcaagtaatatattttacctacagatacttatgaagacattctttcgctatcgtgagtaaaagtatataaagctgtttctaactgaaaatgcttgaaataagcctgtaatagaaatattttttcattttttaaaaaagggcctaaattgtttatattgtagtttgtaactcacaaagtaatatttgatattgtatttttattactgtatcgttgtcgttatgtattgtgtaatactcaggtttgaaggctttctgaattctgataaatgttcagctgatgctccacgtggaatttctcttgcaaactgcataagagtactcccgagaatgagttatgacattgtggatcagactgtacctgatgttcag

SEQ ID NO: 12654 - DNA, 1163 bp, Homo sapiens
acccgcttgggctgaggcagcgagtgattcccgcgctccggctccggaccggcgctgacagctgtaggctgtagcctgcacggggcgccccgccaaggaggcacctggaggtgaaacccagctccagctcccgttagccaggacttgtcccctggcagctgggctgagtctgccctgagggggcgcctttttctaatttgaacagaggcaccctatggcctaggggccctgatcgcccacctgcctggaagcccctgggctctatttattatcatgacaatgttggaattaaattttgattcgaatatgtctgcctgggggtggggttttccctgagcggcaactcctggagaccacatagcctgaatcctcagaatttcaggcctgctgggagctttctgcactaggccacactagttcatggtatccatgctaccaatctatgtgtatctacatatcttttatttttggaaattgcatttgtaaccaaggggtgcgaaaccctggcagtcccaggcagcaccaggccaggggttgatttgaaacgtgaaggattgggttttcaggccctctgctccacccctcctgtgtgtcagagctagggtgggggtgcccgattcgggtgctgaatgtaaggaggggagcctccaagtgtggtgcaagccgggggtctccacatcttccttctctgaagtccaggtacctgcacaagcaggaagcgcctgggagtcccggaaggaggagagcgcacacccaggcagccctctgcggaaactttccttggtttctttttatttgtgtaaaggaggttaagacgtgtcgcacttttcagttgtttgtattcaaatgacgattatttttctactcaatgtgaatatccctggccagcctttccacggcgcccaccgcagtgccgctgcctggccctcagtgtctaccttctgccctctgcgactccagtgctctggcccgggactcccctatccgcccctcacttacccttaaacaggtgatcccacctgtcttgtcaacctcgccgcttttcgcctccttaatggcactgtgcactcaactagagtattaactgtaaaaagatttgtgaagtttggaagctctattcgctgtattttttctttaatttataaacttttagtttaacatgc

SEQ ID NO: 12655 - DNA, 1269 bp, Homo sapiens
tcctgaccactgctgccctaggcttatggaggaacacggtggagaggaaagagacatgccttggtggccataggcttctctttaaccaggaaaaagatatgcatgtgctgtaagtccctaggtgcaagctttttcttgttatgttttaaacagctttataaactattgttcatagaagatattatgtacatttatttcagataaaggacaataagtttactttgtatctgaactcaaaacaaagtagttgtatattttaacattcaaaattgggatttcccaatgtgacacatcatgaatgcaaacccctccagcccatcagacgccaggctgcctactggtaatctgtgtatagtatataaacatgtaaaaataggttgtattttactctatgtatgatgctaatcaatgaacactttatttattttacagagaaaacttatctgtgaactttactatatatctgtttattttactttattttttttttaaataaaaagggttttaaatgctatgcagtcattagtagaaaattttttaggactctgcctgctctgtaactatcttaatatgatctggcagaaactcgcatgtatccaagtaaagtagtttagctaaagaaaggttcttcattgcttttctgttcacagttgtggctctgttttttaagaatgtaacttgtttttagattatacttgcatctgtgactttactaccagccacgttgacacaaaacaggttctggttcaggtaaagttgcgtcagtcacctgcagcagaaatccctcttcattcctcttctctgtgttcattcctcttctgtgctgttctgaagcttctaccaatactctttccatattgtctttttcagtgaagagaaatgcattcaagattaggtccctcctgtctatccagtttcaggattttatgttgttttatacacagttatttcagtatagaaactggctttattgccaagtgtttttttaaacatgttttaactctcatatgagcaaactgtccaacttcagtttttcataagattaaacttcttacgatcaaatttgtctcttgcaatgatgtgatgagttgccaaataattgagattattttaaaatgttttgttcatattcttgttttataattaaaatttacattcagtgtgtatgggtttttttttttattttgactcttaatgtaaggtggatatttctgtcattttacatggtttcttactgagattttatatataaattataaaatgtttacc

SEQ ID NO: 12656 - DNA, 1192 bp, Homo sapiens
cccttgacttctgatctttgtctacttcatttagctgagcaggctttctttcatgcactttactcatagcacatttcttgtgttaaccatccctttttgagcgtgacttgttttggccccatttcttacaacttcagaaatcttaatttaccagtgaattgtaatgttgtttctcttgcaaattatacttttggtttagaaagggattaggtcttttcaaaagggtgagaacagtcttacatttttcttttaaatgaaatgctttaaagaatgttggtaatgccatgtcatttaaagtatttcatagataattttgagttttaaagtccatggaggtgattggttctctttacacattaacactgtaccaagctttgcagatcttttccgacacacatgtctgaagacttattttcaaagacagcacatttttggaaactaatctcttttccgtaatatttcctttatttcaatgattctcagaaggccaattcaaacaaacccacatttaaggttctttaggattatagaataaattggcttctgagtgttagctcagtgagctaggaaagcaccaatcgatatttgtttcctttagggatactttgttctcaccactgtccctatgtcatcaaatttgggagagattttttaaaataccacaatcatttgaagaaatgtataaataaaatctactttgaggactttaccaagtaatactgttgtgttgtgatttttattataaatctcaatccaggtttactttagtatagaataggactacatactttgtctttggacctcccatgaacttattaccctgacaaatagttttagacagatactgaattttattgagctgaattttctttttgaaatgagttattcagtagtcaaaatttgaatccgtaagtatatctactttgctttgttaaaacatcatgagagtggaggcctgccacccagaaaggcacatactagtgccttttagtacaattttatgtcatgtagaagaaaatggcaatgttcctcctattgatacagatacaggcatatgtcatcttattgcgttttgctttattgcactttgcaaataatgcattttttacaaatggaaggtttatggcaactctgcgttgagccagtctattggtgccatgtttccaataaaacttctcctttcatgtctcgt

SEQ ID NO: 12657 - DNA, 356 bp, Homo sapiens
tgaggtcaaaagagaacgggttcccttaagagatgtcatgtcgtaagtccctctgtatactttaaagctctctacagtccccccaaaatatgaacttttgtgcttagtgagtgcaacgaaatatttaaacaagttttgtattttttgcttttgtgttttggaatttgccttatttttcttggatgcgatgttcagaggctgtttcctgcagcatgtatttccatggcccacacagctatgtgtttgagcagcgaagagtctttgagctgaatgagccagagtgataatttcagtgcaacgaactttctgctgaattaatggtaataaaactctgggtgtttttcagaaatacattc

SEQ ID NO: 12658 - DNA, 364 bp, Homo sapiens
atctgacctctccctgacagacaaccatctctttttatattatgccgctttcaatccaacgttctcacactggaagaagagagtttctaatcagatgcaacggcccaaattcttgatctgcagcttctctgaagtttggaaaagaaaccttcctttctggagtttgcagagttcagcaatatgatagggaacaggtgctgatgggcccaagagtgacaagcatacacaactacttattatctgtagaagttttgctttgttgatctgagccttctatgaaagtttaaatatgtaacgcattcatgaatttccagtgttcagtaaatagcagctatgtgtgtgcaaaataaaagaatgatttcag

SEQ ID NO: 12659 - DNA, 1135 bp, Homo sapiens
catcaggatactcaaagtggaaaggatcacagatttttggtagtttctgggtctacaaggactttccaaatccaggagcaacgccagtggcaacgtagtgactcaggcgggcaccaaggcaacggcaccattggtctctgggtagtgctttaagaatgaacacaatcacgttatagtccatggtccatcactattcaaggatgactccctcccttcctgtctatttttgttttttacttttttacactgagtttctatttagacactacaacatatggggtgtttgttcccattggatgcatttctatcaaaactctatcaaatgtgatggctagattctaacatattgccatgtgtggagtgtgctgaacacacaccagtttacaggaaagatgcattttgtgtacagtaaacggtgtatataccttttgttaccacagagttttttaaacaaatgagtattataggactttcttctaaatgagctaaataagtcaccattgacttcttggtgctgttgaaaataatccattttcactaaaagtgtgtgaaacctacagcatattcttcacgcagagattttcatctattatactttatcaaagattggccatgttccacttggaaatggcatgcaaaagcaatcatagagaaacctgcgtaactccatctgacaaattcaaaagagagagagagatcttgagagagaaatgctgttcgttcaaaagtggagttgttttaacagatgccaattacggtgtacagtttaacagagttttctgttgcattacgataaacattaattggagtgcagctaacatgagtatcatcagactagtatcaagtgttctaaaatgaaatatgagaagatcctgtcacaattcttagatctggtgtccagcatggatgaaacctttgagtttggtccctaaatttgcatgaaagcacaaggtaaatattcatttgcttcaggagtttcatgttggatctgtcattatcaaaagtgatcagcaatgaagaactggtcggacaaaatttaacgttgatgtaatgaaattccagatgtaggcattccccccaggtcttttcatgtgcagattgcagttctgattcatttgaataaaaaggaacttgg

SEQ ID NO: 12660 - DNA, 2803 bp, Homo sapiens
atctgtggcttcatgcgctgaagaagctgggtcctggggcaacaagtgctgtgttgccaggacaaatagatgctaaacatggcacttaaatatttatttaaaaacttaaattattattggcaagcaaatcttagtatctttcttccagtaatatggcctggctgagggtcagaccacaggacaggagcgacctccggccttgactgtctgggaagcttgatggattataaaacttcctcctgcctggccaagcagcagcatcatttccaggacccaacaaaggcaacatcaaaatctgttttgctttgtcagtctgggcttccagaatgttgaatttgcctcaaggcctcttcagtataaggaaatacctggaaaactgtgaaacttttaccacgacgtaatctttccagtctcatactattttcacaaacagttttcaaacgttacttcatctgccaaagcattaaaaaaattaaacataagtcaagataaatgttcttaccaccagaataacccttaaagatgtatcttaattaatcagaataaaaggctaccttaaataagacatgatgaatagtagcattttgtagggttaaaaaaaaatgctaaactagtttatttattaaaaaaataattaatgaaggctatgcattactgggaaaaatccttcataatttttcagtttactctttaaagcaaaatgtgagctgtatgtcatttaattggtggataaaacaaatttccttacaaaagggcactttttacaccaaggaagcagagcagtgttaactttaaggtatacttaactgattttgctttaaaactaattacttcataaattattacagctaaaaggattcgatgttgaacaggctgaaaaattgtcaatgtacaaaattcaaaactgtcaactttaactgtaaagtaaatgctccaagtgtgttagacagcatcatcttgcttgggcttaccaaatgcattagtctttgtgtttgggtcgacagcgagtgtgcctgtgctggggcagggtgtgtgttctgtgggagggtgtctgtggggatgtgactatcagggtgggcctgtgctggggatggggcaggcctgggtctggagaggattttgtgtgaaagtaaatggggtgtttgaggcgtatgggtggctgttggtgtggggaggcatctgtgtatggctgttgggaacagcaaccaaaaggtgctttttggttttatttgagatgaagattgtgtttccgcttaattactagtttgtggtctatatcatagaagttatttcccaccccattttatcttgacaaccgtgtttgcatttctgtaaaacttctacaacttctggtgtcagaactgtccagaagatggtactgttaactgttatttcctttgatgttttgattttgaagtttagctctcatgcaaatgtttcaggcgtacatacataggcagaaagcaatttttaggtgatttgtctgtttcttggatgaaatataaagcaagctttaatgttctgacttgttcatttgaaatacaaaaaagtaagtgaattttaatgttttgcattaactaaagaaatctgaagattaatgttgaggaaattgtatggacatgcctttgtgaaaccaggaagtattttaagttaaaaatgaaaaaggttttaattgctttgtgtgtgttttaatggagccccattttagaattattttttccatctccctttaccaacaaaaggaacaatgccaccgtgaatggaatagtttggggaaagctttgccaaacacaaccctgatttcagagcaggaacatggtttggatagatcttcagttccgcttgaattattctgttactgcgctgtcattttcagaagatttccattcctttgcagatgctgttgggagttcgggattatgttcatttcttctgttttaatggcattcagtactaattttataagtgcatcttgtgtgaatctcaataaattcagttttgtaatcttttttaaaaaggtcactgaatttattttaatatttactattgtatttggtagagtgaatttcccactgtataataagtatttatttgtaattcacaagtgatagagctatcttaatttgaattattgctttggtcttaatggtggcaaaatgtttaattttgtctttggaaaaaataggctcggccttgattatagaccatttaatatttctcagcaaatgaaggtatttgcattttacaagtgttttgaatgtcacacaaaatatttttcacatctgggagtcaagttcaagacagtgctttggttttaaaaaaatctaatgaaggcacaggataggccagacccttattaggttttcctttagaataagtgtaaagaccaagtgtcactgatacgcttgtccagattttcttgtggactttggccagtatttagagtttatattcatgttacataaagtgaaagaaacttgctataattaggccatcaaaatatatcctgccactcctggtaactcagcagaggaggagataaatttacaaaataatgtaatatctctacattgttacatgttttcaactattttttatcaacaaagatttgttaatcacttcctatgtgtcagaaactgttctaagtggtgggatcagcaatgagcaagataagtccctgttcgtctgtggaagactgataggaacaagtcgatgaaataatgtctgctggtcacagagtgtccactgaccaaatgatctctcaggcttatttcagctctaaaatatagttctttaaaacgtt

SEQ ID NO: 12661 - DNA, 1099 bp, Homo sapiens
gatgatcggcaccagaatccactgtcaataggcccgtgggtgatcattacaattgcaaatctttacttacaggagaggaaacagaagagataaaaacttttccatgcaaatatctatttctaaaccacaatgatctgattttctttcttctttctttttttctaattgagaggattattcccagtaagcttccatgaccctttcttggaggccttcacaggtaatacagatactggcactgattgtaattaaaatgagagaaaactctagcgcatcttctggcacggttttaacaacgtgtttgtgttgaatttcctttttatgcatcaaacgaaggccatattgtccataaatgctcagtgctcaggatctcattaatatgccgaacctaactacagatgactttttaatattgtaaaatattttctgctttttgacttgcatctgagagtttcttgtttcagtaaaaaaagaaaagacaaaaaaatcagctttggaaagtaatttaaatgtaccttattttttttttctttatgttttctttcattgggcaacagctaagagggcccagcaaggtaatttatggttgagctgatgtcaattggttcttgtcttgagtcgactcaatttagcccaagtgctgaaacaagaaatgtcatttttttcatcaaagacaccagggcagatttttaagtaaagaaagacaattggacccttaagaatttatgcatttgtaaagttgctgttgatccaaatattttcaagccatgtaatccattggttttgtgggcagtttaataaacctgaacctttgtgtgttttctaattgtacctgagttgaccatcctttctttttatagtatatttcttgtatgatattttgtaaagctctcacctggttcttttatggggacttttcgtttttgggcaactccagtgtatttatgtgaaactttataagagaattaatttttccatttgcatattaatatgttcctccacacatgtaaaggcacagtggctccgtgtgttaaaaaacagctgtattttatgtatgctttactgataagtgtgccaataataaactgtgttaatgacc

SEQ ID NO: 12662 - DNA, 731 bp, Homo sapiens
gcctcatctcagtgcctatgaggggcctgccagaaaagtcactaacctgtctcagtgtggccttgtccagccttgtgttttctgtaacccctgtttgtggtacgagataatgagtcctatttttctctcacataatatgcatttgctctcctaggacagtgtaatacatttatgtgaagtaaagacatgcgagactggtggcctgcaaatagcatccgttgatctgtgttaactgcatagggagggctctgcatagcacctgctatagcggtgtcatgttggatcgcttttgtgactgttcatctgtccttgacagtggctgtcatcttgactactttgttgatttgttggtattggggacattttaaaggctgagttatttttgaatgtcatgtttatgtcatagacgtagttttcgcatccttgaattaaactgccttaactccttttgtggtataagcaaaactacatggactctgtcctggtatccttttcctgtgtggttgccccgtgtcctctggcctagggttaagtgtgcaagataactactcgtgagtattcagaatgttgttcctaataaatgcacttgttgtctgtcttctttaatcaaatcacatcttatatacagcagtcagagatgagtatactagaatcatggattgctggaggtcttttaatctgatgttctcagaagggggtggatttaaatcctgaaataaatatttcaacac

SEQ ID NO: 12663 - DNA, 2834 bp, Homo sapiens
agatctaccatttgctctgatatctctgatgttgctaattgagaaagtggtacaaagttagtcattacacagcccactaatgccttctcagtcaaactctcttatgccctggcaagccaatgaggataccctttgacaaaccctgtggataaaatgataatatcaaggtcaggcatggtggctcacacctgtaatcccagcactttgggaggctgaggcgggtggatctgctgaagtcagaagtttgagaccagccttgccaacacagtgaaaccctgtctctactaaaaataaaaaaattagccgggcgcagcagtgcacgcctgtaatccctgctactcgggaggctgaaacaggagaatcacttgaacccaggagacggaggttgcggtgagttgagattatgccactgtactccagcctgggtgacagagcgagactcagtctcaaaaaaaaaaaaggagaattagttaaggggaccatattacaaaagatagttgaatattcttcacactcacttctcaccctccccaccccaatttactctgcctttctgaatggctttaatgagatacctgattattaatgaagaaaagtagaccaccaccccttttgttatccagactttagaacagccattgttgaaagcaagaagttagctacccacaataatacctttctgagcatactcttctctaacatacatttctgtggaagtagttgaattaaattgagtaactacacaaaggaaaatggcagggctatgaatttctttcccagcttttatatagatgtgcctacatatgacactctttagggttccttttattttttctttttttttttttttgaggtagttgaattaaactgggtaactacacaaaggaaaatggcagggatatgaatttctttcccagcttttatatagatgtgcctgcatatgacactctttagagttcctttcactttttcttttttttggaagggggcggggaggcaggaggagtgcagttttaagcctagcctatactactacaaacttattatggtacttaaaattacagcatgaacgttctatatcggagtctcccaccaggctgtctctgactaaatcagcctataagatcatcccttgggattaaacaaacacctgttctgtagggaatgtgtttcctgaatcttggtactcagacttttgtcaagagtaaataacatttcaaaagatgaatggaaaaatgattaagagagcatttctgctttcagcattaactgctaatggattaaaattttaatctgtatagcatttcctggagtaaaagctcaagtactttccacatccattgcaaacttttcaggaacccttctaattttttttttttttttttttttgagacggagtcttgctctgtcgcccaggctggagtgtagtggcatgatctcagctcactgcaagctctgcctcccgggttcgtgccattctcctgccctgcctcccgaatagctgggactacaggcgtccaccaccactcctggctatttttttgtatttttagtagagacagggtttcaccgtgttagccaggatggtcttgatctcctgacctcgtgatccacctgcctcggcctcccaaagtgctgggattgaacccttctaattttaaagaaccttgttattagaaaatctcagcctaatacaatctgaagttaagagttttagcagcattgtttttctaagtagatttagctatagattttcttctggccaaacaaggaagagtatatgcccttgtaaatgagtcttgttttgtttatttaaatagtcagtcaaaacgtagaaatcagtatacgtaaaataaaatgcatgagactattaaatcttttcatatactctacaaataaaatgaaatctgtgtgtggtcctggttgactgggcatctaaagggaatcagaaaagagattgtgaaaagttatatatatatcctcttccttattttagttttgctttttcctattttccataattaagtgccgtttacaaagtggcatcaaaaaattgaagcaggccaggcatggtggctcatgcctgtaatcccaacagtttgggaggctgagggcaggtggatcacttgagatcaggagttcgtgaccagcctggccaacatggtgaaagcccatctctactaaaaatataaaaattagccgggcgtggtggcatgtgcctgtaatcgcagctacttgggaggctaagacaggagaattgcttgaacctgggaggtggaggttgcaatgagctgagatcgcgccactgcactccagcctgggcaacagtgagacaccgtctcaaaaaaaaaaaaggttaggaatcacaaattgtgtaaatatatagcaactttaagaagagagaagaatgcttataacctagtgaatatttctgctgagccttagttgtcttgtctaaaggaaaaaagagggaattgtagaataaaagtatttgttagtggaaattattgacctgaaaccatatcatattgttagtgtaactgaatgtatcagaaattgttcctatgtaggtattctgtgaaactggtttctaaaatgttacaggaaactgtttcctttttttttgtttgtttgtttaagtggaggtgggaggaggtagggaagaggtctgaatattaaaatatgtttatgttcatgtgttcataatacgttcctttttctctctgtgtgtgtataaaagtgccttgctcatgaatgcatttttgctattcacttcgaaaggaagcctttccccagcttggcagctgaataaaccaatagctttgtacatgctg

SEQ ID NO: 12664 - DNA, 2501 bp, Homo sapiens
attgcagttcttcttgcactatctttattttgtatgtcagtattccttctgaacaataagcatttatcaattgatcttgaagtatttctagtcctgtgatttgtctttatattaaatcattagcattaatcattttgattatattctttatatgttttttttacatgttttacatcagatcattgtggaattttgtaaacggattttgatgtttctcttttagtggtattatgtgaattttttatgccctaagtttaaatacgtaattgtccctagttttatttctgtgcacaaagttttaatatataacacattgtgatttataaagctagtattgtaaagatttgtgatgataacctgacccatgagcagttgtaaaacaggtggataccaactacctcgaagcaaattggtgaaagaaaaggcaaaggtatctcttagaagtaaatctccttcaacgttatatatgtacagaagaaaaaaagttgatcatagctttttgtcaagtagcatgtttcccattcacaggaaaatgtgagcttatcagttctttctctgtattttaaatctaagtctgtgggctttaagagcaatggcacaattgcatgtttactgttcagcaaatctgtgcctcttgatagagaaaaatactatgtggtttctgtaagttaccagttttgaatgaaaaatggtaaatggatttacatctgttttattgtaccttagccttttattttaaagttaaagggatgacttttaaaagcaggacattccctacctttaatagtgcaaagcacagtttcagcaatggctacatgactatgtctaaaaactgaatactcagaatactaaaggtttggtgcttaaatttatttttcccatgccagagaaagcaagctttggtatggtaaaccacatgagaacatggctcctttctttttggatagcctggccatgtgtgaatgggattttagcttattatgtttctaagacttttccttacagcacacttaatgtaccttttcagtccttctcccaaccccctgcaaattgtctttaaaacaacaacacataaggaatctgaagcacaggagaacacagagccaacaaacagaatgaagaacaatcatctatttttaactgactttctatcattaccatttttccttttgcttaataactatcttgctttgaaactttgactccttttataagttctatgaggcacatatgtatagcaatttggttctaaaaaccagtgatcttactttagctccatcttaaaatttcaccttaagtaaatggcctctagtagatgataagcctaaaaaaagcacaattattaaaacaaacagatccatgttaggacatttctgaataataaagagaaaaggtgtttcgttgggtattgcagaaaagaggaccaatttcatatagtacaagtttcgtaagtcaggccaagtgtcaatttcaaaagacaagaaatgaaattgacagtgaatagtgctcataaattggtagcgtatataaagagaagttcctgtcacattatattcccactagaattattatccacagtaaataaatattattttgttatgccaaaaatatagcgagcagcttcatggttaataatacatttatgttgacacctccctaatccaggaaacattcacaaacaaggactcccatatacaaatactttaggaagagagatttcccaggcagatatcaccaaaaatgttttcactgtaggaatcacaaaataagtttttgtcaaaataactgttgttgaacgttatactggtcttcctcactggtgattgataagctcctttctagccagtttgtggtacttccttcattttccctagaaatgttacttgttaaatgtgtcctcaggcggtttcatctttgttgattctgcccatctaagtcataagcttctcaaatgcaagctactagctagttacacttgtaagttttccataatgacatgattttaaacataaagagttcataagaatcacttggagagactatttaaaaatgagattcctaggcccacctcagattgtgataaatctgtgtgactgactgatgcacactttttctggactataataactgatgctgctctactgctttaatacaggccaaagtaacgtggaagcgcacagcagaaaatcttcagaaagacatcaggtttgttctgattttgacaagggtaacttcttctttattaaagcaaataactggacataatcttaaaggattccacctccatcgtctttcctaacttagatcttcattgagaaattgggcaaggttaagtttacttttttctagtgctgcggttttggctcgtcttggtagtctcatcttcatttctgattctggttctggaacttcatgatcactaaatagatgttgaaaatacacgaatttagatacaagctttaaaaccagtttatttataaataaaacttttttgtttctga

SEQ ID NO: 12665 - DNA, 1466 bp, Homo sapiens
cttgtcaaatagatcctgaatccaacagacaaatgtgaactattctaccacccttaaagttggagctaccacttttagcatagattgctcagcttgacactgaagcatattatgcaaacaagctttgttttaatataaagcaatccccaaaagatttgagctttcagttataaatttgcatccttttcataatgccactgagttcaggggatggtctaactcatttcatactctgtgaatattcaaaagtaatagaatctggcatatagttttattggttccttagccatgggattattgaggctttcacatatcagtgattttaaaatatcagtgttttttgctactcatttgtatgtattcagtcctaggattttgaatggttttctaatatagtgacatctgcatttaatttccagaaattaaattaattttcatgtttgaatgctgtaattccatttaaattccatttatatactttaaggaaacaagattacaacaattaaaaaaacacatagttccagtttctatggccttcccaccttctgttagaaattagttttatctggcatttttaaacatttaaaaattattaaacatttaaaaattagtttattatcagatatcagcatatgcctaataaaacttattttaataagcatttaattttccataatatgttacagccaaggcctatataataattttggatttgttcaatctttcttacaggctgttttctattgtatcaatcattagtatcaatcattaagtggaagttgaagaaggcatcaaacaaaacaaggatgtttacagacatatgcaaagggtcaggatatctatcctccagtatatagtaatgcttaataacaagtaatcctaacagcattaaaggccaaatctgtcctctttcccctgacttccttacagcatgtttatttatattacaagccattcagggacaaagaaagaaaccttgactaccccactgtctactaagaacaaacagcaagcaaaattagcaagcaaaattcactttgaaagcaccagtggttccattacattgacaactactaccaagatttagtagaaaataagtgctcaacaactaatccagattacagtatgatttagctcatcataattcagattatttttaatcatcttagccaaaactgtaaagttgccacattactaaagccacacacatcgtccctgttttgtagaaatatcacaaagaccaagaggctacagaaggaggaaatttgcaactgtctttgcaacaataaatcaggtatctattctggtgtagagataggatgttgaaagctgccctgctatcaccagtgtagaaattaagagtagtacaatacatgtacactgaaatttgccatcacgtgtttgtgtaaactcaatgtgcacattttgtatttcaaaaagaaaaaataaaagcaaaataaaatgtt

SEQ ID NO: 12666 - DNA, 329 bp, Homo sapiens
cattgctgggcttcctaggcagaaattcatataaactgtgatactcacattccttgaagctatgagcatttaaaaactgtttacagccaccatagggattcaaaagaatttggaataaactttgaagttttggattttacttatttttatccccaaattgttgctattttttaggatctgaaacaaaatctttctaaaacattgttttagttgtcaaagcaccaacaggacattttgggatgtgaaatgtaatttcttggaatctgtaatttgtacttaatatttcaggcttgtatttaatataataaataggtgtttgttattgtgtc

SEQ ID NO: 12667 - DNA, 3800 bp, Homo sapiens
catgttccctagctgaggatgacagagggatggcgaatacctcatgggacagcgcgtccttccctaaagactattgcaagtcatacttaggaatttctcctactttacactctctgtacaaaaacaaaacaaaacaacaacaatacaacaagaacaacaacaacaataacaacaatggtttacatgaacacagctgctgaagaggcaagagacagaatgatatccagtaagcacatgtttattcatgggtgtcagctttgcttttcctggagtctcttggtgatggagtgtgcgtgtgtgcatgtatgtgtgtgtgtatgtatgtgtgtggtgtgtgtgcttggtttaggggaagtatgtgtgggtacatgtgaggactgggggcacctgaccagaatgcgcaagggcaaaccatttcaaatggcagcagttccatgaagacacgcttaaaacctagaacttcaaaatgttcgtattctattcaaaaggaaatatatatatatatatatatatatatatatatatatataaattaaaaaggaaagaaaactaacaaccaaccaaccaaccaaccaaccacaaaccaccctaaaatgacagccgctgatgtctgggcatcagcctttgtactctgtttttttaagaaagtgcagaatcaacttgaagcaagctttctctcataacgtaatgattatatgacaatcctgaagaaaccacaggttccatagaactaatatcctgtctctctctctctctctctctctctcttttttttttctttttccttttgccatggaatctgggtgggagaggatactgcgggcaccagaatgctaaagtttcctaacattttgaagtttctgtagttcatccttaatcctgacacccatgtaaatgtccaaaatgttgatcttccactgcaaatttcaaaagccttgtcaatggtcaagcgtgcagcttgttcagcggttctttctgaggagcggacaccgggttacattactaatgagagttgggtagaactctctgagatgtgttcagatagtgtaattgctacattctctgatgtagttaagtatttacagatgttaaatggagtatttttattttatgtatatactatacaacaatgttcttttttgttacagctatgcactgtaaatgcagccttcttttcaaaactgctaaatttttcttaatcaagaatattcaaatgtaattatgaggtgaaacaattattgtacactaacatatttagaagctgaacttactgcttatatatatttgattgtaaaaacaaaaagacagtgtgtgtgtctgttgagtgcaacaagagcaaaatgatgctttccgcacatccatcccttaggtgagcttcaatctaagcatcttgtcaagaaatatcctagtcccctaaaggtattaaccacttctgcgatatttttccacattttcttgtcgcttgtttttctttgaagttttatacactggatttgttaggggaatgaaattttctcatctaaaatttttctagaagatatcatgattttatgtaaagtctctcaatgggtaaccattaagaaatgtttttattttctctatcaacagtagttttgaaactagaagtcaaaaatctttttaaaatgctgttttgttttaatttttgtgattttaatttgatacaaaatgctgaggtaataattatagtatgatttttacaataattaatgtgtgtctgaagactatctttgaagccagtatttctttcccttggcagagtatgacgatggtatttatctgtattttttacagttatgcatcctgtataaatactgatatttcattcctttgtttactaaagagacatatttatcagttgcagatagcctatttattataaattatgagatgatgaaaataataaagccagtggaaattttctacctaggatgcatgacaattgtcaggttggagtgtaagtgcttcatttgggaaattcagcttttgcagaagcagtgtttctacttgcactagcatggcctctgacgtgaccatggtgttgttcttgatgacattgcttctgctaaatttaataaaaacttcagaaaaacctccattttgatcatcaggatttcatctgagtgtggagtccctggaatggaattcagtaacatttggagtgtgtattcaagtttctaaattgagattcgattactgtttggctgacatgacttttctggaagacatgatacacctactactcaattgttcttttcctttctctcgcccaacacgatcttgtaagatggatttcacccccaggccaatgcagctaattttgatagctgcattcatttatcaccagcatattgtgttctgagtgaatccactgtttgtcctgtcggatgcttgcttgattttttggcttcttatttctaagtagatagaaagcaataaaaatactatgaaatgaaagaacttgttcacaggttctgcgttacaacagtaacacatctttaatccgcctaattcttgttgttctgtaggttaaatgcaggtattttaactgtgtgaacgccaaactaaagtttacagtctttctttctgaattttgagtatcttctgttgtagaataataataaaaagactattaagagcaataaattatttttaagaaatcgagatttagtaaatcctattatgtgttcaaggaccacatgtgttctctattttgcctttaaatttttgtgaaccaattttaaatacattctcctttttgccctggattgttgacatgagtggaatacttggtttcttttcttacttatcaaaagacagcactacagatatcatattgaggattaatttatcccccctacccccagcctgacaaatattgttaccatgaagatagttttcctcaatggacttcaaattgcatctagaattagtggagcttttgtatcttctgcagacactgtgggtagcccatcaaaatgtaagctgtgctcctctcatttttatttttatttttttgggagagaatatttcaaatgaacacgtgcaccccatcatcactggaggcaaatttcagcatagatctgtaggatttttagaagaccgtgggccattgccttcatgccgtggtaagtaccacatctacaattttggtaaccgaactggtgctttagtaatgtggatttttttcttttttaaaagagatgtagcagaataattcttccagtgcaacaaaatcaattttttgctaaacgactccgagaacaacagttgggctgtcaacattcaaagcagcagagagggaactttgcactattggggtatgatgtttgggtcagttgataaaaggaaaccttttcatgcctttagatgtgagcttccagtaggtaatgattatgtgtcctttcttgatggctgtaatgagaacttcaatcactgtagtctaagacctgatctatagatgacctagaatagccatgtactataatgtgatgattctaaatttgtacctatgtgacagacattttcaataatgtgaactgctgatttgatggagctactttaagatttgtaggtgaaagtgtaatactgttggttgaactatgctgaagagggaaagtgagcgattagttgagcccttgccgggccttttttccacctgccaattctacatgtattgttgtggttttattcattgtatgaaaattcctgtgattttttttaaatgtgcagtacacatcagcctcactgagctaataaagggaaacgaatgtttcaaatct

SEQ ID NO: 12668 - DNA, 458 bp, Homo sapiens
attcagtgcttagaactgaagttattgagaggacagctttaaaagatgaatgaactcaaaagttcgagttgtgctcttcacgttggttcgataatggcctttatttgaaagctttttaatttttctttacagtaaatattccattctgatttcataaattaaacatttatgcctcccttttgtgttgacactgtagctcatactggaaaagtcgatcaatgttttgcagtttattgaaagtagttctatatataacaatgttataagcatttctttagaaatggttgaaaatgcttctaaaatgtgattatcgaccatggtatgcatgatcgttgtaattgttgacattccttttagaagttgtgaaatgttacaacttgtgcttatgtagacacaatcttctgtctcagtacagaggcactgacttcaataaagtctatttatactaattttggcca

SEQ ID NO: 12669 - DNA, 4543 bp, Homo sapiens
gtggccaaactcttgtgttggggggtgggcgcgaaggaagtgggacgaggctaccagaagtgaatgtcaaccagctggaacgacggacctgcagggaaggtgagacccctcaaatcaagaaggaaacttattaaactagaatggtgcttctgctttatatcagcatcttggctatcagctggagccaagcaaggaaagggtaccagccatactgaatgcttactctgagctacacactgagtagtatgtatttcatggatgagttccataaaataatcgcctgggtgacttgacccacctctcctccagctcttcttttaggggagaaactgcctcagtgccatttaaaactcccagcatgactttgagggtcttttaatggcagaaatcacccaagcatcaacttccacaggctgcggggcctagaaaagaatctcatgtcactcttccagatccacaaaaaagatggtgaaaaggaagggtaattaaaatggaatgtcttatctggtttttatagcatgttgactatgttgtgtaaaaccaagcaggttaacgtagccattagagatgacagaggtaatatcaagagtgttcagagaatggtgaataaacaataaattaaagtagcaaatactacacatggggttggctttgtgggcatgcaacctgtgctcagaaggaccccacattaggtctgatcttccactgtcaccatcttggaattcttagtcattgttttaacaagagggtcccacatttttattttgcactggaccctgcaatttatgtagctggtcctgcttgcaagacagacgtacacctggaaccaaaatgcaagtgtgagagaactgagcggggcctggaaagctaggcttcaagtgacaaagggagggaccagagaatccggggcctgacgaacgcaggggcatgggagagaggcaagtggaaaatgattgaaagtattataaaaacaaaatagaaaaagagaagctggagtgaagggaagattgcaccagagatgaagatgtatgtggaagaaagcggagagcagcaaagggaagcagggcaatctcgaagggatgacacgggtaatttattgacaggagaaggtttaaatgttcttgaaaagtgaaatcttaaccaaggaatgaaaagtcagatgctgaaatgcagttgcttctcaggggaggaagaaggaatgggcatcccctgcagcacgaaatgtcctccatgagctggcttcgtccttccctctctacagaacacctcatctttcaagccttctcacatcttctaaaccctggtccattctcagcaggtcaccacagttcctcattcactgagaaagtggggcttctcaccatgagcctctcaacttgcggctgccctgaaaccagtctccccatgttctgctcactcctgtctccaggaagtacaccagctgccatcttgttggtccatgggatctttcctcttctgggcctctgctcccctgggacctcctgtctcaccctcttcaacctcctcccttcttctggcttttgcctctttgccctgaactcccaaagcctttcctaaaccctgctgccttcccaaaaataccacccagcctggaatgtttttgaagaaggcctcctctccttcctcaacagccaccctgtctaaatgtattccgggaggtcacttatgttggaattgcttgggtgcagcggctggggggtggggacacttgtttataaatgcagaatcaaagatttgtgggagggaaggttaggattctggatttcagtaagtcccgggtgagtccatgcacaggaaagaaagataaccttggctttaatgcctcccaagacctcttcctacatttcccacggtattctttctttgcaggtcaccagtatccccaaactccacctttgagtctcttccttctttaatttcttcacattgagattttcatcttgaaatccaagtaagatggatttcaagggggaaactccagccttctccactgtctcatttccttttcccacctctcccctgacccccaccccagacccactccatcttttttctccatcttctgtgctttttcccctacctgggagacctcattccctgtctctgtctttgcttctcattctctgcagactcttctcagatctcttgtacccaccaccccatcaagagcaagaccaagacccacatttccaacttctggttgatggtttctccagatatcctttcagctcctcaaattccatcagtcaacatccatcctagtatgtttcaaaaatggttatgccctttgaccatcacttcttccttggggagaccgtcccacagctccatcctcagaccccagtcctacctcccccgcctaacccacctgccagctacagttctgagcatgacactagccttctctgcaaagcagactgagtccccattgcctgccaaagacagcatccacaggctgtcggcctgacatgcctctgcagaggatcccagcctcctctgacagattgattcactaatgtgttcctaaccatacccactgcaaacacacccatgccccaggttcacagcactccctccctccattgtgaaagactgacattttcatttgaccatgtttatttttgtttctatgtactttttcatgtttattttttaataatttttgagccatcctctgggttttttgtttgtttgtttgttttgacggggtcttgctatgtctcccaggctggagtgcagtggcacagtcttggatcactacaacctccacctcccgggttcaagtgattcatgtgcctcagcctcccttgtagctgggaccacaggtgcatgccaccacgcctgactaattttttgtatttttttagtagagatagggttttaccatattgcccaggctggtctcaaactcttgacctgaagtcatccgcccacctcgacctcccaaagtgctgagattacaggcatgagccaccatgcctggcctctgtggttttaatttaatattaatttaaggttaaataacaatgtctttccaaactactcccagctaccttaatccccttcctggaagaaacgtccattcctcatttcttatatatccttccaaaggatgcatagacagtataagcaaatgcacaatatatttatgtatatacacatactcatatatttacatagatatactgtcttttttttttttttacaaacggtaactggtattcattttttaaaaaggtttcttttttcattattctgcatcttgatttttccccctgtaataatggatcttggagattgcttcgcatcagtacataagttgcctaatgtgccatctttaatacttagggggtcctctgtttcatacttttaataaatgttttatttgggggcatgtaaagaaactaattatactacaaatggaatgagggctgagaatagaatgtgactttggtctatgtgtgttctcccccttgatttagccttgtgtaactgaaataataaaatagcttttggaatgcactggaaactaccctggtctctgtgtgcatgacccaattgcaatcttagaaaaaaataataattaattaattttaaaaagaaaagaaatggctttattttgctggagcgttatacatagcagtaaaggtgttccttcctggcagcgtatgctcctatgctggttttccactgcctgacagttaccacccttgagaggctccaacggaagccatctcgaagaattgatgaagaaacctaggactttacatcttgagcaacattcaattaataggcaatttgcttgagctacttcttgccagcaagttggcagttgcctggtgatcgagaaagaacggatatgaggttcatttatctttcaaaccgggtggcaaagcattcgtggacgaggtggttgttcaagggccatttcactgtgcaccacatttcgttctccagaccttccccccaggcccatgccttaccatggcggggaggtggtggtgaatatatgaggacatattggccttttgctatccttcctgctatgcctgaaaccgtttcctcttctctttccctggccaatggtaaatgagcttggaaattcagcatcttggggagcagcagcaagagggtgtatggatcagagcagagacgtgaaaggaggccacctggggtagaagcaagcaggggcgtcttcaggcatgtagagacacagttacctgcttcccctttagagccaggctttccttaaagaccttcactctggtattcctgctgtctgtgttgtccagagagcgagcacggtagtgcagttcctgtgtgagttctgtcttcacagactcctcatcacagactcctttgatgatgtcattactatctaaaaccactgcagggaagccatctggagactgggcatcctgagagattttcctagactactaggtagatacatgctgaaatctcccccaaagcaacccataactaaataaaaactttaaaactttaaaatctccctcatcct

SEQ ID NO: 12670 - DNA, 1683 bp, Homo sapiens
aggtgtggtgggtgaaactaagagaaatgtagcattagctctcacaaaagaggaccaagaaaaatcaacaaacaaatcaaagccaggctcagagctctgaaattaaaaagcactgaaatagttagatgttttcaaacttttagaactcacattttaatcagggattgcatttattggctaactgcatgacatgcccattctaccatttaaaaaaaaatcttaaagcctgtaatttctgagaaaagagtacagcatttactcttatcatctagaaatgtaatatgcttcccccccgctttttgatgaggaagaagacaattggataagatgggacagcacttataatgaaataaaaaaaaactttgagcccctctcattccactttagcaatctttttggtaagaactcttaaagccaaaagtctgctgaaaagatttgctgattattagtttaaaaatcttgtaacactcagcagtgctattttgagtcatcccagtttcctgaaagtaatgcccagtcttcctgaatcctccttaatagcagaaccttggtgattttgttggctcatatgaatgcttgtcatggatatgttaacaatttagtgtttgacattgcttcctctgccacaaagacaatactctggtgacacatgtctagacccagcacaggctgtaggcccaggagtgactcaaaggagtttttccctctttcttacggttcaaaggtgaccctggtggtggccagagcagtaatgcttgtttgatgctcttcatggctcatctgcttctcagaacccacccgttgagtttgtgggtaaccagcaggcaggccaaagactggtgcttttcatttcatcctttagagggatgaaacagttatttccgtctgatgagcattcggtagaatttttgaagtgagattttatgaagtcaaaggggactttacacagatctcgacctgctttgaaacctagaggtggccctttgatttgtgcgtgtccttgccctctggacaacttaatatttcaagtaatcgaataccaacttccctgccagcccacctgccttccgccccgcttgtgtaacagtcctgttttgttgagttgctgctattgcactgccagtgcagcccacaccaaatcacaacccaagatactcagataggaagactccttcctctcccagtactttaccaaaggaacccccgccaggacccacatggggccacgtgttggcagtggaatcagcctgtgcaggctggggatctcaggctgatcagtaggggccagctttggagccagccaagctgaatcccacactccaggtctgtgctcaagagaccagatggtgtatttccaaatgggcctctctggtatgggcaataggcaagctcctggggtctggttatgtggaagattcttagtggatgttccgcctggttagctggttctcttcagagaatataaagtgaatgcctttaggggtagctctgaaagagaaacccaacaacttcattcctagccatgaaagtagcacgatcatattgtactgtattgttattgtaaaatgactatttgccatgtcatgagtaggtagatgttttgccacaaatatgaatgtgtttgttgtttcctgactttaagcaatgaagattgagacaataaatagcactcagagaatgaag

SEQ ID NO: 12671 - DNA, 1831 bp, Homo sapiens
catgcgaagggtttcttcttgatcatttgaaagaaatgataaggctgtagtacaagcaagcagtttaaagataagacttgagatttttgaattgagaatttcatgggaatattcagtcaaggagcagactttggtctgaactagccattgatgattgttaagtttcccattcttagactgcatcaatccttgtgatccttaacaggttataatatacaattagcatttttctaattgttagaatatctgtcaattaagcatcatgactcagataatttttactagtgtaatgacagtaaaattacttcaattctctttgaaatgtagagtgcttcctcctaaccattctttaccgtttctgatcacacagaattgagaaagatctcttaggccactagttactagttgtttgttgagatgtgtaagtcacagtgtgcctgtaaaatgggcattccccaaggaagcagagtcaaggtataaactttcgttttgactcaaaagcagtgggtctcaactggggatgattcgcttatctgaacagcatctgcagacatttttggttgtcacaactggtgggatgctgttaacatctagaggatagaggccagggtgctactcaacatcctacaatgcatgggacaactcccacaacaaagaattatccagcccaaaatgtcattagtgctgaggttgagaaatactcctctaaagtagataaactccttgagtaaagagaagtttaccatagcaactttcagtagtacttcaaagaagatagctgtataaatgtcatcaaactatactatatagagaatcttaagtgataaccagggtcacggattccaaacatgtcattataaattgttttatatggtgctcactggtgcatttttccttttggataagggaaaacattattccacttactgtttttgctttaagcagcctgcatatattggttagtttgttcagatgttgtgcacagacatcatcaaaattagctaacatgggtatttttgaacatatttttgccaggaagatgaaaatcacatagtatgataaacaggtgtattcccctctacttgcccatgtgctcatttttctgagtctgaaattccagacttactggctttaacaataatttttgttgttaatttaagaaatagacttacttaagactattttaagaaatagagatgtcatagcctgaagatttactgaagcttctgaacatgccaccatgccaaagctatgtttctcaaacccagctctgtggatcatgttcctaaaagatgctcatggggagaaaatgtttacagacaaataattttgggagctgcctttgcaaacctgcctgttggcatattgaaggctctaagaattccttcactaaataacccagttttaatatatccttatccaaagagaaactcatttttttaaagtgaaatatttgttaacagcccattgaacatacttttaaaaacactatggtagagaatgctgtgttgccttctgggctgcatttttcttattgatttggaattgtaacctatgtatgagaaagggattttctggtattttggtgacgttgtacattgtcccagactgtttgtaaacatgaggtcagacatgtgtaaggtagacgcctatggccactggcttgaccaccttggaagtcaatgactattttgagatgaagtatttaactatgaatatcatgaaggttatttaaaaatgtatttattttatctttggggttcaaacattaaaaaaatttacataggtgtagtaactcatttcaagggaataaatgctggattaaaaagtg

SEQ ID NO: 12672 - DNA, 998 bp, Homo sapiens
actgtgcactccagttctctccagatgagagagaatcttttcaacagctggtattgggaagctggggccagggcatgatcctgataaacaccttaaatgtcttgtcaactggatgcaaattttgcaattggtgtcattttttttaaagtcaaattacaaggaagtacccagatcaggcagtggtaataccaaaggtcatcaaacacatacaaggaacatcttgatcatagggcatgtggggaagtttactgggccatcacagacttttgttctagtgattgtatgtattaggagtcatagcatgccctacggcagatctggattcttatacactaagatgtgtcttaagaatcacagtgcgtgcttcatccctttattgaagaacagaaaattatgactactctacaaggtggataatattttggtacctgtgcttgccacagccctgttcctcaaagctgaattgatagatttctctttgacttccaagacctagcagttataaggcaccttgaaataaattgtttgtgcctggaaatgcagggagggcaatagctttgtaaattggtttacatttttctccttgaatttttctagggtcctagtgcttccgaatcatttaatggcattgtcggatatcttttacatttcaattgcaatccatgaaattacatttagaagattcttagtacttaactgtagtcttctccatgaattacacgttagaatagactggcagcaacggaatatgcagcaagtaagcctctagcttatagtttcatccctacccctcatgcctgcgtgagtctgtacagggatatgtgtgtgtgtgtgtgtgtgtgtgtgttagagaggaagaggaagagcagaatgtctgtatactacatgctgctaaggtagtgaataaatcagtaatgcaatattgtgggtccaaactactctttgcactactttatttacagtagtaaataaaattatttttatacaattgactacca

SEQ ID NO: 12673 - DNA, 242 bp, Homo sapiens
gatgtcccctgaccctccaccgcagaaggaaggcagggaggaggcagagaagaaagaacggaagaagagatcaggaagagaaggagcagagctgatggagaaggaaggctccatctccagtgggaactcttcaaggtctgcttttcatccttcatctggattccagagcactgctccagtggggccatgattggtttctaggcagttcaaagcaggatatgttaagtaacactcaccatcag

SEQ ID NO: 12674 - DNA, 88 bp, Homo sapiens
ctgcgatctttctcctacagctcatttaaccatgcaattaggcagttaagtagatgcaaaatatttaaaattaaagatgcttctcatc

SEQ ID NO: 12675 - DNA, 1907 bp, Homo sapiens
gaaataaaatgaattgctccccagattatttttttaatattgtatgcaatctttatgtgtaactccaaaactgaactataagataattcataagaatttgcctattgataggcaaatttgtctatgcttaggcatttaaggagcatttaaaaatatgtatatatgtgactgaatgtaagattaactttattttggtctgaacaaaccttgtaaagttccattgtattaacgtgtgtaagaagacattgggttacttaggtggtcagtccttttaaagtagttgtctgttaagtggtataatttatgagcagaaatctcaaactgtactgtattgtataaaatgctgtgtttaaatgaagcctaagaaactatctgtaacatattttgcactttgagaaaccttgtatattaaattaccatatgtttttaggtttacagaagttctaccttagggaaaagaaagggaagtaaattgaaaaaggggggagaatttattgtagtggctgcctaaaaaccactggagtttttaaaagaagcaaggagttaaatgtcctgcaaaacaaggaagtgagctaagattcattctagttcactaatgaccagaacttgtcaatgagaaaccacttgttaagaaaaagtccagtgtttatttctcaagagtaatattcggccaacagatgtaaataatagcactagccactcttattaatatttatagtgttagaaaaccagccacattacagattcactacgtttgagctcattgttggtggctgctaagaggaaacttacactgcattggagaggttgtgtacacaggacctggcctggatgctgattgcactgtcattgtatgcaagcattttgtcttttttcagaatttctgactatacttttggtacgaacaaaattcatcaccacagggtcctgttgttttgtttgatttttagatttttttaaattattattaaggttgtaatgtttttctccgagttgtcagaaataactggaagaatacaatatatggccattatggagccaggggctagttggtggtttactatacatttgggggctacctggtcacatttaatctaggtttttttttctttttttaagtaaaggtgtggtctcttccctgtacttatgaataaggacaaagccctatttttgtttccacataaagatcagctactgaattggtgaatttcctgacagacaatgctatctaaccatagttcatgttaggggaagcatttttccatcagtttctttaaaattggattgtctggtgagttttgatattaaacattatgtagctaagttttttttttttagcatttcttttttatttttcaatctatattcacaggcccatacttcagtcagtccaatcatagtacagtgatgtggtggtagatgctatgaatttcttcattgtaaaatacggatcatttgtattttggggtgataaaatagttcaccatgggtatgagatatttattctttaaatcaaagtaaattagaatttttaaaaagcacaaaactgcaggacagtttatgaaataggtggcactattagggaatcttcctttaaagcaagaaatcatgttatttagaaagaaaaactaatcttaaacatactatttctaataaatatttatatttttatgaaataaagaggtatgtggaaattaatatttggtgatgttggacagtggaaaagtatctagagtttttacctgccttatctgaattcttcttgaaacttgagcttaaactctaatagctgtttccctttctattctgaacaactgtctccatttttcaagtgtgagagataagggctaatgatgacatctcatttattttgagtaaacattaaaattgttttacaagtctacttg

SEQ ID NO: 12676 - DNA, 513 bp, Homo sapiens
aatcccacagtccttgggaagttggggaccacatacactgttgggatgtacattgatacaacctttatgatggcaatttgacaatatttattaaaataaaaaatggttattcccttcatatcagtttctagaaggatttctaagaatgtatcctatagaaacaccttcacaagtttataagggcttatggaaaaaggtgttcatcccaggattgtttataatcatgaaaaatgtggccaggtgcagtggctcactcttgtaatcccagcactatgggaggccaaggtgggtgacccacgaggtcaagagatggagaccatcctggccaacatggtgaaaccctgtctctactaaaaatacaaaaattagctgggcgtgatggtgcacgcctgtagtcccagctacttgggaggctgaggcaggagaatcgcttgaacccgggaggtggcagttgcagtgagctgagatcgagccactgcactccagcctggtgacagagcgagactccatctc

SEQ ID NO: 12677 - DNA, 214 bp, Homo sapiens
attacacatcaagtgaaaaatattcctcctgttgatattgctgcttttggaagttccaacaatgactttattttgcatcagcatagatgtaaacacaattgtgagtgtatgatgtaggtaaaaatatataccttcgggtcgcagttcaccatttatatgtggtattaaaaattaatgaaatgatataactttgatttaaacagttctgacacat

SEQ ID NO: 12678 - DNA, 296 bp, Homo sapiens
aaaaatttaggaaattcaacttaagaaaccattatttacttggatgatggtgaatagtacagtcgtaagtaactgtctggaggtgcctccattatcctcatgccttcaggaaagacttaacaaaaacaatgtttcatctggggaactgagctaggcggtgaggttagcctgccagttagagacagcccagtctcttctggtttaatcattatgtttcaaattgaaacagtctcttttgagtaaatgctcagtttttcagctcctctccactctgctttcccaaatggattctgttg

SEQ ID NO: 12679 - DNA, 820 bp, Homo sapiens
aatatccccgggcaagttggaccgagccctttgaagaatactcagaagtttattttgtgaatgagtagactggaaaatgtttgtgtccagctgaggatgcacagttggaaagcaggaggaatgctgactggttgatgaaaactagcttaagagcattcattcgctccatgagatcaagggaacaagagtgtttgcaagaagccattatgagtcatggaaaaaaagatgatgaaacccatggaaacagcaagagaattcccactctctctcttcttaaaaaaaatctatcattatacagcacagagtggagccaagtttttaattttgaggaaccaaaaacaggatcaaatatgaaaaccctttcttttattgggccacattgtagatgctgatttgataattgtttcctatgcagatagattatttttatttcacagattatttaaaagggaagagggcctggttgtttatttatatgtttgtttgcatttatgaatcttgctgccttttagcaccaggatgtttttaaaaaaattcaaagaggccaggcgcagtggctcatgcctgtaatcccagcactttgggattctgaggtgggaggatcatgaggtcaagggatcgagaccatcctggccaacatggtgaaaccctgtctctactaaaaacacaaaaattagctgggtgtggtggtgcgcgcctgtagtcccagctcctcaggaggctgaggcaggagaatcacttgaacctggcaggcagagtttgcagtgaaccaagatcacgccactgcattacagcctggtgcagagcaagactctgtctc

SEQ ID NO: 12680 - DNA, 1305 bp, Homo sapiens
aaccatttttcactagcgacagccactttttactctccctcctgaccagtccagctggtctagagaaagccttgttttttcccagagcaaccatgttttagcataatgggatgacctggtgtcccattataaataaagggtggtatggctagaagggtatgagcagtaggcttatgtacacctcttatagaggttgataggactgcttgggtcctccactgtcctctgtcaatctagttagacgtgcttctgaatgactgtagaattggaactagaaactacacctgggctttggagtcagattttagttaacaataatgagcctgggagcagtagtactaaggcgtcttttgtaggcttaagaatttatcctaatggcctttataggaccaatgctgattttttttaaaggcagttcctattatgtggtgaaattttgtaaataaatgattatacaaaacagtcaccacctagaactgggtattctttgtacattgtcagatatctttcaaagtataaattaggaataaaaatgttccacatgatatgtgtacaaattctttttaagattgtcatcttgtacagcaaaatattatgttggtatattacttccttattaatttgcaaatgattggattaaaaaagctcactgtattccttactaacctgttgtgtgaaacataacattggcagtcgaggagtcagaactcggattcccagcctcactccctctgtgtgtgttgaccacgtctctgctgtgaataggatttcatgcagtggtctgttatggggctttgcagcgtggggggctgcagaagattctcagacattcttatccttctggagtctcaacccatcaggttcagaccagtaggaaccaggctgggtcaggctcttaatttcactatggtgggggacaaaatgaacactggcttttgttcactttgcccctgagagatctagtcctgtcctgtgatggcttccacaaaccctgttggaagtttgggttattcctataactgtatgtgttgagtggccgtgaggctatggacctagcctggaatttagatgtctagctattttttaatcttgttggtaaatgctcagaggtctgtgctacctctgtgaggtatatactaaaatgaatgtaaaataaggatcgtattccctgctttaaggaactggtagtcttgtttgggtgatgagacaaagttcttgagacatttaaactgtatttaccagtgtgaaaaatgtcatttatggagattaattcattatggaaataaaacattgcctaagcccttg

SEQ ID NO: 12681 - DNA, 99 bp, Homo sapiens
ttacctggctacagaaagaagatgccagatgacacttaagacctacttgtgatatttaaatgatgcaataaaagacctattgatttggaccttcttctt

SEQ ID NO: 12682 - DNA, 1387 bp, Homo sapiens
agattgccatttttatttgtgattttttttttttttttttggtacttcaggatagcaaatatctatctgctattaaatggtaaatgaaccaagtgtttttttttgttttttttttgagacagagtctcactgttgcccaggctggagtgcagtggtgcaatctcggctcactgcaagctctgcttcccaggttcacgccattctcctggctcagcctcccaagtagctgggactacaggcacccgccacagtgcctggctaattttttgtatttttagtagagacagggtttcaccatgtgagccaggatggtctcaatctcctgaccttgtgaaccacccgtctcggcctcccaaagtgctgggattacaggtgtgagccaccacgcctggcccatgaaccaagtgtttttaaggaaacaaaactatttttttaatcatcagatttatactagctatatggatattagcatatctggtaattatgaatctagaatttttttacatatttttataatactgttagctcagttattggatgagtgaaagataatcatgttggttttaatagtgtcaatttttgtaaaataaaaattaaacttcaaactctttactttataaattgtccataggccacactttaatatcacattataaagggaaggacagtcttcattcctcctggttattggtttgtttgtcattaaagatatattttgaatccatgaaattgctatgctaaacagcctttacatgtatggtctggttaaagttcctttgttccttttgttttaataaaatgtgtcactgattttttagctcaaaatcatcactgttaatttccagtcaccccaaatatggttaaaagattttttttttaatcatgaagagaaaattagtagcatttctttctctccccattatttattggttttcctcactaatctttttttttttagtccaaaagccaaaaatatttatcttggttttacattttaatttccattcttaattgtaatttttttctttaaataaggaaaccaatataatctcatgtataaaaacttaaatattttacaagttacatatagcatcattctaaaataagaattttttttgttttctgtctgcttttttcttatgtctcttgttgagttttatattttcagtggttatttttgcttgtgttagatcattattaaaatatatccaatgtccctttgatacttgtgctctgctgagaatgtacagtttgcattaaacatcccaggtctcatccttcaggaattttgcagttcaatgagaagagggagacaaatataaagatgaggacagaagcatctctacagatgaaaattacataaataaaacattctccatcaacaact

SEQ ID NO: 12683 - DNA, 1196 bp, Homo sapiens
ctttgtgatatgggaagtgaaaatagttaacaccttgcacgaccaaacgaacgaagatgaccagagtactcttaaccccattagaactgtttttccttttgtatctgcaatatgggatggtattgttttcatgagcttctagaaatttcacttgcaagtttatttttgcttcctgtgttactgccattcctatttacagtatatttgagtgaatgattatatttttaaaaagttacatggggcttttttggttgtcctaaacttacaaacattccactcattctgtttgtaactgtgattataatttttgtgataatttctggcctgattgaaggaaatttgagaggtctgcatttatatattttaaatagatttgataggtttttaaattgctttttttcataaggtatttataaagttatttggggttgtctgggattgtgtgaaagaaaattagaaccacgctgtatttacatttaccttggtagtttatttgtggatggcagttttctgtagttttggggactgtggtagctcttggattgttttgcaaattacagctgaaatctgtgtcatggattaaactggcttatgtggctagaataggaagagagaaaaaatgaaatggttgtttactaattttatactcccattaaaaatctctaatgttaagaaaaccttaaataaacatgattgatcaatatggcagatgatttacagtccattatatgacatttgtaagccactcaacactagccttacaaggttcatgaaaggaggaaaacattaattctttctgcctttgctgatataatccacatagtaataatttaagctataatttatttttaaaatgagtgcctcttgggaagcttcttttctgttctaacagttccctgttaaaatgaaaatcttaggccagtgcagtggctcacacctgtaatcccagcactttgggaggctgaggtgggtggatcacttgaggtcaggagttcgagaccagcctggccaacatggtgaaaccctgtctctactaaaaatacagaaaaattagccagggttggtgcatgtgcctgtaatcccagctactcaggaggccaaagcaggagaattgcttgaacccgggaggtggaggttgcagtgaaccaagatcgcaccactgcattccagcctaagcaatagagcgagactccctc

SEQ ID NO: 12684 - DNA, 2622 bp, Homo sapiens
aaatgcatttgcaaagggagaaaatgaaggccaaacagaagcaggctccagcttctgcaaaaacttggattcacaaatgtccctgaacagaaaatgaagctcacttcagaacacacactctctgccttgaaaactaaagagactattacttccttttcacatgaccacaagtcctctgatggaaatgtacagcagaaactcttgagagagaggctaaaagcaactctgttctcccccttcccctagacttttcttacgaaaagtcaataattaagcaaattgcttaacacttggttccagttcctgcctatctggagtttaaatgcgtaatacaccattaatttccacgctgcagtttttattttaaagaaagtaacaagatgtctttacactgacactgaaaattcatccattttagagccaggaattcccatgttacacaggaaaaaatagaagtctactgaattaattttttaaaagaaaagagatcagattaaatatttctttgtttttccttttggaaacttttatgtataattctttctgcctgcctacttttctgcaaaaatgagatgtacagatttcggttccctgctatgaaaagtgatgtggtagcaattttataaatgttgctttctgatttttatcagagtgagaaaattaaaattattgatttgcaagtagtaaacagttcatattttgatttcccctcattttagtttaatataatttgcaataaatgtacatattgttgtttgtttcataaagcatatcactttaaaatggtttttactcctgtgattatgttggaatatttggaattttaaaggagtaaagactgtccagcatttggttttataatgtttgtcaccagatttttattaatgtaaaaaaaatcaatttttaaaaaatagttggactttggcagcttttaaggaaagttggaggtgttttaggattgctatcaattttcagcattgtgctatttggaaataagtgttttgcttttgtctgatggtctgggctcatttttatgtttattttagaaaactgttgcatcaatatattatgtttcttggcattgttcagcataggtaatgtgtgcactttatgtgtacacataatcatatttaagttttttgcataaaataaatgcttctagatgtcatggcagtctttttaatctttttatcatatgctttcttgtgaattttttcatgttaaagagctaaagtcataacatgattacagtcaactctccattatctatataaaatagtgactaagcctcaggtttttaattttgtgataacaaaataacgaaggcatgtaagacctgattctggaggaacatgaaatttgtcttttctcatgtccagagttctatcctgcccccactgtccactgtagggtcatccgcaaagccctagcagaatgtgctcactccatttccttacacgtttctagcatgggtcagaggaaacaacatttgtgttataacttcgtcttgataggctgtagtgtacatgggatgtaaaacaaacaagtgtatcaaaggtggatgattctgttagagtgaagtttgagagtaaatgtcacttacgtttctcatagataatcaagagttggctgtgtattgactgaaagatgggtaattattttaaatatgcatttacacacatttaggtatcagaagatgcttagggaacaatggataccaatgatagaaaatgatacctttacaggggcagaaaaatccccactcttccttattgcctcttcagaaccctttagaaagtataaaatattgcctccaacatgctgaaaaagagtatctatgcataagtatcagagaagtccctcaagcaatcagtaggtgtgttctatttagagagagtttaaagttctcttagcatcagacaacttgattcctaaggtttccagtgtgtcaccaacaaaaagtgcattgatagggacctttgtctcttcctccctttgattaattgcccggcatcacagtttactagattaccaagtgttacatcatattaaataaaatgtagcagaaccatctgcatcaatatattcctgtttagatttttgcaggagagaagttaaaaggatttgctccttgtatgatgtaagtggcccaccccaattttgtaacatgatgcaagtgtctggcactaagggaagcaagagtagggttgtggaaagaccaagctgatggggagggacttgtttacgggaatttttttagttttccttttcaaaggaaaacattaaaatcccttaggaatttggtattcacatctcagagaactacaacacaaaagtgcagacttatatttgagaattaatgttaaccctttgtgtctagtttgaagcttcttgtatttgtctaaaacaacaagccagaattttgtatctcctttgataaaaagtgtgtataatgtaaagtagttttgcatattcttgtgctgcacatgggctgaatttttaaattttttttaaaaacttgaagcagaaccttgtaatttgtgtaaatgacaagtgtaaaatcctaccataaaatgctaaaaatatgcactgtttcaaataaaaccaagaaatgcagcatta

SEQ ID NO: 12685 - DNA, 2649 bp, Homo sapiens
ggctggtgaccagcacgaagacagaccacacaaacaccactgaaggaacgcttgactatttatgaagaaggaacatgttggattcacacatgcaacctgaaagtgaagaatgttagcagatttatttctgaattattttatatacatgaagttttcactagttttttaagactattttcaacttagcatgcctacgttcatacatttccaaaagacttgcaatggttcgtgccttcattccatcttttaaaaatttgtatgctgtactacatttgtatagaggtttttgttgttgtttttttaaggatatattttcagtatgaaggttattttcttaacttctgcactccagagatttctattttgtagtaccttcaataatatatcaactatatattaaaaaagcacacttgaggagctagggaactattttgaaaaatatatacaatatttaaagatacaaacagtagtgcttaaaaatactacataaagcattattttaaaggttatactggaaagtgcaattttaaaatgagtaaaacctctgtatttctgctggcattaagggttgatggtgttaccatgtatcatcatggcggtactattttttaaaagaaattaaacactggatctctccttaagccaacattgaaaagacttgccgcacttctgagtccaaacactggaaagctctcctttgccaccgttagccggggctcattctccatgtgccttagccttaaacatgcccccactcccacatctctcaccctgtcccctcctccccagattcccaatcccaccgcaatgtttggcaagcctaggactgataagtagctctgatagaggagctggtggcttttatacttcttcctgggtttttgttggggtttgttgtttcgttgttttttgtttttttttttgtttggttggggaagtattgtcttctacgtgtgctattttcagtagcagagtaagcacaaggttttaatcgagttgcataagacacctttgcatagctatttaattgcccaatgtaaaactttaatgccatttctaatgcttttattcatttttgaagtatgagtttgtagggacaaagaatgtatgttatcgtagacaagacccccagagactcttttcagcagaaagttatgcttctagttgccttaccatgtttcttgcaaaactgtccatggtcctcaagggtgttggaaacattatgtttattaaatgggcctctcttcctttgctgtgcacttgatgggtgaactggattggggtgtgcacatccaggaggaggaggagagacctgtagaagtttaaagatagtttgtaaatatcttctaatgcttgtttttagtccttttatgttggagaagttcatggtatgtagtttaatgcaaaatgaaaccattttatttcaatgttattaaaaaggtttgttttattaggaagttaatgtattgttgcagtgttttgtgcctgtttaaaggcttttgtttagcagagtgaatgtaaaatacagtaaaatgttaagattgtcatctactttttaaaaaaaaatatcaacttggaattgttttttaaaggctcaatcaaggaagtgaggtgtgcaataaggtagcaagtaaaacgcagttgcgtttttatgtcatgttagagatccatacaattttccactcacgggatttttgttgatggctgaattcttgtggattcataagaggatcatgcccttagcaagtacttttgttttgttttaaattaagagattcccaaatgcctttttccccctcatcttgaaatgagatgagtttttatgtgtaagcaatatttatttaactattctataaaattattgagtgcctactgaggcctttaagcaccgctaacattcctttccatcattcttttaaatgacataaaataattgtgcaatgttcctgatgatgtaccccacaagctgcattcaaactcaaatctgtgggaatgagtgactcgacaaaatgtaattcggatcagatcctcatcccctgactgtgtgaaaaaagtactctccttctagtgaaggattgtcacagagtttcactggatgaaactatgacccagtattcttactgtattttacatatgcctgtaaattatttgcaaaaaagaagaagaagaggaagaaagaaaagaaagaaaagaaagaaagaaagaaagaaagaaagaaagaaagaaagaaagaaagaaagaaagaaagaaaaagaaagaaagaataaaaaaaaatgataacatggcaaccaccaaactcccttaaaaacaaacattggtgacatggccaattaagtatcagtgagcctcctatctgggacttatctgttcctattgtttcaaaaccatttcatgtacactactgaggtaagtttataacttgaaatgtgaactttttttttttttagtgttaagaacaaactatataaatgtaaaaaaaaagttttagagttctgttttcaaacattgctagtggtttagttaactttagctgctttatatttgaaaagcttttatttagatcttgctccatttacagtacattcttaggatgtatgtagtaaataaagctttctttaaagcaatcgcaagaccttattttaaattgtg

SEQ ID NO: 12686 - DNA, 1870 bp, Homo sapiens
ctgcacatgcaaaaggactcggctatttacctgaagattgactagctacactaaagaaaatgaactccgccatccgaccttccatccagttgctgatgctttgtcttcagagaatttacccttaaccaagcagtgttagacaagcatgttctctcgtcttgccaccatcatgtgatatgaaaagaagcatgaataattttttttgctgtaagttacatcatgcgcagtggaaggtctttttcttattgtaaatattgtgaacattacttaacttcacacacacacagagaagagtgtggccccacccctcctagtgaactaacgctgcgtccttggaatgaatgatgcgtgagttagtttcactgtcttcttggctggacctgtcacaagcaacctttaagtcctacagcactttgccctgttttcaacattggagtaggcactgcatagcagataccattgaattgctgtaaaaataggatggcgagtttgtgttttaatttttcataaaattgaacctgttggttgacaaaattggctgttggcatcagtatagaaaccaactggcagctttccctgacaagctctttgacacatggacaccatttcatgtctacagctgtttgtgggatgttggaaaaaaatgaaacttcaaaattgatgaaaaactaaattcgaggaattaaaatcgaacaaaacatagcctttcttttccgatggttttcaaactgattatttttaaaagagattaataaaatcataatgcattttgggtgggacatatttcaaacttctgccttatattgtacggtgcagctagagaattatagttcactatggccattctctacataaacattaagatgaaatactcctcatcagcctttcatccttagtttgagaattagctgatatgcaatttgaagttgaggaaatatcattgatatttctatcatgcacgattattttagatttctaccaccgtgtgatttttgctagtccatgtgctagaggtaaacgttctgctggaattctgcatccagctctatccccctctgatgctttttgcccagaaagctgtctgtccatcatgtattgtccatggcaacaaattacattaggttgaacctttccttgattttatgtatttaatattagaatttgttggactcaactagatatattttttaatttatattttttccattttactttgaagatttgaaatgttcatacctgagcaaagtctacacaggagtaatggactgtttaacaagtttcccaaaacagcattttcctgctccttcgtatgtaggtgagaaacttagctggaaagacatacaaatttagactctcgttgacattgtcgttttaaaaggaagttgctaaggcgatcaatctcaatattagtcttgtttacttcttcttaatgtcaaaattaacatttacaacatccaattataaaagtaatgctttatgtttatacactgctatgtacttgtcaaaatggtttccacattcttatcacatctgagccttaccaggtagagaaggtactaaatacactttagaagtaaaaatatgaagtaccgagaggctaaacccactggcctaagatctcaccaaagttcatgaaaaccaggactaggacccacggctcccaaagcccgttcttgctgtgttgtgctgcctccatatccgtcaggaagagcctttccagaatgattctgggcatatactaagaagagcaggtatggaaagatctattgtcagggaatcttagaattccctacacgagtgggagaaagatgtccaaattccttacgcagtggtattcatgatggtgccctatctaagtccaggactgttt

SEQ ID NO: 12687 - DNA, 1724 bp, Homo sapiens
tctggaatcctgcggcggcggcggcggcggcgacagcgggcgagccagggcccgggcgggcgagtgggcgagcgggtaggcccaaggctattgtcgtcgctgctgccatggctttttcattgagggcctaaagtaatcgcgctaagaataaagggaaaacggcgtcgccctcatttcaaccccactcctacccccttcctcaacccccaaacaaaacaaacaaacttccctggcttcgcacctgcctggggcctcgcagcggggccagggctccgcctgctgatcgggggttgtgagcagcgcggcctggacgcggggcactctcagggggctgtgtctgcgtgtcagtttgtgtctgtctcggggaatgtgtgtctgtggcccaagcaggtgacaggaagagatggggggcctcaaccaacttagtgacttgtttagaaaaaaaagacaaaaaagtaaaaataaaaacaaaaaagttggaaggcagaaaccattaaaaaacaaaaagccaacaacccagaaaggtttaaaaaacataaggaaaaaaaagacaaattaaaggaggggctaggggagaagctgcagctggagctgaaggctcgatcttgtgaacccctaaatccgctccctcctaacagcacggattctcttggggctcttcttcagggaagagtagggacgccgttccagccccccttcctatcgtgtccttgggttcgggtcactgcggcgacgacttgctcagactgtcccggcggccggagtgactttctcgcacccccttgcctgtcccacctcgctgaacaccatcccgccattagcgcatcggaaccccacacagttgcaactcccaaccccgaatctttgcagccgttcggccctgaaagatgccctatccatgagatgccttttcatctgcaaactctgcaaaatgtgtctcatgtttcgcaactctttttttccccctcgctcccgcctaccccgtcggcattttcttcttccaccagcttttactgaactttttggcactgctttggattggggtcaattgcagtccacgtaactggctgcagagaaatctaccgagcaaggaaaaggcacacacacacgtttgcaggggtgtctcggtttgcatttctgttggaatgatccgaactggactcacatcctgtatggtggatggactgtatattgagggttccattcttcgcgcagtttagacatctctgttttgattctttgttgttgtttttattttaaaaggcacaaactctagatattagttgaatgttgaggctttaactttttcggtgtctttctacaactgtgttctgtgactcaattgtatcgtgttaatatcagtgcagactgtctcctctacgtgaccgtataatgtttttctcttcttgtagtctctatggcgtgtctttatggtgtaataaggttctcacgggttcaatcttttgtgtttagagaggccacggttcagacaatggtatatatttttgttatcaggtgcatgtctgtctgatttctttttttttcctgttggactatgtttgtgaacataattgtcataagttatgtttcagatttttgaatttatttatatgtgttataatgaatgcttctatttaaaagggaaatatttctacatgtgcatatagttttccaagagtgtaccattaacttgattgttgataataaaaacaaaaagcaagtct

SEQ ID NO: 12688 - DNA, 6578 bp, Homo sapiens
tggacagaatcttcctgttgtagcagctggtcctctcaagagttccaattgtgaatgtcctgttcctgtcacctgagagtccaaagcctgtcattctgccatagtctacacattctcagctgccacagtacccaaatagaaatccattttagggttgtttgggaagtctgtggcacctacaacagacttttggaatattatattataaaaagaaaaaactacatctgatttttaaatgattactagctagatcatgagggtgaaaaaataggtgagctcctagttacctttctgaaatcttcaaactctgctacctgggcagagatagtccccaaggtaggctggggtagtgtttctgcccatgggagaaggtggagacatggagttgtgttaagggacaagaagcaaacattctcttaattcaaataagttgtctttatgttttccaaagacttgacttcatatttctcggcaaagacataggatagatgacatcatataccattttgacattaataatgtctattactaaaaggaaaccagagaacagaggcaacatctgcagacagtgattaattacaggtcaactgtttttctgttgtttaaaaaccactgtgttgatcaagaaggcactatttgatctctggagtttacaaacagtagtcatttttcattgttagtcaagaaacatccaaagatccaaaaccattttcaaatgctcagttttgtaggttaataaatccgcagtttccatagccttaaatcaggctttgttgacacaatgccaaagtgatgggtagaacaatgaaaatttaaagcaattagttgtttggtgcactgaagaccaaacaagtggtgtgactgatggtattcgctgaattgactagatgttctggcattgtatacacacagcttcaaggcgattctgacaactatgcaatgggcttgtcagtaattgctctgaaatttgagggtctttctctgctgagctgatctttagaatttgtatgaaacttgtttcccattgtccttgatgaaaacatttcatcccctccgtgcctcctttaccccaatgtaccccttagctatggctaagtcagcactgtgccgctatcccctggttaatttgttgagttccatatgtgaaattagtggtatctttggaaactttccatattggcaaatgctatagaggtgctagagtcatcatttctgagggcttcctgtttggactcaggagaggctttctttaccaaactagtccagattactacattctttgtagagcaaagggctaaatggacagcgtttattgaaggctactaatgtcatctacagacatgaccaagggtttttgaaaattggttggagattcaggttaatgagcatccattgataaagggtttttgggctatttttgtcaacataaactcataaattgtcctttagatttaatatttagtttgtattcactatatacaaagtcctagaaacaggtctttctgtagcttttgtttattagcttttttgtattactagaattcatccattgaaaagtttaatgtttatggaggtggtcatctgtcagatctgctcaatgatgtagtgggcactaatatttcaatcctgttttgagaaaattaactaaaatttgtcatatcattcaatggaatagggagaaccaatattcaattctatttggggcaaattagctaaaatttggaagtaaaagaaatgatatgggcaaatgccatgttcttacggcagccatgagaccagtctctttggctctccaaggaagaaagatacctcttaaagcattttttagaggtccgagaagtcagtgtctgtcttataagattctttgacaacatgacatcttcgctagaagaaaaacaccaccatagcctcatctgtttttccatcttaccttaatttttcattggccttaagttgtccttactgctgaatacatcgttctgtttttctaaagcaacaatatttgatcactgcttttaagaaaaacagactagcccttcttgtttttctggaagtttgagagtcctgaatatttcttcatatccaaatatcatcttggagccctatcgtgctggtcttcgctgaggctgatgagagcactttctgcacccctgctccatggccgtacatgacaacgcacctgcaccactgctgcaagggcggggggcagcagcctgtgttttggctgtcactgttacctcctgagaaggctgctgtcccaggtttgcacaccacttttgttccaaagttacacatggtctcttcctccctcgcacccattccaggttaatcatttctctatcagctgtttctccatccacagattctgaatgttgagactaattgttgggcatctcttttgcacaaggctgacagactccatactcagcatcgcacagccagttctaactcctctgctgggtctcggacctacagcttttgcctgagtgaaatgttcctacgacttttgctcctgagtgagatattccattgtacttctactgtttgtgtatctgctgggttcctttagccaagcctagcgtctgacgcaggcactagccgccactgaggccgtgatacagcatcactgtggacactgctggctcctctccttgggacatatccacactgccccttgagcttcacctttaaggctggtatgtacgtaagttcacggtggtcgtctgcatggtctcctcttgtttaaatcaggaccaacaaaggatgttcatttgtattttggcaaggcccattgggcctctgtgtagccaggttaaaagctcactcactaggatcggatgctgtcattgctctgtgagcctttcagttgaaatccttggagacttgaaggtgttgcttattattttgatttgattttctgcatctttatctggcaaatggacagattgctctcacaagaaacttagtcatgtcagcttttagagtccttcttgagtcatgttagcattggtagtgtaaaatagattgagttaaaacagctcaggatgcagctgtgcccccacttaattggtgagaggaggaggtcacggggctggcttgacaacaaagactaaatgtggcttttttgtcggtgactaggtgtggtccataagcagaagagccatacctacaaaaagtgacaactgtcctgtgttttccaaattaaaatcttgttacaaagatcatgccggcttttcgcagtgagttgaagccccaagctcagttccagccaggctcaggatgaccctcaaatgatatgtattggatagtgtaggtcaggagcctgtggaggggaccagtattttgcaagcagttactaaagtcacatttctcactgactcttgacggtgcattgttcaaaatctcatggcttaaccttagtgttaaatgctttcaagaaaaactgtaaccatttcaattttacaagtactttctcattttacttgaacattttacaagtactttctgtatttacttgtaaatatttcctctagcccttgaacccgcgcatcacttttttggttttcctcattccaccacagcatttaggtgaccgttaccatttatgtttcattaagcttcactaggaatgtaaggataatattagagcatttgcagaaaattgttatctccttttgtaggggattcgagacatatttgtagctacttcacggctgtagagttagtgggtgatcgggtattctgcattgttccttatccctttgtcagtgacagacacattgacataagagattcctacaggattataaggagagataaattattaaccatttttttacttgatccaactactccatgtcccatcaactagtggtaactgatgttgataggattttttttaagtccagtaactattcttgcagtatcagatgtttaccccaaattaggcaataacccagacttcgaatctgtaggtttatgattcctacattcccctgccgctctcaatggcttgttgcctcccttctgttgctctcagaaaacagatggagatcaggtaaagatgaaacgtgcactatatgttcagaaaagcaaacatccattgtcctcatttagattccatccttcaatttatgctctagaacctaaacctaatacccattgactacctcctgagtttcttaggtttcaattatttttttgaaatgtcatccatggataatagcttcaattttaggaaagatttaaatgtataactttcctcattcagtgctgtgtcatttcacagtacagatctgcgttaatttttgacagctcatatatacagatttttagaaatgtaatagaaaatgattttgcacatatggtgcaagtcttgctggtgtatgtttaatgtggcaacacgtgccagaactgtttggcaaaacatgtcaaatggagtgcttgagtcagaactctaatgtaaatgtgtctaaacagcagtatgtatcattatgatgtatttttgtaaacatagtgatggctgctttcagtcatgtaagtgctggataaaaataaccacttcagttggagtaatgtaggaaaacgtcacccagcagatgggtagtcctctgcaaagttacactgtcagccagtggcactggttcttttatttatgttgggtttttgttttttttttagaggagagtgaagaattgacatcagacaacatggagtgcaaaaataataacccatcaatatttgccttctaaatgtaaaatgtaaaagtttaactgatctgtgtacacattagagaccactttcacacgccacaatatgttcagttgcaggttaacactgagaggttgagacttccctcatctgatgaccagcttggttaatttgacttctgaaggcactaaattaccaagtatttgcagtaatggggaccggattaattttcctcacaattctctatagctgtctgatataagggctgtgtttttattgaatcacagatcctcaaattacagtgaaagcatgtcttgctagtaagactcatttgaaaacctctttattcttggaataattgggccagtacaagtggccagatgtatcctggccacattggaaaactatttgggcccgttcagaaccacttaactgcaacaacagtagtaactatagttaatatctatctattgagttattgtgtgacagttacttggataagtactttaatgcattctcattttaatcctcacagctaccctatgaggctgttactgttcttatccccattgtattgataaggaaactgcccagggtactcagctaagaagaggattgctttgggcataggaagcagaatgacgagttcagtcttcctcagtagttggagcacagttctcaaagcccatcaacactttggaatggatttgttgttttatttatgccatcaagggagagttgatatttgtgtattgctaaaaactactaaagtatgtcgatgcttaggtaggaacatacaaaccatatatcctctgggatctgcccaggtttctgtataaggcttgacctacgtaagatcctatgatgaagaccagaaaactttttttaaaagtaggtaaattaaaattaaaatcacgagtttgttcacatttgtcccataggttcctagtgcaaaaatgcagggagataaaagcaaacatttgaactcagtgaagtgagagtctttgggaactcctagatgttagaaatagcaccggggcatcaggtagccaacgttcaattcacttttcacgtttgtgtctttgtagctttagagctgatgagtctgattggtttggaagagagagttttaatttatgatgtcactgtgagaactgttgtgaaaattttgtaagaaaatacagtaatctgttgattttttcctgtagttttggctttcacatccctttggctgtgtttaagttcaagagcatgccaaggccatgagggtcctggcttgcacttcttgggaacagggcatgctagaggtgggtcatgaagctttcaaggtcactgttccagcccgaccctgcgcaatttaggcattgcctttatgtctctcctctctggaacttcatgtagcagcctaacaccggggccgagttgcctttactctattttctatgatgaatacttgtggagaaactgtgacaaatccattgatcctgatatttttattgttggagtcttgttgattctctatgaataatttctatttgattgtactgtgtagagttaatacccactagggatatgttaataaagctacaaatgcatagtgtaatatagaatagcaagatttttttgtgaacaatttatatagaagagtaagttgttttttaagtgttaggctcatttcttttagaaacttaaaatgttataaaagttttttaaacattcaatatttttaattataagagacatttgttactagagccaattatttcaggtgttctaattggagtgttgattttattacctcatatacctctagaatgccacgtgttctgttggggataaaattgcacaataaatgtcaagtctctgtt

SEQ ID NO: 12689 - DNA, 298 bp, Homo sapiens
tggggagagcctgaaaggcaggctctgttacctctctaaggagagctaccaggttgtcaccgcagtctgctaaccaattccagtctggtccatgaagaggaaaggtagatctgagctcatctcgctgatggacattcagattcatgtatattatagacataagcactgtgcaactgtactgtaacaccatctcttttggatttttttaaggtatttgctaagtctttgtaaacggaaattgaaaatgacctggtatcttgccagagggctttcttaaacggagaataagtcagtattc

SEQ ID NO: 12690 - DNA, 534 bp, Homo sapiens
taattgtcacattcctgcagtattttgatgacattcaatgtttactacagtgtcaccacctgactgatgtcctaacaatggtcagtgtgattcttgctgctcttccttgttgtgaacagtggatgtgggacagtattttcttttatgttttagttgttgttctttttagaaacatgattaaaaaggaaaaaatattaaatcaataagtgttaaatcaaaatggaatatctgattcaaaccattttacaagaatgaaagtaaaatgtgcatgatcaagcttagtatcttggtttttgaactctggtcaactggatatgtttgtcattttgtaacttaccaaaaacaaaccatcatatcataccaactaaaatgatatatggatgaagcaacatcaagtaaaattttagacgatggctataggacccaaatctaaagctgtctaaatgttaattcaatgaaacaagtattatttttgcatgaatacaatgttacaaataaatcacaagaaatagggaagatctgtttgttgcttgg

SEQ ID NO: 12691 - DNA, 77 bp, Homo sapiens
agaatgtttgagatggcatttcaagactctgtttgctgtccagattattttggaaatatattaacattcaaatttgg

SEQ ID NO: 12692 - DNA, 929 bp, Homo sapiens
aggagactggagcaaaattcagcttgaatgaacagagcactttttactaagtagtagatgaattttcagctatgcaatatgacaaaacatggggaattttgaagattgtcattttttcattcgagtctctatgttaaacattccatattttgaatatttatatcttgtacttgggtttaagagaagtagctggctctcaagattgactggctatttattataaagtactgaagtcacatagccacctataaaacagcatagaaatgtctgcctgtttaaaaagtcattttaaaggtagagtgtccacatcaggcaccatttgtgatatgactccagtggcgtatatttcattttttaatgacaagacactccaaacctttcagataacaaactatcattgcagaccttcacttttggaatgcaatctttatattttctgtgcatcacacacatgcttttctgcacgtggttgccttagtcatcttcctacagcaccatctagacatcaaaaattgtgctatatatcattggtaaaggaaatttgaagagatgacagtgcctaaaagtacagtttacatccttttggaaagtatgtgtaagtgcatgttttttgtgcaccttcttctatagcacttttttacaaatatcttatttttatttaacgacttgggttcatgtccctaatataagtatcttgacaattatgagctttatacctagcaagccacttcaggaaattcttttggagaatattttctgattattgttaaacttaatatacaattagctttattccttataaaatgtctaaaagaataatacgaagtatatataaaaggaattactgtaaactacattgccatagcaatttacataaaagtatattgttttttatctttaactcaaataaagcgtgtaataaataagtt

SEQ ID NO: 12693 - DNA, 5216 bp, Homo sapiens
aatctacttcataagcaaaaatcaaaagaagtctgactaaattcagtagaatcttttgtgcttcagtaacttgaagtttaaatttaaaatgcagagagaccaatggttaaaatgtgaatagtattgtaactattttaaggccttcagaagtaaataaagtagcagctttcaggctaatttacgtgaaactgattagttgcaaaatccagtaggttaaaatactcacatatttttacttaaattttctttaatttacttatatgttattataattttgaatttttaagttctatgattcatgttttaaagatggaataattttaatacatattttgtttaaatataatctataattgttttgtaatgtaagactaattactaatatttatgtagcaacttttgtgccagaaaaaagactgttaatttgttttttcttgcttttcatttgattaccctgcttgaaatacagttagttgataacataaagccatagttttcttggattttcttccaagatattgtattcccaagaagaaattgatttatttttaaactatcagttactgaagacttatgaaaaggtcaatttttacctgtcttttaatccagtccattttctgacacaatattaaacagaacgccagttgcatttactttggtgatttgcaaacttggaatgaagccaccagtcattttttaagaatgcaagatgaaaaaatcaggtaaaatctaaccattttattctctgcttcatagcatttataatgtatgatgaggttaacactgaaatattaaaatctgcaaatgcacattaatgcaaattaaatgcagagagaaatgattatttttttctttatgttttatgaaagtgttgcagtccctaaaataaaaatattgaggaacattgcttgtatttactcacgtggttaaaaaattattacctggcaaactgagttgccggtcatattgaggacaaaatcttaaatatgtgctattagcattgtttttagactagtaatatgcagaaaacagttttaggcctgcgttacatattgcctcttccagctccaaagttttggaccctgtcagttttgcaactacattatacattattataatattcttttttttttctagaaactgggggcagcctcaaaatcatgttaaagagggagttttgttagaggcatctttaatgaacatgaatgtgagtgctctctaaattcttagcatctcactggatgtaaaatctatcagttaatagttttaaaaatgtctcttttgttaagaataaatttaggcttcaatcattataatcctgtaagtagcttgacataccaattgtttataagattcatcacataaatttctggagaaccaccaggtttagcttggaaataacctttaaagattgtttctgttgccaagaccaatgaccatgatgaagagttttatgatcacagcctatcttacttaaggtttgagaggaaacctgtcacctctgcaattgttactctagtttttaatgttataattccgctgcgtggttagtgaatgtctggcatgattatacacgtgtattggaaatatctagttttttaaatttttaattaatttatttataatttactgtgtgttcccagctaactctattttttttttcacttgctcataaacttctggaaaaaaataagcatgaatcaaatggtaatgcccaatatccaccgacactgcttttcttgaatgaacagccaaactaaactttggccatctatatattcatttacagattattcatacattcattttaataacattgagtactgatggatgttttgaaagtgagcattcatttaaggataaataaaaaataaagtagtaataaagaataaaatactttactaaaatattgtatggctattttcatgtttgaagctatagcttactatcatgagacagttttgattttgggactctttcaagtgtatctgagcatgactgtattttaaaatacttaaaagtgcttgatataaatagcttttccttctgaaccacgttctatgtaaaagaaaaaaaatagctttgattttctcactggtgtttcattaacttggttttaaatgttgacaatatttacaagtggaaataaaatttgtaaatatatgaaagatgcctttccttgtatataccatcaagcaagcactttgttttcaaagcaagtggtattttgatcagttttatttaaatgtgtgatcagaaagaatggcgtacaaatcttattatttctaaaaataagaataaaaaggtaaaactacatttagacttctttctcaagaaatcaaatacagctttttttcaaagctgattcagttcatttcctgttcctctattccaagtataagtttcaccaccttgagaaataatttttttaaaaaatcttcctctttctctggggagttatataataatttattgaatttattggaacttgattttcctggatgctttcaatgtttttaatgctaacatagaccccaaaattagatataaagaattgggaaggatacctggagcacaaggaataagatcatttgtaaaaatgtttgtttatatagacctatcctctaaatatgtgacaaggatctagaaattctgagaggggaaaatgtgattttggatttacaatgacagggtaatattttatttatcttcgaattccatggacaaaattaggctcacttaaattaatttttgtaaacccaagtaagttctaaaaaaaagtaaaaaatacatagaatacttgagaatttagcagggacagggaaaaatttcccagtaagtctgaagtcttgatgtaagtgggaattagataactaattggaggcattttattttaagttaaagacagatttctttaataagtttttaaaattgatcaactttaaattaagcacagtaaatgtgtataaatatgaaggcaatcataaggattttttcacttgtgtttccatattctggcattagtatatcatcataaaatagacaatgtttttgtctcaagaacaagaataaaattgaaatctgcattcatgccaattcagcataaaaaagaataggctacagttctctcacaccaagggccccatagttataaatgtgaaattatattccaggtcaaaatttgtgaaaaatacacaaaacactttgattttacaagagaggagctttaaataagatgattttagtagattgaaataaataaccagtatttaagtaaatgtataacgaatgaataaatacatgcataatattttcaaagttctataccagtacctatttttactcttacaaaatttcctgtaaaaaaatactacatttgaaattatttcattggttttagaactggcattgaaggtacccagtagactcttaagcctttactgcttgtctcactagaaacatttatttctgacctaccaagttttcttcacatcatcaaatttattcagcttctcagtgctgtaccgtatgatggcaagacatacttggtatttccatttttgttggtcattctttattgctttttactgctaggaaggtcttgccaggcttctatacagttacaaaaaccattaccaaactttatcaaggactttccaaatggagttttcaaatactattgaccacattgctctagttaatgtaaggtcagctctgactttttgtgtttgcatttcggaagtgaggtaacctcattcaaatatatatgcagcactttctgtgtacaaagtactgttctaaatacaaaagggaatataaagatgactttcaaggaacatataatgtagtcagaaagatgagaggattagttatacaatttaaggaagggaggataactttgggaaggttttgtggaggatatgtgtttagagatgcgagctggggattcaacaggtaagagggagagagatcacaatttccaactgggtaaacagcttgaaaaaagaaacagaagcctgggcacaaatgaaaattccatattaattggaagttaagattcatatagagacaatgaaaggttaggttagaacaataaactgagaagtacgaatgtggacttcaggaggctaggggaaattacgaagtcataaaaagttcacagagatacttgagtacaaaagatacattattaaaatttctgcagaagtttcatcttatttgtgtgtgatggtttggaatataacaagccagttaggcgtataagcttatagtggctaatatgaggatgaaatccgtactcttgtgacacaagtcttcagcggagatgggggatgataggcccaaatagaaagaaaagtggcagacattaagctttgactaacagacaacataactgagagacatggtgtgttgggtggaagggatcctgtagtagatacttgcttgcatgtagatgggtacaaagacaccataaggaaattctgaatgtaatacaaaggcttatttttcctgttgatttatctttttcacacataaaagatgaagaaaaaaataatctgaaatgtaaatcctaaagtgatctgtctagattcttattttttgaaaaatgttcctcactaaaagagttttctattcaaataaccatttccagttttctaactgagacatacatacatatatatatgtataaaattatatatatatttggacaaagagaataagagaattgcaggtagaaatagtctactgtgtgtagacaaatccagaaagttgatttctgttcctcaaacaatttctgaaatatttatgtcagaataaataaaagaattgttattgttggacaatgaaacatacctggaccctttgagtgtgtgaatagtaaaggctgtgataactgaaatgcagctaagcaaaaagggctaattagaagacttttgagacatgatttacctaaatggaaatagtttggttttcaatccttcactgtaataacaattatttgcatctattaagtgtttgtagtcactttgtataataaagttttatggcttgtgattataatggcttctgttattctgctactgcctcattgttttgaggaacatttgtaattttgtggcaaaggtgtctcaatttttcagtgttctttactctcatgatccttagaacaaaaaaaataccagtaacttgttataaataaagagtcacattctctt

SEQ ID NO: 12694 - DNA, 619 bp, Homo sapiens
attgagacccatgttatctttgggatgtatagcaacattaaatttggtttgttttgctatgtacagtctgactaataactgctaatttgtgatccaacatgtacagtatgtatatagtgacatagcttaccagtagacctttaatggagacatgcatttgctaactcatggaactgcagacagaaagcactccatgcgaaaacagccattgccttttttaaagatttaccctaggacctgatttaaagtgaatttcaagtgacctgattaatttcctattcttccaaatgagatgaaaatggggatcctgtacaaccctttgtggacccttttggtttagctcttaagtaggggtattttctactgttgcttaattatgatggaagataacattgtcattcctagatgaatcctttgaagtaacaaacattgtatctgacatcagctctgttcatgagtgctcagagtccctgctaatgtaattggaagcttggtacacataagaaaaactagagatttgaaatcagctatgaattactctatatagtatctatagccatgtacatattacagcatgacaagctcaaataattatgagtcagcccgaaaggatgttaat

SEQ ID NO: 12695 - DNA, 115 bp, Homo sapiens
ccatcacagttgctgtaatgacagaattgtttaaaaaaccaacttgtcatgtaagcactctactgcttattaaaatatagcacaattgaaaaaataaaatgtgttttaaatcttt

SEQ ID NO: 12696 - DNA, 9323 bp, Homo sapiens
tttcgttgctatagtagtttgctaaaagatgatgaaaatgcagaatgtctttttaaatgtttttaaatataaacaaatattctttactaaaataaaaactctgtgtaatttttccatttaaagatataagccagttattgggagagttaattaattcctgagtgaaaaagtgaactatgttttttttcagaaaaattattttaaaagaactcagcattcagttagatagaatacacaccatcctggaaagttgggataagagaaatagagctattagagacaagtggcgcatattttttcattgatatttgaaaacagactatgacattttaaaaatctgccctatgagtatcaacctgccaccctaaatttcccagtggcactacccttaaccagaattgtttattagatgtcatatgcagtgacctttggtgatcttcttaggaacttcaagaaaaggaattttcctgttaaattaaacattggcaaaaggaaatggaatagtataaacactgatcaatagagtaaaatatctgctgcataaaaaactaagacaaagaccagaggaaatatcttccctttcttatgttggctaaacagtacttaacagttgacttgaaattttgttctctgagccaaagtttaactcattgtatgaattctttttcatggtagttcattcagttatgtgtttatttactacatagttattcagagcctactgtgttccaggaactatgctagaaactgtctctctaggaaagctcttgcacctttatctacaatattacttaaaaagtagaacagtcaatgcatgccaaagaaccataaactagcagaggacattgcattctttagtgaaggacatttatttagagtctgacaacatattcaaaatatttttcagcctctactgatagtggataacaaatatatttgttcacataaccactttgatgtcagtacaacttcagcaattggttttcaaaatagatgagaatatggtacagattgttctataagtgaaaagcattatgtacttgaaagtaaaaatcagggcaatataagacttaatagattaactgtcgcaaatttgatcagagtcacagagtagaatttgatcagaatcacagaatcatcagacataggaactgagcacaggctttttcaggtgctttccccaagatagatctagatattagctagtgaaatgctaaattttgaagagttttgtgtccgtagttctgtaattctgggcagtcatcatgttggtttttttgggagtttttttaaggtttaataactaaggggaatattttaaaattaagagagcagcaaatgaaaggagtaaagaaaaaaatagctgtcgggtaggatgccactgactctgctatgtgatttatcagggttttcatctactgacttctttctcattaggtaggcttaacaacttacttgagaattttgcaactgtctatgcagctgaatctaagtatggttttttgtcatattgcctctagattttcttctgtgcttctctctatctgctctggaatggatgagtgaatgtgttctgggtgttttagggaacatattgatagaaatgaccaccttgcagacaaaatctctctctctctttttgtttttatagaaaagaagtgatagtagttaattggcatcgatttttcagatattgcactaccttataatggttgtttttgatacctgaaaattgtgcaaatgccaaatattaattgtaagtcatatctgagaaatcattcttggctgtctttctaggtattccatagaatcaacacattttaaggctgaaagatactgtcgaaatcacccagtcccaaccccccaatttaaaattgattctagtaaaattaggtccagtaacacctgtatatatgtatatatttaataaagagtacttgtacaaaaaagcttatcataaattatttcatgaatgtgaatagatttctggccttgaggacgatgtttggaaatatggttggaagcacaattcattcgctactagttattcagagcgtactttgttccaggaactatgctggaaactgatagttcactattctgatgaaaaggctggttttgttgttgttgttgttgttgttgttgttgtttttggtgaggaactcttactctttgctaatctattggcctatcttaagaaataattatttggttattcattggcttcctttaaaaaaaagtgttcttctacaaatcttacagagtgtaaagagataaaaagaaatgattttttttcttacctttacatatgaaggtttaaaaatacatcatgtggccaaagaatgagaaaggacagaattaaccaaggattcttaattgttaatttgaagaacacattaaccagaaagcttaaacattattattaaaataaattatttcatttgcacacaatgataataatgatgataataataataataataataataataataataataataataatatgttgtttgctttccttaactgaatttcatcaaattcattcagtgatttttattttggtcattatttctatcttcccaataacccagaggtacatcaagtaaaaacacttttgcaaagagccagtcacttttccctcttagaaaatctcagaagaatgattaggggcacccaaagttctggttatctatgaataataatgaataattttggctgagaatggtacctttatataactcttttaaagatgaaattcagaataattttattcaggacctagtatctgcagtccatgttggccactaactgctacataattactttcaatttcctccaggcatgactaggtataaacatatatttacatgattaatccacattttaaaatgacttgcacttgtgcatatacatagtactttgaataatgtatattttaaattggacctcacaaatcttgtattaaagtaggtagagagtagagtcacactttttttgatgaaatgagtcacagagaagttacatgacaaagataaaatcacagggttggaaagaactttgaaaggtcatttttcaataatctcaccttaaaagtgaccccttttcaaacaaagcataaacaatttatttgtggcttattttacccatgagctggccaatacttcctggcctagaaaaatatctccactctccccattcctgttcttaatggtcttctcttctcaatttgtaaatattctccagtaaaagacaccaggtgtggagatgggtcacttaatttcaagttctgagtgtcttgtggttttaaacaagtctcttaacctctctaagactgattcctcatttataacagggaggaggtggattatgtaatatctaagagcttttcagttttaatactctctgattctcatagtaaatacaagcatactcttgtaagaaaaacactgaatactttgaaccacaaataagtgtttatggacaaaaatttagttctactgcttgattactttaagttcattgcttgcttcaaactaaggtttccctaccttcaaaaatatatataacatctctccatttagataaagtatattcttccccagggaagactgtattctttaaagacagtagaatattggctatttctcttttctgggatttcctgggcttttattcactaaatgggctcctgcccagtttgggtactgtgctgatttttagatatacagagataaaaatagcccctttccttgcaggtagtcacagtccggaagagatgatagatgcatagacaaaaaattatgggatgtaactaatgcttcagtagaatacagcagggccaaaactagagtgatactcatctcaggcacaaatatatatggggacatcaaaacttcaataatcaagatacctaatatttaagtgaatatttttaaaactcaaaattaatgcaaaagatttatgatgaacagaatatacaaattttaaataaattaatagaatcagtagtaataatattttcttctgcctcaggctccaaaattgctcagcatagcactgatctagatagaggtggataaaagatccacataacttaattacattgttgaaggagaggaacaagagtgatagcagagaaggtttcacagatataatcttaagctaaattttatagaatgatttggagttcttatagcctccattcccacttccacaaacaaacaaaaaaatgaaagcgcaattttatcagcacctgaggcaggagaagagatgaggatgtggaaagtcaaggggaactcttactacaaattcttagttctgtgtttggaggtaagggtgaatgcagggaagtgagagttgttgatgttggaaagacctaaagagcctggattaggaagagttttgtgtaaattactgaaggaatggaatttgatcaggattagtggcaatttattaaaaatcttgaagaataatacgatgaaaactaacatccttatttttctgttttagagaaagcacctgattattgtgtgaactatggtttggagggccacaaatctagaggtagtggaacagttgagatctcttattttttctttcctgtcttaaactttgccttctattccttttttctttttttgaccgcaatgacttcattgtcatttgtaaaagtgatacatgactgttaaagatagacattgtagaaacttaaaaacaatctcaaaattctaccacccagaaatcagaaatattttgtatttggatatgtttgtctagaagagtagattgcttgattaaaagacagagttttataaatgtagaagccaatatgacatacatgctgccattaaataataaaaaattaaattgacttttatctcaagataagattaaaattggagggtaaaactgaagaaattgttgaaatttggatggtgcttctttaaagcaagagatttagagagtcagagctttttatcccaggtttcaatctttatttcaggaaaattttctgcaattttgtctaagttaattttttttttttaagaaatgccaattatgtcaaatcccttttgtctctatacaatagtccccaactgttttggcaacaggcacgggtgagggtgggggaatggttttcagatgaaattgttccatctcagatcatcaggcattagtcgattctcataaggagcggacaaccttgcatgccctcctatgagaatctaatgccgccgctaatctgacaggaggcagagctcaggcgataatgctcaatgggtgccactcacctcctgttgtgctgcccaattcctaacaggtcatggataagtactggtcagtggcccaggggttggggaccactgctctgtaactatttacagtattctttgtaactactttggtatctttaaaattttctttaacttttgtcaaccataaccctagtgagttttcagttgtgattattctattttgtaacttccaatgtacttttcaacttcataatggttaattttgttttccattgctttcttggtcactgtcatttcatttttcttctctttctctatttttaccattgctttattgaaatatcttctttgagcttctcatgtttctctattaatgagatcatgtctataatattttttgagactacagagacctatttatataaactcttcctctatttcttgaaaaagtttttatctggcgtgagcttcatctgctttttcattgaggttttatctcccttgcctatttttggggctggtttctttctattaatcactgagcagagccagctatttactgaactacagtgtgggaagtggtgggagggtgagtcagatcagcccacagaagctatttaaatttcaggtttcaagcccacctccccaaaaccgttttatgtgttttttcttctgcccaggcaccatatttttatatctatttttgacatttgggcggcctatgtagttcacagtgtaaaactctctgttttactttctttatgttattgctagtgattattgcttgtagtcccacccccttccccacattagccttagtattctatattattcagcaagcttgttcacaactctcaaatatagtctatcagaatttttatctttacctctacattccactattcggaagtatatagtaaaatcgtatgaagacagattttgtctttttcttgcctgtttacactctatcttacagaggtttcaaacaaaccatctttgtttgaaacatcgcaggataatgatacttattgaaatctacatcctgcccaagatatatgccagtcaatttcctttctcctattagtgcaaatggctacctacttaaaagctgctgactatagtttgtcatcaattacttgttaattacagatatggttttcatttttttttctcaatttttcattatgttatttttggagactgtcttaggtggggagtgaattataaatatttttatttcaccacctttaactgagtcaccatatgttatttgcacttccaatagaccagggattgaccagagtatcttttactgatatgaccaccagagctacatggcttttaccttctgtatatcagatgtcactggaatcaagcattaaacctagattaaatctggattaaaccagctgtatggcaccttagaaaattgagaaggactaggaagctgatagaaagaactcctgtataaaaaataaattctttttacattttccttggtagtatttctgcaagcttctttagtttctataggggaatcccagagttttcctctgagattgcttccctttcctttgtattttcatttttccctcttgggctttacttttcagtcgtgtatttctatcccaatgttaatttattacactgtttatattttcctgtccttcaattcatcagtagattagtgaagtacttattcctttaattataagtataaacgtttttaatttctttttggataacgatacatttaatggaaaatttttaaatgctatggtttcttaatagcttttctctaccactaattacttccgttaaaaaaaaaaagaaatacccatgcgtaatataaaagaaattttgaataaaatgttatcctttccttttactagagacaaacatctccacttcaaaatggaaaaatggaactatgcaaaggaaatttacgatattcaagagtatgatattatcactgaaccgattaatttaattgaaaatactaacctgcaaaaaagaattacacaaatgtatttgaaatgtcatcagatacctcaagctatgacagagttgattatgttacacaagtagtaaaggataaattaaatatattctatattaacactaagatttaaaactaattatagtcttctttaatttttctactgtatacatttcatctagttttcagtaaaacaaacttttcattacttttacttatcccatgcaaatctagttgctataagatataacctaatttggaaatacctccctgtaatacattggaattttggtgtgagtgtgtgtgatcagagaggataaacaaatggtgtcagcaaaatagaatgtaaaatatggagataatgtggatttacacaatttgataaaaattctcccttgaattttgcagatcatatatgaatatcatcatgtgaagtgcaattaggattttttcatatattaatacatatacatcatctctttaataaaatattttgctgaactcgtttaatatttctcatgtctcatatttcatattttctcatatgtctcatattttatattttctcatatgtgtctcatttttattattactatagtatccattaaaggagactggcaaatacctgaacaaagttatgttgttggcaatataagatattaccaattgcataatattatttccaaaggcaaattaatatgcaaactatagatttccatgggtatctatacaaattattacttgaagtccatagaaaacagcttccttagagggaagtaaaagaagctctgataacagacaatgtatagcatttcagttaaagtttgattgacatatttttttctcagtcttttatacttgtgaattatagtctacattttgtctttacagatgttgctaacacagtgcagcatgttggcttgtcattttactgattatgtatattgtctcctagttcaagtatacagtaaatcagagctttcatttttcaaggggcagaaaaataattgttggttgataaggtaaggttatatgattttgagggagcttcattgtaaattgaatgagaatccggttttcatgcaaaggtgtatctatgcgataatactttgaatgtctgtagtttgaaatagaaggttaattttttccactggcttatccttaatgaaggaaatcccctgataattactttgattctgaaaatgttgaaaactccagaagaaataaagcttttctttgatttctcagctgaagtgttgtacaaactgaggaatatgaagtccattcccttctttcttctcttgaataattttaaaattgtttgtttagttgtacaattgaaaatattccttattatagaagtaaaaaaacaataatgcatatttcctcatatcataaaaactaaatttgttatcatctgagcttcaatattcttgctcaattagaatagtaaatataaagtgtgatatttataacagttcaaggtttgataggagatagaggtgttttgattttatgggaaaattacttcctcaagaacacatttcttgaggttttagtaatcacatttgactccctgaaattggcaattttattcaatgtaggaatattatcatggtatattatagtgaggagcacatagtcattattattttgtttttgcaaatttattttgaaaaaaaggagcattatcaaatattggtttactattttaaagtaattcatcaggaaatgattttttaaacactgtccctttaagtaaatgtcccttgcttttcaaagctcaacttattacttatggtaatagagttactttgcttcttaaaacaaagtttatactagagcatagcattgtagaattattcaggtctcaatttctcactggaaaatgagtctttaaaatagtaaggatttaaatttctataaaatttaatcacagatacttatattttaagataaatgtgttggagctaaactctggaattattaaaatataaaacattatatccctctaatgtattttttctatttaaatttaaaacaataaacataaatatctttgg

SEQ ID NO: 12697 - DNA, 851 bp, Homo sapiens
ctggaaatgatgaataccagtcctatcagattttattgctccaacttatatggcagagtgaatactgcgtgttcagaaaccttgtgatgtcttgactgttgcaccaggctgagaaagcagcaatattgatattataaagataaaaatttatcaacattccttaacaggaaattacatggttgagaggaaatgcataaaatgaaagatgaaaaatctatagtagcagtttatattttcatgattgttttgcctcatttattaaatatttgagaaatctttggagatacatagttttattgaaagctaaaaataggttctaaagtaatgtaaaaatataaagcacaaatatacttgaatattgcttaaagaattgtgtgaatagcaacatatattatggatatatactttgtgatatttttaaaaaataattttttcaaagaatgtataagctgcatatataactcaggagattccatgtctttctcatatttcagaggaaagattataaaatataaaatttcttagagaacacctctttgtcagagataaacaagaacaaatactctaaacttatgtgaacagttttgagtttatgaattctagaaactaaaatcaagaatacagaaaaatgaaaataacattttacttctgcgcttctatgtttgggaaacattgctctgataaaaaatagctgtcattatgcagtgtgtatattcaaatatgagataagactatgtacacatccacttttgttaataaactcaatattgaatactttgggatgttaaattcattggaaaaacaaaccatttgtaacctcagttaactttaacaacaagcattctgagcaa

SEQ ID NO: 12698 - DNA, 1718 bp, Homo sapiens
ttataaggatgatcagagacttttgccagctacactaaaagaaaatggccttcttgactgtgaagagctgcctgcagagagctgtacagaagcacttttcatggacagaaatgctcaatcgtgcactgcaaatttgcatgtttgttttggactaatttttttcaatttattttttcaccttcatttttctcttatttcaagttcaatgaaagactttacaaaagcaaacaaagcagactttgtccttttgccaggcctaaccatgactgcagcacaaaattatcgactctggcgagatttaaaatcaggtgctacagtaacaggttatggaatggtctcttttatcctatcacaaaaaaagacatagatatttaggctgattaattatctctaccagtttttgtttctcaagctcagtgcatagtggtaaatttcagtgttaacattggagacttgcttttctttttctttttttataccccacaattcttttttattacacttcgaattttagggtacacgagcacaacgtgcaggttagttacatatgtatacatgtgccatgttggtgtgctgaacccagtaactcgtcatttgatttattaaaagccaagataatttacatgtttaaagtatttactattacccccttctaatgtttgcataattctgagaactgataaaagacagcaataaaagaccagtgtcatccatttaggtagcaagacatattgaatgcaaagttctttagatatcaatattaacacttgacattattggaccccccattctggatgtatatcaagatcataattttatagaagagtctctatagaactgtcctcatagctgggtttgttcaggatatatgagttggctgattgagactgcaacaactacatctatatttatgggcaatattttgttttacttatgtggcaaagaactggatattaaactttgcaaaagagaatttagatgagagatgcaattttttaaaaagaaaattaatttgcatccctcgtttaattaaatttatttttcagttttcttgcgttcatccataccaacaaagtcataaagagcatattttagagcacagtaagactttgcatggagtaaaacattttgtaattttcctcaaaagatgtttaatatctggtttcttctcattggtaattaaaattttagaaatgatttttagctctaggccactttacgcaactcaatttctgaagcaattagtggtaaaaagtatttttccccactaaaaaactttaaaacacaaatcttcatatatacttaatttaattagtcaggcatccattttgccttttaaacaactaggattccctactaacctccaccagcaacctggactgcctcagcattccaaatagatactacctgcaattttatacatgtatttttgtatcttttctgtgtgtaaacatagttgaaattcaaaaagttgtagcaatttctatactattcatctcctgtccttcagtttgtataaacctaaggagagtgtgaaatccagcaactgaattgtggtcacgattgtatgaaagttcaagaacatatgtcagttttgttacagttgtagctacatactcaatgtatcaacttttagcctgctcaacttaggctcagtgaaatatatatattatacttattttaaataattcttaatacaaataaaatggtaatggtct

SEQ ID NO: 12699 - DNA, 920 bp, Homo sapiens
aaaaagttttgatcttttaatgtaactcagattggatttagataagttgttaaatttgaaatattagaaaatgtatattatagaacatgatatatatttacattcatctctgtattctctcagctgttgttagaaggacagaatgttaaactttatcttaattagtatactagaaagggcagtataatactgttttaaagtgaaggcatgactgaaactaaaatatttcataaggcttagctagaggcagagtaacgtgtttttgttcattgggcttccttgtacttagttttttcatttaataattcaaaccaacacttttaaaaaaataattcagatgagactgagccatatctgcagtaagagaaatatttcttaatgttttggttacttatgatagagtacttttcttgatactgttaactttgtgctttttaaaaaaagtgattctctaacagacctcttaaattgtgacatgaaggtatgtaattagatttcagaaattggtttattagtgaggaatttttatcaataaatgtcatggggcgtgttcttcagaatatatagttattttcaacaaatgccaggctagattcctcacatgtggctatttcttatgtaagaagcttttaactgaagttggcatgtttcgtaaaacttgcgtgtcttttaaaaataataaaaggaagatgagtatttatgaagaatatgtgctgacaacagggcttatgaggtctatgtaccttaatctcgtttctccttaccacaatcttaaatagatttcagctgaaaataatcagttcttatgaaaacaaatagagaaatatcagtaagtcaaatctgtttgaattataattcctttcaaatagttttgctatttaatttatatgattaatgttttcattaaaatttttgatacc

SEQ ID NO: 12700 - DNA, 442 bp, Homo sapiens
aaccgaaaagctggtcattaacagggacatgcctcatgatccttttgatcctatgactgacatcaactaaaatttaaaagaagaggaagactcagttgggaaatttttccatgaggaaaatgtgctttggtgcaaggtacaaggcccacaccctctctgagagatactatgattaaaaaagctttatatcttgggatttttcacaactgataatgtgcaaagatataaactgattaacttgtcagtgtctgtattttctgattttttcacatacgctcattttatgtaatattcttcataaaaatgaataagtagccctcactttcatgccatttccattgttgagtgaagcgtatttgaagtaactgagaattaccatgtacatcatatttgggataacatttttaaaaattagactgcaataaagtaaaattaattatgc

SEQ ID NO: 12701 - DNA, 1244 bp, Homo sapiens
ccggaaacagaatgccaacccaaagagtcatcttgcaaaactgtcatttattgtgaatatcttcaccatatggggtcacttatggtgaatatctttcttcagagttgctgactcttgaaaacagtgcaaagatcacagtttttaaaagttttaaaaatttaagaatattcacacaatcgtttttctatgtgtgagagggatttgcacactcttatttttctgtaaaatatttcacatcccaaatgtgaagaagtgaaaaagacttcgcagcagtcttcattgtggtgctcttcatgatcatagccccaggaacccttgaggttcttcttcacaaggctgagagtgcttccttcttgaagacgagtgacattcatcacttcagtgatccatgcatagaatatgaaaataaattcttccaactcatgggataaaggggactcccttgaagaatttcatgtttttgggctgtatagctctttacagaaaatgcacctttataaatcacatgaatgttagtattctggaaatgtcttttgttaatataatcttcccatgttatttaacaaattgtttttgcacatatctgattatattgaaagcagttttttgcattcgagttttaaacactgttataaaatgtagccaaagctcacctttgaacagatcccggtgacattctatttccaggaaaatccggaacctgattttagttctgtgattttacactttttacatgtgagattggacagtttcagaggccttattttgtcatactaagtgtctcctgtaattttcaggaagatgatttgttctttccagaagaggagacaaaagcaagatagccaaatgtgacatcaagctccattgtttcggaaatccaggattttgaattcgagatgaaacaaccagcaatcacagttaaatcttaactttgcctgcactctttgtaggaatgatcagaaatttatctttatcattctgagtgcttcaggagtacaataggaagaaagatactggagaaagcactaatgtaatcaccatgaagtctgacaacaggagcccattatttgcgtactgtcccaccctgtatcatggttctctgggaacaagctttatgattctcattagagtttatttgttgattgtcagtagttgcgacttttaaattatatttcccccactcaaagaatggtatctttatatatcaatgacattcaataaatgtgtattatttctaatgagaa

SEQ ID NO: 12702 - DNA, 1633 bp, Homo sapiens
gtgatgtgtgaccagtggctcccagattcccaagcacaaggaaggatgggcattttgtggcttttaatttattgagcacttggacatgtagatcattttacttatacagtggaaacacataaataatttgcttctagaccagcctctgtctagacttgcttctagacagaatctcccagagtgtggaaatgttgccttagaaatggtgattaaaatcactcatttctattcattcctcaggcacttgagtgacagttgtttaccaggcactgtgtgtagccccagggtttggccattcaggggtgcacacatgggaccatgttagctgatgccagttgaaggccagggtatttgggaaggggaagggtattagagtcatgaccaagcaacccttctttttccctttgacttctacagaaatctgggcctgagacattgtctacaattgggttctagatacatcaggaacccatcttggataaataaatacctatcttttgttttgaaaacatctcagttttcaagactgctcttagtattacatgaacaatatttgtatgctgtatatattgtaaatatatataatatataaagttatatatttatgagaaacacgaattgtcttttaattgaaacttttaatcctgtagtataggagttcaccttcttaggactagagactgtgccttatagctgttaattcatttccccctgaacatcaaatatgcctgaagagaagaaagtctagattcttctatgagtaacgccccctcctcactcaggtaaatgtgtctggggatgcctgtccagcttaaccacgtgcatttggcctatgtaatcctgcccatggtggccgcagctaatcagaatcagatggaaaattaaaccgggtaatctacttctaagccttaagaatattccctgggacacagacactataattggaagtgctgagctctggggcagaaggatcaggtgaccttcgcaacaaagtttgcccccacctcacataggacccggaagcagcctgagctgtggcggaggatccaggaagctacggagagaagcagccagcatggtgttccgtgcctcccggacgtttttcaggaggcctggttggacttgggttcctggatggtgggattgttgtacagcctctcaggagaccctgctgtcaagactgtgtgtgtggatttctcacccttagaagctctactaagacatcaacggaattagggccttcctttttgccttgtgagcgccaaggaaaagaaactatctcggtcacgtgagcgccagcgaaaagaaactgtatcagtcatccagagaccgtttattgcccaacacgttattcttgctgttggtggggtaactagccgaggaagacacagcgccttcccttcaggagttgcgtctcctctgcaggccacgatggtctgctctggagcattgggtgaacacacaggctggctgctctgggcagcgccttcactctgaccctggagaaccatttcatttcatcctggtcagtctagagtctgtgcaccaggcagtccatccactgaaggctgtgtttattcttttcctgtgcccctcataatggaagaaagtaaactgcttatcccgagcctta

SEQ ID NO: 12703 - DNA, 141 bp, Homo sapiens
agcatggattaagtgagaagggagactctcagccttcagcttcctaaattctgtgtctgtgactttcgaagttttttaaacctctgaatttgtacacatttaaaatttcaagtgtactttaaaataaaatacttctaatgg

SEQ ID NO: 12704 - DNA, 678 bp, Homo sapiens
gaatctttcattaaggaaatattcacagctctaaacaatattcttttaaagatcatggcaggggaaaactaaagccttcacaacaagatcctgaaggagacaacatgaattccaaccaagtggacactgatgcaaatgagggttttgtgggcccacttgagggcgatgattctagaagggttataagctaaacacacttgttaacatcctatggggatgaacctgctcttcagtgtgaaagagaaagaggggaatattttgagatcattccaagaaccatgcaccattattacaagagctccaaacaaaaccagttcactgagaacacaggagcacttcatcaataggttggggtaaatattcagaagagaatctgttgcagttagacgaagtggttctaactttccttctcaaatacagacctggagcaatctgatgggatttggctctctgaaaagaacagctttaggatgacaaagacaaggatgttcaacttgatcatcaaagagaattcaaatgacattttttcatacatattgaagcacttaagtggaaatgctggatagattttaatgaattctgaacacacactagcacaactttttggaggctgatcgtgaaactgcaaaattggaaaagttctgagtaaatataaatgtttttaaataagttatgtta

SEQ ID NO: 12705 - DNA, 3251 bp, Homo sapiens
aagaaccccagaggtcaccaacatgtttatatcttgacttgacttttttatgcatgcaaatcattgtttttacagagtttgtgataactcataattattttaatggcagagcactgctgtatctgttttatggtctacatagttaaaatcttctcagagagcctaaattctaatacattttattaatttatactaatcttcatatttactgttctctaaaataattatgagaagcaaataaaatcaaaagtcatgtttaaagacgtgtttttaaaattccactatcccttttctaaaggttaaaggtctgaagcagctgtttagattcactgtaagtaaactttggtaactctaatggggatagacccacttaagatatttaaaaaggtatggcatcagcgtttcatgctctgccttttagcttctaaaaggaaagatgcagatttctagtgcattaagcctgagccatattctcacatgcaagtgaagtcattaaagaactttacatatgtgagatagaaacaatggttccttagttttgcactgggaagaaaatattttgtaaaagaatgtttatttgaaataatgataactatcaattgttcacaatgtggtggaaattaaaacaccatctcagctttaacttttaaataataatgataactatctttattgagcatcttctacatcctaggcattgtcctaggcattgcatgtttatatccccaattctcaccacaaccctgcaagtaggtggtattatccaagttttacccattaagaaactgaagatcagagaagttaagaaacttgctcaacatcatatagtaagtagcagagttgggattggaattcaggcatgactcaaacctggatgtacttgattccaaatgccatgttgttttcactctctgcactgactttttaattatttaaaactctagaaagatgaacaaaggttaatttaaacttacctaagaagatgagaatcaaacaaaacagatatgcttactctagttaaaaagaaaataaatctcatgtcagacccagaaaggaccaatcactgtccgattgtaagctatgttgggccaattccaaaatattatacgatggagaggtcaaatttacctacttctgagttacctcagtttcccaacaatggaccttggcacactggagtaacaatacataacagagttgccaagatatttataccctcagcactcggggcaacacagtggaaagtggggaggccatagacccaaacaagttctttgggccaggcatggcctagtaagtacaccatgcctcgaaaataagtccagaagcactggactaaagagtgctaatgcaggaaataatacacataatttttaggtaaggataataatttatctctgctcctaatattactatcccattgtaattatttataaccctcaagccagttgatttttaatatatttgattggaaaagaactctctggtattattaagactcacacagaatcagggacagggcccccaaaggagtttgctgtaaaataggcagtagagttgtggcatgggcccaaccctgcattcaagtgtaacagcattctgtcagggtcactttgaattgtgcacataagaaaaccaatacaaaaaacaatttgtattcaatattgtcacatttctctctggtagaaaaatcaaataccttagagattatgaagtcattaatttatactgaaattggattgacttactacctaacactgagcgctgtttttaaatgaaaagaatgagatttataaccacttgagtgttattgcagtgatatttgaactcatttgaatatattcagtatcatttaatgtctgaattcagaaaaaaatgccgaaatttttattcagatggtccataaattaaattgcatattcattacttatctgctctatttagatttattttaaaagtttatttaagtaaatatttttataaaaaccagaaaacactgtattacaaaatattatttattaaatgtagttcaggaaataatctatttttactcttttttgggaaatacttgtgtttttgatacatctccatgaagttcttttgagaggagaggctattttgatgtttttatacaactgaaggttaacagccatagcattttatgatactttacaggtagtcctggctttttccctgaaacataagcttggaaaatctattagaaagcagaacagggcaaactctccattttacttatggcttttctaatttttaattaattaatttatttttttgagacagagtcttgttctgtcgccaggctggagtgcagtggcacaatctcggctctcggctcactgcaacctctgcctcccaggttcaagcgattctcctgcctcagcctcccgagtacctgggactacaggcatgtgccacagttcccggctaatttttgtatttttagtagagacggggtttcaccatgttggccaggatggtctcaatctcttgacctcgtgatctgcctgccttggcctcccaaagtgctgggattacaggtgtgagccaccacgcctggccggcttatttttatccacagtaaatcttcagcaactcattgtctccaccagatagtatttttctgtaaatgaaatgctgacttcgcctcttcctgctgtatgctcatccctgcactgagcacagatatgacaagcagtagccatgggggaggtgggtgacaaagataggaccccgggagggggcgcaggtacatgctagtttcaattaccacagtattctagagacgggttgcaatgacaaggggggcaaatgaaatcaatgcaagatttcttaataatgggcagacagaaaaatgtaaaaccacacaaaacggactgctgataatattttaaaatatacttatttgtcttctttttgcattgtgaaaaaaacaaaataaattttgtgtgataattttgatgatgaaaggtggaagttctacctagatttgaatgagtgtttttttaagggaatgagaatgtcatggtgctaaacctgacaaataagagatcattgaaatgctgaaaattttaacagtcttcttaaaagtattgagggggcaaaaattaccaattatggtatacaaaaataagcctataaatgtgtttcacattgctaacttgagtttcagttgattcagtttgtaataactagtaatgagcttctgtttacaataaaaattctgtaaattg

SEQ ID NO: 12706 - DNA, 2596 bp, Homo sapiens
ctgaaagacctgcgggactgattcacgtggggagaatgttcacagcactgtcacccggcttctccgcaggctttcctcttccccagtggcccactaatggtatcactccgagtctcaatggtctggctgtgttagactctctccttttgtgtttttacatgcagcactactcttggttttatttcagtctgacatagagttaactgcaatcagattgtagtctgatttatatgaataacggttgctaattttaggactgggtgaaagctatgccattcattatgtctggctgtattagaatgacatttcctatgaatgtctacggtctgttttaggtgtttgctaaacttctatggcttccagggtcttcttacaatgcattcctttaacttgtccctggaagcattgctacccattttcagcttctctgcctctcttctgatacaaggacagaagaattgggtagatattcaccttttaggggtgcaagtatagctttaagtttgtgcaagtgaaaatgttgaaaagtgagtaacctcgatattaaaatcatccttgacatgaaacagggtgaagagaagctgtccgtggcggctggtgttggctggcattggcactgggctgtgctgacctagccattacaattccaggggctaagaaggctcagggcagacaaagtcaagaggaggaagtttttgtggacaatgaaaagttattttcgtacctttctaccaaaaccaagtttcaggaaaataactctatgttgtttattttcagtgacacttatgtaaggccctgtgagttgtatttatcctgtatccggcactgctaagcttttcaaggtatctttccaatcctgctgatgtggcagtcaatggctgcagggctggcaaacctccccttagccagtcagcacggcattgttccttatcaggaataacaaaggtactacatctttccagccatcagcacgttgtacaacttaactttttaacatagtccgtctgtttactgaggcactggcgagtcccagggctgatacagaaccttccctagagggaataccagagttagctgggtatagaggtggctcaaaggaagtgtccgtgggcagggggaggaatgaacaaaatggcgctgtttctttggctcagactcctagaatgcttgacaagacagaatttttttggaagaacctcatctcactatagttacttttttcacttttgttatatatgtatttattagagcatttgaatattggtacctttaaaagggtcatttggtgttttgctgttgagctggtttttgagtcatagatcttggcttcctttagaagccacttaacttccatacactataataaactgtgaacatatttttgttacctaatgcatccactgatgaacatgcaaactttgggcataatgtgaactaaaattgaaatggaaaatgttagtggccattttgcaacaatgaagaggatagcactttatctagatgaaaactggatttcttatctttgaaatatcttgaactgtttattgctcagaacttaagtaagcatgccaacatttcgtttgtttatgcttgaagtgaaatgttttacttttcactggagaagacaaaacagggtgatcttcatgttattgttttatacaagtgatggaaatgtaccttgccttgtttagaggcaatttcacatttataaatatttttttttcctccatgaaacttacgcagtaatcactacctggaaggtgagttttgatctctttttaaggagaggcactttccaactgaaggtgattgatgtagggaaatgtttgtactatatagaatccatatatttgactgcaagttacaaagttttaagaacatgatggttggtctctaatatatttggaactgattcataagaaaagttattaaaattatctttgaaacacctcttgaagctaatttattagaaaaaatatttcagttggaaggctgtagaagtaatgtttaaatgctaagtcataagttcaggatatttcttttctatttggttgtgcaaaatgtttttcccagttatttaatcgaagtaattccttttaatagaaagagtcagttaaaattcagcattcatggatagatttttggaacgaaaaagggtaagtataagaaaatattgcaaacacattaaaacagttgtatggtgcaggaaaagaagattggaaaaagaccaaaacacacttctccagcaacactccatcagctttttaaaatttagagctatctgctaattttttccctcttccttctcaataaatgaaacaaacactgggcagctgcaggtttctcccaatcatgtctctttatgtaaagacagtaacatgcaaacacttttagtttacatccctcattcacagtgtaaagcaggaaatggtgtgggagatgtgagaccattctgaggtcagcgatagcccaaaggctctgcagtattccctccaatggccaaggattccgtgtgtcatctgcaggagtgagtaggcctgctgtatttcttgtaactgctgggtgttacaaaataagttacaatgttttacacttt

SEQ ID NO: 12707 - DNA, 984 bp, Homo sapiens
gcatccgctaagaagataagacctactcaagctggaaatgccgatgcaattttctgccaccactccaaatactcctccacaaccagcgtccctgtcactaattgcgagaatgatggaattctgcctgaagggtcttgatacctactcagtgaggtactttgcttggattgctgtgattcttaaaaaaaaaaaaaaaaagtttttttattttcctgaaggcgacagtctgtcttttggcgagtccaattagtgatcgtttccatttatccttaaccctctgtttgtgatcttcctgattccacctacaagttcattagttctaaataaaagcctgttggcaagtgttggtagattacaactctttttatttgaagttgctcgagaagttagacatgctttagaattatgagtgtggggaaaatttgatgttccttaggattatataactgaggagggaacattgcaaatagggtctgaggctttgtttctctcttgctctgaaacatttctgaaaaggcaaggaagggaggggtagtgtctggggcagtgctggtagcctgcatgtgttgtaaatcatcctgccataacaaaggactgcattgttctagctggcccactgggcaggtctgccaggctacttggaactgtagtgggaaggtggttgattggagggttatctgtatataaaaggttttctcccctccaaagaaagactccagtacaagatacctggtcccagggagtctaaattgtaacagcaacccctgtggactttgtgggtatgagttttgattgaaatataaagctttcttttctgtaagtttaagttttccatctgaccatagcagaaaaacctagacccacctagtgaaactttgtaagaactccagggcaaaaacgaaccacttgcaacccacatgtttgtaggtgtatggtcgatggaagtttctggcatccatgttggtaataaagagataaaactga

SEQ ID NO: 12708 - DNA, 1606 bp, Homo sapiens
aatcaatgatgggtcagaggaaaacagaaaaatcacaaataggctaagaagttgaaacactatatttatcttgtcagtttttatatttaaagaaagaatacattgtaaaaatgtcaggaaaagtatgatcatctaatgaaagccagttacacctcagaaaatatgattccaaaaaaattaaaactactagttttttttcagtgtggaggatttctcattactctacaacattgtttatattttttctattcaataaaaagccctaaaacaactaaaatgatttgtataccccactgaattcaagctgatttaaatttaaaatttggtatatgctgaagtctgccaagggtacattatggccatttttaatttacagctaaaatattttttaaaatgcattgctgagaaacgttgctttcatcaaacaagaataaatatttttcagaagttatagttgtcttttagtatgtgatactaattaagattacttttgtattatcactatttaaaagatcctagtaatttattctttcaaataccatgttatttgttaccatcaccgatgaatacctcctaggcttatccctaaaaatgctcgctcagagaattaattataaacttgttttgtttttagtaagaaatggctaaagctctttttttccacaatcgttagtaactgtataaaaactcatgctgctccaccagtgggccttggaaaatgcatcaagaaggccaaaccagcttgaccctggctcacagacatggtcatgaggcgatttaaatttgtgccacaatgaagagtgtgtgtacacatgcctcctagaaactacactatgggtaattaattaatttatttcatagaggccacccagatgccttataggttttattaatttggatatgaaagtgtaccccatttggtttcaccaggaacccaaatttagaatattgaaaagccatcaaaaagttgtgatatcaaaaatgtatgagtctcttaatatactaagcaagagtgtcacagcagtaatgataaagactagttttaatctcaagccttagaggggccctttgttgccttttgtgatgcagcctcttaagagagtggtgtttgattaacaaaaaaactgtggcccaagtggaacccttgaccttttctcagataatctgtgtatgtacacagctaacacagctctttagattccctgttaagtgactcattcacattcctttcttggatataaagtcattgctgtctttttatttttgaaatagtacaagacaaagatttttaacttaacatgaaaaattcactcttttattttggaaaaaaagttaacttttcatactaacaaacagaacaagatttaaggtaaatttcttaaacattatccagaaaaataacaagatttatagtatctacttctggtactaatatacacaaaaggccaaaaccatgcctattctgcaggtgtagcttcggtgctctcctgttcaggggcaggctcactgcccgcttcttttccttctttgcttcttttagattttttgtgtttgtgtctcctgtgactatctccttcttcactttcatggcgacgtctactattac

SEQ ID NO: 12709 - DNA, 1085 bp, Homo sapiens
gtgttaataaaataaaataaaataaaataaaataaaataaaataaaataaaataaaagacctctggctgtaaaacaaaacaaaacaaaaaaatcaaaaaacaacaaaaaagaaagcagtggagtgcatttgtagatttggtacattaatgtgccaggccctccatcccacttctctgaaagcctctctcctgtgtgtgagagggaaggcatggggcaagaaggggaaggtcttccttaaatagctggtggtaacattgtcctcagctcaccaagagaactctctgaacaatgtgactcctattagaaatgagaacaagtacctattgtttaggcttaaacaactctaagtgtttcttttagagataattaatttaattaaaatggtccctgaagccaaactgagcttcatattgagcactatacacattccttccaaattccagtacaaagctattcagaagtagtaaactatcagtcatgtagctcacatttacttccactggaatggaggccctagcacaggggctgggataggaggctcttcctgagctggagggagtagcattagttctgatgcagttagagaaaagatgatttttcatctgtggatttagttccaaaaatgatgtgggcattttttccttcatggtagtttcaagaagagaaatttggtttactgactgcatccaaatcaaccatctacaggataccctcagcatgtcggtgctcaataaatgaatgaatcagtggataaatggccaggcgcagtggctcacccctgtaatcccagcactttgggaggccaagtgacctcaaggcggatcacttgaggtcaggagttctagaccagcctggccagcactttaggaggctgaggcaggggtggatcacttgaggtcaagagtttgagacaagcctggccaacatagtgaaaatccgtctctactaaaaatacaaaaattagccaggcatgatggtgcactgctgtaatcccagctactcaggagactgaggcagaggttgcagtgagctgaggtcgtgccactgcacacagcctgggcaacagagtgagactctgtctcaa

SEQ ID NO: 12710 - DNA, 304 bp, Homo sapiens
catttactttatttatagagactttccaagtatgttgtctttccaatggtgccttgcttggtgctctcctggtggtgacataacattggttctacagaatcgtgtggtgttttttttgtttttgtttttgttttttttttaaataaccgcatgttctaagtgtgcatttttgtcaatctttgcaacagttatttcatacagatgtttaatacttaagttattgtgctcttttctgttatgtattctgattttcaaggattacttttttgtattatcaaaaaaatacatttgaacttagcataaa

SEQ ID NO: 12711 - DNA, 1458 bp, Homo sapiens
aaggaagcatccacacccccaactcctggacatcacatgagaggtgctgctcagattttcaagtgttgttctttccaccagcaggaagtagccgcatttgattttcatttcgacaacagaaaaaggacctcggactgcagggagccagtcttctaggcatatcctggaagaggcttgtgacccaagaatgtgtctgtgtcttctcccagtgttgacctgatcctctttttcattcatttaaaaagcatttatcatgccccctgctgcgggtctcaccatgggtttagaacaaagacgttcaagaaatggccccatcctcaaagaagtagcagtacctggggagctgacacttctgtaaaactagaagataaaccaggcaatgtaagtgttcgaggtgttgaagatgggaaggatttgcagggctgagtctatccaagaggctttgtttaggacgtgggtcccaagccaagccttaagtgtggaattcggattgatagaaaggaagactaacgttaccttgctttggagagtactggagcctgcaaatgcattgtgtttgctctggtggaggtgggcatggggtctgttctgaaatgtaaagggttcagacggggtttctggttttagaaggttgcgtgttcttcgagttgggctaaagtagagttcgttgtgctgtttctgactcctaatgagagttccttccagaccgttacgtgtctcctggccaagccccaggaaggaaatgatgcagctctggctccttgtctcccaggctgatcctttattcagaataccacaaagaaaggacattcagctcaaggctccctgccgtgttgaagagttctgactgcacaaaccagcttctggtttcttctggaatgaataccctcatatctgtcctgatgtgatatgtctgagactgaatgcgggaggttcaatgtgaagctgtgtgtggtgtcaaagtttcaggaaggattttacccttttgttcttccccctgtccccaacccactctcaccccgcaacccatcagtattttagttatttggcctctactccagtaaacctgattgggtttgttcactctctgaatgattattagccagacttcaaaattattttatagcccaaattataacatctattgtattatttagacttttaacatatagagctatttctactgatttttgcccttgttctgtcctttttttcaaaaaagaaaatgtgttttttgtttggtaccatagtgtgaaatgctgggaacaatgactataagacatgctatggcacatatatttatagtctgtttatgtagaaacaaatgtaatatattaaagccttatatataatgaactttgtactattcacattttgtatcagtattatgtagcataacaaaggtcataatgctttcagcaattgatgtcattttattaaagaacattgaaaaacttg

SEQ ID NO: 12712 - DNA, 2922 bp, Homo sapiens
cacacgtgcttcctctcttgacatcaagggaggaaggggatggcccattaagagttactcagatgacctgaggaaaggagggaaagttccagcagtttcatgagatgcagtattgagtgttctagttcctggaattagttggcagagaaaatgctgcctagtgctacagatgtacattaaataccagccagcaggaggtgatcataggggcatagccagttctgacagtgttttaggtgcctggatattttttgatggaaaaagaatatattgccaaatattaagaagctcagctatgaaatgacctccagggaatcagaaaggcactaatgatgttagtaacttttagtggttctgtgcctcttatcaagtgttacagaggacataccactgccatgtcaggggtttgcttacagtgatgccatgaagacagtccagtagacttggtagcgaccccctcccccaacccctctcccttttcagataatgatggaacagtaattactttcagaatgttgtgtgggttcaaattctctatgtacagatgatgtaaaaatatgtatatgtctagataaaaggagagaaagcaaaacattttgtatgctgcatgaaagcgttatctcttccttacaggtgtgagcacctttcctgaaattctgacaccatgtgcaaactgatccatcctgtttttccttttgtttacaacacagtagtgttctgttcacttttccggggcacaagtttttttgttcatactttggctgtgatgtcacagtttgttcagtgaggtatgatgtgctgctgggaatggattttttttttcaggttaaattattgatacaacaggattttcaagttattcagaaatatccctcatttcattatttttcaattatgtttgaaaataggatttgcactgctttattttaggtggctgggagttttgattgcatattttgttatagttcatagttggaaatatttgcgtaaatggttttcaacaagcctgaaagtaatttcaagaatgtttcagttatagaggtaaaatttgcacacaaaacatcttaggcactttttaacattctcaatcatgggaattttaacttttgggatttgttgaaatcttttttattatccttcacaatttcaatgcttcttttagtcagaaatgattcagggttatttgaggggaaaaaaccccatagtgccttgattttaattcaggtgataactcaccatcttgaagtcattgtccggtttccgtagcagttttgaaaccttagtacctttttaacagcatgtgggtgtcagtgtcattattagtctcctaataagttcctctgaagactgctatcagtctcttggactggaggtacaaataatttagaaataaaagatgataacctaacactatcatagttattaatgtgatcctaaaattgtttcctaaatcagcatttttctttagtcatttaagaatttaccagaaatatttgctcaatatgatcttgatattcctacaaagaaaaaagaaggggtagggatttggctatgccttcactacaacattagaatattgtaactcacatgccttctaaacgtgaactaagatttcctttggcaatatcatattctaaaagtaataaattccaatacaagttacatacatttaaaaaacattttacagattttatggtactaatgaaatttacagtgatagaacaaaagaggattagtagaaaatacattattagaatataaaaaatgttattactgaggaaagggaggagaggacaagtgtaataaatcaaaattgacctcaaaagaaaatgtgtaacagagttgaggttgttaaaacagaaaaggttctgaataatgaagattaacctaatgcagaattgctaggtaaagaggtcaggggaatgctaagccagttcttaagacttctctgtcctctgctttgctgttatccttaaggcatatactttgtctttctgcagaaaattctacctggctacaattactttgaacattaatgttgaaaaagaaaacaaccaaagaaaattggtacttacccttctacaaaagaagtgtgactagatatcaatcagtaattaacatatcaaggagctcttctagctaaatgaccatccagtagagatttcccacattcccatgaatatcaagaatagttgtcagaatatgtatgtacctgagcatatgtacacagacaagggggatgttgtggaatatggcaatagcattgttcttctcccctttcaaattgcctttcttgaccttatgccattccatatatatctgagttgtgcctcatttatttattggcaatacctagtgatacggatttagctaacaaaagatatgaagaactattatattgaggcctgtcctctacataccacacttaaaagatggtgaactgtgagtactacttaggttgacagcaacaaagcataagacaagccccaggtaaacgtctaaactgtttactcacattgtcctactccagccccttcaattatttcccatctccacaaatagtcgggggaaaaaattaaaattttcctttatgattcttactgttcttcgcagctcatcttttcctgcttagaattaaccattgctaatttaaaggagcagctagctgcttttctgtcagtctgaagcgtagtagtggaagaggtagtaagcaccagctgcctctttgctgctttgttttcctcctgattctcttaaatttgggttgcaaagctatcccgccccccaccctgccccatgaaacttgagcattcaaatgaagattcagcagtgtctgttcttcatttctatagccaaagctgttagttaaaatcccaaatctatagcatttaaagataccaaatagaaacaccttccagcttt

SEQ ID NO: 12713 - DNA, 31 bp, Homo sapiens
agagaaatattcaataaatagcttttagtat

SEQ ID NO: 12714 - DNA, 174 bp, Homo sapiens
gatgccagctaattttccacagagcaatgctatggaatacaaaatgtactgacattttgttttcttctgaaaaaaatccttgctaaatgtactctgttgaaaatccctgtgttgtcaatgttctcagttgtaacaatgttgtaaatgttcaatttgttgaaaattaaaaaatct

SEQ ID NO: 12715 - DNA, 109 bp, Homo sapiens
tcaaatacagtccttatttgtataacaaatgtgagatatttgaaaatattttaccattatacatcatgtggacttattttatattaaagaagattatattttggctaag

SEQ ID NO: 12716 - DNA, 1987 bp, Homo sapiens
ctggtagggttggatgtgtgtagtttcaagatagaaagttggtcaagaagttatagtggtcacacctcatctatttactgttactcagttggtacaatgtaaaatgccatgcttatgtttataagttttgagattttttttttttctgaaaaggataccaaagtgcgataactgaacatttccaattgcatataatacaacaatatgtggtgttcttttttttacacaagcattggctagcctttttaacctggtcagagaaggcaggtggtcactgacatttcccaagtccatgctttaaagggtttgcaagaagttagggttaaggagaggtgatgccaacaagacaggtgagttaaatataccatttcacacaaagtttgaatagaatacattatacctcataggtgtctagcctctacagttctggctgtagttatgaccttggcttccctgtctaactgtagacaaatctttaaaaaaaaataataataatctggtgcctcagtttccccacatgtgcaatgggatacttattaaataattaataagaatgtgaataagtgtcatacttttgtgatttgagccatcatttcacttctgattttaagacaactcatgattgttagctttcagaaagctaatgattgttaactttttgaaattagtttacaattaattaagatttcattatgatggaaggagacataattggcagatctttgccatctctctttgagatgtcctaaaaagggttgtaaaaatctgtgaaaaagtttttcctacatttgactagaaaatgtgatccatagtatttagtgccctgatactataagctcagcaagtaacctggtacatttgaaataaaaaccaaatttttagattcaaacaatccctttatccttaatttaattaattatcatatgctttttttaatgaagtgcttgatcacttgcaaacatatatacatgtagatgtacatatacatgtacacatacacataaatattattgcaattaagtgatcaagtacagacacaataggggccagttttgtttaaggatcaaagagacaaccactttggggaattagtatcaacttacaatccaagtccaagtatcatcttataatcacttttttctactatattaagatctaatgaatttgatttcttttttgaagttttttcttgtaacatctgagattagaagtttaagatgacttgaccccaaacctttgtttatgtaagaatttttaaacataaaagtgtttgtttctgttatgttaccataatttgatgtatatagtgtccagatccatttagaaatttaatatttattaataactgaaactgtttgtcttcctttggtatatagtctcgcatattatattatagcaggccaagataaaattttgacagctctttaagcccacatgcagcagtgggtcagataaccctgtggcagtgacacgggcaaattggcatttgaataaagccctgggaccacctcaacatgcgtagcctcttgtcttaaatgtactccccatggcagcatggaggaggcaagacctgtgggtcaattttgaactggccttactttgatttttaaaacaagagactcagggaaagtactaaaccaaaatctctgattttactttgcgttttctgtagtttttgttttactgagatgcttttgtaaaggaaaataatactgtgacagtttagtaattctacagattcttaatatttctccatcatggccttttacttcacaattttctgaagtctgaattcaattacaatttttttttaccaatttaatctcaaatgttgtttaactgctttaaattcatatacgtagagtattataaactgcagagatgaaaaatgtgttttcacgggatttatattgtgaactaaactaagcctactttttgtgacttatttgtgatgccttgttgataaatatgtgtaataagtatgttt

SEQ ID NO: 12717 - DNA, 721 bp, Homo sapiens
ggagatggcaggcattgacagcttcactccatgaaggccatctctgtttctctcctccgcttaaccaagctgttgtggtttttcagcatagtgttgtatgttccattgctagctgtcctgctgtttaacacagtgttgtattttttttctaaatgtacataattagaaaagaaaataacaataggaagctatgtgtatcttctgtgtaaagcagtggcttcactggaaaaatggtgtggctagcatttccctttgagtcatgatgacagatggtgtgaaaaccatctaagtttgcttttgaccatcacctcccagtagcaatttgctttcataatccatttagcaatccaggcctctgttgaaaagataatatgagggagaagggaacacatttccttctgaacttacttccctaagtcactttccttatgtatcatctaatacaatgatggttgagtgaaaatacagaaggggtgtttgagtattcagatttcataaaacacttccttggaatatagctgcattaacttggaaagaagcctgttgggccagaagacagaaactccaactggcaaaaaagcaagcatctaagaaaaaaaaccaccaaagttcttgaatttactatatttaaatgcattggttaagtttattttgctaaataaagtgaactgctttttgtctctaaaatgatattctaaataaaaccttaactttttgttga

SEQ ID NO: 12718 - DNA, 271 bp, Homo sapiens
tggagcagtttacagaaaagaagatggagagaccaccttcactggcagactagataaattgcatttcccctttttctcttttcctgtgtttctttacatgagatttgttaacacacattttctgagagcaggtatggaagacagccatgtgtagtgatggataatttaaagaaaaaaagaatccttgtttcttggcttttgctcctggagttaagcttactgcccaggtgacttgtgcattgctttatttagttgaaataaaatcagcatt

SEQ ID NO: 12719 - DNA, 99 bp, Homo sapiens
gaccgaccttgttcactccagatattaactgtattgaacacaacaaaatacattgaatttgtattaaacatataacgcataaataaagctcccattctt

SEQ ID NO: 12720 - DNA, 237 bp, Homo sapiens
acctccagaatattattagtctgcatggttaaaagtagtcatggataactacattacctgttcttgcctaataagtttcttttaatccaatccactaacactttagttatattcactggttttacacagagaaatacaaaataaagatcacacatcaagactatctacaaaaatttattatatatttacagaagaaaagcatgcatatcattaaacaaataaaatactttttatcac

SEQ ID NO: 12721 - DNA, 2369 bp, Homo sapiens
aaaaagaatcttatctcctatagaaaacagcaacatataaattcaataaataagacttagttaaggatagttaactattatactccaacaattcatgagcaacagtatatacactgagtaaaaatataaaatagtaaaatttcactaaatttagagaaatgcacatggtaataaaaagtataaattataaatgcaattaactaagaacagctctgaatgtatttgcatgggattggtccttgaataaaattgtcttacttcattaatacttcacaatactatttgcataagacaaaataccacagcaaaaaaaaaaatctgattaacaaatgaaaaagcgatctgaacagacatttcccaaaggaagacatatacatggtcaataagtatatttttaaaatgctcaacattaactattcatacagaaatgcaaatcaaaaccacaatgagatatcatctcatcctaattaaggtgactattttcaaaaagacaaaaaatatgacagccgtggtggttcatatctgtaatcctaacactttgacaggccaaggcaggggaattgcttgagttcagaagtttgagatctgggcaacatattgagactctgtctctaaaaagcatattgagactctgtctctacaaaaaaattttaaaaagtaaaaattagctgggcgtggtggcacatgccagtaggtagtcccagctactcgaggttgctccagctcaggcgttcaaggctacagagagccatgattaaaccaaggcactccagcctgggtgacagagtgagactgtctcaaaataaaataaaaataacatattggtgaagatgcgggaaaaaaaaaagaactcttagacactgctggtgggaatgtaaactagagcagccatgtggagaacaacatggactttcttcaaaaattacaaatagaactatcatatgatccagcaataccattactggaaaaaggaaatctgtatattaaagagacatttgaaccctatgtttactgcagcactattcacaatagccaagatataggagcaacctaggtgtccaacaacagatgaatggataaagaaaatgtggtatatatacacaatagaatactatgcagccataaaaactgaattcctgtcattcaggacaacatggatggaattggagggcatatgttaagtgaaacaagccaggaacagaaagttaaacattgcatgttattacttatatgtggaagctaaaaaaattgatatcatagaagtaaaaaataaaacagaggatactacaggctgggaaagctgcagcaaagggagactagagagagatttgttaaaggatacaaagttacagcttggtaggaggaataatttctggtgttctataccactgtaggacgactatagttaagaacattatattccatttagtttcaaatagctaaaaggagattttgtccccaacaaaaagaaatgataaatatttgaaaccatggatactctaatttctctgatctgaccactataaattatatgtattgaaacattattatgtatctcccaaatatgttcaattcttatgtcgctcaaaaaataaaatttaatttaaaaagtatctgatttttaaagtaaatattttttaaagttttgacatttaaattacttgaatctcattattttgacaataatttaattcttttattgttcaatctgttagtgagatgtgtcataggtattatgtcattagttcaaattcttgcggaaattatagctatattaaaagtgtaacatttttatttagttgtgtacttatttgttaataatacagacattgtatgttatcatactgaaatttacaattaaaatattttctgtagattatttgaaaatcattctaaatatatattttgaaatatatagattatatttgtatgtaaattatatttatacatcttctgaaatatatttcaaaatatgtgtgtacgtgtgtatatgtgtatatatatacacatatatatacacatacacaaatatatgcatatttcaaatggattgtatgcacttgcaaagcaaaagtacattggtaatttgggcacattcagagtggaaaaaatttgttctatttttacatctttaaatacctatcttctatgaaagcctatgtgcatgtgtgtgtgtgtatgagtttctatgtgagcatgcatatatacttcacaaagagatgacctatataaatcaaagtacacattatttaaaatatttaaaaaaattttcagtttcttcatttttaaattgtgatttttagatttgttagtctatggagtattttcaattctcagattatacatatgttataaaatatgttcattaa

SEQ ID NO: 12722 - DNA, 186 bp, Homo sapiens
cttcatgtaaatgtcgcttcttcaagtgaatgattctgcactttgtaaacagcactgagatttattttaacaaaaaaagggggaaaagggaaaacagtgatttctaaaccttagaaaacatttgcctcagccacagaatttgtaatcatggttttactgaagtatccagttcttagtccttagtct

SEQ ID NO: 12723 - DNA, 332 bp, Homo sapiens
aagatcaaccaaccttaaatatatgtatgtatatatgtatatgtgaaaaacagtttgtatagttggaatatttgtctttgtaattacttgtgatgttttaaaataaaaattttattcagttttctgtagacttgtatttgataaacatttctaactcacatgttttttctgatttttcagtgactgtacataatagcttgtagcgatgtccatatttatgatattatttttataatttgacaagaatatgaaaatgaaatatagaacatttctgtgtcaaaagagacctgattaatatgtctactcattaaaaaacatcttttccaaatact

SEQ ID NO: 12724 - DNA, 3236 bp, Homo sapiens
tacaagttgtcttaacgttactccaggaccacttgattttggaaagagtgcacttaattcagaagctaaagaaaatcagttcataatactatggatttctctttcattaagccttaattttaagggaaacatcagtaagaaactgcactgaagaattataaaacattttggggcatagcatacacttgtctaacggttcacacgtggctatgatcacaagcaactttgaactggaatgctatttacaaaagttttgtgtattaatctgtgtattaatctctctggataaaaagaaggaaaaaatatgtatgaccagaacagatatggatgaagaaattgaaagcaacgaatgcaactattcaaaaagtttaattttatgaatttcttttttgtttagtcttgaagactgattttctatgcaaatagtgtttggcatcctgcacctctgatatgatttggctttgagaatttaataccactgggaagaagtatggtagtggtggatgaagggtggatattttaaattgtgcagttacagtttactgtcctattacctctgctcgtttaaccagtttgttatatcactgtgtccccaaaatcaggatttttgttgatagcatcagtgttgtaggagcaataggtcagatgagacatattaacttagactaaacgtgaacagtattatatggactctcacaacgctcttagagaatccgtgaatgtgaacagacaaatgtggctaaccatttgattcttcagtatgccttctaatgtggctattttatttatgtgagactctaaacctgattgtcctaatatataaaactaaaagattttgtaaagggagtgtctttagaaatagatgaaatgtagaatgttaaaaattattgctagggtagtcttttttttttccagaaacctaattagggtattaaattttgtgttttttttgttttttttttttaaacagaagcatgttatttcattcccattcccagaaagggagttaatgaagataaaaatttattttttaaggtctttattgagagaaactttgttttctgatatgaactattgcagatgtttttataaatactttcattaaaatgatgtaaacagtagtacccaacactgtaaactcagtgaaaatagtaaatgattcttttattactaagactgtcatgcattctgaagcagttggcttttttttaaccataggaagtaatttccctctagctcctttccttctactctcctgctcagaccattagtaggtactttgttaaataaaaaactagattaacatcaatattactccaatttggtatcttttacactatgtattatacctactttctttttatttcatttacaaatagtttaaattactttatcaaccagctgtattgtttccctcttgtaaaagtaccatcaagtggggaaaatgtatgtggaagtggagagtgaatttgtatgactaaaggataatctgtacatggggaagtgggcaaaagtggataggatgaatttaaagaaaatgactacctttggaaaaaagaaattaaattttgttcacatatcctaccctttcccattgtgcatatcccaagtgtcatatttaaaactaaggttacttaaaacagaatccaggaatatcaaggctctgtggcttggaattttagaggataggactaataaaaggacttttgcaaagaaggcttttttccacgttcactttgttttgtgttctttgaaagtaactgatacttttcgggtagttaattcagcagtccataaatatgatccagtaacttgcttatattttattgaagtctcgacagctcttcagaagtaaatttagaacgatgctgtcagttcatatttatagatattagtgttttagcagataaaacaaaatcaacaaaaattaagttcattttgtgattaaacctgcaaccatttttccattactttttttctatagttaatggttattgccatgatttcttctgtttggttctactaagctagaaagccagggtgaagttaatgataattcccattattttatttctgtaccatgagattgctgttgatgactgaaataccaggtgcaaaaattaatgatttgatttttgtacagtttcaatgagtattttttacttattaaaaataaattaagaaatgtaagaatatctttgtaaatcatgtttcataagttgactccagagattctgattttgctgtttattttgtgagtaatgttgctttggtgtttcctgattttcaagtttgcaatcatggagatacagcagttattaggtgtggaaggacattacctcaaatgtcctcagatggctccaggaaattcttttaaaacagttggagagaaatagtcgtgaccatgtaaaacctagaggatctggtaaatcccatactactggttagggatttgtaaagtccatttctttttagagttcaaagcagttctgttacttgtccataagttcctcataaattgtcccaaaggtaggacatggaaataaatgtatatctttattttttaatctactatgtcacactctggtgatattcatggaacattaaaaaagcaactatgtttattttataattagtaaaatgaagatagaaaattgttcttttgaaatttttagggaaaaaaaaaatctcgtgacctaaatctttccactataatgaatattcattgtgattgcaaatatctaattttatataatcactgtgtatggatttagcgattttacttttcatagattcaaaaacatataatctgaatgctttctctgaaaaaaaaaaaatcagagttgagctcttgaggatcagagttaagtatccattgataatatgtgttcattttgctctatgtcataactttgtttttttattgagaaatatatatttttcaaaaacacatatatattcaaaaatacataaaatataaatatgcagttcaaggaataattttaaagcaactatataactagcactcagcttagtagaatatattgacagcagttcagaaattacacatgtagttccttcccagtcacaaccagctccctgccacgtaccctttggtaattaccactatcctaccttgtatgataattgtctctttgtttttatagtgttaccacctatgtgtgtaaacttaaacaatacagtttgcttgtttttgagttttatttaaaatcata

SEQ ID NO: 12725 - DNA, 3201 bp, Homo sapiens
tcctgaaatgttaaacaggttgtcagacccagtaaatcacttcttctttctctttgcctttttaaacccatgctttgatccacttatctatggatatttttctctgtgattgatagactacacaagaagtcatatgaagaagggtaaggtaatgaatctctccatctgggaatgattaacacaaatgttggagcatgtttacatacaaacaaagtaggatttacacttaagttatcattcttttagaaactcagtcttcagagcctcaattattaaggaaaagtcttcaggaaaaatactaaaatattttctcttcctcataagcttctaaattaatctctgccttttctgacctcatataacacattatgtaggtttcttatcactttctctttgcataataatgtactaatatttaaaataccttcagcctaaggcacaaggatgccaaaaaaacaaaggtgagaaaccacaacacaggtctaaactcagcatgctttggtgagtttttctccaaaaggggcatattagcaattagagttgtatgctatataatacatagagcacagagccctttgcccataatatcaactttccctcctatagttaaaaagaaaaaaaatgaatctatttttctctttggcttcaaaagcattctgacatttggaggagtcagtaaccaatcccaccaaccactccagcaacctgacaagactatgagtagttctccttcatcctatttatgtggtacaggttgtgaagtatctctatataaagggaaattttagaggggttaggatttggacaggggtttagaacattcctctaagctatctagtctgtggagtttgtggcaattaattgccataaaataacaatgtttccaaatgcaactaagaaaatactcatagtgagtacgctctatgcatagtatgacttctattttaatgtgaagaattttttgtctctctcctgatcttactaaatccatatttcataaataactgagaataattaaaacaaaattaagcaaatgcacaagcaaaaagatgcttgatacacaaaaggaactctggagagaaaactacagcttcagtctgtacagatcaaagaagacagaacatgtcaggggaaggagggaaagatcttgatgcagggtttcttaacctgcagtctatgcacaacactatatttccatgtaatgtttttatttcagccctatttgtattattttgtgcatttaaaaaacacaatcttaaggggatagactagactgccacagcagcccatggcacaactaacacctactgatattcacattaaatagtatggtttccaaaatatgtctgcacaacaagacctctttatgtaattcaggcttgtgtctacctcttccatgaaaaatggaaagggatgaaaataatgggagtataatacccatttaatgtgaaaaacataagagtcttaaaagaaattaagccatttaacattttttaaataggtaagataccattatatttatatgagctatgtactgccacaaaaaaagatgaaatgtaatttctaaatactccaggtgtgtggtattatggaaagcaaattgccaactaatggcacgtcctttctttctttgattttctcctctcatacttcagttttatagtgttgtgttgttgtttttttcatatcctaccttactttccaattctgtctcaattgaactccctctgtctactcactctttcattcatagcttcttttccattaaactcatacctttaattaaccaattcatggcccagttctacagttgaattggacaaggctaaaattctgtagtgtgctaaaatgctcaagttggcacataaacccattccaagattttatagttcttgtagataacacagggatgtagataagttgaaacaaaaccagtgtcctctaagtctctatcatatacttattcctaaactgataattcttacttctggatttaaaatcaaaaataacacacttgtacagatacaatctaagggctttatcacacacgtgttaacgaatgtatctcagcttggttcttcttgtgtgctcattatggatctctctgtcttaggaattgcctcaggcattttttttttttacacattaactaaagggctattcgaaatcttgactcaggggttcttaacctacatttcatgcaaaaaatatatatatttcaatgtattttttattttagtcctatttgtattattttatgcatttaaaaacacagtcctgagagggatggaccagactgccacagcagctcatagcacaaaaaaaggttaagaagtcctagttgactttgtatatatataaagaaatctattacaataaaaatataacataatctattcatctatttatatgcaaacataaaaatgtaaatattgaaacaagattgcttcaatatgcttattgttttcaaaccaacaaactctcttaaggttcaatatgtaataaaaaacataacacaaataattattctatatgaatattatggttcataaattataatgtataatctatacattataatgtaatatataaactaaaatttatggcacaaaagataaatatggctttgaaattaaagatattccactcaacagacaatatttcatatttgatattacaatcatttattttatgtcctattataataaaaggtgaggactccttgtaaaaaaggaaatgttccacagagtcaatctaatatatcagatattggagattctatcttggtttctcttcctttacttagcctataaaactagttaaaaatggaatttcttttagcaattcagtttagtacaggagtgacattaactaatgacaataaattaaacaaagcctacattagttcaatttaagcctattcaacagaaatatagaaatatagtagctaaaaaaatactctggggaaggtaccacaaacattatctaccagggaacatagcataaattagtctgaaatttcctgagagtgactttgtcttagaacttaggtggtagtcatgaagagataatgtttttaggcagttaaaatacttctagaactccatctattttacctgtggtccactttcctacattgaaccaatgccttgggcttctctaattactatacattgtgctcatatgaataaaagaaatttt

SEQ ID NO: 12726 - DNA, 1454 bp, Homo sapiens
tgcaacaagtgcatccctgttgcaaagtctgtatgcaggtgtgcctgtcttaaattccaaagctttacatttcaactgaaaaagaaactagaaatgtcctaatttaacatcttgttacataaatatggtttaacaaacactgtttaacctttctttattattaaaggttttctattttctccagagaactatatgaatgttgcatagtactgtggctgtgtaacagaagaaacacactaaactaattacaaagttaacaatttcattacagttgtgctaaatgcccgtagtgagaagaacaggaaccttgagcatgtatagtagaggaacctgcacaggtctgatgggtcagaggggtcttctctgggtttcactgaggatgagaagtaagcaaactgtggaaacatgcaaaggaaaaagtgatagaataatattcaagacaaaaagaacagtatgaggcaagagaaataatatgtatttaaaatttttggttactcaatatcttatacttagtatgagtcctaaaattaaaaatgtgaaactgttgtactatacgtataacctaaccttaattattctgtaagaacatgcttccataggaaatagtggataattttcagctatttaaggcaaaagctaaaatagttcactcctcaactgagacccaaagaattatagatatttttcatgatgacccatgaaaaatatcactcatctacataaaggagagactatatctattttatagagaagctaagaaatatacctacacaaacttgtcaggtgctttacaactacatagtactttttaacaacaaaataataattttaagaatgaaaaatttaatcatcgggaagaacgtcccactacagacttcctatcactggcagttatatttttgagcgtaaaagggtcgtcaaacgctaaatctaagtaacgaattgaaagtttaaagagggggaagagttggtttgcaaaggaaaagtttaaatagcttaatatcaatagaatgatcctgaagacagaaaaaactttgtcactcttcctctctcattttctttctctctctctccccttctcatacacatgcctcccccaccaaagaatataatgtaaattaaatccactaaaatgtaatggcatgaaaatctctgtagtctgaatcactaatattcctgagtttttatgagctcctagtacagctaaagtttgcctatgcatgatcatctatgcgtcagagcttcctccttctacaagctaactccctgcatctgggcatcaggactgctccatacatttgctgaaaacttcttgtatttcctgatgtaaaattgtgcaaacacctacaataaagccatctacttttagggaaagggagttgaaaatgcaaccaactcttggcgaactgtacaaacaaatctttgctatactttatttcaaataaattcttttt

SEQ ID NO: 12727 - DNA, 1041 bp, Homo sapiens
ttcacgataaaagttaaacaaagaaagctgtatgcaggtcatatatgcatgagaattcaactatttagtgggtgtagtacaacaaagtgatattaaattactggatctagtaacatgaaacacacaacgtaagttatttagaatcactttaatcaaccaataatccttagccaatttataagggacttttatttgtaaagtaatggatctggcttgaaaaatacggtagagatacttagctctttaaatcacgaatgttgaagtaccagtgagactcaatacatatttttgaagatagtccatgggatttttagaatgtcgttgtcaagggtctccttttaactgagaaactttttgaactcacaaagtgttcaagaaacccttgtataattccctacatttctctcgagctcacaaatacttttttttctttttccttattcaatcagattttccaaagtacctttccaccataagaaatgaattttctacttctacacccatttgagagacaccaataaaagaaagtcatatgtaggaaacaaagtctgatagtaaaacaagccagagatcttctaactttttttagttataaaacctctaatttttggtgacttttctacacacacacacacatacagtcacatagatattcttatcctacagatataatcagaaaaatcccgattaatgaattatatatagatagatagagtgattagttaatcaaaactatatatttgttaaaaatttgggagaaggtgatggtaatttcattagtcccaaaacaccggcataagaaatttgacatttcacagatgcacttacatattttgaccacaagggggaaattttgtgcattattattgtagggttaaatgcctgaaaaaaataagcatttactaataccttgaaaaatcaaagaacattatgttcctccgtagcaagaaaaattttatgccctcgcattgctacagccaaatagcttataaggcttatggcaatgtcccaactattgcaatcataaaaccctagttttag

SEQ ID NO: 12728 - DNA, 711 bp, Homo sapiens
tgtggattgcccatgagttatacacatggcacacagagctgatactcctgcgtattttgtattgtttaaattcatttactttggattagtgcttttgctagatgtcaagaagcccttcagacccagacaaatctaatatcctgaggtggcctttacatacgtaggaccaaaccctctctaccatgagggaagaagacacagcaaatgacagacagcacctattccttactcacaagggaaactgcttgtgatacttcctaataagataaataagtggtttccctcaattgaagacaggaacatcattttccacaggatatgaagagctgccagtaatgccaaaatcttacctcatataatacctggagcatgtgagattcttctagtgaaaaagaacagtcttccctgaagactcagggcttcaacattctagaactgataagtggaccttcagtgtgcaagaatggagaagcatgggatttgcattatgacttgaactgggcttatatctaataatacagagcactatctctaacctcaacagttgacattttaaaagtttttaaatgtatctgaacttgctgttaacacagtgttataactcaagcactagcttcaggaagcatgttgtgttgttaagaagcttttctgatttattctttaacagcatcttgccatctatatgttagtagcagttggcccagaaaggac

SEQ ID NO: 12729 - DNA, 1258 bp, Homo sapiens
acaaagtcactgtgctggtcccttgcaagtctttagacaggttgtactgtagaactacgtaactttctgttgaaagcacttcctgtattcttgtatttcaatgtaggaagctagtagagcaagactttactttaaaatttctttcagtgattgactcttcaaaaattgcagtaatgtgaaaatacatttttttttacaaactgaaaacacagcagataagctgtagaaaatgaaaaacgattcaattttaattttctgctctgagtatttagtaaccaacactgcctaaagcaggtagcatccaaaataagaaactattctctctctaaatcttcactcttacttcaatttacatttgtgatataaagactatgcagttctcagtttaaatcggaacatcatgttaaaaacagttctgagattccttacgaagtttccaataacttgtgactagactttatgaaatttacggataaagttcttcaacatgatgttatcttgtgcctttcatgtaagttgaatttgctcatacggcttgaaagttgtatttgcaaaattaagccttcgatttttataaatgcaacgattcctcagaacagtgtcgcaagatctttatttcctccgaagtatgtaaaagttgtatgatgtgctaattttgtaaatggcaagtcactttcatttgtttttatatttagaaactctaattaatcaggaatattataagctgttttctttataattttgcttcttacctaatgtatcattttatgcatatactttattaaatagagtatgttttatatatattaaaaatagtttcttttttctccttctcatttctagttcaaatagacaaaaacatactatttaccagttactaaaaagcagtatatcattgctcctagtcccaaaaaagtactatatattattataaactagaacttgttattaccataataacaaaacaatgcatagatgttacttcagcttggatatactgaaaggccttaaaagaaatccaaaaagaccgtgaaattctgtattttttcatttaaaaaaagcagctctatgcattcatacacatgaattataagaaaaaatacaaaaggtatattggatgacatgaggtttgagaatgtgttttacagggctgcattaaagggaaaaattcatattttattgttacatcaatgagctttctccaggatttttacaataaacgagtaggaattagaacctgaaaaaaaaaaagagagat

SEQ ID NO: 12730 - DNA, 1258 bp, Homo sapiens
aaaaaaaggaattatacaaaggaacataaagaccactgtaggctatccttatctgtggctttgggatctttttattttgattgttggtaaactaatcattttattatatataaaaatataaatgtctttattaatattttattatatctaaaacactgtccatgcatttattaatcttttaaattaatgtaagagataggaagaggccaggtgtagtggctcatgcctgtaatcctagcactttgagaggccgagataggcggattgcttgagcccaggagtttgagggcagcctgggaaacatggctaaatccgtgttcaaaaaatacaaaaattagctaggcatggtggcgtgcacctatagtcccagctattcaggaggctgaggtgggaggattgcttgagcccagcaggttgaggctgtggtgatttgtgattgcgccaccactgcactccagcctgggcaacagagtgagaccctgtctcaaaaaaaaaaaaaaaaaaaggagagaagaaaataaagaaggctaatatataatttttcttaatagctgagttgtgattcattttaccattatattcagaattgaccttaatttgttttccagaatcaaaagaaaataaaatataaattttgaaactatgagaacatatataggggatttatcaaatgagttactttttattatatcaattataatttcattttattaactggaataagtgcgaaagtgtacattactttttaacttatatgtgaaatgattcatgtacctcacaaaatcatgcaatcttgcagtgaagaaggagtatcagagctccagctacactgagtctttcaatttacagatcaagaaactgaagaccagagaagagaaatgatttggttaaagtcactctccatcatctgtgataagttgacaaatttatccttacacaaatttgtcctcattgagttgacatccaaaatttgtcaggaattaaagaatgacttttgagtggcaattatttatataacattttccattgtcttcatattcaccttttgtcatttgtttgctttctcttgcagcaaaaataatatgaggtcatcaagggcagagaactgtgtggcatctccttatagtaaaagtgcaatcatatggatggctaactttgtaatctctacaaataatttaccttatgtaattttccaaatgtaaaagtcaccaaaaacttaaaggcattaaaataaactaaaaaagtactcatttcttca

SEQ ID NO: 12731 - DNA, 3711 bp, Homo sapiens
tgggcttttggaagcactgattgtttaaagatacaaaaaatcttgtattttttttttgtgtgtgtttacaagtagtaaatttattttcagctgtctgcctatgaagttcattgtgtagaaggatttattatgaccccctttgttccaagcatgcagtatcataagaactggaaaaactcaaatccgccaaaaatccacagctgacagttgaattgacacttttattggggcagaatggaacagtccaagaatgtagatactgattctttctccataaatgttcttatagtgtgttcatcctagagttatttttttgtttgtttttttcctttttggatcttgattgataactgccatgatattttgctttgatgtgtttctacatgtagttgcacacggttcagtaaaaataatgctgctatcgagtatgcaaatattgaagtatgatggtttgactgtatggcagtgttgtagcagcctcttgtttttttccccattgcctctttttttaaaaaacttataaagtcactttttatttttcctcagtcttcaatgacgagagcaatattaagaagacattgctatctaatttttaatctttttaaatgaaaaattcctatgttcagtagcgtggttgatgctattgtttagccttcccctccaaattgtatacattggcttggaatgttcacaacttgcgtgcgtggcagcggaagacgattcccatattctacattgctactgttttgtataaaataaattggtaaagattgacggttatcttttgtatctttttcttatccaattgcaggtttgttttattatgcaataatggacataaaagcatgctttttgttcaggaattttaggaaccccatttgctttttttgaggcacactttagcagaaatgattgacctaggcctgttgcattaaaagcttacttctatttctaacataagatacacagagttatgttaataatttggttaagtatttatacacctgataacattttgagtctactctgatcacagaatcgtttatttaggttttctatttgttgttttagtcttctgtaagtgaacgactttgtacatgctttctactttacttcataaatggacttttaaccctcttgtattagttctgtattttaagttaactgtccagttctcccagtggtaaccaactataacatagaaatagagccgctcaagaaaacagtttatgaaataatttttttgaattttttcttgagttacacctggagttttggcctttggaatttggcctttataaacattaggaatatttgaatgtttgatttttttatagtatcaacagttgtactgtgtaccagatcacatagtacagttttacatttaatctatattggcctgaaaagaacaacacaggcactttactcttaaaggatataataaactatagttatactgcattcatattcataccagcatgtagtatctttccctgcattcacagaagttttatttacaatgacaaaactaaagcctgaggatttgttttaaatctgcattgtggtagagaggaaaaagtacttttaaggaaacctgggttctagttttgtcattgtctttaattaaaccggttagtgatacatggtaagtcacttcattggcattttgtgtattcatcagtaagctagacaagatgatagctacagtttaagaatttctgtaaccattatacaaaactggtaggtaatattaaaggtattttcctgaaataataggaataaatactgagcactttgtatgcaatagagactttgtgcttttatatacagactcatttaaatgggctcagagaggctagtaaacttgcccaagattagaaaggtagtaattgatgggccaagattttacccatgtttttatttggtgtttctaaaccacctcatcacttttgaaaaaacagtatataaattaataaatgttttggagatggagtctgtcgcccaggtggagggcagtggcatgatcttggctcactgcaacctcctgcctcagcctcccgaatggctgggactacaggcacccaccaccacaccccgctaatttttgtaattttagtagagatggggttccaacatgttggccaggctggtctcaaactcgacctcaagtgacctcacctgcctcagcctcctaaagtgttgggattacaggcgtgagccactgcacctggcctgagatttttaaacattaacatttccttcaggcttaagcagaggatttttctaaagtgccatccaattagatgttaagttatgctttgtatgttgagcttagtattgagtcgatctattttaaaaagccaacattaagtttttaccaagtatctggcactattctaaacaattctgttggctcacataatcatcactgttttctcctttcctaatttttaaaataaacttaccggaacattgtataaaaaatgcaagatttttttctgtacagaagagtcagtatataaaaatcagtatgttttatttaatattcgtacacatgacagcttttgtcactgtgagaagacatggtttctttcgtgtactccactgtgctgtgattctaacaatctacattagtatgatgtgttcagatgaaaaacagaaaattcagtcattccgagtttagaaatccggtcagggattttattggctggagtaatagttcaaaggagtgaaaattcaagcatgtaatttttggatttgatttcctccataatgatttcctccataatggctttttttcaagcatggtctaatttttcagaaaatggccattatctccaagcttccattgtccatgtagtttcagtggcaggagagagactattttcctcccagtgtccatgtcagttccccaaaaggactgaatagccatgttggttttggagccagccgtaatccaatctgtatttccaaggaaatggggttctttgtctcccagcattgggaagcaagagaggcacatgttatggtcacctctgtgaggattacatcaggaaggacagtctccaaaagacatggacagaggaaatttagcagatgtccattaaatcaggatctcatacaagttataacacctgaatgtttgacttttcagagtattttgccatcacaggtgtggcatcttgcccttggatatatctacattctgctgtagaatgtcgtggtctttctgagggtcacatacatcctgtcttgtcataatgttaaccattaagagtcctcaggggcatggaattgaagaaggaactgttgccagcagttaactgaccaagctagagttccctgacccaacgtaagggtgactgtgacacacatggataattttagcttcatgtttaagattttgttatttgggtaggaaacattccaaatgcagtttgaaacacatattaaaattgaggcacacaggaaagaactggctcaagtttagtccccaagttccttatagtaggaataggaatccttagagtataagcaatccatgcatagtattctgttatctatcatgtagatcatttaatctctaattttttggggtggggattctcttgtttctaaatcttacactttcagtttcttctgtgtcttaaatatagattattgactattgtcttaaatactaataaatacattaaatgtatcttaaatact

SEQ ID NO: 12732 - DNA, 438 bp, Homo sapiens
ttatatcaaaagcctgaagtggaatgaccaaaagatgggactcctcctttattccagcatggagggttttaaatggaggatttcctttttcctgcgacaaaacgtcttttcacaacttaccctgttaagtcaaaatttattttccaggaatttaatatgtactttagttggaattattctatgtcaatgatttttaagctatgaaaaataataatataaaaccttatgggcttatattgaaatttattattctaatccaaaagttaccccacacaaaagttactgagcttccttatgtttcacacattgtatttgaacacaaaacattaacaactccactcatagtatcaacattgttttgcaaatactcagaatattttggcttcattttgagcagaatttttgtttttaattttgccaatgaaatcttcaataatt

SEQ ID NO: 12733 - DNA, 506 bp, Homo sapiens
ttatatcaaaagcctgaagtggaatgactgaaagatgggactcctcctttatttcagcatggagggttttaaatggaggatttcctttttcctgtgacaaaacatcttttcacaacttaccttgttaagacaaaatttattttccagggatttaatacgtactttagctgaattattctatgtcaatgatttttaagctatgaaaaatacaatggggggaaggatagcatttggagatatacctaatgttaaatgacgagttactggatgcagcacgccaacatggcacatgtatacatatgtagctaacctgcacgttgtgcacatgtaccctaaaacttaaagtataatttaaaaaaagcaaaaaaaaaaaatacaactcttttttttaaaccaggaaggaaaatgtgaacatggaaacaacttctagtattggatctgaaaataaagtgtcatccaagccataaaaaaaaaagaaaagaaaaataaaaataatataaaacctt

SEQ ID NO: 12734 - DNA, 508 bp, Homo sapiens
ttatatcaaaagcctgaagtggaatgactgaaagatgggactcctcctttatttcagcatggagggttttaaatggaggatttcctttttcctgtgacaaaacatcttttcacaacttaccttgttaagacaaaatttattttccagggatttaatacgtactttagctggaattattctatgtcaatgatttttaagctatgaaaaatacaatggggggaaggatagcatttggagatatacctaatgttaaatgacgagttactggatgcagcacgccaacatggcacatgtatacatatgtagctaacctgcacgttgtgcacatgtaccctaaaacttaaagtataatttaaaaaaagcaaaaaaaaaaaaatacaactcttttttttaaaccaggaaggaaaatgtgaacatggaaacaacttctagtattggatctgaaaataaagtgtcatccaagccataaaaaaaaaagaaaagaaaaataaaaataatataaaacctt

SEQ ID NO: 12735 - DNA, 1364 bp, Homo sapiens
atctttccaaattcaagaaagacctgatggggtaatcctgttaattccagccacatagaatttggtgaaaaccttgctattttcatattatctattctgttattttatcttagctatatagcctagaattccacgatcatgaggttgtgagtatatctcattctttcgttgtattttcctaggtgtctttactctcttctctcactttgtgacacaaggacatgaatacatctaaattttcctatttctgatatgactgttttgatgatgtcattacttctataaccttaagtgatagggtgacatgcaatatgattattcctggtgtgcgcccaaacacatggatataaagaggtaaaaaacttaaaattcacaaaattcagtaaaccacacaaatcaggtaagtgttctatgagattagctggctatgagaaacataatgatgtttctttttcaatttaaataagcccttctacatagccagcatcagtgatctcagaaaataaattgctaataatgatgacatggcattatgcttagaaaagtttgctgtatttccatagacctcatctagatgtcatggcctacatttctgccatcactcaaccaatacttttttctgttttcttgatgataaaaagacctttctcatgattgccatcaaataacaaaagaaactattttttttctcacatagagaacatgtcagtaagatattcaaggtgaacagattatttttgggattagtaactatttgaaatatgtggtgataattactgagtttataaaatttatttgatagtacacttaaagaagatttatatgtttattctttaaaaatgatgaatactcataattcttatctctataatcaaaagtataatttactgtagaaaaataaagagatgcttgttctgaaagtaagatcagtgaactgcttttcagtctcaatctttgagaattgtaaattcatcaaataattgcttacatagtaaaaatttaaggtattagaaaacctgcataacaaatagtattatatattaaatattttgatatgtaaagctctacacaaagctaaatatagtgtaataatgtttacactaataagcaaatatgttaatcttctcatttttttactgtcatataatcttagtgatatgcctattaatagttttaaataaataaattggctcatctggctttttgaaaattttgaaattcttacagatgttgattaggtatatctacaaattaatttcaattttaaaatgatgatataaaaataaatataagtatttttcttgtgtatgtatacaataaatataaataaaattgtttactgttttgaaagtttcttaagtttt

SEQ ID NO: 12736 - DNA, 111 bp, Homo sapiens
ttatgtctgacatttgaagctggaaaaccagatagataggacaacttcagtttattccagcaagaaagaaaagattgttatgcaagatttctttcttcctgtgacaaaaaa

SEQ ID NO: 12737 - DNA, 469 bp, Homo sapiens
ttacgtctgaggctggaagctgggaaacccaataaatgaactcctttagtttattacaacaagaagacgttgtgatacaagagattcctttcttcttgtgacaaaacatctttcaaaacttaccttgtcaagtcaaaatttgttttagtacctgtttaaccattagaaatatttcatgtcaaggaggaaaacattagggaaaacaaaaatgatataaagccatatgaggttatattgaaatgtattgagcttatattgaaatttattgttccaattcacaggttacatgaaaaaaaatttactaagcttaactacatgtcacacattgtacatggaaacaagaacattaagaagtccactgacagtatcagtactgttttgcaaatactcagcatactttggatccatttcatgcaggattgtgttgttttaactgttgttgaggaagctaataaataattaaattgta

SEQ ID NO: 12738 - DNA, 954 bp, Homo sapiens
gtcaagaaaaagaggaaatatatatatttttaagtttggcaaaatcctgagtagtgtagtcctattaattccagacaaaaggagtttaacaaaaacacgtctcccatcctgtttccaaattttctatttctctacctgcgataagcctactgataaagcctagattttggcatgattattattaacttgtgagttatagtcttctatttttcctttgtctctccctgctgactataccctcttcctgtcacttttctgacacaaggatactacctaattttaaatatgttctattcatagtatcaaattattttatcgttaaccttaattaatgattaacaatatgctgaatcctggtaatgcatacagtgtagatggaatttgataggtgtaaggaagagtcaaattcacaaatttccatataccaaacaaatcagggagccaccgtaggagagtagtgtgttatgagaaaggtaatgatttccttttttaataaaaacaaactcttctgcttgctcaatgtttcaggagttagagaatgaattttaagtgtgacgtgcgtccctattaaatgtctacaaaattttcattaagcatatctagaaaatcacggcataacttgcctgcctttcttcaacatatattcttatataacctgtagtggaagatttgggtactgtctttaataaatcaatcaatcgactcttttatttcaaggagaaagttctatgttatatgttgaaggtgaacagatcatatttagaggatataacaattagaaatctagaaaataattatcatttttataaaatttttagtcaactgtacaaataattacataaaacatcaattaattatgcttaaaaatcactaatgttcataatatataatcactatttgtaatcaaaagtttaattttatgccaaaaaataaaaaatgcttacttggaatttg

SEQ ID NO: 12739 - DNA, 118 bp, Homo sapiens
agtgtctaaatcacacatctgaagaaataagagattgtctgtagttgattgaaacgagggcagttatgaattgatttgggcaatcaaatgaatttataaaggagaataatatgctttt

SEQ ID NO: 12740 - DNA, 781 bp, Homo sapiens
gaaggtctttctttacttaacatatctgatattaaagatttcttttcattattctccactttttcttattttagattgctagaaaagacataatcatggattatgttgacattttctttttaaatttttgtttaactttttttttttttttttgagacagagtctcactctgttgcctaggctggaggacagtggcacaatcatggctgattgcagccttgacctccttgactcaattgatcctcccatctcagcctcccaagtagctaggactacagacatgtgcaaccatgtttggctaatttttttaatgtttttttgtagagatgaggtcttattatattgtccaggctggtcttgaattcctgggctcaagcttcccaagtagctgcaacaacaggcacacaccaccatgctcaactaattttatttctattttttgtatagacaggggcttgctatagtgtccaggctggtctgaaacccttgagctcaagtgatcttcccacaccagcctcccaaaatactgggattacaggcttgagcctccatgcctggcccaggtaacatgtttattgagctgtacatgcatatgagaaataagaaacttttttttcctactatcatctcttaaattttgttttctttttcttttgcttcctcttcttcttttctattttttataaatatcatgcacaactataacctatgggaatgatgtagtaacacagattattcatcttgttagagttgtattaaaaataaacaagcatttcaaatt

SEQ ID NO: 12741 - DNA, 336 bp, Homo sapiens
aattgactgagactggaaatatgatgccttttccgtctttgtatcacgttaccccaaattaagtatgtttgaatgagtttatatggaaaaaatgaactttgtccctttatttattttatatattatgtcattcatttaatttgaaatttgactcatgaactatttacattttccaaatcttaattcaactagtaccacagaagttcaatactcatttggaaatgctacaaacatatcaaacatatgtatacaaattgtttctggaattgtgcttatttttatttctttaagaatctatttcctttccagtcatttcaataaattattcttaagcat

SEQ ID NO: 12742 - DNA, 362 bp, Homo sapiens
tttaagtcattgctgactgcatagctctttttcttgagaggctctccattttgattcagaaagttagcatatttattaccaatgaatttgaaaccagggcttttttttttttttgggtgatgtaaaaccaactccctgccaccaaaataattaaaatagtcacattgttatctttattaggtaatcacttcttaattatatgttcatactctaagtatcaaaatcttccaattatcatgctcacctgaaagaggtatgctctcttaggaatacagtttctagcattaaacaaataaacaaggggagaaaataaaactcaaggactgaaaatcaggaggtgtaataaaatgttcctcgcattc

SEQ ID NO: 12743 - DNA, 5080 bp, Homo sapiens
ggtgaagcaagaagcatttcatttgcacatctttcttggacttgggatatacagttccagtttattagcagcaactgctagggaaatgattttggtgttttgggttaattgcttctaagaaaagtttcatagtggactgtttagaagaagaaatgaaagatccagtttgggattatgaaataaaccacaaattaaaatttttgtttaaactgtccaggatctgatttaaaaatatggtctttgttttatatgattaaatggtttgttttcatagatgatatgttactcattgtaaagaccacatatttttattcagcagtgttctttaaacggtttcatttaaaaagtaactttttttttttgcctgtgaattgagtgctctgatgtaaaacttctcatggagtgaaacagtgatttattttaaccaaacattcaccaaagcaaagaacggtttcagacctttgaactggtatggtttggcagaatagttttaaattttgctgtatttgattacttagagataggaatttttaaaaatcaaaacaaaaaataccacagcttagtgtaaatgacaatttggcggttttatgtctttagaaatgttttgcctttctaagccttgtgctaaaggcgtataacggtggtgcctatctacttaagggggcattctagtcttaacttaaaagttgtctaaactgtccctccctggctttttttggtttggggtagacctaagggtgtttgttagtctcaaaactgtgaagtgacatgtcagaacagtccagactggtaagaaaattaatggcttcacttgaatttaaaccagctctagataggaaaaaaatcagtctcctcatttgctttttaaatggagtagtacatcccatattttagaacaagtaggggtgccttgcttaaataaaaatagcatttaatgtataattgtgtgaagggtttatggataaagctgtacttctgtcacaatgtggcagtactttctgctttaatattaaacagcttgttatttaaatattggacaaaatggctggcttcaaaatatagtcattaataaactaactttatgtgcacctgtgtaggagaatcaaaatcctgtatgctttctttgccttgttcctgttctcagggtgacgactgccaccaggagatgcagttctagttcttaaaattaaatttgcccaggtttctgacaggtgatacctggaagagagactatgtcttctcttacttaatacataaccatctttgattaccagctaagatgcgaaatcactgtactgtagtcaataaatgaagacttgtttcaggctgaagattacctaagagtatttattattggagtctgtgagtcaactgaatatattattacctcaagtcctgctatattaatataagtagtaagggttaattttcgtgtgtgtgttctctaaaatcctgtgaacatgacttaaccagcttaacatcatcagtagtactgcctagatggaaatgcgttttcatatatggttgaatatgccaagctatgagaactggtatctgtagttgtacgaactattagaatgtgatctttgttgctctttcacatttggtatctgatttgctgtggaaaagatctgtggggcctactgtgaggaattcatctgcaattgatttaagctaatgagttttatttgcacatctctggaaaaagaatgcaagcaaagcattaaaatgctatatgatggatgggtaaggttgaaaggatatatcttcttggcacgctacaggctgagttttctgtacaaaatgtggccattattgggaaatcattttatgtatttgaatgctcccttttgtttttgttcatgatctaggctagtacgtaagtgattgctaaggtggatgtagttatgggaaaggaagagaagcacataatacagtaaaagtaatcttatttccatgcaagtggaagacggtaccgtctccccacatttgagaagactgttttgcatcactctttgctattgaaggaagcagtgatggtgaatttccttctgtttgggttccttgtgtctataacttcctttgtggtaaagccatcaggaagaatagtgggagtggggcatatggtcagggtgctcatatcctgctttagcctagctgctgcttacggagtgcaagggagaactctgagaagcagtatgtaaataccagggagctgattgctgaatattgtggtctcatctgaatattgtggtctcatctaaatattgacaccaggcaatgaagcagaaatagagtatgtgtccctttatgcgtgggtaacttaagcttctgtcatgtgggaagggggaccgaatcttccctgggaggaaggctccaaattctcactacttctgtgttacttgaagggggaagcataaggaacccagtttgaaggcaacattgtgtgccatgaatctgcttattaatcaacatgccttgttaatgtcctctgccctgaacagcccttactcagttctcatttggaaagttattttttggggttacatcctgtttgtttcagaatttaaaaccctccatggtgggtcacttgaggtcaggagttcaagattagcctggccaacttagtgaaactccggctctactgaaaatgcaaaaattagccaggtgtggcacacgcctgtaatcccagttacttgggaggccaaggcaggagaatcgcttgaacctgggaggcagaggttgtagcgagccaagatcacaccattgcactccagcctgggcaacagagtgagactctgtcaaaatcaaaaaaaccaaaatacaaaaaactccattgttctgagagtttcccctaaattatcggaagacactcacattgaattggtaggacctatagtatagaggagaatggtatgtatgtcagcagtagagttccaatccaaattgcgctatcgcattagaaatacattaccctcccactccccaagttcagcaaattagaagagaatctgaagtttgtaggaagggaataaagctgctataaacatttatgtgcaggtttttgtgtagactcgttttcagctcctttgggtaaataccaaggaaccaggttgctggattgtaagttaagagtatgtttagttttggaagaaactgccaaactgttccaacatgactattttgaattcccattgacaatgaataagagttcctgtagctcctcaccctcattagtatttggtgatgtcactcttgcattttagctaatgggtgaatagtggtctcatcgttttaattcccaatcccatagtgatgtggagcaccttttcatatacttaatctgccatccttatatcatcattggtgaggtgtctggattttctgtccagaattttagttctagtggttttcttatttttagaaaggaagtataggaaggaaggtttaatctgtcttaagcctgattatatgaaaatcaagaataggctaggtgtggtggctgacatctgtaatccccgcactttgtgaggctgaagtgggaggactgcttgagcctgggaagtcaagcctgcagtgagccatgactgttgctgcactccagcctgagtgacagagtgagaccctgtctcagaaaaaaaaaaagcaggctcattttaaagttgtttatattttattttttgaaggaaataaacttgaagagatacaaacggtagtgaagattctccttcccctcctgtaattcagctgtttagtttctattctcgcacagccctgttatcagtttctagtgtaagcttgcagtgacttttactttatttataagcaagtgttagtgggtgttgtcatttcttttaaaaatataaattatactgtacatgctattttgtattttggcttttctcccacctaaacaccctaaagatcattttctgtcagtatataaaatcttggtgatgccaatacccatcccttagattgtacaagcagcattttgccatgctttatcccatagcctgcctcctgcagtctcatctttttttctatatgcatgtccaagtaagttgtagacatttttcacttttaatcctttcagcatacatgtcatgggaatttgtttttgtttttgttttttgtgtttgagacagtcgctctgtcacccaggctggagttatagtgacgtgatcccagctcattacagcctccacctcccagtttcaagcaattctcatgcctcagattcccgagtagctgggattacagatgtgcaccaccacgcctgactaatttttgtatttttagtagagatggggtttcatcatgttggccaggctggtctggaactcctggcctccagtcatttgcctgcctcggcctcccaaagtgctgggattacaggcatcagccaccacacccagccgtcattggagtttttttgagggagatttgcagtaaggtgaataaatgttaagtgtatcatttgatgaggttttttctttttttttttttttttttgagatggagtcttgtatcgcccaggctagagtgcagtggcctggtcttggctcactgcaacctccacctcctgggttcaagggagtctcctgcctcagcctcccgagtagctgggattacaggtgtgagccaccatacccagactcatttgatgagttttgatgtaaaagcatgtaactcaaacccctatgtctggaacatctgtattacatctgaattttttcacctagtcaattcctgcacctctctctcctgtcccttcttccctcccctggcagtcagctactgttaggattttgttcactgtagattaattttgcctattctagaacttcatataacggactcacttatgcagtatgtattctgtaagttccttttactcagcatgtttgtatgttcatcagtgtgtttaagctttgttcctttttatggctgagcagtgttctatgtatgaatgccacattttaacgtttcacctgttaggtgaacaactaactggtgaacaatgggctgtttctagtttggggctatcatgaataaagttggtatgaacatgtacaac

SEQ ID NO: 12744 - DNA, 175 bp, Homo sapiens
accagagttggagccacccaggggaatgatctctgatgacctaacctaagcaaaaccactgagcttctgggaagacaactaggatactttctactttttctagctacaatatcttcatacaatgacaagtatgatgatttgctatcaaaataaattgaaatataatgcaaaccat

SEQ ID NO: 12745 - DNA, 2166 bp, Homo sapiens
gaaagtgaaccaaaaaggctagaaaccagaggaaaacctggacaacctctctcttcccatggtgcatatgcttgtttaaagtggaaatctctatagatcgtcagctcattttatctgtaattggaagaacagaaagtgctggctcactttctagttgctttcatcctccttttgttctgcattgactcatttaccagaattcattggaagaaatcaccaaagattattacaaaagaaaaatatgttgctaagattgtgttggtcgctctctgaagcagaaaagggactggaaccaattgtgcatatcagctgactttttgtttgttttagaaaagttacagtaaaaattaaaaagagataccaatggtttacactttaacaagaaattttggatatggaacaaagaattcttagacttgtattcctatttatctatattagaaatattgtatgagcaaatttgcagctgttgtgtaaatactgtatattgcaaaaatcagtattattttaagagatgtgttctcaaatgattgtttactatattacatttctggatgttctaggtgcctgtcgttgagtattgccttgtttgacattctataggttaattttcaaagcagagtattacaaaagagaagttagaattacagctactgacaatataaagggttttgttgaatcaacaatgtgatacgtaaattatagaaaaagaaaagaaacacaaaagctatagatatacagatatcagcttacctattgccttctatacttataatttaaaggattggtgtcttagtacacttgtggtcacagggatcaacgaatagtaaataatgaactcgtgcaagacaaaactgaaaccctctttccaggacctcagtaggcaccgttgaggtgtcctttgtttttgtgtgtgtgtgttcttttttaattttcgcattgttgacagatacaaacagttatactcaatgtactgtaataatcgcaaaggaaaaagttttgggataacttatttgtatgttggtagctgagaaaaatatcatcagtctagaattgatatttgagtatagtagagctttggggctttgaaggcaggttcaagaaagcatatgtcgatggttgagatatttattttccatatggttcatgttcaaatgttcacaaccacaatgcatctgactgcaataatgtgctaataatttatgtcagtagtcaccttgctcacagcaaagccagaaatgctctctccagggagtagatgtaaagtacttgtacatagaattcagaactgaagatatttattaaaagttgattttttttcttgatagtatttttatgtactaaatatttacactaatatcaattacatattttggtaaactagagagacataattagagatgcatgctttgttctgtgcatagagacctttaagcaaactactacagccaactcaaaagctaaaactgaacaaatttgatgttatgcaaacatcttgcatttttagtagttgatattaagttgatgacttgtttcccttcaaggaaacattaaattgtatggactcagctagctgttcaatgaaattgtgaattagaaacatttttaaaagtttttgaaagagataagtgcatcatgaattacatgtacatgagaggagatagtgatatcagcataatgattttgaggtcagtacctgagctgtctaaaaatatattatacaaactaaaatgtagatgaattaacctctcaaagcacagaatgtgcaagaacttttgcattttaatcgttgtaaactaacagcttaaactattgactctatacctctaaagaattgctgctactttgtgcaagaactttgaaggtcaaattaggcaaattccagatagtaaaacaatccctaagccttaagtcttttttttttcctaaaaattcccatagaataaaattctctctagtttacttgtgtgtgcatacatctcatccacaggggaagataaagatggtcacacaaacagtttccataaagatgtacatattcattatacttctgacctttgggctttcttttctactaagctaaaaattcctttttatcaaagtgtacactactgatgctgtttgttgtactgagagcacgtaccaataaaaatgttaacaaaatat

SEQ ID NO: 12746 - DNA, 3415 bp, Homo sapiens
catattttccaataattttgaaacagttgcaggagtcactatcatctaaatgtatttagacttagaaattcagatgttacttgatttccttttatttaaaatcattaacttcatgaaatattgtaggttaagatgtaatccagaccaggcacagtggctcatgcctgtaatcccagcactttgggaggtcgaggtgggtggatcacctgaggtctggagtttgagaccagcctggccaacatggtgaaaccctgtctgtactaaaataacaaaaaaattagctgggcttagtggcaggtgcctgtaatcccagctacttgggaggctgaggcaggagaatcgcttgaacctggaatacagaggtttcagtgagctgagatcaccccattgcactccagcctggacaacaagagtgaaacgctatcaaagaaaaaaaaaagatgtaatccagatatatttgacagtaattaaaatcttttaaatgttataaatgcagtatgtttgtgaaagtattagaatagaaccaaagtgcctgtctctgtttataaagttacagtttgttagagctaccagaactttggagaatagggttagctactgaatgatggcaagttaaactaaacaatactgcatattactgttttgtaaaataagaggatcagtgagatgattcatgttttttttttttgagatggagtctcactgtgtcacccaggctggagtgcagtggcgcaatctcagctcactgcaacctccatctcccggattccagtgattttcctgcctcagcctccaagtatctgggattgcaggtgcacaccaccacgcccagctaatttttgtatttttagtagagatggggtttcaccatgttggacaggctggtctggaactgctgacctcaactaatccaccctccttggcctcccatagtgctgggattacaggcatgagccacctcacccagcattttttttttttaatttttttaatgagacagagtctctctctgtcacctaggctggagtgcagtggcacgatctcggctcactgcaacctctgcctcccgtgttcaagcaattctcctacctcagcctactgggtagctgggactacaggggtgcaccaccatgcccagctaagttttgtatttttagtagagatgggatttcaccatgttggctaggctggtcttgaactcctggcctcaagtgatctgcccaccttggcctcccaaagtgctgggattacaggcgtgagccactgtgcccagctgagatgtttcttattattttggaggtggagaggattttagacctctttgagcatctgaaaaaaggctatatatgtatggttttctcttcagaaaaatcttaagactcacaatacggggacttccttgttaccaggaagattttctggcaattcctagttaataaatcttattctaatggaacatacattgatcttgagttaatgcgtggttgaaaaaaaaagcgggggcaacttgaaatatatgcagtaaagtagtccatgcatacaagtccctaacatggtagatgatgttgcctcccggccctgctcagaaagaatacaaaaagtgtacattcctttttctataatttaagaagtctggaatacagagtgtaacactgtgtactgctagcacccaaagtggaaaatcttaagcattcagattgtttagtcaaagaagaaaaccagaagggcagttgcctattgaggtgattttaaacctgtttatttgtaaggattaagtaccctaataggcttaaactatgatagaggtttaatacagaaaaaattgacaggtattataaattgtggatccagttacttgcttatttaatttgtaaagaggtaaaattagctctggttgagatatcaagtatggcaggtatttgagaaggctataaatcataattttcatttagttaaaatatggacctgattctgggaaaccctatcattccatctcaatgttttacaataaaataaaaactaaagtgaaattcattagtcatttctttgattgatgtctcttaaattttagttcacctgcttaatgaagttatgacattttttaatagaaaaaatgtacagcatacagaggtaagaattctgcttccctgagaatttattttagacatagatggtggcaattaagactaggttcttttttcatacaagttcctagtcctggtttctgactgtcctattggggcaattgtgctttccaaccacattgaaggaattgaaatatcctcattatttgtggattttatatttgtaaatttgcctccttgctcaaatctatccataaccccagaaccagtacttgcacaagtgcttttgagccatttgtaggcaaaaatgtgagtcacctcccaacagaagtgaaacaaatggtactctgccttctagtttcagctctcataccgtaaacatgtatcctttttgagtctacttagtcccatctcttcctaatttctgttctttttgttggtgattttactgtttaaaatggcctccaaatgccctgctggagtgctttctgatgttcctaagctcaggaaggcttaggagaaaataagtatattagataagcttcattcatgcacaagttataatgctgttggcagagagttcagtgttactgaatcaacaatatgttgcattgttctgttgacaaaaacaaagcttgcagaaacctaaccctgtatgttttctaggagcagtgatttggtattcactacttcagtgtttgtggactttatggaacataagtaccacaaataatgcaaattgactatatttgcagcgtgtacaatcaaggatgcagaggcagaaatgtgtgtgcagcttaggtcatagtaaaaagaggaaagaatttgaggaaaattttgccagttacatattacctctggaataactttgcctttgccgtgtgtgttactgtgtacactcagatatttttctcataatggcctttgccgtgtgtgttactgagtgagtacactcagatatttttctcataatggcatgagggaaatcagtctccttttcccattgtgtttgtcacttttgctgagacgcaaaaaataacgtgctatgatattgtgaaatatgtatttggtctttatccccaatccctgacatccagcggaatctgcagagttaagtgtcttttgtatgctcatgtgatgactggtggctgggggcccctagaaagtttcaggatagggcagatccttgtggccaggagttccagatcagcctgggcaacatagtgagaccttgtctgtacaaaaaagaaagtaggaaaaaacatctttggtttttcctatctccagatacttccttttcaaataaatgaatcttctttcatgtgcataat

SEQ ID NO: 12747 - DNA, 1445 bp, Homo sapiens
tgaggatcagcttgttagcctgcagattccttttcatttggaggaaatcacaagtggccgaaaaaaaaaattatgctcccaaatcattctactgatgtgcttgactgaagtgtgtaggctttttgcagaagatcttactaactgacctattttctgtgaacatttgtgactgcccattccccatcatcatccgttttaccttagttagcatttttcttatcatttttctttttttctttccctcttcccctttggacataactttctgttgaagctgttctttggctggttggttttagtactgtaaactgcttctgagcaaacacggaaatttagcaaaattatgtaaacttgatcctgaagttttagaatggcaaataaatgtacaattgtttacataacagaaaaggctaagcagaaagtaaatttcaatatgtcagtatagaggctctactttatgtagacttaaattaatgtgagatatgtaccttcatattcagaaatctggatgtttccttcatacattaaactattaataagcataacttttctactggtgtaatttaagtataaagtaaaataatgggcattatcattggatgtttccccacattggcttttaaaatacccatcttgctttctttttggtttatttgtagcaaggcacatatagaagaagaaatttctggcttttccatgttgttttattaccttttctcacttttaaaactaatacagacttatctcctcactcctttttctctccttacctttaccactaataccagtaaaattatctttctgatagtgaaaaggttctgtcaagattttcactgtaatggctgctacagagatggaccatcttcatcatcaccagtggtttcttctaattataaaatgtttaaactttctgagaatttaaaaagccaccactgttcccagtcagcatatacaagctcttaatattctgtttattaaataattcaatgtactattttatattggatgatattgattcttaacattggcttttcagtcatcaacagtcaacataaaaatttcaattttcagtaatttagtggaaaatatcttatttcttttttcaattttaaaggcttcctgcttttttacccttgtatattatcagtgaaaaggatcaacagttaatttgagccaagtaataaaagaaattctgcatttgtcacgaagacaatttatggtagacagataaatacacagattacagtgtaaagtctccatttaacctgtttataaaagatacaaggccacactaaactactcagtgggatttatatattccatccacttgaaacaataaacagtaatgtatccaagaagattatgtgtcctaccctgtctcatggaaaaattaattatatggttgaaatgtaaaagaaagtaagcataaaaatcgagtaatgtat

SEQ ID NO: 12748 - DNA, 3090 bp, Homo sapiens
cagtacaagcttctattgctaaaacatttcaaaaaactcagagatattactctttgatgaatgcataagttctgtacttgcatttatacgaacatatatgagacttgaatcgtagaaaattgaatgtcaaaaaaagctcatttctttttgaagtgatgaggttaattagggttcacagttggacaaaatgagtttgagtttagtttcagtaactgaaataagcttgaatactgcatatgccaaatagcttttatagtaaaccatgtaatgaactcaaatttaaatggtgtcttcagataagcagtttaaacttcatttagcttggactctcaagagaactgaaacataatcaatggattcagaaatgactcagaaaaaagaagctgccagttcttggaatgaaaaagaaatacagtcttacaccatcaaggaatctacctgatagtgacagtagcttcttgaaaactctggcattttcataaaatctaggactatcttaaatggcctgttgacttctgactatctgtaacatcagagctgtctggcctttggaaaggaaaaattatggactctgttaagaaatcctaattgaaattttctgaacctccccccagcccttttattctctctcttctgctgatgaaagacctttcatcagttcaaagcttttcttaagctcttttttaagttaattgaactttttctttatttatttttcaaaaaaatgtttatatcacatagacatattacatcggctaaagtaagacttggcccacaaatacctatttgttgctgaatgaatacaatggataaagcaaggctgttgtagctgaagttacatagggaatcccaaactctgccctcttagcatcttattctacatgacaactctcaaggtactcacagatctgtttaacccacttgaaaaaaaaacactaaaaatgaagaaatgctataagtataaactatgattttatttataaattctgtattaaaatggaattatatgcaacattctttcattctgtaaactaattccatttgcattcctcataagcattgtagtaaattgatcatattacatgtactaaggaatgagattatatgcagtaaacccaactggaagattaacaatattaaaatatgaaacatttttaagacaaaggcattacttctcagtattaccaaacctaaactggttgaaggtgaaagtgtgctatggccttttcaagcctaagaagtctctcttactgagtaaaccagaggcttgcatcgctattctttcacctgtcaatattaataagaaaatagtctcatctcacttaaatgaggcaaatgtaatagttaaaattcaacatacttataaaaaactagtgtcatgtacctgccatgaacatgacaaaaggttagtcttcaatagactgaaatgtataagagaagaaccaagtcttacatagaaaaaaaaggtagatatgaaaagaaaaatcacagaagagagaatgcaaatggccactaagtatatgaaaaaagtcgtatcttaacagtgaacaactgtgttagtctgtatcaatcagaagacagaaacaaggtagtaatttaaacagggaaagtttaatataaataataattaagctatgataggagaataataataaagatgaaaagagaaggtaccctaaggctgagggaaagaatcctaacaaggaaaggcaggaatgagggtttcagaattcactggagaaggtgtggttgcagcccactggagagaagtttgctggcttgcccaggccagagcaggaccacagatactggacaagctggtacagccaaccccctaggtgtggaccagctgaggcaggtgggcagatatgcagagggacttggggctttgccaaagggtaagcacaaagaaggagtcacgggttctgttcgaggcactgttgggattaggagccggagggacctactttgcaggaacctagcataactttgtgtgacgagactgcacaagacaaagctcaggcaagtggctcagtagttggccagcccagcagggtcctctgtatgagtgtgcacccagctgaagagaagaaatggagagcagcaattggagcttcaggaccggcttgcactgtggctccaggttataccaccactgcccaaagcaaaagctagagaagcaagtggagaaatgctggagaaagctgcaccctacaggcaaccagcactgcagaaaccactccaggcaaagtagtgaaggaaaaaagcctgctctccagtagcctggcctgtcagcctggaggaatcaggaaagaccccttcctcttgcagtgtgtctccagcgccctctactgacaaagtatgccatcatgcaagctgcaaaggaaacatttcaagagtctatatctattttcacggagcgggcaaccaacagtgaatgtggagctgagagacagtaaaataataactgacatgccaccgaagtacaaagtaaaataaataaataaatacacattttggcctattagcaaagattaagaaatgataacattaaatactcaataaatcaccatgagatggggactcaaacttctggtaaaaatacaaatagatataatttttcttgaaggcaatttagtagtctgtttatcctataattctacttgtaagatcctatcatatgaaaataaccagagatacaaagacattctgcaaagatatgttttatattgttatttattgtgacaaaaggaaataaaaagcctaaatgttcagaaaattattttaaaagatgaaagagggaaataggccatggacggtggctcacgcctgtaatcccagcactttaggaggccaaggtaggtggatcacttgaggttgggatttcgagaccagcctggccaacatggtgaaaccctgcctctactaaaaatacaaaaaatgagccgggtgcaatggcaggcacctataatgccagctactcgggaggctgaggcaggagaatcgcttgaacccgggaggcggaggttgcatgagccgagatggcgccactgctctccagcctggacgacagagcaagactccgtctct

SEQ ID NO: 12749 - DNA, 125 bp, Homo sapiens
ctactagctgcctacgtgtgtgcatttgctatatagcatacttcttttttccagtttcaatctaactgtgaaagaacttctgatatttgtgttatccttatgattttaaataaacaaaataaatc

SEQ ID NO: 12750 - DNA, 231 bp, Homo sapiens
tttgttctgtttctgccaaacttctttaactcccaggaagggtagaattttgaaaccttgattttctagagttctcatttattcaggatacctattcttactgtattaaaatttggatatgtgtttcattctgtctcaaaaatcacattttattctgagaaggttggttaaaagatggcagaaagaagatgaaaataaataagcctggtttcaaccctctaattcttgcct

SEQ ID NO: 12751 - DNA, 1994 bp, Homo sapiens
ttaagagaaatgagcacgcatggaaaagtttcccagtcttcagcagagaagttttctggaggtctctgaacccagggaagacaagaaggaaagattttgttgttgtttgtttatttgtttttccagtagttagctttcttcctggattcctcactttgaagagtgtgaggaaaacctatgtttgccgcttaagctttcagctcagctaatgaagtgtttagcatagtacctctgctatttgctgttattttatctgctatgctattgaagttttggcaattgactatagtgtgagccaggaatcactggctgttaatctttcaaagtgtcttgaattgtaggtgactattatatttccaagaaatattccttaagatattaactgagaaggctgtggatttaatgtggaaatgatgtttcataagaattctgttgatggaaatacactgttatcttcacttttataagaaataggaaatattttaatgtttcttggggaatatgttagagaatttccttactcttgattgtgggatactatttaattatttcactttagaaagctgagtgtttcacaccttatctatgtagaatatatttccttattcagaatttctaaaagtttaagttctatgagggctaatatcttatcttcctataattttagacattctttatctttttagtatggcaaactgccatcatttacttttaaactttgattttatatgctatttattaagtattttattaggagtaccataattctggtagctaaatatatattttagatagatgaagaagctagaaaacaggcaaattcctgactgctagtttatatagaaatgtattcttttagtttttaaagtaaaggcaaacttaacaatgacttgtactctgaaagttttggaaacgtattcaaacaatttgaatataaatttatcatttagttataaaaatatatagcgacatcctcgaggccctagcatttctccttggataggggaccagagagagcttggaatgttaaaaacaaaacaaaacaaaaaaaaacaaggagaagttgtccaagggatgtcaattttttatccctctgtatgggttagattttccaaaatcataatttgaagaaggccagcatttatggtagaatatataattatatataaggtggccacgctggggcaagttccctccccactcacagctttggcccctttcacagagtagaacctgggttagaggattgcagaagacgagcgggagcggggagggcagggaagatgcctgtcgggtttttagcacagttcatttcactgggattttgaagcatttctgtctgaatgtaaagcctgttctagtcctggtgggacacactggggttgggggtgggggaagatgcggtaatgaaaccggttagtcagtgttgtcttaatatccttgataatgctgtaaagtttatttttacaaatatttctgtttaagctatttcacctttgtttggaaatccttcccttttaaagagaaaatgtgacacttgtgaaaaggcttgtaggaaagctcctccctttttttctttaaacctttaaatgacaaacctaggtaattaatggttgtgaatttctatttttgctttgtttttaatgaacatttgtctttcagaataggattctgtgataatatttaaatggcaaaaacaaaacataattttgtgcaattaacaaagctactgcaagaaaaataaaacatttcttggtaaaaacgtatgtatttatatattatatatttatatataatatatattatatatttagcattgctgagctttttagatgcctattgtgtatcttttaaaggttttgaccattttgttatgagtaattacatatatattacattcactatattaaaattgtacttttttactatgtgtctcattggttcatagtctttattttgtcctttgaataaacattaaaagatttctaaacttc

SEQ ID NO: 12752 - DNA, 665 bp, Homo sapiens
caggagagaagtaagaagcttatcagcgtatcattgacacttcctgcagggtggtccctgcccttaccagagctgaaaatgaaaaagagaacagcagctttctagggacagctggaaaggacttaatgtgtttgactatttcttacgagggttctacttatttatgtatttatttttgaaagcttgtattttaatattttacatgctgttatttaaagatgtgagtgtgtttcatcaaacatagctcagtcctgattatttaattggaatatgatgggttttaaatgtgtcattaaactaatatttagtgggagaccataatgtgtcagccaccttgataaatgacagggtggggaactggagggtggggggattgaaatgcaagcaattagtggatcactgttagggtaagggaatgtatgtacacatctattttttatactttttttttaaaaaaagaatgtcagttgttatttattcaaattatctcacattatgtgttcaacatttttatgctgaagtttcccttagacattttatgtcttgcttgtagggcataatgccttgtttaatgtccattctgcagcgtttctctttcccttggaaaagagaatttatcattactgttacatttgtacaaatgacatgataataaaagttttatg

SEQ ID NO: 12753 - DNA, 719 bp, Homo sapiens
ccagaaggaaggaggaagcttattggtggctgttcctgaaggaggccctgcccttacaggaacagaagaggaaagagagacacagctgcagaggccacctggattgcgcctaatgtgtttgagcatcacttaggagaagtcttctatttatttatttatttatttatttgtttgttttagaagattctatgttaatattttatgtgtaaaataaggttatgattgaatctacttgcacactctcccattatatttattgtttattttaggtcaaacccaagttagttcaatcctgattcatatttaatttgaagatagaaggtttgcagatattctctagtcatttgttaatatttcttcgtgatgacatatcacatgtcagccactgtgatagaggctgaggaatccaagaaaatggccagtgagatcaatgtgacggcagggaaatgtatgtgtgtctattttgtaactgtaaagatgaatgtcagttgttatttattgaaatgatttcacagtgtgtggtcaacatttctcatgttgaagctttaagaactaaaatgttctaaatatcccttggacattttatgtctttcttgtaaggcatactgccttgtttaatgttaattatgcagtgtttccctctgtgttagagcagagaggtttcgatatttattgatgttttcacaaagaacaggaaaataaaatatttaaaaatataa

SEQ ID NO: 12754 - DNA, 438 bp, Homo sapiens
aggctatgaagttacctccaggttggtggcaagctgcaaagtgccttgctcatttgaaaatggacagaatgtgtctcaggaaaacagctagtagacatgaattttaaataatgtatttactttttatttgcaactttagtttgtgttattattttttaataagaacattaattatatgtatattgtctagtaattgggaaaaaagcaactggttaggtagcaacaacagaagggaaatttcaataacctttcacttaagtattgtcaccaggattactagtcaaacaaaaaagaaaagtagaaaggaggttaggtcttaggaattgaattaataataaagctaccatttatcaagcatttaccatgtgctaataagtttgaaatatattatttcctttattcctttcagcaatccatgagatagctattataatcctc

SEQ ID NO: 12755 - DNA, 3521 bp, Homo sapiens
attctctgcaatgactgtaatggacgatccactgttcagtttcatatattaggcatgaaatgtaagatttgtgaatcctataatactgctcaagctggaggacgtagaatttcactggatcagcaatgacgagcctacacagtactggagaacttggcattttctgatatagaaaaaggctttccttggtatcgtgttatcatgtgtcgtcatctatgcattagagttgatgtgttttgtactagtgtcacagcataaaatcatattacaagtacgtaaggattcagggtctcttgatagacttatcatagctctatattgaatgaaagccactgtgcttgtgttttgattggaaattcctttagtgtcagttttttggaagccaatgatgtttgccactgatacattcatagaagtgtattatattttcatgaagctttgctttaagtgacactacgcgtgcagttcatttctagttcttgatagaactgcacttaattttcagtagtagtcttgactttttaagggctgtgttatattaagttctcccttactgttaaaacctaattaaatatgctttagaattttctaagacagtcctctggatcctctaaatgtgaattttgatgtaataactgctaataaaattatattgaaactgttttatagaaagttttttccaaagttttctatgtttggctcaattagggcagtatcatcagttctataatgtaaaagaaattttctttcttttgaggtattccataaaagtagttgggaaaattattatgtaaaataataagactcttccaaagccttaataaaaacatcaacattgaaaacagttttttttaggttgcccaaaattatttcttcaaagagtcattcattccttcatttagcaagtatttattgagcaactgctatgtggcagatatgtttctagatgctgtagagacaacagtgaacaataaagataaaagtccttgtcctcacagcagtacattctattgttcatcatatttgatcaatgtactcatttttctttatgcaaggagtggatgtcttattgtaaatgaatagaatatttcttccctaagcgtgtgaaaataggggatggatgagtgggaagggcatgggatattcctggcaagatctctgatttcataatacttttttgggctcatgtagtggaattaaatatacctcttacttcaggaacaaagttaacaaatatgtttgatgatccagccgactttgacactgttatctccgtaatagctttaccattaggctaggatgtaaaatgtacatttatcagttgataagtacctattgagcaccagttgtatttccaactttgagctatttgaatcttctttgaataaggaagttagccttttaactagaaagcctaagagttctggcacatttatttcttcttttgttgaaatttattcacctagataaaggcagcagtttgggactcagatctttattttatcccaccttcttgtcttctgtattccactcttcttatgttctttcccttcatctgtttccttggcctggccagagcagcagtgctgatcttcatttgggaaaggatgttcctgggtattaccaattagtatacagataagtaaagactagttttccagatctaatacttttttttgaagtggttttgctctgtcatttaggctagagtgtagtgaagtgatcgtagctcactgcagccttgacttcctgggctgaactgatccttccacctcagcctcctgagtagctgggactacaggtgtgtgccaccatgcccagctaatttttaattgttttgtagaaacaaagtccaggctggtcttgaactcctgggctcaagcatttctcctacctcggccttccaagggctaggattacaggcatgagccactgtgcttggtccagatgtattactttttatgtttggtattattctgccaaaccaatcatgttattgtttttaatcattgaatcattggatctttaaataggagtgagtatataataataaggctcttctgttttcaacatctgtgctgggtcatgcattagcattaattactacaatgattctgtggggtaagtgttgtcctcatagacaagaaagctgaggtttagaggttaaaatgacacattgggggtaaataacagacactatatgttggagttgggaatcagatccaagtttgactccaaacccacttttaccacattgcttttgatctaaacttctattttgctaaaatacccctcacagctagtcatccatatcattgaagcgctcatgatttgatagattaacctttcatttttttaggtgactctagttagaaagtcttatttcacaatctgattgtttctttaacttaggatccaaacatgtccaaaataatgcagagtacatatgcaatcactcgtttatgctgtctagtcatgcacttaaagcaattttcaaatgtactcaaagtctctaggcttcggtacccagggttgcttcaagtatttgttcatgacacgtcaactcgatgattaaaatccttcaacacttctcattcacaataagaataaaatctacatcccttaccattcagtatgcaaaacttaaaatacataactttacccttaaatattttttctttctctgacttcataagtataggttatacctctataagaaagaaggtaaaaaactctcaacaatcccttctttcagagagaactactgttaacattttaacagacaacttcattcttttcctattcttttttataatgcttacaggaatgttaaatacttagacagatcttaagtacactagaattatctgtccctgaaataagttaggttgccctgccgcagaatttgtatctatagtttatttggattatttttgaaaaaagtaaaataacaatacccttacgaattttttggtgcatagcatctcagcttcttttatcattaaagatgtatgtataaaaaaaaaatgagtgtatatcaagttgttcatttcttagtttctggggtcttcttaaccagtacatagaactctttatgaattaactttagcttatgttggaagtagtagtttgtttatagtgtcatggattttaaaatcaaactcagtttttatttcttcactaaaacctattttcatatgatatacatgttaaatttcccttttattttggtcatgcatcaaaataaatttactaagtactaaagagccaacattattttataagtgcctggcaataggtattcactagttgaatagtttaatttgaaatgaattaattttaaatgggagttgttcaaaactatgccactttttcttttgtcctttgtgttattaaaatttaattgataattgtgtatattatatatatggagtacaatgtgatgttttgatatatgtttacagtgtagaatgattaaatcaatgtaataaatttattgcctcataccattttttgtggta

SEQ ID NO: 12756 - DNA, 2685 bp, Homo sapiens
atgatgctcttgcacttgagatgacatcttcttgcagcaagagtgctgatatcccaagaggagagattcatggttttgatcatttccttctgaactgcctgcattttctgaggaaggccttctagaagaaggaaagacaaagacttccaaatgtttcaaaggaagattgaacaaatggccctccccaactgttatcccattacctttcacgtccaccgatgctatttcaagacatatccagtggaataacagtgatatggttcttgttacatgaatgtgtatttactgttaggagattgtatattttaagttaccatgattaaaagtgtgtaaaaaagggggacagagagaaatactataaaaggccatgttactcatgcattgaactttgtgtgttttctgtataaatgtgtacatttatttaggagtgggtttcttgggggtaggtgataaaaattaggatcagttgaagaaaattgaagaaactaggatcagtaagagaaactgtttgctttacctgaatttaactatgaaaacacacttaacaatcttacacgtttctagatattaagtgaatatgtaactcctgtccatgggtagatgtgtatctttgacttctgtaattatttttgatattctatcagtgtattatgagactctggcctccctgcagatcttctaagaaccacactaatgcaagcgtgacagagaaacctctttcgaatgacttactacaactctggcattggttagttccatgtattgtaagattctggtgctaatgctccatacagaattgatcaggactgattactcttctgtggaccaattgctattgaactacccagctgaagagggtttggggagagaacgttcattattatggactccacttttgtcccctggtagtttaagggtgatactagaatccagagaagttcctgtctccttgtggcctcaaacactcaggccgtctcaaaagcttttcaccaaggtgcaaaatcatttacctgcattccacacatcttttccaatgcatggatccaaaactttttaggtgggaggaataaactaagttggctacaggttcttgatttctgggtttctacacatgctctgcatttatcattttagagaatggttgtttagggaaccagaatttgtgagttttttttttttttttgccttaactaattaatagtgtgttgctttttttccaaagccattgactagaacttagctgaagaatttaactagaacttttctttattactctgaggagcttaatactgaaattctgaccttggatatttaagcctcaaaagagtaggacattcaagaggaggcaaataaggggtttcaatgtacaagtctataggtggtggttaaattaaaattggtcttgatttaaaagctctacttttaatctgtgaccagctgtttgacaacattagtatggataacatgctgaaaaaactagggtatcagcattaataggctgcatattaaaaagttactactttatttttactttgaaaaacactgccaatagattctgcagcatggcaaacaggtaatacttaaagccaaatggcgcttcggcttatttcaatactatttttatgtaaagatcagtgtgagaatatcagctcaatggttgaggttctaggatcaattgccttgcagtttttatactagcttttgatatcttttgcctattaaaacactttgtgaactttagaattaaggaactaaaaaatatttaccataagtccaagttatgacttgaggatcatatctgattagaactgtggcagaactactagaaaaagattctgcaaattggtttcagtgattcttgttgatgtaatcaacaagattacataatcaacaataatagatattgaaccaaaatgatcctttttttaagtttaaggttatttagtttctcttgcaaggatatgatttagtcacacactaatagggaatatgtgtatgtactggtggggagcagtgggcttgctgcatgtatgtatgttttaaaattaataaatattatcttactgggctccatagatggtttaaatttagatttatttaattaagaggctataaataatatatacactactgtatggtatttaacaaataagttttaaatctgttaattcttctggaaaactttggatgtagggatggcaagctaattttcttgtatagctggtgatataagcagcatggtcataaaataacatttcttataaagactaactggtaatagttgtgacagaacctggttttcctgactgagaatcccttgcttgcttagaatatctgacttcccattgaaatggaacatagaaaatgtgttttcttatgtgactctcattattggttcctttatcttagttgtgctacaatataaggctggacctgtaatacactatgtatcagactagactgaaaaatgtgatcgatttgttttctaagtcctcctctatataactgaaccatggtcaggggattagagaagcaacagagcactgctcctaaggctttaggctagtcttagtgaattggactgaatggatttttctctgttgttttttgcattaagtgtttttgcactagaagagggtgcttaacactcctctatctatatgaataaaaaattatgttctcaca

SEQ ID NO: 12757 - DNA, 2647 bp, Homo sapiens
agctccactgttggcaaagtcttggcagtggtacattattcatcgtgtttgcattcttgttaattttttttttggctttggaatgtgacacagcctttttgatcatttctttgatgtgaaaagcatctttggttatcagttaaattgaggtggacattatttccccaatttcacaacaggattcacattgttaatttataaatctagacttggagaattaaggactgagaaatgaccatatcttaaactatctacgacaaagtgaacttaaaaggacatgcccactgaattcaggtcctttgagtaaaaaaaaaatcttctgctgcacattttgtttaagtgttactgtttctgcctgttaatgctgggaacacaaatagtgcaatttgtgcaattggagaatcttgccttttttcttggctccccccaaaaatacaaaccaacagaaacttgttatgcactcatcaaaatgtactaatgggtactctgaactcattaacattgacatctgcaacaggaggcaacagggaaaaaatctcatcttcttttccagtagaaaatagtttgtgaaatgatgagggcattttatctgcttgctgtgaccagcgtgtgtacacataaaccttaacaagactacaagtatattccagaaggaaatcattttagttatgaactaaataataaaaattagaacttcaaatgcgatggtcttgactattagaccagatttagtagctccatatctaagatttttctacctgcccctcttcagtacagggatggctggctgctcaacacactcctcctccccttttttcctttctttaagctgtgtacagtgaaaattgtctttactgtatttttgttctctggtaatgtaataagcatgatggtgccttctattaatacatcattccagtcttgctggtaattttgtacagtatagtgtatgaattgctgtgctgcaaagccaaacagctgcaaaatgttgaaaaatcatcgaaatgtataaaaattgcagtatctttaaaatcagtaaaatggactagcatattatttatcttgttcttcagttaacaactttgtgttctctgtgggagggagggagtcctgtgtgtttgtggggagagggaaggaggaagtcagttatttgagtaagcctctagttgacttttctcttagcctgaatgtggacgttgaaacatatcacttcagggcttggaaaagtcagtcaacttgacgtacatttttagtgacattttaaaagcagtcagattctataaatggcaagtaagcctgaagtgaggatactgcaattttcggagaaaagaacagcagctctttaagtgtttgcattttctatttggggggcagggaactgtcattcattttgcacaattcttgaactgatgtcagcacccgagtggctcctgaatttaagtctgggacgacatcttttatttttacatgaatctttaaacaattctgtgagcaaagtttgtagctgctggattattgtctgtctttatagcaagttccagtaaaccacaagtatggcaaagcttatccaattttatgcttggagcagtcagtacataccagtttctgatgtttcaggcaggagtggggtaaataagtgtgaccacttaaagctgctcgttagcatggaagacttctccattctatctttgtaaaacagacaagatatgcacttgacatagtagcaaattggttctgaattatgcaactgtttgctatttagtaaactagcaaatgatgcatgtattttgtttttcatgtactgggcaatatgagtaaaatctgtccctttttccccctttgaatgaggtcttccatgtttgagggaaagtcttgcactattgcatatattttggggacacagattttcatagtttccatttttggggggcttaaggattttttttttttctgtttgaaacagttttatactttctgatatagtacttgaaattcttaccagaaaattactttggagttttgaagcctttattaatactacttttaaagaagcagttgttttattgtcaatgttttttttcccccaagcatattttcttgtatttctgtttccatatatatatatatatatataatttccaattcaggatattgccctgccatccatgaaaactgttctggcaccaaaagtaatgacaaatgttaagtgtaataatagaaaagtagagcaaagagccattcagcttcagtctttacataccatgaataaaacattaaaacatcatatggagaagtttacatggtgattgttcacctgcagtactgtggagttttaacattttgtcctcttttcagtgaaacagagtaaaaatattcatctaccattactgttatttgctgattttgttttattttttgatggtaatattctatccttatgacactattgcaaccaaattggctttaccatcttggctttagtaggtatagaagacaatggattaccatctttattgctgtaatgtgttaagcattatatgctagtagaatctagtttaattgtttcaggtggaaagtattctttgagtttccatattgaatgtgtttggactaaacaaacaataaactactgatgtctgcagcattt

SEQ ID NO: 12758 - DNA, 792 bp, Homo sapiens
gaacagcctggtcttcatcacccaaagtgcctcataggcaatgctcagcttctcactagactatctcccttattctccatgtgaaactttatgctgaaaatttacctatccatatgcatcagaatcacctgtgtatttcagtgtggaggggtgggttggggtgttgtgtatgtatgtgttttaagtatatgagtgccccaaccccacctcacaatcttcacaaagtagaacttaggtatagtgttttcaaattctaaagtccacttcagttaagaaccactgacaatgtaactctctcattgttttcattttatacgtttttttgagatggagtttctctcttgttgcccaggctggagtgcattggcgcgatctcggctcaccgcaaagtccgcctcccaggcgattctcctgcctcagcctcctgagtagctgggattacaggcatgcaccaccacaccaggctaattttgtatttttagtagacacagggtttctccatgttggtcaggctggtcttgaactcccaacctcaggtgatccaccctcctcagcctcccaaagtgctgggattacaggcatgagccaccgcacccagcctattttatactttttatttattgtctttaacaatgtctattggtaaaggaaagttatttttaaaaattgtattgtaattccatgacccaagcatatggattttcttcattatttactttttcttacttgttactgtagtgtttatataattttatgttctacttttaaaaaaataaattaatatctaattgt

SEQ ID NO: 12759 - DNA, 682 bp, Homo sapiens
atgattttttaaaaaatgaaattcttgaagagctgcaccttaaaaaataagacaaagtgaaagtattgtattatgttacaaacaatgcaggctccttcctcatttaactttacaaccttgcgaagtgggtccaggagatttggagtttgtggtaaagccagtaatgggcattgtcctgcattcccttcccttcatggtttgcctcgatcctctctaagcttctatcctggcctgaataactcaaagataattggtctcagagatcaagccatatcctcaggccttatttccatcttctcatgattctgccatcatacctttgcttctccgctaatgaaatgagctggcaagacctctgttcattgtgaagtgcttctgaaagagcctaagaaaaaaggctcatctgaaagaaatggagaactctatttcgaaccaagcctgtttgaatgtgtgttagtctgatctttgatcatgtgtttccatgtaatgggagtctcgttttttataatgtttctaacgttttattgaaaaacctatggccctccttctttctcaatagctactttcttactgctttttgaaaataatatgcaaccaaattatttcttaatgtcacataattaagtaataaaatgtcaaaagaaatgttggcaaggagaataaaaaaatttccaagaaactt

SEQ ID NO: 12760 - DNA, 835 bp, Homo sapiens
cttcctggcaagttttccattcctagaagaatgctaagtttgtgtccttgctctgaaaattggtaaatcaagcatgtttgtttacattaaaaagtccagacacactgtattgtgaaaactgctgaacatgtggcagcaattttgtgtttttattttggagacggctaatggtaggaatgttaatgtaaatagtggtggtaatgtaaaatcatttcatttatcattcatgcaaaaaaaagtatgtattgagtgcctattcattgtcactgtagatgcaaaacgaatgagctgtaaccccttcactcaaggcattgacagcttagctgtgagggtggacacacatatgtgtatttacagtgcagtgtaaatagttctgtagtagaggttaactccatatttctgtgaggtcactgaggccttatggactaactctgtgaggataggagttatatattcttataagacaaaacaaaacaggacaatgttacaagagtaagaggttcttacttgtacataggctttcctgctgaaaacaggcccctgctgtacagattttgggtacataatttagctcttttagtcaatccaagagatttaagtgacccccccccccccgtgttttttttgtttttgtttttgttttgaatgccatgtaaaggctttttggttaagacctcacttttaaaactgccttaagtataaatagtacctttggaatatatttagttcatcatttgagctgccttcatactggtttcctcagccttccttcagcctgtaatattttcagcccactgtttaccttgtctcaataaaaggtttctaatgccaaata

SEQ ID NO: 12761 - DNA, 2128 bp, Homo sapiens
gagaccacttcaccaataagtattctgtgttaaaaatgttctattttaattataccgctatcattccaaaggaggatggcatataatacaaaggcttattaatttgactagaaaatttaaaacattactctgaaattgtaactaaagttagaaagttgattttaagaatccaaacgttaagaattgttaaaggctatgattgtctttgttcttctaccacccaccagttgaatttcatcatgcttaaggccatgattttagcaatacccatgtctacacagatgttcacccaaccacatcccactcacaacagctgcctggaagagcagccctaggcttccacgtactgcagcctccagagagtatctgaggcacatgtcagcaagtcctaagcctgttagcatgctggtgagccaagcagtttgaaattgagctggacctcaccaagctgctgtggccatcaacctctgtatttgaatcagcctacaggcctcacacacaatgtgtctgagagattcatgctgattgttattgggtatcaccactggagatcaccagtgtgtggctttcagagcctcctttctggctttggaagccatgtgattccatcttgcccgctcaggctgaccactttatttctttttgttcccctttgcttcattcaagtcagctcttctccatcctaccacaatgcagtgcctttcttctctccagtgcacctgtcatatgctctgatttatctgagtcaactcctttctcatcttgtccccaacaccccacagaagtgctttcttctcccaattcatcctcactcagtccagcttagttcaagtcctgcctcttaaataaacctttttggacacacaaattatcttaaaactcctgtttcacttggttcagtaccacatgggtgaacactcaatggttaactaattcttgggtgtttatcctatctctccaaccagattgtcagctccttgagggcaagagccacagtatatttccctgtttcttccacagtgcctaataatactgtggaactaggttttaataattttttaattgatgttgttatgggcaggatggcaaccagaccattgtctcagagcaggtgctggctctttcctggctactccatgttggctagcctctggtaacctcttacttattatcttcaggacactcactacagggaccagggatgatgcaacatccttgtctttttatgacaggatgtttgctcagcttctccaacaataagaagcacgtggtaaaacacttgcggatattctggactgtttttaaaaaatatacagtttaccgaaaatcatataatcttacaatgaaaaggactttatagatcagccagtgaccaaccttttcccaaccatacaaaaattccttttcccgaaggaaaagggctttctcaataagcctcagctttctaagatctaacaagatagccaccgagatccttatcgaaactcattttaggcaaatatgagttttattgtccgtttacttgtttcagagtttgtattgtgattatcaattaccacaccatctcccatgaagaaagggaacggtgaagtactaagcgctagaggaagcagccaagtcggttagtggaagcatgattggtgcccagttagcctctgcaggatgtggaaacctccttccaggggaggttcagtgaattgtgtaggagaggttgtctgtggccagaatttaaacctatactcactttcccaaattgaatcactgctcacactgctgatgatttagagtgctgtccggtggagatcccacccgaacgtcttatctaatcatgaaactccctagttccttcatgtaacttccctgaaaaatctaagtgtttcataaatttgagagtctgtgacccacttaccttgcatctcacaggtagacagtatataactaacaaccaaagactacatattgtcactgacacacacgttataatcatttatcatatatatacatacatgcatacactctcaaagcaaataatttttcacttcaaaacagtattgacttgtataccttgtaatttgaaatattttctttgttaaaatagaatggtatcaataaatagaccattaatcag

SEQ ID NO: 12762 - DNA, 812 bp, Homo sapiens
aaccagaggggagcaaaatcgatgcagtgcttccaaggatggaccacacagaggctgcctctcccatcacttccctacatggagtatatgtcaagccataattgttcttagtttgcagttacactaaaaggtgaccaatgatggtcaccaaatcagctgctactactcctgtaggaaggttaatgttcatcatcctaagctattcagtaataactctaccctggcactataatgtaagctctactgaggtgctatgttcttagtggatgttctgaccctgcttcaaatatttccctcacctttcccatcttccaagggtactaaggaatctttctgctttggggtttatcagaattctcagaatctcaaataactaaaaggtatgcaatcaaatctgctttttaaagaatgctctttacttcatggacttccactgccatcctcccaaggggcccaaattctttcagtggctacctacatacaattccaaacacatacaggaaggtagaaatatctgaaaatgtatgtgtaagtattcttatttaatgaaagactgtacaaagtagaagtcttagatgtatatatttcctatattgttttcagtgtacatggaataacatgtaattaagtactatgtatcaatgagtaacaggaaaattttaaaaatacagatagatatatgctctgcatgttacataagataaatgtgctgaatggttttcaaaataaaaatgaggtactctcctggaaatattaagaaagactatctaaatgttgaaagatcaaaaggttaataaagtaattataactaa

SEQ ID NO: 12763 - DNA, 1104 bp, Homo sapiens
aaatatcaaaacatatgaagtcctggaaaagagcatctgaaaaacctagaacaagtttaactgtgactactgaaatgacaagaattctacagtaggaaactgagacttttctatggttttgtgactttcaacttttgtacagttatgtgaaggatgaaaggtgggtgaaaggaccaaaaacagaaatacagtcttcctgaatgaatgacaatcagaattccactgcccaaaggagtccaacaattaaatggatttctaggaaaagctaccttaagaaaggctggttaccatcggagtttacaaagtgctttcacgttcttacttgttgcattatacattcatgcatttctaggctagagaaccttctagatttgatgcttacaactattctgttgtgactatgagaacatttctgtctctagaagtcatctgtctgtattgatctttatgctatattactatctgtggttacggtggagacattgacattattactggagtcaagcccttataagtcaaaagcatctatgtgtcgtaaaacattcctcaaacattttttcatgcaaatacacacttctttccccaaacatcatgtagcacatcaatatgtagggagacattcttatgcatcatttggtttgttttataaccaattcattaaatgtaattcataaaatgtactatgaaaaaaattatacgctatgggatactggcaaaagtgcacatatttcataaccaaattagtagcaccagtcttaatttgatgtttttcaacttttattcattgagatgttttgaagcaattaggatatgtgtgtttactgtactttttgttttgatccgtttgtataaatgatagcaatatcttggacacatctgaaatacaaaatgtttttgtctaccaaagaaaaatgttgaaaaataagcaaatgtatacctagcaatcacttttactttttgtaattctgtctcttagaaaaatacataatctaatcaatttctttgttcatgcctatatactgtaaaatttaggtatactcaagactagtttaaagaatcaaagtcatttttttctctaataaactaccacaacctttctttttt

SEQ ID NO: 12764 - DNA, 701 bp, Homo sapiens
cagttcacaaacttgtgtaaaggtttgtgaaatgcatcttcttactgcatcagaccttccttaagaatgaaaccgaccacatggagggaaaaagaaaacaattctttcttggattggttttttgagaagtttactgacaaattactgttcatcaaatctgaaatagtcacctcacagctcttcaaagaaaacctttgaaagatttatatctaaaagctgtatttactttaaaagaagtgcataattaccaaaattgtatgtactattgtacatttttacaacagcattttcttaaacataatctgtgtttaatgattattgtccattgagcctgtactctgctttccataccaagtaaatatgaaataatctactttgcacataacagaacaaactataattacttggctgttggagatttgtacttgagtataaatgtacaccagtttttgtatttgtgaactcatctgtgggaggagtaaagaaaatccaaaagcatttaatgttttgtttttgttctataaagatatgaaaatgtatttttatattattttacttatttggaatttacagagcacacctaagcaattaggatataacaaaactacttaaccatttttgcaaccattttgttttttaagcctttttatttctaaaaagatgaaaacttataaataaattcttaatttgtaattactttt

SEQ ID NO: 12765 - DNA, 2972 bp, Homo sapiens
acattgcctttgcttggtgaagaaactgtgtgagctgtcctgacctggacgatgacgtggggaaaccctccacctccttgcaggcttgttgcctgttgaaagaaggaaaaagacacggcgctggcaagtgataggaacattctggccagaggttaaagagcaggctgacatggctggccattaagctttataaaatcatgtgggctctgaaattgttcttttatgtgtctagcaagtatttaataaacccttgtatagtaattttgttgttgttgggtgctggtagctccagaattttgtgaccactattgtgggtaaaatgtctctgcatcacttgttaatgctactggtctaacttcattcagtatgcttcattcaccgaactttgtgctcaaaatgcgtatataccattttatgttgtattcctccatttcacttgcaaaacagaagtaaataagagttcgggacccagggtaaaatggtagcttcatccaatatatcattcaaatgcatctgatttctaaaacatattacattttatgctgatcttcagttcataattcttccaggaaaactcagtcttccaactgcaataaaatactgggtagaatcaaatgggaaaggggttgggtggggcaatacccatgagttgatagtgataagctcctaaggatttttaacttgtacttttgtgaacgaagagaatgcataaataatgttggtgaggataaagtacagatatttcatgtagaattaattgctagttatgatgcttgtggatagttaactgttttttttttagtcaaaatgatcatgctacgaaaagatgcttctgagagaatgtaatgagtaactgatttttcttcctgagtcgcccttgccaaatatgttactgtattaattaatctaatattgagtgattatttgtaaaattatgaatatgggaaatccatctatctacagcctaagttacacataagtttcagaaagtctgattagactaaagagatatttcttctgggacagccgccttcttggtaattttgaagttctttttacaagttccttcctcagtttcagttctttccagtgttttgtagctcactgtcactcactgaatagagaaacgtgtgccctatacttcctgtgacaatcattttgctgacagaatgatggatgtttaaaatattgcacaaagtactttaaagaaaggtctgttaggaccagaagcagagacaccacttttcaaaggacttcttggtttcagcataacctaagacagggaattgggagccatcatatgtcacagtgttcagaattcaagcatatttaagggcattttctttgattctcaaagttcagcattcattttgaattgagaagcctatacatttagctgacaaagtgcttatagaatttcttaacaactgaaccattcaaaaggattttttttgtttaaaactggatttcaatgtaagcaaatgaagaaaaaaatatagatttcatttccatagcttcttatccctgtattgaggtaataaattgttttactgacaatttttcctttttctacactaaaacaatatgtgatatatttcccctcttgaagaggcaattcattaaactctcaaattttctatagaatcaagatagaacctttagatactccaactcaccaaaatgtaaaaaaactaacaaaaatatttggtcttcaataatgctaaatatctacatttttagaatttatcaacatttaactagataattgggcatgtcttaattatgcatgtacttatccatactaataaaattgacaatgctagtgcatacttattggtttagtcctattatcaggatataatcatctgtgaggaggatattttaaatactgtaaatgataacagttaatgatatacacatttagactgagttgcacactggcagggagaccaaaaacattacttccatacttgtgtcatgattcttttttttttgagagagtctcactctgtcgccaggctggagtacagtggcatgatctcggctcactgcaacctctgcctcccgggttcaagcaattctcctgcctcagccacccaagtagctgggactacaggtgcgtgccaccacgcccagctaaattttgtatttttagtggagacggggtttcaccatgttggccaggatggtctcaatctcctgaccctgcgatctgcccacctcagcctcccaaagtgctgggattacaggcgtaagccaccgggcctggcctgttttatgattcttaatagttacttggtttaaatcacatttgatactatccttctgaaaagtctgagacagatctacaaactacagtcaaaattatagattaagaggaatgaatgcacctatttggctttaagttgaagatgaattatttctcatgctcattttcttgcggcagttatcttagaaagacccccaaaggctttgtgattgtaagcactgtcatgatcacagaatgcaagcttctggtaccatgatcctcaacttagagaggaagaaaccaagacagagagcttaactcacttctctcagggaaaattaggagttgagcacaggacaggaaatgggctttgccacttttagctccaggcttttctaaccagacttgatttcctcatgttctagaaagatcactaatggtcaagtggaacaagcactacacgactaacccctattggggtttttaacttaagggaggctaatttttaatttaaactgctcgagatatgagttctgcaaaaggtggtccgcatccttggccctctggacattatcactaaattgcttgtgcctgttaacaagaatactgaccagaatgctcttcatgtagcttatacagttggttcacttcatgcggttcttgacatgtttatttctacccttaatgcaatgaaatgtttcattaataaaaaaccactttatat

SEQ ID NO: 12766 - DNA, 538 bp, Homo sapiens
ggtgggtctctctgtccaacatgcaggcagcactccctcatcctgctcagtgagagaattcagggggaatagaaaagctgctgagagttggtaaagaggatggtcgagtgagatggtgttgacctccctggatcttatgtcactacatcctggacctcaagagggtcatccaagctttttgaaagctgaactccttgactggagaaacctagacaagaggcggggccaggtgcttgatatctaggaggcattcttcctcttcccttgccaccatggagctgggcacagtaagccatattgtttcctgaagcaggagtcccaggccttggctagagagggaacagatgtctaacaaaaagagaagcaattcgaggaattgatgaagcacaattaaaatcctctctggctagtagctctctggcttctgttcatttgaagaataaatcttggctgacagtgggaagcaccaggtttgaaatcagatggctttatttttctttttttggcatttaaatcagtgaaataaaattattactgg

SEQ ID NO: 12767 - DNA, 200 bp, Homo sapiens
tttcaacaagtgctacctttgagtgtaaactaaggtagactactttgggaatgagaacatgcaaaatcaggaaaggctgtagaaggaaatataccttaacaggctgatttggagtgagccagaaaaaaaaaataaaactctcattatttgtgtggctaattataattcagcgttatttaagcacataaagaccaaaaaaa

SEQ ID NO: 12768 - DNA, 7043 bp, Homo sapiens
tggagtactgccccgccaagacggggatctgttgctatggacctgtacagttgtaaatcaaagtatgtaggagtgaagtatggccatccttaagctgcttcttcaggtttctttcattatgtgtttgctgtaagactttgtacatttttgtgcatattggtatcatttggcagtagggctggaaccaaagtattactctctttacaaaattttaatttaacatgtttttaaattggaccttctttatattgtattaacagccagcattcaaaattgataaattaccaatttgaggcccaataacagtgtatttgtttttccaaaacaaatactttcttttgaatggtttcagtgagccaaccattttataaaaggcaatttttaaaaactataaatacagtattttaaactgaatgatgatatgccttccagggaaaaccttgaatttttcctttataactgacttttggattccaaagtcatttgcacattaacagagtacttaaatttacttgttcagtccataaactatgatatagcctctatacatggtaagaaaatttgaaaaattaaagatggttgcacagtatacttttataatccagcatgtaacaccacatgacaatttgttggccaaatgctggtttggagtttttttgaggaatcactttggtttttttgtcctttatatataaccttattggaagtattaattctaagcctgtctctcaagtttatttatagagaaaaagtaagtaatctgtattgccacataccttgaaaatagaatgtggtatgtttaggatgcccacggaatgaatttttccttattccaattcaaccttctgtctggttgtgccaggaaaacagatgttatatgacctatgtcatttttgccattatagtcaaatgttaaaagaagaaaaaagtctgctgaataaaaaggccttgatcaaagtttcagatggggaaaatcatacagatattttatgtgtttccaacatagattatgtggctgttggtttcttgagatgacagtgcaaaggatttgggagagagaacaaatttggggcagtagttgaaaacgttgggtcattttcctgactctagctgccaaatggccatcatatgcttttaatctttgtttcagttgtctgtcagggttgaattaagaagctactggtttattcccaattgttgatgcctttaggtatgttggaatcttttttttgcctaggaggggccagttgaaaatctgtgactcaagaggcagtgaacagaatactgttttctggggaaaaattggttggctacttgatgttaattatggcacagtaacaggaaaaggttgtgtctgtgtttttaagtttttctttattctgcttttttgctgctataagagttttctgaaatttatattttaaacttttcatgcactttactgtttctagtctcaaaatgtgatatttttaataaacaagaaattttccattatgtgaatgaaattttaaaagacaatagcctatatttgtgtctcactaatatataaagtataggtcaaatttaaattatttaattagttttaaatatacacaatttgtctcctctttcaaacctgacatcttcggctgttttattagtcttaaatgatgcatttactttggtcattttatgctaatttcttccatagtaaattaatcaggctatataaggtaatatttccccagagggtaattttagtgggacgagggtggtgggatgatgtcatatcatacatgggattgcatcagaagggttctgtaaagcctgaactcccttttaaaagtgcctagtgatagaggcgttgtttgtcatctattataattggaatgtcattgtagttcagtgaattttgatgtaaataaaatatcttttaaaaatgttaaagtaccaggataaacaaacaaaaagaaacaacccttaagatgacagattttcctcaacatgcaggtttcccttcttatatacctcaagtatccaacatctagccatgcaaattgattacctgaagcatagtactggaaagtagaatagcatgaaaaacttaattttgtggacattacctttttttgtaatcagctactgtatgttttattttagatcttttgttttgggtgggttttctgctctggaggtatatgcactaacaaaacattttcctcctttcatatacgcatgttaattagcaatgtgagcaatatttcctaccatacttcactcccaatattttttgagatgtttgtataaaatggaatttaaagttcacttatgattgtatatgaaccacagaggagcccatttattaataaaaaacttttttaatagttaaatgtagagggaaaaaataaaaaaaaatgggaaacattgtaaacagcttaagtttattttgtgtatgatcgaggcactctgttgcaggaaggtgtgtaattgggttctctctgcttcaaatgcgctctttcaaaccattcattatcctgtgtatttttaatgtggttttagtaaatgttggtagtagctctgttgaagtaggtaattgtgttatgttttgggtggtacacacttggggcatggtaacccaaatttcatgtgcacggtttccctttagcccactgcccaaatttcacatacccttcaccctttgttccctttgtaaaaggagtggtatctgttttgagctgccaattcagatgatcagaaatgctgctttcctcagcattgtcttgttaaaccgcatgccatttggaactttggcagtgagaagccaaaaggaagaggtgaatgacatatatatatatatattcaatgaaagtaaaatatatatgctcatatactttctagttatcagaatgagttaagctttatgccattgggctgctgcatattttaatcagaagataaaagaaaatctgggcatttttagaatgtgatacatgtttttttaaaactgttaaatattatttcgatatttgtctaagaaccggaatgttcttaaaatttactaaaacagtattgtttgaggaagagaaaactgtactgtttgccattattacagtcatacaagtgcatgtcaagtcacccactctctcaggcatcagtatccacctcatagctttacacattttgatggggaatattgcagcatcctcaggcctgacatctgggaaaggctcagatccacctactgctccttgctcgttgattttgttttaaaatattgtgcctggtgtcaacttttaagcaacagcactgcctaaaagcaagcagagaacagaatcccagcaccattctataggcaactttttagaattcagatatagtaaatctgttccagatttatgatgttttatgtaaaaaaaattttgtataataacatagctgaatatttttgtttcatttctttgatgtaaggcgtgtgaacattcgtttgaatatcacatgttgaagtcaggtatggcacaatgggttctgagaccagcttttcctcccctcccatttgccttgttccaagctctttcttttcaaattacttttctgatattcataggcaggtatttaattttactaattagcatcctgtgtgaatgtattaaagaagccactgtgttttagtgtagttggcaaaaatataaaagctgtttcttatttgcccctatttttttggtgtcttaaagttatatattaaatcacagagaagcaagggagaaagttgaaagatatctaaggctcatatcacttgattctatggtagattatattagaattgaggatgtggcacattaaaactggaacatgggcaaatatagtgttccattttaaaattctaagtttatattgttaaatgggtgaaaatttaagtttatatttgcatttccaagcgtttctaaaaatcactaatgccatctatacttttagtatgaaacagcagactatagaaagcacagggaagaataggctaaatacattctttgaagaaccagaggcatataaccacatcattatgtcattcctaatacatggctagattttctaatgataaaattgactgtgtcccaatgcttatttgattctaagcttttttattctgtttctgagatattttaatagctttgcaaaatatgctgaccagtttttggaaaataatggtttttatagcaagcaaagactttatggcacattttcaaaatagcactcatacatacttacattttgacagaaatgtgaattctcacattgatgagatattctttttcccacctgccctaccctttaaaaaaggtcacttttctaatgtgtagtagattcatttacgcctttccctttgagtcataccatgtttggagaactgtgtgaattgtaggtagagaaattaactagggaagccagaagcttgaactaaagttttaaatttgtaggcagatgagaacttttatactatggttgctttgggcgattctaattttgtaatagcatcatgatcaccaaaattaattcaaacattttagtacatctttaatctgtcttatttaccaaagttctaatctgtttaagaacaggatgccaagagcatctttcattttatagaatgatatgctcacctttataagtgtcacctaaaagcttgagggtaaaaaagaagcagcccatatatctaaactacaggatgtcttgaacaagattcacagaaagaaagaaaaaaaagcagttctttccaggaaggtggtaaggaagagcatgcatatttcttgttttaaccaaataccttttttatgtaaatgtctctattaaaccccaggtcctacaccaggaaatagggtgataaccaggaaaataccaagctttaacccagttggcagttccttgtggcatacatttggttagacttgggtttttcctggaaccaaaggaaaataagcatgttgagttcttcgttcaacagacatgacattgaagtaatagaatattttttaagtaaaatagttttcactttcaaagcctatgacataaggacatttgtgcttattaattgttaatttttttttatggtacattgtataaactgagtagcattgaactgcattttagaagtatgtcatcagaaacaaatcacattatggaaaggatatacaaatgccaagtgatatgactcttttggcatggtggtagcatggtccattcagctttcagaatctttcggaggctctagtttggtgcctagtactagttatttttgttagaacaatctctcaaaatttagataattttccagttgtatgtctgtcacttttaactctaaagcgtaagaatcatggtaaccctctcagaagtggtcctttcttgctcatttcagtttcgtattaacttcaaatcactgatgtattgtctttcaagctatcaattgttatatgtaccaatttaatttagtttgtagttatctgaagtcacaaaattggttcagcattgatgtcaaacaatggctttgcttcttaccaaacagacttagtatcctgctgcttgtttcaatcttgatgcagtaagtgatgcagtatctgggtctgtatttacttagaaactgtactgtcctttctctgtgcttaacttgctaaaaatatattcccttacctgtgaaattcctgagcggtgctctgccaacttttcaaggggagggatttggatggctgtgttactgcacactggatctggaattgttcagggttatgagtgacaaatttcttaaacaccagcagcactgagatgtgcactatgggcattcgtacagttgttgtccaaatgcaaacaactttttcatcttggagaagctgagatacagagttcaatagaactacttggaatattttgagaaggttgaatgtttcatctttggctttgttgtctctggagtggggaagtatggagggctttttttttttttttttttttttttttttttttttttaaagagagtgtgtatgtactttttctctctataagggccagggtgttggtcaaattcaccatcgattaatttatatcttctgttgtgatttttttcaactatataacaagtgccaactaattgtccatgggacaatctacttttccactcaatttatcgttttgagtagggaaaggttcatttattttcattacctggcattaagttaaagaattcattattttgcatacatttgagtcattctgtgacctataaagtgtttttgtaactatctaattctaatggttgcaaagcaaagcacatgactgtaaaaccaagcaaggtgttttagtaactttttccctgaatacttggtagtttccattgatactattccaaaacaaattctgctgttttaggttgtatatttactttgcttttgttctaagaaaaagccaaggactaaatcaacttgtttttgtgtttcagtaatcagtttaaaatctaagatttttttttaaattagactatttaatgaagtgccatgtaattgtagcttgctagtgtttaatgtttaatagactggttctgtaggtgttttaaccatttaacactctctgccatccctggagaaagtggttctactcttactgaacacattctctctgacaaaatcaccagctgctttatttttctatttattacagttaaacagttgatgaggtctgaatcttgaccaaaactgctcagctgagatgtttttcacaatagacactgtacaaagtgtgcgtgcaaaaggacacggttggtagtattttttcattaatgtgaacattgactaaaaaaaagcagtcctgccttttaaatcttgtggcagctcagaagggaggtgcttaagaaccttaactactatgtcagataacaaaatatttttttccattttggagattggttactgctcacacatgatgtatagggctaaatatatgcttgtttccttgcacctgtgtacttcccctctctccctccctttccttcccctgtaggcaataaatggccattttgcaactgc

SEQ ID NO: 12769 - DNA, 185 bp, Homo sapiens
taataccagctatggagtcccaagatgtaaacattttacataatgaaagcatatagcagttctgcctcttaatataatgacactattatagactctgattttgtttataaaccacttgctacatgacccatgaaaaccctagacttgtgacctgaaataaagaaaatacgttagaagagcactgt

SEQ ID NO: 12770 - DNA, 1858 bp, Homo sapiens
aagggaagcaggaagaccaagaaggtacgaagatggcacattttcacatagctgattttcaaccaaatgaaaaaaatcaagtgcatttcagaagcttttggaagagcagcttaattcctctcagtcgggaaatgttttctctgccttctgctttgcttgcaccaaacatttctaaacacttgttctgccatctacatgggaggtgatgaaactcagtggtaactcatgatttatgacattgaaaataaagaggaacattgacctgcagactatggtttgtacaagaaagtttgtttgaatgtgtagaagaggaaaaagcaacaacagcaacaacacgaagatgataccaaaacaaggaccacaaaacaactagccatgatgggagacaggagttttttacatggaaacatggcacttgtgtttttatgtggcaagatctttatccataggcagagtatgaaatttcccaccaggctaagcaaataaagaagtccattgccttatagctatgtcagatcacagaatccttccaagtgctctatcacagtgtgccttatgggaagtttctgactggaaaatcttgtcattctaacactgaaaagtgcacacgcatgacaaaatgtagacaagatgcctcaaggtattggtagcaagcaagattttgccctttagttttcgaagacacctttctttcattatgcactcgggacaagaaaattaatagagcgttattccacagaaggcctctagccagagatcttgagtgtagtgcaagggactcattttttgcgaacttgtccctgtgactagtagattcccccttttcctgtgtttaggatttagtagtgcataaagcattaatatccataaacatacctagaagtttgttttgcttttaatttaaaggaagcagtaaccacaaagcttccgctcagggttttttctttcttcaagtctccaagggctcttcagcgtcacaagccagcaactctctttgcattaaaatttcaaagtttaattaatataattaaaagcaacagcaagcagcagcctgtgaagattttgctcatcttttttatgccttttgacattgaatgacctattactgtatgcgcattacttggattttgaggggcactctaccttggttatgattcagtagaggaaaaagaccacctttcttcaatttacaaattaaatcttctggagggtcgctatcacaaaacattgacgatgtatgtattataattttttagaaaaaccaccatcgtgtcacgtcgacgatgccaaattatgttagcgtgagcagaaacaccgtgggggaggaaggcagcagctgaagaaaaaagctcaaatgatctagtcactttcgatactgtacttcagatgcgaaatggatattcgagtggaaacctgacaaagtgcgcctgctttgatgtgaactggtatagacaatgaccagtggctgggtcagtgggatgtctctctgtgagcacaaaggcttatcaaatgacactaaaaataagttcaacaaccatcacattggaagggagaaggcgaacatttcatgtttggcgggcatgtgagtgcacaagatggaaagagcgattggagcatcctggtataattacccccattgtgctcttaatggaaatttcaaaggacgggagtattctgttggttggtgtccaggtttgtggcactgttccaagaggccttacacacacacacaaatatataattttctatacatatatatcctctagcttgaaacttttgctcaagtttatttatgtcactggctggctggatccaaagtcatgtgtccacacattcataaataaaaattttacctatg

SEQ ID NO: 12771 - DNA, 1025 bp, Homo sapiens
cagaagaaaagttgattactgcctgtactctacagaagaggacctcaaggatcaataatccaacacattattttcttttcagagtattataatatctttggaagaccattagggaaaagaaattcctgcacaatgggaagaggagaatggtgtggatatggttctgagttatagtgtcttatttagatgctgtgaattattgatgtattacattatttgcttttctcaactgctagaggctaccccattttcctttccacaatcagagccatttttgttaaagtggcagttttttctgcaatctattgttccattccaatcatatccttctcgtttgagtactactaacgtttaaaaagggtcttgcccttgaataactaagtcatacaaatagaaggaaaaacaatggtgaattttggagagctccccagctctcagcaacttcatataagcatggtggtatcttaaaatggtggtttgcagaaaccatggtagccaacagaacctcctgactttcacctgcttttaacctgaaaatatattaatacgcctctgacatgagtccagggagaggcaagattgagcaatagtcagtggcaccatttcctaaagtaactgaatcaatcaatccagtcaggtaattattttctattggggaacttagaaaaaaaagtaaagcaagaaatattttctctcctttatgatcagtgataccttagagacttttcgaaagtccttgttaaagatagttacaatgtgtggttaaatgatgctaaaatattttcacaaccagagtagaaaacgtgctggaacaaaattgcgaaggcttttgcctcccagtaaatagaaaggaaaatatattctagtaggtaagactgctgactctttgaaaatctgaggtattttgaaaaattctgtgatagttgctattaataaaccaaaattgtatagaatcatcgttaatttttaatataaatcccattgacaaatgttgatgcactgtagtcactgctgagttaatagcg

SEQ ID NO: 12772 - DNA, 703 bp, Homo sapiens
cacatgggagctgcctgcctgctgctgctgctgcttcctgcagatcatggaggggctggcctttgttttctggcatctcgtaccacgaacactcatgaagaccctgcagtcattggagcacccgggtcagcaaagcacacaagctcactcaagaccagatggagaacttatttcctgcagctgacagatagactcagattttgtgagactgaaatgttcactgaagacacttgagaaagaatcctctaaaaatcccggctctgcacattattcatctcctggaatttccatgtgaatcacagctctgcacctggatggagttttcttttgtgtgtgtgtgttttttttaatttggttgaacatttgctgctaatgggacttgcccagctgagtgctggctctgaggaagcccacgtttcttttgttaacttaaatgaagaaaggagtggagggaggggatctaaaacccccccgtttagatcccaaaccttagctcaatcagtattgccagagaggggtaagactggttggaagctgactgcagactttgtttccccttagtatgtgctgtgttgtaaatttttctcctccctcctcctacaaggttttgagttggctgctggttagcaaactcctttttacccatataagttatttaatataataatgaagctcaacactgtggtaggaaaatagccactag

SEQ ID NO: 12773 - DNA, 841 bp, Homo sapiens
gtggtgaagcagtattttccaatttgaagattcatttgaaggtggctcctgccacctgctaatagcagttcaaactaaattttttgtatcaagtccctgaatggaagtatgacgttgggtccctctgaagtttaattctgagttctcattaaaagaaatttgctttcattgttttatttcttaattgctatgcttcagaatcaatttgtgttttatgccctttcccccagtattgtagagcaagtcttgtgttaaaagcccagtgtgacagtgtcatgatgtagtagtgtcttactggttttttaataaatccttttgtataaaaatgtattggctcttttatcatcagaataggaaaaattgtcatggattcaagttattaaaagcataagtttggaagacaggcttgccgaaattgaggacatgattaaaattgcagtgaagtttgaaatgtttttagcaaaatctaatttttgccataatgtgtcctccctgtccaaattgggaatgacttaatgtcaatttgtttgttggttgttttaataatacttccttatgtagccattaagatttatatgaatattttcccaaatgcccagtttttgcttaatatgtattgtgctttttagaacaaatctggataaatgtgcaaaagtacccctttgcacagatagttaatgttttatgcttccattaaataaaaaggacttaaaatctgttaattataatagaaatgcggctagttcagagagatttttagagctgtggtggacttcatagatgaattcaagtgttgagggaggattaaagaaatatataccgtgtttatgtgtgtgtgctt

SEQ ID NO: 12774 - DNA, 1688 bp, Homo sapiens
gaggagatgttaaagtaacccatcttgcaggacgacattgaagattggtcttctgttgatctaagatgattattttgtaaaagactttctagtgtacaagacaccattgtgtccaactgtatatagctgccaattagttttctttgtttttactttgtcctttgctatctgtgttatgactcaatgtggatttgtttatacacattttatttgtatcatttcatgttaaacctcaaataaatgcttccttatgtgattgcttttctgcgtcaggtactacatagctctgtaaaaaatgtaatttaaaataagcaataattaaggcacagttgattttgtagagtattggtccatacagagaaactgtggtcctttataaatagccagccagcgtcaccctcttctccaatttgtaggtgtattttatgctcttaaggcttcatcttctccctgtaactgagatttctaccacacctttgaacaatgttctttcccttctggttatctgaagactgtcctgaaaggaagacataagtgttgtgattagtagaagctttctagtagaccatatttcttctggattgtaataaaattgttagtagctccttttactttgttcctgtctctggaaagccatttttgaattgctgattactttggctttaatcagtggtcacctagaaaaagctttgtaatcataacacaatgagtaattcttgataaaagttcagatacaaaaggagcactgtaaaactggtaggagctatggtttaagagcattggaagtagttacaactcaaggattttggtagaaaggtatgagtttggtcgaaaaattaaaatagtggcaaaataagatttagttgtgttttctcagagccgccacaagattgaacaaaatgttttctgtttgggcatcctgaggaagttgtattagctgttaatgctctgtgagtttagaaaaagtcttgatagtaaatctagtttttgacacagtgcatgaactaagtagttaaatatttacatattcagaaaggaatagtggaaaaggtatcttggttatgacaaagtcattacaaatgtgactaagtcattacaaatgtgactgagtcattacagtggaccctctgggtgcattgaaaagaatccgttttatatccaggtttcagaggacctggaataataaaaagctttggattttgcattcagtgtagttggattttgggaccttggcctcagtgttatttactgggattggcatacgtgttcacaggcagagtagttgatctcacacaacgggtgatctcacaaaactggtaagtttcttatgctcatgagccctccctttttttttttaatttggtgcctgcaactttcttaacaatgattctacttcctgggctatcacattataatgctcttggcctcttttttgctgctgttttgctattcttaaacttaggccaagtaccaatgttggctgttagaagggattctgttcattcaacatgcaactttagggaatggaagtaagttcatttttaagttgtgttgtcagtaggtgcggtgtctagggtagtgaatcctgtaagttcaaatttatgattaggtgacgagttgacattgagattgtccttttccctgatcaaaaaatgaataaagcctttttaaacaaaatccaaactttt

SEQ ID NO: 12775 - DNA, 1790 bp, Homo sapiens
acttggaacagccatcccacatgtctgccgttgcaacctcggttcatggctttggttacaatagctctcttgtacattggatcgtgggagggggcagagggtggggaaggaacgagtcaatgtggtttgggaatgtttttgtttatctcaaaataatgttgaaatacaattatcaatgaaaaaactttcgtttttttttttgtttgttttgtttttgagacagagtctcactctgtcacccaggctggagtgcagtggcgcagtctcggctcactgcagcctccacctacctggttcaagcaattctcctgcctcagcctcctgagtagctgagattacaggagcctgccaccacacccagctaatttttttgtatttttagtagagacagggtttcatcatgttggccagactggcctcgaattcctgacctcaggcaatccacccgcctcggcctcccaaagagctgggattacaggcgtgagccaccgcaccctgccgaaaaaaacttttttttttttgagacggaggctcgctctgtcccccaggctggagtgcagtggcgagatctcagctcactgcaagctccgcctcccgggttcacgccattctcctgcctcagcctcccgagtagctgggagccagcgcgcccagcctaaaaaacttttcaagtcaatattactacgatttaacattagagtgtggacatgtgatttaatcgctatagctaaaatacgtcaaatatacgttgtcatgtgcttgaacatgatgctaaccctgacaggatgaaggaaagtaatattctttcagtgtagttcaggagagcatttgttttcttttctaccaattaacccatcattgcttttaaacaaccatctgaaggagcagagaggcagggtagaagacagaagggggatctatgtggtaactaaagaatgtttctgttttgttaattattgtgtgtgtgtggttttattgtttgcttaagagaatcaaaaactgaaaaaaatgagaatacaggaaatggctcttgtttatttttttgctgtgtttacagcttgttaatgctctactgtctttgtttcaagagagatttgttcactgcccagctcgttttgtgtcctgagccctatggccagcccaccttataaatcatgcctgtttagatgtttgattttgttctgtttgctattgttatcttaaaggtgtataactctgacatgccagacatcaaattaagctcaaattaagctctcgtttaaatgtttaagcacctaatttatattctaattgatcccagccactgatgcatgtactttagctacttctgctaaataagcatattaattttccacatcagaccatcagatcttgagaaccaacagttatctagaattccgtgtctactaatgtttcacctgcatgcagccttcattaattttgtagcaaaatataaagtgatcattatgtagcttctggattaaaaaaatttgtgtgtgaagttgctttgtaaagtgcatgtggaattaatgggacagtgtgccctttgtgttagatgttagagcaaaagaaagggcttatagtgttagtattggagcactttgaagatagatattttcagaaaagatgtaggatttaaaagttaaattttaaattttagaaaaagatatgatggcaattggaaatagtcacaatgaagttcttcatccagtaggtgtttaacagtgttattttgccactggtaatgtgtaaactgtgagtgatttacaataaatgattatgaattcatt

SEQ ID NO: 12776 - DNA, 989 bp, Homo sapiens
aggtcagaagagagatatacaacagcgaggcttggtgataacgtatagaataacagacggggactccacacccaggccttttttaacggtgtgaagcatagacagagctgcagtctgtgctaacattaggttatttattgattcaatcagttgacacaaggaggcagctacggggaggtaaaatatggtcctaaaatcaaaaagatttcagttttgtcattctgtctctgagattctatttccacatctagagcagggtaataatgatacctaccttacaaaattattgggagaatacattagttaatatatgtgaaagtatggaggagatgtgcaataaatatttgtgttattaactacacatacagcactctataggagatattccatttataaaaactttaggttctaaaaacctgtacacgttgattatttttgtaagtcaaaagtgattaagaggagtttaagctatcatttccagatgtatttctataaataaaaacataagtatattcagttgatttggggtggagagttccatagatgtctgttaggtccgcttggtccagagctgagttcaagtcctgaatatccttgttaattttctgtcttgttgatctgtctaatattgacagtggggtattaaagtctcccactattattatatgggagtctaagtctccttgtaggtctctaagaacttgctttatgaatctgggtgctcctgtattaggtgcatacatatttaggatagttagctcttcttgctgcattgatcccattaccattatataatgcccttctttgtcttttttgatctttgttggtttaaagtctgttttattagagactaggattgcaacccctgctatttttttttttttttttgcttgataaatattcctgtatccctttattttgagcctatatgtgtctttgcacgtgaggtgggtctcctgaatacagcacaccgatgggttttgactcta

SEQ ID NO: 12777 - DNA, 412 bp, Homo sapiens
aaggacagcttctcttccactcaatattgccatttttccaaagaaacatgttaaaaaaaaaaattataagacatggactagtcctcattagcatgtttgcatagcaaccagtcaagagcatttacactatttctgctgatatactcaccttagaactgctcagaaccctggtgctttatttttgttttaatcttttgttgccagtgatgattttcctattctgcaaatagtgtatttcctggattacacatagtatggtttcctgaagtattctgataaatgtgttttttaaaacctcaatatactttttagaaaaggagcatctggttatgcataaagcagagctaaaactaaatttctttcatgtcctccctacttcctcagtgtcaatcagattaaagtgtgtaatcct

SEQ ID NO: 12778 - DNA, 3127 bp, Homo sapiens
ctcttgcacaaaagactgataaatggaactgtacagaaaatttaaggtgcagggacacttgattttctggaagaaaaacaattactgtattttaattcagtccttgttttaaaagacctgaaattataatactgaaggagaagaaattttaaatgaggaaattagtacattttaaatcttagttaaatctgcttatgccccttctaaattgaatttttctttattatatagattttttaatttgcttgggtttcttaagaattagatgttctctttctgatacctttgacaaaaaatgtttataaattcatataatttataatgtatggtgttgtatgactttgttaatagaaaagccaaagcagcagtggttagcacccattctttgggacttgatctagaatatctgcagacagaatgttacataaacaaattcttatgaaacacattcaaatgacattttgtatttagaaaaggactatcttttaaagaaaaagcagccttttagggccgattctggaataatatcctgttgtcactttgggaatgtcagaaggggaaacaatccccaggcacactaaaaattttttaaagttatttaaaaaaacatataaaatattaaaggacagtaaatctcagaggatgggcaatgtgtttctataataaggaaaggctaacagatgctctgggctgtctccattttctttcaaagaggtggtatgtatttgaagtaataaattgtcaaagtgattactgggtactattaaaatgataggtggatataaatggaagtaaacattatgtagtgataatatagaacctcacatagtaatcaagtataaaatttggcatgggtggagaaacaaagaatagggaagctgcaaaagatgaatttagagaagttttcatctatacaatcaattatttttacagacttttttttttttttttttgagacggagtctcgctgtgtagcccaggctggagtgcaatggtgagatctcagctcactgcaacgcctctgcctcccaggttcaagcgattctcctgcctcagcctcccgtgtagctgggactacaggtgcatgccaccatgcccggctcattttttgtatttttagtagagacggggtttcaccgtgttagccaggatggtctcgatctcctgacctcgtgattcgcccgcctcggcctcccaaagtgctgggattacaggcataagccgccgtgccaggccctttttatagacttttgaactaagaggtttcaaaccaaatcgcaactcttacttgatttacagaaatgggcctcctaacaaaattttcaaaattgtggtgggatttctttttataagggaagtttaatatggcattattttcagccagtgatttggaaggtctgttttcctataattactaaaataacctaaatcattttcagtattcaaaaactctatgaatttaagagcctgttgtgacaggactcttgattttatgacaagaaaaaaccatgttggaattcaggcattttgttaggtaccttaatcatcagtaattagtatatgattatttcatttcctacaaggactctatagttgtatgtattaagtgtgtatatatgttcatatgaacatgcaagatataggcaatagaaattaagtaatccaaaagaggattccgttattcactaaagtatcttccttttaaatttggatttataaaatcatagtgcagtaactttaaatgtagatagttcaaacattcttagcacctcaatctagtatgtttaattaaaatttgtataaatgtaaattagtgtaagagggtaaaataataatcaagttatttttcaaaagattgcaataagtttttggtctaaacttaaactttgttcattttgtacatactctgtgttaattctaattgcacctttgtgatgtgtatttatatacagtgtgcagaaaatgttcgtgaaattttgattacaattgtagattatgtatgatggcattgcttacgaatgttttgcttgtaaaaaaatttcaaggtgcaatcaaatgctactagtttttctgattttcaaaaatctatctatctaaaatattaagccttttccttcctgtgtagtacttactaaataactttttgtattcaggcatttgcatcaaattgctgaacaagatgaatagccacattaattcaatgattttaaaagactatttggggagggttgggtatataattttttagctctatttacatcccaaagtagaaagattaaatttatatttactagagctattcaaagaatacacttttctatattgtaaaaacaggacagcaaagtaaatcatacagaaaataaacatttatactattctgtaaaaaaggttttgcattttttctttagtataataacaccactttattaaccatttaatatgcaaaaaaccttttaaattatctgaagtaaatttgacattacttctgaaaacacacaactaaaaaattctatcattttgctcagttattactaacataaattgctttgaaatgagaatatgtcttctctttttttccccactgtttcttttaagagcagaaactcagccgggcatggtggctcacgcctgtaattccagcactttgggaggtcaaggcgggtgaatcacttgagtccaggagttctagaccagcccaggctacatggtgaaaccctgtctctactaaaaatataaaaaaattcactgcgtgtggtggcgcacacctgcagtcctcgctactttgaaggcctgagcctgcagaggttgaggctgtagtgagtcaaaattacaccactgcactccagcctggcaatcagagtgagaccttgtctcaaaaacaaaaatacctagaaaatcaatctactctgtcttttaatgtgaaatgttcttatgatagctatctttcttagtttcctttttttctgaagcactaaacacaacctgtaggtcttatctctggggtctgggaaacagaaccttaatgttacaggtacaaaagcaaacagagtgattagttccccattttctggtagtgaacaactgacattttttcaatcttatgtaaaatgtgaataaaaataatttt

SEQ ID NO: 12779 - DNA, 282 bp, Homo sapiens
gtgaaaagctcttaccgaagcaacaaaattcagcagacacctcttcagcttgagttcttcaccatcttttgcaactgaaatatgatggatatgcttaagtacaactgatggcatgaaaaaaatcaaatttttgatttattataaatgaatgttgtccctgaacttagctaaatggtgcaacttagtttctccttgctttcatattatcgaattcgaatttcctggcttataaactttttaaattacatttgaaatataaaccaaatgaaatattttactgat

SEQ ID NO: 12780 - DNA, 373 bp, Homo sapiens
tgaatgaaatttatctaggaatttttaaaacattttttacaaaatataattagatttgaatacaaaatctgatacaatatgttaaagaattaagaacctgaagatgaagatttagagcatatttacctggattttacttatttgctagcaaaattcccccttgtcacagaaaccagggactcttcaggatttgagatggccttgagtattttagttgatacattcttctgcccattataattctcacctgaagttatggggattgcacgggttttggcactttagaaaaagcctgatgtgggtcttacataaatgaatgtctgtataagaaaatggactcttttttttagggaaaaataaaagcaactatggg

SEQ ID NO: 12781 - DNA, 23 bp, Homo sapiens
aaataaaatatactagtcctgac

SEQ ID NO: 12782 - DNA, 105 bp, Homo sapiens
agctatctgatgagaattttcatatatgaattatttattgtacatgtgtgttattaaagataacttatactttataaatgaaaaaatacatttcagttatacatt

SEQ ID NO: 12783 - DNA, 1527 bp, Homo sapiens
tccttttaaccttacaaggagatttttttatttggctgatgggtaaagccaaacatttctattgtttttactatgttgagctacttgcagtaagttcatttgtttttactatgttcacctgtttgcagtaatacacagataactcttagtgcatttacttcacaaagtactttttcaaacatcagatgcttttatttccaaacctttttttcacctttcactaagttgttgaggggaaggcttacacagacacattctttagaattggaaaagtgagaccaggcacagtggctcacacctgtaatcccagcacttagggaagacaagtcaggaggattgattgaagttaggagttagagaccagcctgggcaacgtattgagaccatgtctattaaaaaataaaatggaaaagcaagaatagccttattttcaaaatatggaaagaaatttatatgaaaatttatctgagtcattaaaattctccttaagtgatacttttttagaagtacattatggctagagttgccagataaaatgctggatatcatgcaataaatttgcaaaacatcatctaaaatttaaatttgtcctacatttgtacttgctaaatctggcagccttaattattacacaactataacacaacacaaacagtaatctctcccctagtttagagtcctttgcatgaaatttagcaaatctatcattttgaatacagtacaagcctggtaatccagtgtatttgggataggccagtggaactcagaactgatacatatatacatgtatgtctatcatattcaatgtctattaggtgtaaatcatctcttcatgtaaaagacactactggtttgagggtagactcgtctaggaatattttgtccttctgtgacagcaccactatccatcccaatgtaacatttctacaaagggaagatatcttaaccaggcatacttatatttgctagttggaaaatcattctgaacagttttaattccattctattgaatggattattgtatgagctatttggggatcagatataaatgacaatcacacagaaccacttttattcaacatagataaaatgtgatgagtgttaacattttaaataagcaatctgcttaatggacattggtatgaaggggaagtgtcattctttacctcactcctcaaacacttttctatccaaaggttggtttgagtcagtattggcatcatacaaccacttactgtaaaataagtttattagtggtaacgtgatagaatttattcccgatatctgatgttacaaactttagggtccttgagatatgcaggatccttgtatgtaactggcataaaccctgtaaagagataattaaagttcttgacaaaacataatgagcaaaatttcagctagctcaattcagttgttgaggtattctttcttacccattatttgagctctcttaattgcttttgtgatttctttctgtttcttcccacaaagacctgtaaaataaaaagctttcttattcataaa

SEQ ID NO: 12784 - DNA, 3326 bp, Homo sapiens
agattcaacaagctgagtggagaccatggtctgtagaccccttcccgattctcctgtcccagcttggaaggcattgaaaacagtctccgtttacacatctcttcataccacgtgtttgaagtgttaaaattcaaagggatcattgaataaaacgggtgtagagtacaggaatggggcagacgcgattcaggtgaacagcacaagaagaatatgaggtggttcctaggagcaacactttcgacctccagttctccctgatgacagtagctgtctccaagagaaaaatcctcacttattaactctcttttcttgcatctcatttttatagagctactcatccttatttggaaaaaccaacaacaaaaaaggcttttagaaaatggttgtaaatctgacttctttgcaagtaactatgtatattgtaaatagatataaaaggccttttttctaaataaggacttaactgcctgtaacatgaaacttcaaactaaaccactaactcaatgaactacttatggtttgtctgacatccctcacttaccaattaattataaatatgtttttttaaatccccaaagacattatctgtggtctttttttcctttcaagctcagcctgtgtgcctgatgtcatttctttcaagttgcccacagtatctccacttaaactaggctagtaaccaaaataatgtggaccttctttaggaaacagtgtgggagaataggagtccagccgtaagataaactggaaatatttgggcgtcttgtacctggctacgcaccacctcagtgttgttcctacataaacagggccccttttaaacttgtatgtggactgctgtttggtcaaagaataccttcttagcattgcagaaaggtggtcagatgaccagtgtagtgcaggaaacagccctgtctcaactaatggaaatatatttgcatgtaacccaaaattagcttatcttgcatagaacataataagtatgtgtctttggtgacactaatgttctactatagcttattttcaaacaaggggtaaaaaaaggaaagaaagaagtgtacagaattaacatataaactttgttgtaaaactgaatcatgtcagaactgcttaaaattaacctttaccatttaatgtcatctacctgaaaacagtgagatttatactgtatcaatgtctatttttttgtttttgctatgaatataattacagtattttaatatttagttatttaatttgttctactagttggatacagaacacacaaatccagggggattaaagctggaaggggctaagagattagtttacagagaaaaggcttggtggtgggatttttttaaatgtgtgttatgtacatatatatatatatataatatatattaaaaatgaaacaattaatctagattttaacattttcagaaacttagtgataacattatgaacaattctaaaagccctgtgatttgaaaaatatagaatcattaatggcccaagataggccttcacaccttcacaggtgcgaaaggaaaggccttcacaccctcacagaggcatcatgcaaaggacagcggctttggcttttccaattttccatctttaggccctggtgagaggcacacttatgcactaaaatgcacatatatgcacatgcattcaaaaataggcatttggtacaatggtgatcttgtacctgatgggctgaaaccagcttaagaacaaatttgttcttcctgatatgataactaggtctccaagagaaaatagaaaggctgctttagtgccttacgcttactaaatttaaatctttatttacctgggtttgagcctacagtctatttatgattacatatcaaaattgattaaaacacttccatttctaaaagttcaaatatacttgttaataaaaggattatcggcattaatactttaatttaaagaaaagttgtgttctgttttcctttctgtgtcttactccccccacactctccctcccccatcaccatcttcaattctaataaataatgctgatgttcaacagttgcagaaattgtgctattatgtaactgtgggccttgcccctgtctggccctctagatgatttgtagcagtgttattctacactttttaaaagaagcgtcctccttttgtccatgaatcatgtttaccccatacccagtggcagaggtgttctttaaagacttgaatatatgaatgtgtgtgtgtagttacttaaaggttattcctctttgtaataggaaactatatgggatgaacacttttaaactttccgacacaacttccattactaactttctaacagaacttccataactagaaggtggaaaccaaaaccctcatggtagtatttcctctggcagctggtgctgtgggcaactgttttgttcaatcgggtttcttttctttttgcctctaatgcagaaatcaacagaatcactcacacatacaagtacactcacatacataaactaattatttctctggatatctttctgtgttccatgtaaatttatttaccaacatctattgtcaacatgtacatctaccttagtatggtctgcattctttttctgagagtacctcatagggctcctgcctgatctttgtagtttgttcattcatccatccacctgttcatttgttcatccatgtattctaacatttctatgtagtgtgcaactctaatgtcatgcttttgaagaagagaatagctgcccatagcagccatccgtctggataatagcaaaacactctagataagttattttgcactttcttatgtataaagttggtagaaacttatttttgctttgtatcatttaaatacattttgttttggtaaatgaactgtgtataaaatatttatgccgttaaaactgtttttagaaagtatttttaatttcagcaagtttggttacttgttgcatgactcttaacacagctgactttttgtgtcagtgcaatgtatattttttgtcctgttattaacttgtaagccctagtaatggccaattatttgtacagcaacagaagtaaattgaagatactggctaagactggattgattgtggacttttatactatattgcagaaaccaatatctgtttcttggtggttatgtaaaagacctgaagaattactatctagtgtgcagtctgtgatatctgaatgttcattgtatatttgtctctgatgcaaaaaggtagagtaacacaattacaatacatgattaaatgcaatagtccaggtacttaagtaatttttttttcatttcaaataaatacctatttaccaccaaaagaaag

SEQ ID NO: 12785 - DNA, 978 bp, Homo sapiens
gcatgacttcaacattaagacttgaattatgagttaatccaaaagaatatgaaaacagatgactcttctcctatttgtttgaagtgtatcactttatttttgaatattactcttgctctggtattgtttttttttttttttagcatggaagcctgtgtactatttgtaaattcaggttcaattagttctcattgcagttattggaacagtttctatgaagtttcctttaatgatagtgtttactgttgttttttttctttttagcctcaaaaggtgcatctggacttattgatatgtgttatcaatagaacatcattatgattattcttatttccagacacgtactccatcattctccacatatcatactcctcaaaaaatgatatagttcccaaagagaggtgtcagtgtcttgaaccgtcaagttcaagaggccatcagactcaatatttactcattccttcatgaaataagtacttaacaaaaagctgctgcatgccaagtcactgtgctaggcattgaggattcagctctacacagggctgtcttggtccttgctatcttttagctaaaatgtagacacataaataaacaattacatatagtgtgacacattctacagtgggggaatccagggttctcaggcagattgtaggagagccacttcatctagatcacttattttcagtgcttcaactgtgttttcaatgaagatgtcactttgaaaataatacttctaatttatgccccaagtgttattgcttttaacttaccatagttttactacataaaataaatgaactgccctcatcaatagaccatgtaactacattggatagagcttgtaataggttttgtgtccttttctgtggaatatctgctttgaagtatcaactgagatatttcctgcttcttaacaagatttcttagtcctcagtatttacatttaaaaatccaaacagctttgacaacaattgt

SEQ ID NO: 12786 - DNA, 879 bp, Homo sapiens
acagcagtgagagtctccctccatcctcgtctgtcaatgacatctcctccatgtccaccgaccagaccctggcatctgacactgacagcagcctggaagcctcggcaggacccctgggttgttgcaggtgactagccgcctgcctgcgaaacccagcgttcttcaggagatgatgtgatggaacacacacacacgcagacacacacacacacacaaatgcagacacacaacatcaagaaaacagcaagggagagaatccaagcctaaaattaaataaatctttcagcctgcttcttccccagggttctgtattgcagctaagctcaaatgtatatttaacttctagttgctcttgctttggtcttcttccaatgatgcttactacagaaagcaaatcagacacaattagagaagccttttccataaagtgtaattttaatggctgcaaaaccggcaacctgtaactgcccttttaaatggcatgacaaggtgtgcagtggccccatccagcatgtgtgtgtctctatcttgcatctacctgctccttggcctagtcagatggatgtagatacagatccgcatgtgtctgtattcatacagcactacttacttagagatgctactgtcagtgtcctcagggctctaccaagacataatgcactggggtaccacatggtccatttcatgtgatctattactctgacataaacccatctgtaatatattgccagtatataagctgtttagtttgttaattgattaaactgtatgtcttataagaaaacatgtaaagggggaatatatggggggagtgagctctctcagacccttgaagatgtagcttccaaatttgaatggattaaatggcacctgtatacc

SEQ ID NO: 12787 - DNA, 239 bp, Homo sapiens
cctgaagcgcggattgtagatgaagaaactcagcagcgccggcgggaactgcttctcctgggccgcccaggacccgctcccggccccggccgtcgctgcgctgcagccatcctggcccggcccccacctcaggaagcctcccacggcccgcccagagaccgagaaaatctcttaatttcagtggaactcagtttgtttctctttttaaacattgccagttataaatgtattttatttta

SEQ ID NO: 12788 - DNA, 2457 bp, Homo sapiens
tttgagttctggccaccaacaatttagtcatatctgataggtacaaaagaaaaccaagattttgatatgaccacctttcaacactttttactgcaactagagtcttatttaaatgttaactgttgtattgtgactaagtacaacttttggaatgatacctgaagaattattagtaatagagttaaatttgatacttcctgcttttgcaaataatggagtagggaagaagatagtcgaacttaaaatcatacctaccctgaaaaatgcttaaagtagtgccaaaaatcttgaaatctctctctctctctctatttggatgaatcaaaatgtaatttgttgagttttgccttttcttttgcctaaagatgttaacgtcaggcagtgggtttttcctagaggagagattagtacctattcattaacacaaggatacataagagacttgccccttttgaagatcatttctacttggtgctgatgaatttatgcctagctttttttttctaggtggtgatttttcaatttcttttatatttacggaagtagaaaaaatgttctgtctttttgaatgccacttagctgcattttcagaagcttataggctataagaagcctttaatttcagtttgaattgctaggacaccaaaagacctagctgggctaactccatccaaatgattttacagttttattttttcatcttttgcaaaaagtatttgttacataatcaaaaggtgaaccagaggaaatattgaacaaggttttagatctgatgttattctggtgcccaattgagagaccttgagaaagaatgatgcagattacatgactctaatgtgggcagtctgaaaatatctttaactgtcttctttgatcatttgattttggatccaagatttatcatctctctattttgctatttgccaccatcctggtttttctgactgtacagaatcaatctgcatttatttattatcagaaatgaatgcatttttacaaaaacctttttgtagactgtagtttattgattagttcaagcccatcacgaactaattaaacatattgttggtaaaaacagagattgaaattactgtttttatcatatttaaatccctctggtgtatttattgaaatttaattaaaaatatttctacatattgatttgaagccaggatattgatggacctacagatttaacagctcttcaaagttttaactagcattataaaatggcctattcattatatgtatatttttttataaatatttatcaagaacatgaaaatattttattttgtatttgcagtgcagtttggcacctctcttccaggccttcctaagtttttgttagttgtgtcttcgaatttattgtagttcaccgctggtcagtaatctggttcataaggaagctggggcagtgaaaaacacttcgttgatccatccagccctaaagttcattgactaatagctcatgcatcttattaaatgggattctggacttctacaatagtgtggaaagccacatcacaaaaaaagccacatcacaaaaaaaagccagtgcctattgagtatatcaaaccaaaaaagaaaaaaaaaagttttaagaggggtcaggctggcagataaaagtctcttatgaagcagatataaatccagtaagctatttttttctacctatgggcaagttcataagtcattgctggatctgaaccagtgttcttttgtgtaagtacaaccatatttcagtcagtccagaggcagttaaccctgtagcacttactagactggtgacaactggctggatgtggagaataagtgtcaaaacctggcttcaatgtctatttcttatgtctaatggagttcttatattacagtgtttgtttagctatggttactaatatgtttgttatatttattttcggggagaggatcttgttattgtttcctgagattatttaaaatgttttttctttgatgtatttctgtctttcttatatgtaaggagttataagggttattatattttcatttctggtttttactatacaatggttatctaacatactaagttggtaccctacctacccgtaaaatatgaaatactcagaagtaaagtgtgtgggcaatcagaagcatagccttgaaggacctgacagcagtatgaaaagataaataggccaggcatggtggctcacgcctgtgatcccagcactttgggaggccgaggtgggtggaccacctgagatcaggtgttcaagaccagcctgaccaacatggtgaaaccctgtctctactaaaagtacaaaaattagccaggcgtggtggcgcatacctgtaattccagctactcaggaggctgaggcaggagaattgcttgaacccaggaggtggaggttgcaatgagccgaggttgagccatcgcactccagcggtgaaacaagagtgaaactccatctc

SEQ ID NO: 12789 - DNA, 1429 bp, Homo sapiens
ataaataagctccagccagagatgtatgcatgataatgatatgaatagtttcgaatcaatgctgcaaagctttatttcacattttttcagtcctgataatattaaaaacattggtttggcactagcagcagtcaaacgaacaagattaattacctgtcttcctgtttctcaagaatatttacgtagtttttcataggtctgtttttcctttcatgcctcttaaaaacttctgtgcttacataaacatacttaaaaggttttctttaagatattttatttttccatttaaaggtggacaaaagctacctccctaaaagtaaatacaaagagaacttatttacacagggaaggtttaagactgttcaagtagcattccaatctgtagccatgccacagaatatcaacaagaacacagaatgagtgcacagctaagagatcaagtttcagcaggcagctttatctcaacctggacatattttaagattcagcatttgaaagatttccctagcctcttcctttttcattagcccaaaacggtgcaactctattctggactttattacttgattctgtcttctgtataactctgaagtccaccaaaagtggaccctctatatttcctccctttttatagtcttataagatacattatgaaaggtgaccgactctattttaaatctcagaattttaagttctagccccatgataacctttttctttgtaatttatgctttcatatatccttggtcccagagatgtttagacaattttaggctcaaaaattaaagctaacacaggaaaaggaactgtactggctattacataagaaacaatggacccaagagaagaaaaggaagaaagaaaggttttttggtttttgttttgttttgttttgttttttgtttttttgagatggagtctcactctttcgcccaggctggagtgcagtggtatgatctcagctcactgcaagctccacctcccgggttcacgccattctcctgcctcagcctcctgagtagctgggactacaggcgcccgccaccacacccggctaattttttgtattttttgtagagacggggtttcaccatgttagccaagatggtctcgatctcctgacctcgtgatccacctgcctcggcctcccaaagtgctgggattacgggtgtgagccaccgtgcccagcctttttttttttaatagaaaaaataatccgactcccactacatcaagactaatcttgttttgtgtgtttttcacatgtattatagaatgcttttgcatggactatcctcttgtttttattaaaaacaaatgatttttttaaaagtcacaaaaacaattcactaaaaataaatatgtcattgtgctttaaaaaaataacctcttgtagttataaaataaaacgtttgacttctaaactctg

SEQ ID NO: 12790 - DNA, 737 bp, Homo sapiens
gcacctagttttctgaaaactgatttaccaggtttaggttgatgtcatctaatagtgccagaattttaatgtttgaacttctgttttttctaattatccccatttcttcaatatcatttttgaggctttggcagtcttcatttactaccacttgttctttagccaaaagctgattacatatgatataaacagagaaatacctttagaggtgactttaaggaaaatgaagaaaaagaaccaaaatgactttattaaaataatttccaagattatttgtggctcacctgaaggctttgcaaaatttgtaccataaccgtttatttaacatatatttttatttttgattgcacttaaattttgtataatttgtgtttctttttctgttctacataaaatcagaaacttcaagctctctaaataaaatgaaggactatatctagtggtatttcacaatgaatatcatgaactctcaatgggtaggtttcatcctacccattgccactctgtttcctgagagatacctcacattccaatgccaaacatttctgcacagggaagctagaggtggatacacgtgttgcaagtataaaagcatcactgggatttaaggagaattgagagaatgtacccacaaatggcagcaataataaatggatcacacttaaacttttggtgtttccatctttttgtcttaaacagaacatgacaaccttcaaattaaaggaaaataaattgtg

SEQ ID NO: 12791 - DNA, 439 bp, Homo sapiens
acgaagattttaaagaactcaactttccagcatcctcctctgttctaaccacttcagaaatatatgcagctgtgatacttgtagatttatatttagcaaaatgttagcatgtatgacaagacaatgagagtaattgcttgacaacaacctatgcaccaggtatttaacattaactttggaaacaaaaatgtacaattaagtaaagtcaacatatgcaaaatactgtacattgtgaacagaagtttaattcatagtaatttcactctctgcattgacttatgagataattaatgattaaactattaatgataaaaataatgcatttgtattgttcataatatcatgtgcacttcaagaaaatggaatgctactcttttgtggtttacgtgtattattttcaatatcttaataccctaataaagagtccataaaaatccaa

SEQ ID NO: 12792 - DNA, 1969 bp, Homo sapiens
atttccccttaattcagtatgatttatcctcacataaaaaagaagcactttgattgaagtattcaatcaagtttttttgttgttttctgttcccttgccatcacactgttgcacagcagcaattgttttaaagagatacatttttagaaatcacaacaaactgaattaaacatgaaagaacccaagacatcatgtatcgcatattagttaatctcctcagacagtaaccatggggaagaaatctggtctaatttattaatctaaaaaaggagaattgaattctggaaactcctgacaagttattactgtctctggcatttgtttcctcatctttaaaatgaataggtaggttagtagcccttcagtcttaatactttatgatgctatggtttgccattatttaataaatgacaaatgtattaatgctatactggaaatgtaaaattgaaaatatgttggaaaaaagattctgtcttatagggtaaaaaaagccaccgtgatagaaaaaaaatctttttgataagcacattaaagttaatagaacttactgatattcctgtctagtggtataatatctcaggaatcttggctgagggtttggaactgtgggtagagtagagggccaggagtccagtaatagaattcttgcaccatttctggaacattctagctctgggaggtcacgtaaccttcttggggtagttcagtggtttagtggtttataatccaggtgtgcgtcagaatcatctgaggaactttgctaaaatacaaaaatctggcctaagtagctccagatctaccttcataaaggaatctgaccactcctggatttggtaatttccaagttctgaaaattttacttaggatttaataactattaacatctgtccctacataggttttctttcctacttatataccttatgttctcttcattctaaccttcatcagtaatagggaaatgttttaattttatttttttagttgaagggtaatgtaccaaaaaatatagttcagtgaattaaaatgaacacacatgtgcaaccatcaattcaggtcaagaaatagaagattgtagcacacaaaagcctactcagccattctcccagtcactacttccttccttacccctgggttatttttgaaatgacacttgatgtatttccctctgttgctgttatgagaacattgctacagccaagtgttgtgtttctgtgtgcataggttgatacttaattatctccccactttttaataaacttttaatttggaaataattttagattgacagaaaagttgcaaagatagtgaggaaagttcctgtctactctttgctcagcttcccttaatgttaacattttatatagcaagatgcatttgtcaaagctaacaagttaacattggtacaatcactgttaattaaactgcacacaatattcagatttcaccacttttccactaatattctttcattgttctaggattcaattcaggagaccacatttcatctagccctcttttttaaaagtaaatacttttcagcacttacaggagttaactgagctggggcatcatggtgtatagacgccctgacactggtcatcttggaattcatttagtttgtcagtgggtgccctgacattctgtcacaacatcaatttgggaacatggcattatatttttatctttgaacttttttctttttggatgacatttgattaatgcgtcatcttggaacacattatcttttttcttggttatgtgatcaggaagattaatcagtttttcctgttcttggtataattcctgcttttcacatacctgtcccttacagttctctatatatacccttcccttattacacagagagaaatatctatctatactttttacacaaaatatacttcaaaagaaacaaaacagccacaattattaactttttaaataaatgagaatttaattatatcct

SEQ ID NO: 12793 - DNA, 702 bp, Homo sapiens
ttaccagctgggacttagagtttctgtgcaacagtttttcactgagcatgtcaagaaactgataagatcaaaaaggtctcctaactcactagatcagcgcacaagtcagtgtaaaccacttagatagtagttttttcataaatgctcatcatatttatgttccgctgtacatgttcagtataaatatatgtgtagtgaagctactgtgagtctttaaatggaaagagcaaatgagaagtggtttggatacacttgatgagagatgagagtgtcacattaataatttttaagactcttaggcagctatgggtttcttttgatcatttttgttctttattcatttgaacacgtttttgaagttcttcaaaactagtcagtttgaattttgacagctattcaatatgtgatctccaagtttaaaaaaatttttttccagacttccctaatcctaaaatgcgagtttttatttttaataactgtaccaaggaataagtatgaaaacagttctctgttaccatattttgtattctggaccacttactggtgaaagcaaccatgcaaaagaaattaatttggccaggcacagtggctcatgcctgtaatcccagcactttgagaggccaaggtgggtagatcatctgaggtcaggaattcaagaccagcctggccaacatggtgaaaccctgtctctagtaaaaatcc

SEQ ID NO: 12794 - DNA, 904 bp, Homo sapiens
ttcataatttaaaaaaattaaaaaaacgcaacagccaacttttcttaataccatataccttttaaaacacagtggcaggtaataagtggaagagaagaatgtttctgtctcttcctacgttgactgttcttattccactggtttctttagcaggactgttctactcagcctctgtggaagaaaacttcccacagggctgcactagcacagccagcctttgcttttacagcctgctcttgcctattaccataccagtgtatgtattcttccacctttggacttggatgggtattaaactcttcaggcataattgatgcaactagagtcaatatgctgtatatattaatgatagctcttgggcatcgatctctgaaagctcaaatggatggaatttagtttgcgggaaagaggctttgctttgcgcatatcaggcttaggactgtgggaggcttaagttgcagatgcttcttttattgtactcttgttctgcccttgttttttgaaggctctgacttataactgctgtatcagaagaaacattttgacagtgtcttggttggagatgaacatccctaattgacatgtgatgactatttcttattccattcatctaagagtcattgaaattttgttttgcttgtttgtttagcttcaaggtctttggtaaagtcacatgttaaggatgactgaaataattccaaaggagtgatgttggaatagtccctctaagggagagaaatgcatttgaacgaatgtgatataaaaccacataatcaaatagaaacttcatgtacttacaaaaactgagtttgtaaaattaccttcatttctttgacattaaatgcttatattagcaataaacatgttgacactttcctataaaaaataaaccagtttgcagtag

SEQ ID NO: 12795 - DNA, 1290 bp, Homo sapiens
ggggggcagagatggatgaagagaaagcccacgaagaaaaaagcctggttttgtttttcccagaatatcgatggacttaaaaaggctcaggtttttgaccaaaatacaatgtgaatttattctgacattcctaaaatagattaaattaaagcaattagatcctggccagctcgattcaaatttgactttcattttgaacataataaatatatcaaaaggtgttaaagaaaactgaattaaacccaaaattatgttttcatggtctcttctctgaggattgaggtttacaaagggtgttagcagatgcgaagtaaagaacgtcactttgaaacccattcatcacacagcatacgctacacatggaacacccaagccatgactgaacacgttctcagtgcttaattcttaaatttctttactcatgacatttcgcagtgcagagaaggcagaacccaagaaaaacgtcatctttgagactttgcttttgtaacgcagacatcagctttacacttcacaggagattgatggcattgaggaagattgcaatggagatcatgacactactgttaataaggccaggaaaactgccatttcaagttctgaaaaatgttttgagtatttgaatttagagaaacaacatggttccaagaaggagggtgtaaaacctgtaaaatactgtcaacatatgtattcattagttacaatctcatgtttgtgttttcttagtactgtctatttacaaacacgtaaaaaataccccaaatatgtttaagtattaaatcactttacctagcgttttagaaatattaatttacttgaagagatgtagaatgtagcaaattatgtaaagcatgtgtatccagcgttatgtactttgcgccttgtgacgtctttctgtcatgtagcttttagggtgtagctgtgaaaatcatcagaactcttcactgaagctaatgtttggaaaaaatatatacttgaagaaccaatccaagtgtgtgcccctacccccagctcagaagtagaaagggtttaagtttgcttgtattagctgtgccttcattattttgctatgtaaatgtgacatattaattataaaatggtgcataatcaaattttactgcttgaggacagatgcatacagtaaggatttttaggaagaatatatttaatgtaaagactcttagcttctgtgtgggttttgaattatgtgtgagccagtgatctataaagaaacataagcttaaagttgtttatcactgtggtgttaataaaacagtattttcaaaaaat

SEQ ID NO: 12796 - DNA, 2578 bp, Homo sapiens
ggggcatggccaagcacagggggctggcagctgcggtgagagtttactgtccccagagaaagtgcagctctggaaggcagccttggggctggccctgcaaagcatgcagcccttctgcctctagaccatttggcatcggctcctgtttccattgcctgccttagaaactggctggaagaagacaatgtgacctgacttaggcattttgtaattggaaagtcaagactgcagtatgtgcacatgcgcacgcgcatgcacgcacacacacacacagtagtggagctttcctaacactagcagagattaatcactacattagacaacactcatctacagagaatatacactgttcttccctggataactgagaaacaagagaccattctctgtctaactgtgataaaaacaagctcaggactttattctatagagcaaacttgctgtggagggccatgctctccttggacccagttaactgcaaacgtgcattggagccctatttgctgccgctgccattctagtgacctttccacagagctgcgccttcctcacgtgtgtgaaaggttttccccttcagccctcaggtagatggaagctgcatctgcccacgatggcagtgcagtcatcatcttcaggatgtttcttcaggacttcctcagctgacaaggaattttggtccctgcctaggaccgggtcatctgcagaggacagagagatggtaagcagctgtatgaatgctgattttaaaaccaggtcatgggagaagagcctggagattctttcctgaacactgactgcacttaccagtctgattttatcgtcaaacaccaagccaggctagcatgctcatggcaatctgtttggggctgttttgttgtggcactagccaaacataaaggggcttaagtcagcctgcatacagaggatcggggagagaaggggcctgtgttctcagcctcctgagtacttaccagagtttaatttttttaaaaaaaatctgcactaaaatccccaaactgacaggtaaatgtagccctcagagctcagcccaaggcagaatctaaatcacactattttcgagatcatgtataaaaagaaaaaaaagaagtcatgctgtgtggccaattataatttttttcaaagactttgtcacaaaactgtctatattagacattttggagggaccaggaaatgtaagacaccaaatcctccatctcttcagtgtgcctgatgtcacctcatgatttgctgttacttttttaactcctgcgccaaggacagtgggttctgtgtccacctttgtgctttgcgaggccgagcccaggcatctgctcgcctgccacggctgaccagagaaggtgcttcaggagctctgccttagacgacgtgttacagtatgaacacacagcagaggcaccctcgtatgttttgaaagttgccttctgaaagggcacagttttaaggaaaagaaaaagaatgtaaaactatactgacccgttttcagttttaaagggtcgtgagaaactggctggtccaatgggatttacagcaacattttccattgctgaagtgaggtagcagctctcttctgtcagctgaatgttaaggatggggaaaaagaatgcctttaagtttgctcttaatcgtatggaagcttgagctatgtgttggaagtgccctggttttaatccatacacaaagacggtacataatcctacaggtttaaatgtacataaaaatatagtttggaattctttgctctactgtttacattgcagattgctataatttcaaggagtgagattataaataaaatgatgcactttaggatgtttcctatttttgaaatctgaacatgaatcattcacatgaccaaaaattgtgtttttttaaaaatacatgtctagtctgtcctttaatagctctcttaaataagctatgatattaatcagatcattaccagttagcttttaaagcacatttgtttaagactatgtttttggaaaaatacgctacagaatttttttttaagctacaaataaatgagatgctactaattgttttggaatctgttgtttctgccaaaggtaaattaactaaagatttattcaggaatccccatttgaatttgtatgattcaataaaagaaaacaccaagtaagttatataaaataaattgtgtatgagatgttgtgttttcctttgtaatttccactaactaactaactaacttatattcttcatggaatggagcccagaagaaatgagaggaagcccttttcacactagatcttatttgaagaaatgtttgttagtcagtcagtcagtggtttctggctctgccgagggagatgtgttccccagcaaccatttctgcagcccagaatctcaaggcactagaggcggtgtcttaattaattggcttcacaaagacaaaatgctctggactgggatttttcctttgctgtgttgggaatatgtgtttattaattagcacatgccaacaaaataaatgtcaagagttatttcataagtgtaagtaaacttaagaattaaagagtgcagacttataattttc

SEQ ID NO: 12797 - DNA, 3502 bp, Homo sapiens
aagggagtatttatgggagtttgtgtataaatttacggtattcacatgcgtccctctatgtcaaagcttgcttagttttttgctgcaagactaggaagaaaaagcaagtattcactataggaaattgctattaaaaattgttagatcctttgacctggagctctataaacaaaaatgtcatttcaatttgaaagaaggaacaagaaaagagaaacaagcttcactgaaggtttgcaaccttaacaaattgaaaataatactcactgggtttttaaaaatatgatgttgttcatagaaatagcattattgtatcattatacatgtattattttgtataactgcctcaatttatcacacagtagtagttccattaaaatccctgcttcatattgaaagtagcaaaaacactattggcgaaaacattgttataatttctagtcttattgcagtaagaatgctgtaaccacacaaattataaataggtgataagaaccataatgaaaaaaatgagaacatatttgattcattcctaggccagataacattaaataaaaacagttaaatgtgtaaaatatgaaatatgaattaatgtttataaacatctgcagacaactctttttataaaccttcttattgctgttaataaatataagaaagttatattaggaacattagctaagcttttgactatgaaaactgcctacattaaacatggatttatatagacccattttcctgcactgaaggcaaggcgcatctctgtgattctgaccagacatattcatattttcttaccctagaggaagtacatgggactgaattcttgaaaagagccatcaaattagggataatactaaattgatactgtgcaggtgttctccagtgatattctactgagaatgctaaggttctggtcaggaactataaatagcagattaccaaacactgctttttctgtgatgataaaagcctcataagtaacaaaaacaatgtttaatttagactcctgtaaacaggatgcaattagtgattttttttaattgggttcagtaacttccagtaacaaatgtagtcaacaccaaattagaatgtgagcttccttacaatttttgtacatagactactatcatctaattgcttaaatatatatgctggagtaaaaaggtaacttctgcaaacttattgattttaagagaaatacccataatatccttcaaacccaatgaaagaagaggcctttacgaaaacatggcttgtgatttgggtggattatacttcctgggaccttggccctcccgtgtctccagaagagacgtgtgtcccgagacacatgagtatcctccaaggcactggcctggatgagcagcatcgccttgagaattggggtagtgtggaaaggaagaatgaacaacggccctgggaagccttcccttcctgcagatattgttgggggagtgctggtctccattttgcgtttagaaaaccagacttagatgctggaggggcaccggttgtcttctttgaactcattccccgtaatgagctagaaaagagtacctaaccataggtattctctctagagactcatgtgtcccgtgggtacagtcaattcacagtatctgttctggcttttttcactttaattctgttctgcacattctgaacatatgcaggaaaaaaaatcattcctgaacttagcacaagctacactcgacacaacctaaattagtaaaaagcctttgatttattttgaagcaatttaactgtagacaaagcttgcatatatggaacagtattctcagagcctgagagttgttacagttgttctatttggaaattagaaggaattttttaataaggcacatttttcagtttcttacccattggtgtctattaagaatactatgtaatgttgaaatttccatcaaattaccaagcaaattactattaatgattagagatttagcctaacactctctctttgggccttaaatacccatttgtagttgtgttcgtgtcacttctgtctcagatgcctctgccaggacataatctctctaactcttgctagctggcttctccctcccacatgggcatacatgctgtgtatacacagagtacagcctgtgtacacagtagcagctgtcaacagggcctactccagatgggtggccccaggtaatcctctgctgtaaagtggctagaacaggctgtccctgcattaaaataggtgagaataaggaatttcgcctctgataataatatttattttcatgactttagagtaaccacatgatttgtaaacagttaaatgaagcagaggcctgagagagttgttggcatttgtctcacattaaatacattaaaattgctagatttgctattgtggttatgtctatcaaaactttaagaaaatttgtttaatgtactgagtttaactgattttctttggtgctgggaccaaattcttcacttctacaacactcaagagattgtcacaaaatattacaaaaatattgtttgttttgtggctcattaaaccctatataactaacagcttttaaggacattaacagaaatatatcttcagatggataaataagatagggacctattcaagacagcagcatttttgtattgtgatacctcccctaagttactctcacaataaaaccttatttgagaattttccttcacttcaatctgtgacatagcattaggcatttagtataccttatttgtgaaacctaaggttcattcaacagatgaagctgcaaaacagttttcttggtagactcttggaacttgctcagttttttccttactttacctgcatgacacacattgggttgaaagttgtttggttttacccttcatttctcttagatatgatttggttctttttcatgcattatatttttgaaatatatggaggaaatattttattgaatcaagaaatagaaaatattccttaaaccagtagtaaaaaggtgagttagaactccatgtctggaagacaattcaacatttaaaatattaagatgctataccacttaacaagtgaatactaaaatttttaatttaaagattgattgttctgtttttatgaccatgagaaaaatgtgacagcttcagctgtcatatgtttatcttgaatgcttttctaattatgtatttctggattattgactttgaatgccacagaccaactactttacatagagtaaaatattgattaacctttgtgctttgggtcactggcaaaagttgaacatcctgataagtcaatgttaaccagaaacctttttgttcacgtctgaaattgaatatttataaaatgtgttagtatgtttcctgccttgataagttcacctatattgaatgtaatttgatctttgataattttttttaatcttgagaattctctgatactgttttgaataccagtgttcaccatgttataaagttaaacataaaaattgaaataaattgaactaaatat

SEQ ID NO: 12798 - DNA, 1074 bp, Homo sapiens
gaaatatctttgctcccagtttcttgagatctgctgacagatgttccatcctgtacaagtgctcagttccaatgtgcccagtcatgacatttctcaaagtttttacagtgtatctcgaagtcttccatcagcagtgattgaagtatctgtacctgcccccactcagcatttcggtgcttccctttcactgaagtgaatacatggtagcagggtctttgtgtgctgtggattttgtggcttcaatctacgatgttaaaacaaattaaaaacacctaagtgactaccacttatttctaaatcctcactatttttttgttgctgttgttcagaagttgttagtgatttgctatcatatattataagatttttaggtgtcttttaatgatactgtctaagaataatgacgtattgtgaaatttgttaatatatataatacttaaaaatatgtgagcatgaaactatgcacctataaatactaaatatgaaattttaccattttgcgatgtgttttattcacttgtgtttgtatataaatggtgagaattaaaataaaacgttatctcattgcaaaaatattttatttttatcccatctcactttaataataaaaatcatgcttataagcaacatgaattaagaactgacacaaaggacaaaaatataaagttattaatagccatttgaagaaggaggaattttagaagaggtagagaaaatggaacattaaccctacactcggaattccctgaagcaacactgccagaagtgtgttttggtatgcactggttccttaagtggctgtgattaattattgaaagtggggtgttgaagaccccaactactattgtagagtggtctatttctcccttcaatcctgtcaatgtttgctttacgtattttggggaactgttgtttgatgtgtatgtgtttataattgttatacatttttaattgagccttttattaacatatattgttatttttgtctcgaaataattttttagttaaaatctattttgtctgatattggtgtgaatgctgtacctttctgacaataaataatattcgaccatg

SEQ ID NO: 12799 - DNA, 412 bp, Homo sapiens
tgaggcgtgcgccgccaatatgcactgtacattccacaagcattgccttcttattttacttcttttagctgtttaactttgtaagatgcaaagaggttggatcaagtttaaatgactgtgctgcccctttcacatcaaagaactactgacaacgaaggccgcgcctgcctttcccatctgtctgtctggctggcagggaaggaaagaacttgcatgttggtgaaggaagaagtggggtggaagaagtggggtgggacaacagtgaaatctagagtaaaaccaagctggcccaaggtgtcctgcaggctgtaatgcagtttaatcagagtgccattttttttttgttcaaatgattttaattattggaatgcacaatttttttaatatgcaaataaaaagtttaaaaacttaa

SEQ ID NO: 12800 - DNA, 924 bp, Homo sapiens
ctgatccatgttgccttcaagtttgtttttctcgggggcatctctctcatcagataagacagctacatcagcctgccagataatccacatgctccctccccagctccactaagattttcactttagccatattctgatttttaaaaaggaaaataaaaacaaatctttcttcagtatctttttctttcagaatagcttctcatcatttacaattacagaaaaatagtatgtaatacaggcagaccttgctttgcacaggttctaacatgcacgaattgcagtcataatggtttagcaacaccattcttcccctcccccaaaatgttttggacttcagctaccacaattacctgtaattgcataaaacacaaactttgctagtagctctccagttcacatatcgctgtgtaaataacctatgtacatcatgaccaatgaccagtcacttctatcaaagactgccagaggtcactgcacatctgttattcctgcatagatagcaaagtgtgtagttgtattgctattgcctgcttgtggcccagtgataaatccctttgacattttacaaaaatgaatcaaaagagggaactccccaacaaagatgaaagtgcagcaaaggaacaaaaactgataatcctggaatgaaattcaaactgaatataaagagttatcgagaaaagagctgactgtgggaatctgacacggctcaaaaggctctagatatgcagccagagaaacttgtaaagatgaatttactgacatgaataaagttgttgtgatgagaaaaatgtagataccccagagatcaagagaaggagaagacaagccacagacttggagaaaatacttgtaaaacatgtatctgacaaaagactattattcaaaattatatagaactcataaaactcggctgactctcttttc

SEQ ID NO: 12801 - DNA, 696 bp, Homo sapiens
ccaccatgctggaaggggaaatgaaggacaaaaatgcacagggagtctgtggccgtccaggtgaatcacagctgaggaggaaatccagatgagaccaatgcacttcacaggcaagactgcagcaggagccagaaggaaaacagatacaactgcccatgtacatgcccactttactcggacatcatcacgggagttaagaaaaattgtgtaaatttgtaccttgaatttagctatcaacctaattttcctcttagttgggctgtatgctgtgtggtacaggatcttacagtttcctaggaaacgctttttattgctatccagatatatggataaactttcttaacaaacccaatttctacaaatgttgtttacatcaaattggacagggatgcagacactgtccatggctcgttctatttttgttcaaatcatttgaagttgaagctgtggacggtttgttgtgtctatttcagattagtaatttacagagaaatcacagacttttgctacaaatcgtgtgcatcaagtgtctcagataatcctcccatcagtgttctgtttctagaacttgtagaaccagtgttactgtttgtatcagggaagtggagaatctaagtgtaaaaaagaaataactaagactcctattccttggagggacccttctggtgccctttgggaataaagctgtagcactgc

SEQ ID NO: 12802 - DNA, 175 bp, Homo sapiens
cataaatttatggcaaaaacttaaaaaacaacttcatggaagtcagtttatttctttgtcattttaacaaaatttattccaaatataggagtaataaaagcataattttcacttgttcaggcattcgctcaggctttagtgactatatgacacaaccacggagaaataaaccttg

SEQ ID NO: 12803 - DNA, 262 bp, Homo sapiens
accccctgcaaccgctgctgcaagacactggacagacccagctttcgggaccctcccgcgtgccgaactgatcttcgagctgcatggacctaatcacagatgcagcctgcagtctcgcctaatggagctgccattaggggagtgtaaaactgggaaatgctgctcactgacagaattaaaaaaaaaaataaccagtatgaaagtcgttgcgccgtgaatctctactgtagccatgaatttatggacagttagatgcttacca

SEQ ID NO: 12804 - DNA, 966 bp, Homo sapiens
gaagacaccttctgagtattctcataggagactgcgtcaagcaatcgagatttgggagctgaaccaaagcctcttcaaaaagcagagtggactgcatttaaatttgatttccatcttaatgttactcagatataagagaagtctcattcgcctttgtcttgtacttctgtgttcatttttttttttttttttggctagagtttccactatcccaatcaaagaattacagtacacatccccagaatccataaatgtgttcctggcccactctgtaatagttcagtagaattaccattaattacatacagattttacctatccacaatagtcagaaaacaacttggcatttctatactttacaggaaaaaaaattctgttgttccattttatgcagaagcatattttgctggtttgaaagattatgatgcatacagttttctagcaattttctttgtttctttttacagcattgtctttgctgtactcttgctgatggctgctagattttaatttatttgtttccctacttgataatattagtgattctgatttcagtttttcatttgttttgcttttgtttttttcctcatgtaacattggtgaaggatccaggaatatgacacaaaggtggaataaacattaattttgtgcattctttggtaattttttttgttttttgtaactacaaagctttgctacaaatttatgcatttcattcaaatcagtgatctatgtttgtgtgatttcctaaacataattgtggattataaaaaatgtaacatcataattacattcctaactagaattagtatgtctgtttttgtatctttatgctgtattttaacactttgtattacttaggttattttgctttggttaaaaatggctcaagtagaaaagcagtcccattcatattaagacagtgtacaaaactgtaaataaaatgtgtacagtgaattgtctttt

SEQ ID NO: 12805 - DNA, 1438 bp, Homo sapiens
ttcaaaagagaaaaataatgtccatcctgtcgtgatgtgataggagcagcttaacaggcagggagaagcgcctccaacctcacagcctcgtagagcttcacagctactccagaaaatagggttatgtgtgtcattcatgaatctctataatcaaggacaaggataattcagtcatgaacctgttttctggatgctcctccacataaataattgctagtttattaaggaatattttaacataataaaagtaatttctacatttgtgtggaaattgtcttgttttatgctgtcatcattgtcacggtttgtctgcccattatcttcattctgcaagggaaagggaaaggaagcagggcagtggtgggtgtctgaaacctcagaaacataacgttgaacttttaagggtctcagtccccgttgattaaagaacagatcctagccatcagtgacaaagttaatcaggacccaagtctgcttctgtgatattatcttgaagggaggtactgtgccttgttcatacctgtaccccaaattcctaggatggcatctgcccttcagggggcactaaaatgtattattgaaacagcattctgggcttaaataggtgtatgtatgtgttggttgtgactgtactatttctagtatagtgaactacatactgaatatccaagttctcagcacctacttttgtcaaatcttaacattttgccacttcgagatcacattgccattcctcccctccagaggtaacaattatccacaatttgatgtttatcattcctgtgttgttgtactttcactgtgtataacctaaaccatctactctttagtactgttttatatatttttaagcctcatacttgctcattctacagcttttttcactcattattgtataattatatctgaagctctcgttcattaattttagtcctgtgtagcagaattcaattacgggaactaccataatttatctgttctccagttgaaggcatgaagttgttgccagtttctgtattataacactgtagtggaacattcttctgcattgggctcactgcgtgttacctaagacgtatcacagaataaacacatttagccttatagacattgccaaattgctcttcaaagtaaatgtgagtttttgtgaattacatgagtatggaatggtgttttattatgactttagtttgcattttcctcaattctcgttaaatccttcattctaatggacattttattgtgaagaacctgttcatatcctgtgctcaactttgtattgaattatttttctctgaataatttttaggagttcttttattctagacatcaatcatttgtcagttttatatgttgcaaatatcttctagtctatcttgtgacttttctttttactttatggtattttgttgaataaagttttaatgtagtcacataa

SEQ ID NO: 12806 - DNA, 758 bp, Homo sapiens
agatgccaggagcaattcagaatactatctgattgaatgtgaacctgcctggttaatttattacctgatttgatgaaccaaggaaagccatgagtttaaacaaatatttacatttaatatgggaacataaaagagctttaaatattatagactttgtacctgttatatatatgaatattccctatgttaaataataataataactagtgtttatgaatagaatcatatcatctttagaaattgtttaaaattagttctgggaagttgaaagtggggaatgaagagataataaataaaactagattggccatatgtttataatttttttagattgggtaatgaatacatggagtttcattatacttttctctccacttttgtctatgttgaaaattttctgggagctaaatgatgagaacacatggacacatgatggggaacaacacacactggggcctgttgagggcagggagtcggcagagagagagcatcaggaagaatagctaatggatgctgggcttcatacctgggtgatgagatgatctgtgcagcaaagcaccatggtacatgtttacctatgtaacaaacctgcacatcctgcacatgtaccctggaacttaataaaagttggaaatttttaaaaagaatgaataagacctggtatttgatagcacaacagggagactatagtcaacagcaatttaattgtatattttaatatgactaaaagagtataatggattgtttgtaacacaaat

SEQ ID NO: 12807 - DNA, 199 bp, Homo sapiens
actgcccacataaattttatgtctgtgtgtttgagaccaagagaaagggtgtattggcttgggagtagaagaagggtcgtccctgctgcagaagctgtatactgataattgaagaggctttcaggaatttgtaaagcatctccttcccctctgcattttgttttatttctagctaataaaatacataatcctgaaagta

SEQ ID NO: 12808 - DNA, 257 bp, Homo sapiens
gacaatacagatgttttcccttgtggcagtcttcagcctcctctaccctacatgatctggagcaacagctgggaaatatcattaattctgctcatcacagattttatcaataaattacatttgggggctttccaaagaaatggaaattgatgtaaaattatttttcaagcaaatgtttaaaatccaaatgagaactaaataaagtgttgaacatcagctggggaattgaagccaataaaccttccttcttaaccatt

SEQ ID NO: 12809 - DNA, 1468 bp, Homo sapiens
ggcaatagagatgccttcccctgtagcagtcttcagcctcctctaccctacaagatctggagcaacagctaggaaatatcattaattcagctcttcagagatgttatcaataaattacacatgggggctttccaaagaaatggaaattgatgggaaattatttttcaggaaaatttaaaattcaagtgagaagtaaataaagtgttgaacatcagctggggaattgaagccaacaaaccttccttcttaaccattctactgtgtcacctttgccattgaggaaaaatattcctgtgacttcttgcatttttggtatcttcataatctttagtcatcgaatcccagtggaggggacccttttacttgccctgaacatacacatgctgggccattgtgattgaagtcttctaactctgtctcagttttcactgtcgacattttcctttttctaataaaaatgtaccaaatccctggggtaaaagctagggtaaggtaaaggatagactcacatttacaagtagtgaaggtccaagagttctaaatacaggaaatttcttaggaactcaaataaaatgccccacattttactacagtaaatggcagtgtttttatgacttttatactatttctttatggtcgatatacaattgattttttaaaataatagcagatttcttgcttcatatgacaaagcctcaattactaattgtaaaaactgaactattcccagaatcatgttcaaaaaatctgtaatttttgctgatgaaagtgcttcattgactaaacagtattagtttgtggctataaatgattatttagatgatgactgaaaatgtgtataaagtaattaaaagtaatatggtggctttaagtgtagagatgggatggcaaatgctgtgaatgcagaatgtaaaattggtaactaagaaatggcacaaacaccttaagcaatatattttcctagtagatatatatatacacatacatatatacacatatacaaatgtatatttttgcaaaattgttttcaatctagaacttttctattaactaccatgtcttaaaatcaagtctataatcctagcattagtttaatattttgaatatgtaaagacctgtgttaatgctttgttaatgcttttcccactctcatttgttaatgctttcccactctcaggggaaggatttgcattttgagctttatctctaaatgtgacatgcaaagattattcctggtaaaggaggtagctgtctccaaaaatgctattgttgcaatatctacattctatttcatattatgaaagaccttagacataaagtaaaatagtttatcatttactgtgtgatcttcagtaagtctctcaggctctctgagcttgttcatcctttgttttgaaaaaattactcaaccaatccattacagcttaaccaagattaaatgggatgatgttaatgaaagagcttcgcc

SEQ ID NO: 12810 - DNA, 258 bp, Homo sapiens
aacaatacagatgccttcccttgtagcagttttcagcctcctctaccctacatgatctggagcaacagctaggaaatatcattaattctgctcttcagagatgttaaaaataaattacacgtgggagctttccaaagaaatggaaattgatgggaaattatttgtcaagcaaatgtttaaaatccaaatgagaactaaataaagtgttgaacatcaactggggaattgaagccaataaaccttccttcttaaccattc

SEQ ID NO: 12811 - DNA, 887 bp, Homo sapiens
gatccaaagtggcaggaggtctgtgttgtcatggtgaactggagtttctcttgtgagagttccctcatctgaaatcatgtatctgtctcacaaatacaagcataagtagaagatttgttgaagacatagaacccttataaagaattattaacctttataaacatttaaagtcttgtgagcacctgggaattagtataataacaatgttaatatttttgatttacattttgtaaggctataattgtatcttttaagaaaacatacacttggatttctatgttgaaatggagatttttaagagttttaaccagctgctgcagatatataactcaaaacagatatagcgtataaagatatagtaaatgcatctcctagagtaatattcacttaacacattgaaactattattttttagatttgaatataaatgtattttttaaacacttgttatgagttaagttggattacattttgaaatcagttcattccatgatgcatattactggattagattaagaaagacagaaaagattaagggacgggcacatttttcaacgattaagaatcatcattacataacttggtgaaactgaaaaagtatatcatatgggtacacaaggctatttgccagcatatattaatattttagaaaatattccttttgtaatactgaatataaacatagagctagaatcatattatcatacttatcataatgttcaatttgatacagtagaattgcaagtccctaagtccctattcactgtgcttagtagtgactccatttaataaaaagtgtttttagtttttaacaactacactgatgtatctatatatatctataacatgttaaaaattcttaagaaaattaaaaattatataaaatg

SEQ ID NO: 12812 - DNA, 2361 bp, Homo sapiens
tgttacctggtttccttttagtttaaggaaaaattaggagaaagtgaggtgctatatagaatattgaaattggaagaacattttattttctcttatttctgttgtgatttttaaaaacttttttttggacctaaataataataaaaaaaaaagccctttaaactttgtaaggaaatattttttgattttgcgtaagaagatttaaatgtgtatgtgattttttttgtttttgtttttaaagcctcagtagtttctagataattttactgtattagtatattttcattttctttcattttatattctttagaatgtgccttctgacctttcagttttttaattttatagtcacatcaacatctttatgatctattgcctatatatctgtgagggcacatattcataaatatactgtcaatctatcagcatttgtgtatggtaggttaccctctatttgcagcttttatgtttaaattagttacttgaaagaatgtagtaattttaggaagaagtatcagtttgatagacttaataattcatttcttttggactatggagcgcatatctgttccttctttatgatgcctttttatggttctgaagtaattactgaagagttgagaatctctttaatgcattttcttaattcttacaatggtgataagttacttcaattataaaattgaattttgcagactaaattattttataaggctgttgctattgaaagatcaattttgtctttacctgcatttaaaatggaacagctcttagcagctgtggtttttttttccatattttttttaaatttgttggctcttaagatgaataaagtttataggtgcatctgcctcctcttctctaagaatatgcatactaatgtttgtttctataaatcaaatacacatgtgataatatgcatgtaaatacataactatcctcatcatgtatggctctcagttcttaattgatgataacatgattgaattgccatatatctgtattacttgtgtgaatggttgtgttgaacacgctaagaacaatttgaattttattaagtacaaaaatccttaacgtttgtatgggaacattggcaagaaagaatagtgtgaaagggaactgttttagtttcctatcagtaattgtacatgcagttaaatgtttaaggtaaaatgattggtctctgtcacagctaaaagatttcagtagccttcattgagtttgggtaaaataagttgctgttcttttgtcttctttttaatatataaaagttatatttaaaaagtatataacatactatatatgttacatactaacatatatatacacaacagaaagtttattggatttagtactgatatttactgtctatttttgttactttgttcttagtaatctattatagttacctattttaaggtaaggtctgtaggcaagatatgtaagtaaagacaagccctacaattttaaaataacaaagcttatgtcttaagttgtattttttcaaaggttcatgtttttctgagtaaatgtggtttattagcatgaaatattatgccttttacttaaattattttatgtaaaatagggcactgtttaattatgaaagggggaaaatcattccaaataagagtttaatttttattaattataaaaaactctgtattagtttcctagatgtgctagaacaaattaccacaaactgggtggctttaaacaacagaaatttattctcttaacagttccagagactaaatgtccagactcacaatgtcccagtgccatgcttcctccttaggccctaggaaagaatacttcctagcctcttcctggcttttggtggttgccagcaatccctgctgttccttagcctatagtggcttgactccaatctcagttttgttgtcaagtggtcttctaccctgtcttctatgtttgtatccgtgtccaaactctttttctagggagaccagcactggattagagttcaccatgatccaatatgacctcatcttgactacatccgcaaagaccctgtctccaaataaggtcacatttacagggtaccatgtgttaggatttgacatatcttttgggggacacaattctacccactacaggcccatatcttatctaggatgttggtggcaagaaggtgaagattactacctcttttgatataactagtttctgaggtatttaaaaatttggttttaaaaatattaagctttttgctcatttgcatgtatacttttctctcaacattgttttggtttatttaggttatttgttaaaacttcagtaaatactaaagttacttgtattagaacataataaaagtagagaattaaactacctaaa

SEQ ID NO: 12813 - DNA, 780 bp, Homo sapiens
tctgacagtggtttcagtgtgtaccttatcttcattataacaacacaatatcaatccagcaatctttagactacaataatacttttatccatgtgctcaagaaagggcccctttttccaacttatactaaagagctagcatatagatgtaatttatagatagatcagttgctatattttctggtgtagggtctttcttatttagtgagatctagggataccacagaaatggttcagtctatcacagctcccatggagttagtctggtcaccagatatggatgagagattctattcagtggatcagaatcaaactggtacattgatccacttgagccgttaagtgctgccaattgtacaatatgcccaggcttgcagaataaagccaactttttattgtgaataataataaggacatatttttcttcagattatgttttatttctttgcattgagtgaggaacataaaatggcttggtaaaagtaataaaatcagtacaatcactaactttcctttgtacatattattttgcagtatagatgaatattactaatcagtttgattattctcagagggtgctgctctttaatgaaaatgaaaattatagctaatgttttttcctcaaactctgctttctgtaaccaatcagtgttttaatgtttgtgtgttcttcataaaatttaaatacaattcgttattctgtttccaatgttagtatgtatgtaaacatgatagtacagccatttttttcatatgtgagtaaaaataaaatagtattttt

SEQ ID NO: 12814 - DNA, 1623 bp, Homo sapiens
actggaatttttatttataccttttagcgtactctttattttttctgtaagtaagtttggtttcatcatgagggatgaaggaaaagatttgatactgaaaactaaactgaatagttggttcctgaaatcttggactgtttatgacctactggctcctttaaatagtaactgaaaactaaaatggaatattttagttaacgcttctacaagtattttcattttaaaagcttacatgattcctaactaaagtgtcatgagaaaggattatcacacctgtagcaatttccagttttagtgattctccattttttcccttgtcatgtaaatatttatggaatgatcattttgtgtacatacaggttactgcttttttatttaaattcttttagtgtttagctccatgagacacttcagtttaaattgatggaataaatgttatatgacacatttacattttccttatcaaggtgtcaaatatgtggactttaaacaatgaaactttttcaaaaagaaaaaacaaaaactttaactttgtgtaaaatcttatagtattatcagcttagagggaattgatatttttaatattgccgttatattccaaaatatatattgagataaatgaactggtgtagaatatcagtttgctatttagttttatgaattactatacatatacatgcatagaaatgaaatgctatactgataaattttaaagaaaatatgaggaaatggctataaatattaaactaaaagggtcttcaacagtaaagtgcagttatgtcatttaaaattccaatactttaaaggccaccaaattttgatgtatatgtccttgaagggctgctaaaatttatgaagaggactcacattttcccccatagaaatttgcagtttcttggtgatcatttaagcaggatccaaagaagttcctttacaaataagtaataagaaaaatgagtactaaaatacagctttgtgccttttaaccctatgccaactcctaaacatataagtagattacagtatacttatctgatcagagcatgatctgtttggccacatgcaagtgtgagcagaaatagagcagcacgtagaatagtaacttaaagcaagtcatcctttaaaaattctgagctaaaatctatttaccattgagtaattgaattaatcccataggaataagctccttgtaagtaaatccatgatatgaattagaaaaaaaaaacagctggaaattgaagtttttgatgcctgtatactggatatgaaactatttgatttctagtcttctgtgtttagcagttgtaatattttaatgattttgcttcatactcggttaatggaacataaacatatctttgatacttctttgtgagtgagagaatgctagatagggtggctttgttctttgtttaagttttttttcctgaatgtagttaatttatggcatctgttgaataaaactgctaaaatgacctcttaaaaatgttctgttgtatccccttttccaggtgaatcaatagaaatgcctgattgaattagtaggttaaactaaacaacatactgtcataggaaaactggagagcttaaccaacttgctcttagaaatgttaccttaaaaaa

SEQ ID NO: 12815 - DNA, 375 bp, Homo sapiens
aggatgcctggattccttgttatctcaggactctaaatactctaacagctgtccagtgttggtgattccagtggactgtatctctgtgaaaaacacaattttgcctttttgtaattctatttgagcaagttggaagtttaattagctttccaaccaaccaaatttctgcattcgagtcttaaccatatttaagtgttactgtggcttcaaagaagctattgattctgaagtagtgggttttgattgagttgactgtttttaaaaaactgtttggattttaattgtgatgcagaagttatagtaacaaacatttggttttgtacagacattatttccactctggtggataagttcaataaaggtcatatcccaaac

SEQ ID NO: 12816 - DNA, 1805 bp, Homo sapiens
aaagggaaaatatataaagattatttcatgattgggtagtaaaactattcagctagtcagctaaagtcatttgtagtttgccccacctgccctaaataagaaaccccaaatgtagtctcttttctttctgtgtttcacattcatagcaactgcagctaacaggctgattttctggcctttggagaagtgattcaaaatagtgtagattttctgcatagatcccatttttgtacagaattgaatgggatggaataggtaagcaaaagtagaagcccatttgagttttacatttgattccacaatttggtttcaggtaggcttggtaatagactatataaaccagatttgcctattttgattttcatatggcttttttttctgtaagttttcagaggattttttaaatcacagaatcatactaaatgatatttagcctatcaaaacttccaaaagcccacaccaccagttcctgactcaaatttgaagggtttttagacaggagggtaggattaagtaggtgagtttaattaaagcttaaccctaggtaagagtaaatgagaaatattacggcaataatggaactgcttcactgtttcttggtgacttcctcactctaatgttttaaagaggcaacaaaagcttgtggtgccatttcagtaaccacggtgttgttttagatgcctttataagctcagtttcccctgttcttaagtgttgaatactgtctttaaactagaaaaatgcaaaatattgaactgatatttttgtgtgtagttgattactcttccattgagtgaatgatgaatacctgtgaggataggaaattagttctgagatctagtccctctctgattcacttagtaatctatcctcttttcagtattacatgtgcttaatctcagatgaaccatttcaccatggcagtgttatctcatctctgggcttttctgggaattgaagtatctctccttaaccccaattgtcaagggtagtagctgtatactaccactttgaattattgaaacgggtcaatttacgaagtctgcattggctatggagatatggtttatagtacagcctagagaatgaaactcaccgtccagataaccatgcatgcacccagattttttccaccttggatacctgtcactagggaataataaaggcctgattttttgtcttattccaactaagtagatcattatctctttccttttttatgttaatgagagaatttagcctccactcaacaatgttcaattcagcaaggctttcatatccttgctgtgggtcgtggataaggagcttattcaggtttcctgccctagctattagctccacttcacatgctggagaccggcgtagggacagatgtattcatcctggtgttactgaaaaacaggtgtgatcctgttactgatactataagtgacctaaaatgtcactgttcaaattagccagtgttctaacaaactaaactcttcaaatgcttggaaagatactacaaagccaatctttatagaattgggccaagataaatctatgttgttttgcatggctattgttaagctccaaaggttcactgtgtttctgccgctgtcctggagttgtcaccactgactgggcaaggcttcttgggcatggatgtagaactgttgtccttttcccactaacagttatctttgactctcttgcctgttatgcttacaaaatggtgatggcttatggaaggctgttaaattaatattcctgttaaaggaaattaaagtttgtctatttttgacaataaaacattatatattttt

SEQ ID NO: 12817 - DNA, 548 bp, Homo sapiens
gcttaatcttcagcttctatgcaccaagcgtggaaaaggagaaagtcctgcagaatcaatcccgacttccatacctgctgctggactgtaccagacgtctgtcccagtaaagtgatgtccagctgacatgcaataatttgatggaatcaaaaagaaccccggggctctcctgttctctcacatttaaaaattccattactccatttacaggagcgttcctaggaaaaggaattttaggaggagaatttgtgagcagtgaatctgacagcccaggaggtgggctcgctgataggcatgactttccttaatgtttaaagttttccgggccaagaatttttatccatgaagactttcctacttttctcagtgttcttatattacctactgttagtatttattgtttaccactatgttaatgcagggaaaagttgcacgtgtattattaaatattaggtagaaatcataccatgctactttgtacatataagtattttattcctgctttcgtgttacttttaataaataactactgtactcaatactctaaa

SEQ ID NO: 12818 - DNA, 2435 bp, Homo sapiens
ccacttcctgttcactttttttttttttttttttttttttttttgagctgcggggcatgatggggattgctgcatatcagcagttggatgttcttgcctctgacagtagcttatttgctctgggggccaggaattggattcagtttacactatcattaaaaaagagggagagagataataaactatattttggtggggatggtgattaaacacctcttttgggtatgccttttaaaaatgcttatagagaaaaaaaattttaaaaagaaagctaatgctagtatatactgcaatgttaggggaatgaacatgttttcctactgcattggggacttctagataggttaatgaaaggccttttattctgttactggacatgaaaactttgtctaatttcttactctattgtacgtttacagtcgcagcactaaaaatggatgacatcaaacatttttaacaaaatgatgtacaaactaaggactatttattgataatgttttgctactcttgtcagacaatggctataaactgaattaggcagtcttaaaaaaaaaaaaaaacagaaaaagaaaaaaaagaacgttgcaaatttgttaaaatgccaaaaaggacagtttaattttgtacagattatgcttacctcaggtttctttagtgtgcttgaatgcccttctttccatataacacttatcttcttcttaattcggcaatggaatatcttttaagttttaaaaaaactggaataattatatctatcttttttgccgtttatatttaggggtttttgttgataaaatcaagtcttggttgtggcttgctgaattaaatatttatgagtggtgcatttttaagtatagtgaacaagacaccatattaagtacagtgataaagcatctatattctgtaaaaaaaaaaaaaatctgcctatgcatgttttttaagaaaaaaaaaatggctgtatcggcctgtatgggactgtaatgcgcttagtggtctgacatatactggaaatgtatgtatactggcgtactttatattctctaaaatgcttaatgcctttgaaattttgtaatcaaaaaaaagctttgaaaaaatctaaaggggagagtattctttaaagtttttaacataagcttgtcaatgcacatgtagatggttagcatgtttagcaaaccttgtgaaattataataagtttgtagttacatgtgaaactctaaatgcatggcaactgttaatgtcataacagtttagttattttgttctgttctgtcatgtgccacaaaatatgtacttttttcacttttttccctttgtatatcagttacgggttacaactggttcattctgaaaacaacaacaacaaaagtccattcatattttttaacaattgtataagtgcccaagtaattcactacagcctaaagccttgcctttgtaatttgacttctgacatgttggcaatcaaagcatgcacttgtaacaatgaaaaagaaaaagcattttatattactactcaataaaatgtgcatgaacttacagaattctcatccttccactgagtccgctgaagggatttatgtgcacaaccaccatgtgtcttctaggtgctggcccaccaccacacatcacaggctgatttccacaggcttcttcctaggggcctcgtgatctgaggggtggtgcctacttccactgtaagaaagaatcttggtggatttgtgtctcaaatcagataagagaagcctgtttaaagagcagatgccatcttctggcttcctcaaggagccagttaaaaaaccagagcattcctttttattgaaaaataaaattaatttgttatcaggttgtttcagttgtattggatgccctatctatctgctaaagcaaaaagtactaggctactaagtgcattttcatcacagaaaagagttgcatttgtattaacaagaaatttgtatacccacgcttcagctactatctaatcatcacccgaagatttaagatacaccaaatttcagtttgtttgtaacattgttcatctttagtgcactttgttttatataataaagtatgcctgttatattaaataataagaatatggcaattagcgatatagcatacccaaacaaagatgttctcgatacagtctggcaaagactatcccaaggttattttaatgaattcagacattttttcctgtggatatttctccatcctaaaaaaagtggcaaccaaggaaaatatttagatgcaacttactagagtgatgatgtgaaagaaatggtgattctggtatcatggtgtttattttctttcttataactgcagagaaaatatcctgactaaaaaaaattcatttttttggattcctttcttttacaaattgtgctgaggcaactatggcatagaaataaacatttgacattaaaataag

SEQ ID NO: 12819 - DNA, 1380 bp, Homo sapiens
tagaaaatggaagatggtgttgttaataaaggcatttaatagataaaaacatctccaaaaaggattttgaagctgatcctatttagttaaaaagataattttgctttcaactgtaggtccagaaaactaattattggcatcagtctgtgaaatagtccattatttgttgttaaaaatgcttcaaaaggttttcagtgtcagtctgagatgcctggtatataggagcctttgggaaatacctatttttcagtattccatgcatattagatatcaccatgaagcaagagacatgcattctataatcatgtagacactcagactcaggggaaaatacaagttatatcctgaaagcctttaaaactctatggtaggatcaaagattcaaatggtttcagagaggttttatttcaattaatttgttctagtgctttcaagagcaagtacatcaaaatgtagaaggtaaaatgtatgcaacactaatataaattattccaagtctttaaggagccaaagaaaaaaaagatttctcacagctttttgttctgttttgtatttcaattaggaacttgcagtattattttgaaaaccattctaaaataataggagttaggaaataaataaagttttgctagccctgctaagttcaggcttagaggcttatcgctaagtataaacttcaccagattccacgaaaagctggatagctttttttctgacttatgttgtggttgcacccctcacaaatggcagaacagtatgtaaagctggtaacacctcggtttcagtgcaccatgtgtttgctttgtgaaggtgaagaatatgttggtttagagaaagaaattggatgtaattttatgcaatttacttttaaagacaaacataactatttagcagagaatattttaataaatgcaaaacaacagctggactgctgtacatcaaggacagattaactggaaaacatatgttccttatgtgtgatcgagagccattcagaaaagacttcctttgtgttcagcctatacttttccatatggtataccttgaaaaaaattagcacaccatggttatttttctaccttttataaaagacagagcctgtttactcatttagaagatagagaaaattggtctaaaattgaacatcctagattcacactcccaagtcacttaaggtgatttgatggtgaggaaaatgattgacaaagcccaacaatgatctcaggaattacattttccaacagaccaaaaaatgttttcatgtagcagcaatgcagatttggtgaatatttaatatatattttagtatgtatttcactttatgactgacaattaaaaaatattgtttggccaaatagtaaacacccttttgaaaccatg

SEQ ID NO: 12820 - DNA, 570 bp, Homo sapiens
aggaatctaggttgtattttcagtggacaatgggaataaagcatttctaaagcaccgactggagaggaaggcaacagagacaaggagagaagccgagagacatgtctgcgtgctgccacgcatttgagcgattgctctgtgaagagttgtacactgaacactttcaggggaggctgtttacccaggcaatgtcctcaaacaagcctgtgccggggtgtcctggaatctgtgccaggactgtgtttttagcccttcacctctcagctttagcaggacatgaaccagttataacaagatggccctgcagctggttacaagaatgtgacatggcaggatctatggaaccaaatggaaggttttgaggtgatgtaggtctttcacagctagctttggggaatacggaatactcaaataaagtgctttgttattatttcagagggaatggcgattgaaatgttacaacagagatttcttggtggtagctatttgggtaaaggtatatgggtatttttctgtacatgtgaaattatataaaaataaaagttatataaattacattgacaacttgat

SEQ ID NO: 12821 - DNA, 1484 bp, Homo sapiens
gtacaacagaatatctcgggaatggactcagaagtatgccatgtgatgctaccttaaagtcagaataacctgcattatagctggaataaactttaaattactgttccttttttgattttcttatccggctgctcccctatcagacctcatcttttttaattttattttttgtttacctccctccattcattcacatgctcatctgagaagacttaagttcttccagctttggacaataactgcttttagaaactgtaaagtagttacaagagaacagttgcccaagactcagaatttttaaaaaaaaaaatggagcatgtgtattatgtggccaatgtcttcactctaacttggttatgagactaaaaccattcctcactgctctaacatgctgaagaaatcatctgagggggagggagatggatgctcagttgtcacatcaaaggatacagcattattctagcagcatccattcttgtttaagccttccactgttagagatttgaggttacatgatatgctttatgctcataactgatgtggctggagaattggtattgaatttatagcatcagcagaacagaaaatgtgatgtattttatgcatgtcaataaaggaatgacctgttcttgttctacagagaatggaaattggaagtcaaacaccctttgtattccaaaatagggtctcaaacattttgtaattttcatttaaattgttaggaggcttggagctattagttaatctatcttccaatacactgtttaatatagcactgaataaatgatgcaagttgtcaatggatgagtgatcaactaatagctctgctagtaattgatttatttttcttcaataaagttgcataaaccaatgagttagctgcctggattaatcagtatgggaaacaatcttttgtaaatgcaaagctgttttttgtatatactgttgggatttgcttcattgtttgacatcaaatgatgatgtaaagttcgaaagagtgaatattttgccatgttcagttaaagtgcacagtctgttacaggttgacacattgcttgacctgatttatgcagaattaataagctatttggatagtgtagctttaatgtgctgcacatgatactggcagccctagagttcatagatggacttttgggacccagcagttttgaaatgtgtttatggagtttaagaaatttattttccaggtgcagcccctgtctaactgaaatttctcttcaccttgtacacttgacagctgaaaaaaaacaacatgggagtaataatgggtcaaaatttgcaaaataaagtactgttttggtgtgggagttgtcatgaggctgtgttgaagtgacttatctatgtgggatattgagtatccattgaaatggatttgttcagccatttacattaatgagcatttaaatgcaacagatatcatttcaggtgacttaacatgaatgaataaaagtcaatgctattgg

SEQ ID NO: 12822 - DNA, 187 bp, Homo sapiens
aaagtttacctgtcatcatctgcctgcttcttttaatgaattatttcacatgacagaagaattttaaagtagaaatatgtggggactgtacagagaatccaggatttagtaaacatgtgatttcagtacagggcttttcttggactttttactccaaagttaatttaataaaaataatattaaatgg

SEQ ID NO: 12823 - DNA, 176 bp, Homo sapiens
aggtgaaaagagagagtgctgaacataatgtttagaaagctgctacttttttcaagatgcatattgaaatatgtaatgtttaagcttaaaatgtaatagaaccaaaagtgtagctgtttctttaaacagcatttttagcccttgctctttccatgtgggtggtaatgatctatatc

SEQ ID NO: 12824 - DNA, 2076 bp, Homo sapiens
ttttaggatctccatggtgggaaggaaggcaggcccttcctatccacagtgaacctggttacgaagaaaactcaccaatcatctccttcctgttaatcacatgttaatgaaaataagctctttttaatgatgtcactgtttgcaagagtctgattctttaagtatattaatctctttgtaatctcttctgaaatcattgtaaagaaataaaaatattgaactcatagcaggagaatagtttttaaaataaatctcgatttgttagcatctgtcttagtcactttgggctgctataacaaattaccatagatggagtgtcatagacaacaaacatttatttttcagtctggaggctaggaagtgcaagataaaggtgccagcagatatagtttctggttagggcccacttcctggtttgcagatggtcctcttcttgctgtatcctcacatagcaagagcagagaaaaaaagcgagcgctcatgtgtctttttataaggacactaatcctgttcatgagggcactacccttatgacctgattacctcccaaaggccccacctcctaatgtatcatattgcaggttaggatgtcaacacatgactctggggtgatacaaataggccattgcagcatatacaattaaaatgtaaatatgaagaaaaaaggaagtttttgtttttttgtgggggagatgggggttaaggaagaagatagtaatttcaggactaggcatggtagctcatgcctataattcctgcactttgggaggccaaggcaggaggatcacttgcggccaggagttcaggaccagcatggttaacagaggctaaggcaggaggattacttgagcccaagagtttgaggctgcagtgagctgtaatcatgccactgcactccagggtgacagagcaagaccctgtacctaaataataataataatttccacttcatttttcaatattcaaatatttttatataattctgcattgttctgtatgtagatcctaattttaaaattttacaccatcataaatgaacaaaggtaggaaggagtttggcttcaatagcttacagtaaaaggagtaaaggagttcagcctcaaaacgatattgttgacctgttatgttatgaaaaataatccagtgtttatacttaacggatgccatcccttattatttactattttcttagtctaactaaacaatctttattaaaataagcaatgatatttgacatgggcctaagaaatatatagttagctaacaatattgtcagttagagggatttcttttctaaattaagtacagatttcttcaccaaactccaggataacagaaaagaggacataaaatttggacatagtttctggataaataaatgtaaatttaaatataaattatgtaacaggaaacaaacgaaattaaagaaaataaatttttcaagaaaagtaaatttatggatgttaattctgtaacattgtcagggcaaagttttttgtttttattttaatttaagggttttatgtttgttttttacttgttgcaacctcaaatgaccaaatggtatgatgcacactgagatactcaataaatgtgcagtgattcttagccttttttcctagaactttaatattaacatggaaaattctgaaatggacaacaaaaagataacactttgtgtatggggaagaatatcatgcagttgatgacggtacattaaaattcacacaaaaggacattttgactagcattcagaaagagtccattgattataagattatctatgaggttttggaccgggcactacactaccgaattatggctaactttggtttgtgatctagaccaagtcacccaatctatcttggattttagttttctggtttatgaaattaaggagttaagctaaatgacttgggtttcttttcgtgtatcataatcaaaatgctgtaacttctctagtgaattcatagaacactgactcttacaagtatgtcatgaaatactttatgctgtgagcaggtatacatgtataatatatgtatagctatgaacaaataaattttaaataaatgc

SEQ ID NO: 12825 - DNA, 416 bp, Homo sapiens
actcctctttgtcacttctctggagatccagcattccttatttggaaatgactttgtttatgtgtctatccctggtaatgatgttgtagtgcagcttaatttcaattcagtctttactttgccactagagttgaaagataagggaacaggaaatgaatgcattgtggtaatttagaatggtgatagcaataccttcttcttgcatatggtaatacttttaaaagttgaattgttttatttatttgtatattttgtaaagaataaagttattgaaagaaatgtaaagttatctacatgacttagcatattccaaagcataatacatacattaatataaaacatcattttattaacaaaattgtaaatgtttttaataccttacacattcaataaatgtttagtagttctgaatcacc

SEQ ID NO: 12826 - DNA, 214 bp, Homo sapiens
ttccatttcctgaggtaaaagattagtgtgagaccatcatggtgccagtctaggaccccattctcctatttaccagtcctgtcctatataccctctagaaacagaaagcaatttttaggcagctatggtcaaattgagaaaggtagtgtataaatgtgacaaagacactaataacatgttagcctccacccaaaataaaatgggctttaaattt

SEQ ID NO: 12827 - DNA, 134 bp, Homo sapiens
agcagtagtatatcttattttcaaggcatttggaaatgaagggcaaactaatgtcttgttttaagaaactgcttagtccaccactgaagaaaatatccagaaattattttcattttatgtatagggctttcttc

SEQ ID NO: 12828 - DNA, 647 bp, Homo sapiens
ttgaaacatctgaaattctgctgtcaagattcccatctctaaggactccaagtgctagagacaagggggtctatgagcatttactgacttcctgttaaaacttcattttttcaaactttttgagctatgcaatatataaataaacagtaagaattttaaattactctcctttggacatttattgatataaaaagaagattttggccaggcacggtggctcatgcctgtaatttcagcactttgggaggccgaggtgggcagatcacaaggtcaggagttcaagaccagcctggccagtatgttgaaaccccatctctattaaaaatacaaaaattagccaggcgtggtggtgcatgcctgtagacccagctactcaggaggctgaggcagaagaactgcttgagcccaggaggcagaggttgcagtgagcagagattgtgccactgcactccagcctaggcgacagagagagactccgtctcaaaaaaaaaaaaaagattttgtttcatttcatagcacaaatttagaggcattgagttgaccatttctagtttctatacctgaaggaacccattgattttaccagtttttatttctgtagattggatgtaaaaatcacagattcaataaattaataaactttgtgt

SEQ ID NO: 12829 - DNA, 103 bp, Homo sapiens
tgtggccaagtaggtttttgtatcatattagcctaaagatgaaaggcttattattatgatataatctgtaatacactgtaatttaataaaagtcttcataatc

SEQ ID NO: 12830 - DNA, 487 bp, Homo sapiens
agaaccaagagtgtgactgccaaaacttagtgtggcatcagcaccaacagcacagttcttcatatccacgccactctcagacaaaactagatgtccagattgttgcatttccgtaaagtttgtcacgagacattttttaaaatctcataacccacatgttcagttatccatgcaagaaacttgactctacatgtattgctgaaagaattttcttaacagtgaaatctgatcatatatttttaccacactgccacataaagcccaagaaattcagctgacaagacagatttagcattatcaagaaatcccatttgccctgaaaaagctgtcctccattgtactgaacagacagtcctgtcgattgtgttatttagaaacatacactgaatgtgggctgaaatcatcatctttccataatgaaaactgagaaactattcacaatgcattccttataaataaatgctacatttagtaactcatttcaccc

SEQ ID NO: 12831 - DNA, 2150 bp, Homo sapiens
tcaccattgaggaacatcatcaattgcagactgtgaagttgtgtatttaatgcattatagcatggtggaaaataaggttcagatgcagaagaatggctaaaataagaaacgtgataagaatatagatgatcacaaaaagggagaaagaaaacatgaactgaatagattagaatgggtgacaaatgcagtgcagccagtgtttccattatgcaacttgtctatgtaaataatgtacacatttgtggaaaatgctattattaagagaacaagcacacagtggaaattactgatgagtagcatgtgactttccaagagtttaggttgtgctggaggagaggtttccttcagattgctgattgcttatacaaataacctacatgccagatttctattcaacgttagagtttaacaaaatactcctagaataacttgttatacaataggttctaaaaataaaattgctaaacaagaaatgaaaacatggagcattgttaatttacaacagaaaattaccttttgatttgtaacactacttctgctgttcaatcaagagtcttggtagataagaaaaaaatcagtcaatatttccaaataattgcaaaataatggccagttgtttaggaaggcctttaggaagacaaataaataacaaacaaacagccacaaatacttttttttcaaaattttagttttacctgtaattaataagaactgatacaagacaaaaacagttccttcagattctacggaatgacagtatatctctctttatcctatgtgattcctgctctgaatgcattatattttccaaactatacccataaattgtgactagtaaaatacttacacagagcagaattttcacagatggcaaaaaaatttaaagatgtccaatatatgtgggaaaagagctaacagagagatcattatttcttaaagattggccataacctgtattttgatagaattagattggtaaatacatgtattcatacatactctgtggtaatagagacttgagctggatctgtactgcactggagtaagcaagaaaattgggaaaactttttcgtttgttcaggttttggcaacacatagatcatatgtctgaggcacaagttggctgttcatctttgaaaccaggggatgcacagtctaaatgaatatctgcatgggatttgctatcataatatttactatgcagatgaattcagtgtgaggtcctgtgtccgtactatcctcaaattatttattttatagtgctgagatcctcaaataatctcaatttcaggaggtttcacaaaatggactcctgaagtagacagagtagtgaggtttcattgccctctataagcttctgactagccaatggcatcatccaattttcttcccaaacctctgcagcatctgctttattgccaaagggctagtttcggttttctgcagccattgcggttaaaaaatataagtaggataacttgtaaaacctgcatattgctaatctatagacaccacagtttctaaattctttgaaaccactttactactttttttaaacttaactcagttctaaatactttgtctggagcacaaaacaataaaaggttatcttatagtcgtgactttaaacttttgtagaccacaattcactttttagttttcttttacttaaatcccatctgcagtctcaaatttaagttctcccagtagagattgagtttgagcctgtatatctattaaaaatttcaacttcccacatatatttactaagatgattaagacttacattttctgcacaggtctgcaaaaacaaaaattataaactagtccatccaagaaccaaagtttgtataaacaggttgctataagcttggtgaaatgaaaatggaacatttcaatcaaacatttcctatataacaattattatatttacaatttggtttctgcaatatttttcttatgtccacccttttaaaaattattatttgaagtaatttatttacaggaaatgttaatgagatgtattttcttatagagatatttcttacagaaagctttgtagcagaatatatttgcagctattgactttgtaatttaggaaaaatgtataataagataaaatctattaaatttttctcctctaaaaactg

SEQ ID NO: 12832 - DNA, 582 bp, Homo sapiens
gctgttaacccagtcactccacctttgacacattactagtaacaagaggggaccacatagtctctgttggcatttctttgtggtgtctgtctggacatgcttcctaaaaacagaccattttccttaacttgcatcagttttggtctgccttatgagttctgttttgaacaagtgtaacacactgatggttttaatgtatcttttccacttattatagttatattcctacaatacaattttaaaattgtctttttatattatatttatgcttctgtgtcatgattttttcaagctgttatattagttgtaaccagtagtattcacattaaatcttgctttttttccccttaaaaaaagaaaaaaattaccaaacaataaacttggctagaccttgttttgaggattttacaagacctttgtagcgattagattttttttctacattgaaaatagaaactgcttcctttcttctttccagtcagctattggtctttccagctgttataatctaaagtattcttatgatctgtgtaagctctgaatgaacttctttactcaataaaattaattttttggcttctt

SEQ ID NO: 12833 - DNA, 1207 bp, Homo sapiens
gtggaaaacgaagctcattcccaacgtgcaaagccaaggcagcgaccccaggacctcttctggagatggaagcttgttgaaaacccagactgtctccacggcctgcccagtcgaccccaaaggaacactgacatcaattttaccctgaggtcactgctagagacgctgatccataaagacaatcactgccaacccctctttcgtctactgcaagagccaagttccaaaataaagcataaaaaggttttttaaaaggaaatgtaaaagcacatgagaatgctagcaggctgtggggcagctgagcagcttttctcccctcatatctgcgtgcacttcccagagcatcttgcatccaaacctgtaacctttcggcaaggacggtaacttggctgcatttgcctgtcatgcgcaactggagccagcaaccagcacatccatcagcaccccagtggaggagttcatggaagagttccctctttgtttctgcttcatttttctttcttttcttttctcctaaagcttttatttaacagtgcaaaaggatcgtttttttttgcttttttaaacttgaatttttttaatttacactttttagttttaattttcttgtatattttgctagctatgagcttttaaataaaattgaaagttctggaaaagtttgaaataatgacataaaaagaagccttctttttctgagacagcttgtctggtaagtggcttctctgtgaattgcctgtaacacatagtggcttctccgcccttgtaaggtgttcagtagagctaaataaatgtaatagccaaacccactctgttggtagcaattggcagccctatttcagtttattttttcttctgttttcttcttttctttttttaaacagtaaaccttaacagatgcgttcagcagactggtttgcagtgaattttcatttctttccttatcacccccttgttgtaaaaagcccagcacttgaattgttattactttaaatgttctgtatttgtatctgtttttattagccaattagtgggattttatgccagttgttaaaatgagcattgatgtacccattttttaaaaaagcaaggcacagcctttgcccaaaactgtcatcctaacgtttgtcattccagtttgagttaatgtgctgagcatttttttaaaagaagctttgtaataaaacatttttaaaaattgtcattt

SEQ ID NO: 12834 - DNA, 439 bp, Homo sapiens
ctgatttgcattttaaagcaagatgcgatgtccagagttacagagaatgagtagatgtgtctcatcggttaatagctctattatacctctaaaggtggaattgtcagtttagattcataaatgaaaaggtaaatgagtaatcagaataaaccaagtgataatcaaaccatgtcaagattattagttcagactctagcctgttaattttcttagttgatttctgaagctacctgatttattctattaaattgtaagcttgcaaactcaaaataaattggcagatttacctctcatgttttaatgtgtcaaattagagagcaaagtataacaggtgccttcacttttgagacttagtgccttaaaatatgtattctataatgatttcatatataaaagtatatttattgactgtaataaaataaaatatgatgtaaacaaa

SEQ ID NO: 12835 - DNA, 205 bp, Homo sapiens
cacttaatctttctccatcctgtgctccaaaaacatactgatgcctgatttaaggaatcaggtcttcagagaggaatgaagaaggctgtactgccagatataagggcactgcctggcatagaagaaaaaattattatcaccagatattctagctacagtttttcaaccacctgacaccaatttatggaaaaataaaggatttttg

SEQ ID NO: 12836 - DNA, 111 bp, Homo sapiens
tgaatctaacctttcaagcatgaagttgtgtatataagggtccatttttaatatttatagttgaaaactgaattgcagattttacaagtctgagatatgtttacatagggc

SEQ ID NO: 12837 - DNA, 701 bp, Homo sapiens
ttaatagaggctatctaattttacactctgtattgaaaatggctttctcagccaggcgtggttactcacacctgtaatcccagcactttgggagtccaaggtgggcggatcacctgaggtcgggagttcgagaccagcctgaccaacatggagaagccccgtctctactaaaaatgcaaaaaaaaatttagctaggcatggcggcgcatgcctgcaatcccagctacttggaaggctgaggcaggagaatcacttgaacccaggaggtggaggctgcggtgagccgagattgcgccattgcactccagcctgggcaacgagtgaaactccgtctcaaaaaaaagaaaatgtctttctcttccttttatataaatatcgttagggtgaagcattatggtctaatgattcaaatgttttaaagtttaatgcctagcagagaactgccttaaaaaaaaaaaaaaaaagttcatgttggccatggtgaaagggtttgatatggagaaacaaaatcctcaggaaattagataaataaaaatttataagcatttgtattattttttaataaactgcagggttacacaaaaatctagctgatttaacttgtattttgtcacttttttataaaagtttattgtttgatgtttttaaaggtttttgaaatccaggaattaaatcatcccttaataaaatattcgaaattc

SEQ ID NO: 12838 - DNA, 842 bp, Homo sapiens
aggagatgccgacagctagtgacagatgaagatggaagaacatacctttgacaaataactaatgtttttacaacataaaactgtcttatttttgtgaaaggattattttgagaccttaaaataatttatatcttgatgttaaaacctcaaagcaaaaaaagtgagggagatagtgaggggagggcacgcttgtcttctcaggtatcttccccagcattgctcccttacttagtatgccaaatgtcttgaccaatatcaaaaacaagtgcttgtttagcggagaattttgaaaagaggaatatataactcaattttcacaaccacatttaccaaaaaaagagatcaaatataaaattcatcataatgtctgttcaacattatcttatttggaaaatggggaaattatcacttacaagtatttgtttactatgaaattttaaatacacatttatgcctagaaggaacggactttttttttctattttaattacacataatatgtaattaaagtacaacataatatgttgtttctctgtagcccgttgagcatatgagtaagtcacatttctattaggactacttacaaggacaaggtttccatttttccagttgtaaaattggaaccatcagctgataacctcgtagggagcaaccccaggatagctaagtgttatgtaatatgcctagaaggtgatgtgaatgcgattcagaagcatagccactcccattttatgagctactcacatgacaaatgtcatcttttgctataacctttgccaagttagagaaaagatggatttaatgagataaatgaaaagatatttaacctaatatatcaaggc

SEQ ID NO: 12839 - DNA, 199 bp, Homo sapiens
aattgtgatctctctcttcattctattctttttctctcaagagttccatttaatggaaataaaacggtataattaataattctctaggggggaaaaatgaagcaaatctcactggatatttttaaaggtctccacagagtttatgccatattggaattttgttgtataattctcaaataaatattttggtgaagcatac

SEQ ID NO: 12840 - DNA, 1951 bp, Homo sapiens
tgttggaactgaggaggaagccatagctcagggtcatcaagaaaaataatagacaaaagaaaatggcacaaggaatcacacgtggtgcagctaaaacaaaacaaaacatgagcaaacacaaaacccaaggcagcttagggataattaggttgatttaacccagtaagtttatgatccttttagggtgaggactcactgagtgcacctccatctccaagcactgctgctggaagaccccattccctctttatctatcaactctaggacaagggagaacaaaagcaagccagaagcagaggagactaatcaaaggcaaacaaaggctattaacacataggaaaaaatgtatttactaagtgtcacatttctctaagatgaaagatttttactctagaaactgtgcgagcacaacacacacaatcctttctaactttatggacactaaactggagccaatagaaaagacaaaaatgaaagagacacagggtgtatatctagaacgataatgcttttgcagaaactaaagcctttttaagaaatgccagctgctgtagaccccatgagaaaagatgtcttaatcatccttatgaaaacagatgtaaacaactatatttcaactaacttcatcttcactgcatagcctcaggctagtgagtttgccaaaaccaaagggggtgaatacttccccaagattcttcctgggaggatggaaacagtgcagcccaggtcccatgggggcagctccatcccagagcatttctgatagttgaactgtaatttctactcttaagtgagatatgaagcattatccttttgttcagttgccccgggcttttgaacagaagagtaaatacagaattgaaaaagataaacactcaaccaaacaatgtgaaaacgggttctgtagtatttgtaaaaaggcccggcccaggaccactgtgagctggaaaagggagaaaggcagtgggaaaagaggtgagccgaagatcaattcgacagacagatggtgtgtatgcccctccctgtttgacttcacacacactcataactttccaaatgaaaccccacagtatagcgcatattttcgatatttttgtgaattccaaaaggaaatcacagggctgttcgaaatattgggggaacactgtgtttctgcatcatctgcatttgctccccaagcaatgtagaggtgtttaaagggccctctgctggctgagtggcaatactacaacaaacttcaaggcaagtttggctgaaaacagttgacaacaaagggcccccatacacttatccctcaaattttaagtgatatgaaatacttgtcatgtctttggccaaatcagaagatattcatcctgcttcaagtcagcttcagaaatgttttaaaagggactttagctctggaactcaaaatcaatttattaagagccatattctttaaaaaaaaaaagctggataatattctctgtaatatttcagtcctttacaagccaaatacatgtgtcaatgtttctagtatttcaaagaagcaattatgtaaagttgttcaatgtgacataatagtattataattggttaagtagcttaatgattaggcaaactagatgaaaagattaggggcttccacactgcatagattacacgcacatagccacgcatacacacacagacacacagatgtggggtacactgaacttcaaagcccaaatgaatagaaacacattttctggctagcagaaaaaaacaaaacaaaactgttgtttctctttcttgctttgagagtgtacagtaaaagggattttttcgaattatttttatattattttagctttaattgtgctgtcgttcatgaaacagagctgctctgcttttctgtcagagatggcaagggctttttcagcatctcgtttatgtgtggaatttaaaaagaataaagttttattccattctg

SEQ ID NO: 12841 - DNA, 701 bp, Homo sapiens
gccgcacccacagcgccgggatcctaggaccttgccggatggggcaactccgcccttgaaagactgggaattatgctagaaggtcgtgggcactaaagaaagggagagaaagagaagctatatagagaaaaggaaaccactgaatcaaagagagagctcctttgatttcaaagggatgtcctcagtgtctgacatctttcactacaagtatttctaacagttgcaaggacacatacacaaacaaatgtttgactggatatgacattttaacattactataagcttgttattttttaagtttagcattgttaacatttaaatgactgaaaggatgtatatatatcgaaatgtcaaattaattttataaaagcagttgttagtaatatcacaacagtgtttttaaaggttaggctttaaaataaagcatgttatacagaagcgattaggatttttcgcttgcgagcaagggagtgtatatactaaatgccacactgtatgtttctaacatattattattattataaaaaatgtgtgaatatcagttttagaatagtttctctggtggatgcaatgatgtttctgaaactgctatgtacaacctaccctgtgtataacatttcgtacaatattattgttttacttttcagcaaatatgaaacaaatgtgttttatttcatgggagtaaaatatactgcatacaa

SEQ ID NO: 12842 - DNA, 2235 bp, Homo sapiens
acacagaaagtctaagaggagaaatatgatggatgaagagctctgtagatgctgtatagacactaaataagagttgattagggtagtatattatagtcatctgttatgctgtgaaatttggaattcagtattatcattttgaagtctgtaaattgtgttagtcattaacttagtcacctgttgtattctggatctacacaaaattattttaactgctcttattaatctgtgaggattaatatacaaaaagtatcctttgagatgaagtcgtgttctcaaaataaggttatattattttctttttctgcttgattttcatcttgtgttttgctttgtttttgtaaggaaccatctcttggtttggtcacatcagttcacaacagccatttgttttcaaggtcaaggctccaggcaggttgttactggtgtttgcagcctgtcagtacttgcagtactggaataggttctaggctagtgtctgcgcgtcactgtggttttagcatgggaggacttatttgagaaatactaccttacttttctatgatttctttttacagagttatagtgtgtttactcctaagatgacagttctctttgtctatattcagcatctaagacaaatatttaaacattttaaagaaccactgtgttaagtttaggattatttacttaccaaattagaagtttgacttttatgtgttatacacaatcttaaaatttcacgaattcacctttttaatagtatccatgtacataataaaatcaaagtttaattagccattttctttgaatttttttctaaataagggaaataactgttcttgggccactttacagagataaatgtatgtgaatgtttatgataaacgcttaaatatttctaaaatattaacttcaaaaaagtctttttcagttcttaaataaaaatttatttatttaagatacttattcgacttatcttaactaaggtagctatgaatgttaagtagatgaggtaaccattcagttaagttaaattgtagcattgccaggtagtgaggctcactgtacaattttccaggtaaatgaaatttcctgtagtaagaggtccgtatttttgtaacagccttttaaaaatgcttttgggaaccctccagcctcttaccaaaagaggctttaaacctcatcttgattcagactgtcagtctattcctgggcagtagtatgtgatgtccagcaccctaaccccgactccccagccctgggactattccagtagagtgaaatatttgtccctgtacaaagtggcctgaatgactgttggagttcctgtgtctggttttcctgtttattccctgtgatgcccagagtaatggcccatccaaagatgtccagatgtccatgtgctagtctccagaacttgtaactgtgttgttatgtggcaaaggggaatgaaggctgcagatggaagtaaaatagattatgctggattatctgggtgtgcccaattgatcaccggatccgtaaaagtggaagagaggcagatcaggatgtcagcgtgatgaggtgtgagacagacttgacttgctgttgctgggaggaaggggaggtcatgagccaaggaatgtggacagtctcttgaagctggaaagtgtgcattggacatctggaagccagaaaagacaaagaaatatccagaaaggaacaaagtcttgtggacaccttgattttggtccagtgagaatatgtttgacttgttaacctacaaaactttatgatgataaatttgtgttggtcgtaagccactaaatcacagtaatttgttatagcagcagatagaaaactaatatactccctttaatataaggttatctactattgattctttctaggattttagcttctggtctgatgtgggtttacagccagatcacccggcttgaattgcttacagtgtgtagtctcatggtaaaggcgttctatgagtgaagtgtatatactttaatgtgtgtatactgtcacattttgactattttggaagactttcacctctgtttcttgtctttgaggctgatgaatgtgtttctaagttataaatttaatattaagggattcatgtattattgttattgaatccaaacaatgtgttaagtaatatttagggccagaaaaatcttgtacagaataatgatttctcctaatgtaaatcttggaaagggttttgttcaacttgagaaatattaaattttttattct

SEQ ID NO: 12843 - DNA, 1141 bp, Homo sapiens
agctgccatttctgctacccacgccaggccttagtgggttccctttcctgtccccagtcgagccctcctcccttcccctgcccctcctttccacgccctggaaaccatctcacttcacagggcaggtgtagcctttctgattcctcggttgtttcttgcatttcttggctttgggtatccttcattcagacgggctctgatttactgaaggtgtgatggagcttattgtcaaagccaagggtggcgttttgggggcgcttcttgagacgaaaaagaccctgggaagagatgatggtggcatatctaaagagtttgcagagcggactgacgctcctcccctttctctttaacgccgaaggacttggtgcagttcgtgtgaatctcacagggggaatgcaactggttcctgtgatctcttcacctttgcttctacatagagatgttaatgtcgagtagaaagaaatgtatcttagcatctgaatgattttgctggtaataatattatccacagatttgcaatggctggcatctgctttattcccattgctgtctgcaggctgtgggaatttcacctgtcaaaccaaacttccctctctgatgtgcactttgttctgtttcccagattcgtcacaatgcctattgtcctgtccttctctttcctttttcttccccattttgccatctgtctcttatgatttataaggggaaaaaaacttgttttgttagaggggcaggttagaagtcattgtataatttgtaggctttgtaatgattgaatgcaagcgtggaaatttaggctgaactctctatcaaaaggaaaaatgtggaggaaaagggaaaaatcaggagggaggattgcctcatgtattatttatttcgaccttttaggggagaaggaactcccccattctttcaagagattaaaaataaatcaacagtctgaaaacctaagcagacacggagcattatccggatcagccacacacgtgttcccttctatttattataaagaaatttttcatgggaaaatatgtattttttgtatattctacagagtttattctagtatgtatttacatcttgaagaacaagaaagttgttcttgtgattaaactataaataaactatctaattttcataa

SEQ ID NO: 12844 - DNA, 31 bp, Homo sapiens
gagattattacactaaatatatcttagaacc

SEQ ID NO: 12845 - DNA, 2099 bp, Homo sapiens
ctaaatttcaacagtgccacttctgcattctctgttctcaaggcacctggatggtgaccctgggccgtcctctcctcctcttcatgcatgtttctgagtgcatgaagttgtgaaggtcctacatgtaatgcatatgtgatgcatcatcttatcatatattccttcctatacattgtttacacttcaactacggggatgttccacacaaacttaaattactgttggcaaaacaatagggggagattagacaaaaaaaaaaatccacaatattccaagtacaactcttcatcaagtttctctgttaatgccaagatttaacagacttaagaactattgttctctgaatgacagttgtaagagaaatgtaaattttttagaactctttgctgttaatctgttttggtttgtttggtttttttttttttttttaaggtaaaaaaaaaatacaccttcagtttcctggtgtgatcctggttaaaatggatgatttttcattgaaagttttgctgattaacaattaaagtgggatgatatgtgggcaaaatcacttatgaaagtagaagcaagaatcagttggtttgctaccacataaagccatgctgtttttggtcaaactgtgtaaactggaaaaattcacatcatttctgagtttaatcactttaggatatattcacattgttttggtgaatttgctgaattgaattgtttttctttctcaaatctgtgatctcttttctttatcctgtttctttgttcctttcgtttgctttcttatttttcttttgttccattcttttcttacttttttcccttttccttttttggggaggctggctagtagtgtgtgagaaaagaatagaagtgaaatttgcataatgaatgtaaaagggaaataaaagtcttttgaaggtagctatactagcacttttgatcatcttcagggcccacaaaaatgttgtcaagattttaaaggtttataattctgcttaagctctagtttggacttaggtatcctaactatgttggaggtatttgcattgtttaaagttaggataaaagcaagttcctcctgtgactgcaacgtcttactgattgggacagttgccaggaggataccaacttgatagcagagggggttttatgcaaacgcactcacctccgccttggggaatgaaagggtcacttctgcatcatcactagctagttttctagtgttagagaggcttacaaatgtttgccattctcataagtgttttgaacttgatctttgtgacttgtgcttttttagcttctctcttgaatcagagtatcattgtcttcctccaaggagttagaatttcccagtttaaaacaaaaagggaaatgtcctaggttttctttgtgcttctcatttttcctttgttgattcaattcctgtgatttttgttctcttccctgaagtgctttacagtgcatggaatctccatcattgttattttaacgatagtaattcacagtcctcagaagcctatttttaaagcagaagcaaaaaagaaaaacaaaataacaaaaacaacccttcctcttttctctcatctcacctctctgtgttgattactaatcatcttagatattattgctagtggatgtatggtagatgggttgaagcttttctgataattattacacaatttaaaacaacatatatatttaaaataaatatatacagtaaatatattgagccatgttaacctgccaatgagatctgtgaaaaaataatggcctcatttttctctttttaatttcttttacccttttgtgaagcagctatacgtggcatacatgtatttaaagaaaaaaaaatagatgtagagtgttttttttacacttttaacttagcatgtggtgttgaagtattactgtagatcaagtttgtcttccgcactaagatgtgaggaaattgtgatttgttctctccaccacaaatgaattacacatttattatcttctatcattttgaaacactgcagtttaccatgggacactgtatatatttcttgccataatggtaaaggactgattgatatatttaagagttaataaatttgtgatttctgctg

SEQ ID NO: 12846 - DNA, 143 bp, Homo sapiens
atatttccaggctgtcagcttctttgttaatacacccatggtcagctccttctacttattccattgttaatagcatggtatatgttatttaacgctagtagttggttacactgatgaaaataaatgccttcacgggaaaggtt

SEQ ID NO: 12847 - DNA, 1990 bp, Homo sapiens
gcacaaatatttcctgtttggttaaactttaatcagttcttatctttcatctgtttcctaggtaaaccagcaaatttggctcgataatatcgctggcctaagcgtcaggcttgttttcatgctgtgccactccagagacttctgccacctggccgccacactgaaaactgtcctgctcagtgccaaggtgctactcttgcaagccacacttagagagagtggagatgtttatttctcttgctcctttagaaaacgtggtgagtcctgagttccactgctgtgcttcagtcaactgaccaaacactgctttgaattataggaggagaacaataacctaccatccgcaagcatgctaatttgatggaagttacagggtataccatccgcaagcatgctaatttgatggaagttacagggtagcatgattaaaactacctttgataaattacagtcaaagattgtgtcacctcaaaggccttgaagaatatattttcttggtgaatttttgtatgtctgtcatatgacacttgggttttttaattaattctattttatatatatatatatgtttcttttcctgtgaaaagctgtttttctcacatgtgaacagcttgcacctcattttaccatgcgtgagggaatggcaaataagaatgtttgagcacactgcccacaatgaatgtaactattttctaaacactttactagaagaacatttcagtataaaaaacctaatttatttttacagaaaaatattttgttgtttttataaaaagttatgcaaatgactttattttatttttatttcctgcataccattagaataattttatttcatttcttcaaattaccaagcactgtaatactataaattaatgtaatactgtgtgaattcagactataaaaaacatcattcagaaaactttataatcgtcattgttcaaccaagattttgaatgtaataagatgaatatattccttacaaattacttggaaattcaatgtttgtgcagagttgagacaactttattgtttctatcataaactatttatgtatcttaattattaaaatgatttactttatggcactagaaaatttactgtggcttttctgatctaacttctagctaaaattgtatcattggtcctaaaaaataaaaatctttactaataggcaattgaaggaatggtttgctaacaaccacagtaatataatatgattttacagatagatgcttccccttggctatgacatggagaaagattttcccataataataactaacatttatattaggttggtgcaaaactagttgcggtttttcccattaaaagtaataaacttactcttatacaaagtggacactgtggggagatacagagaaatggaagatacggatcctgcctggagtaggtaaccttgcttggaaaccccacatgcaaacgtcatgaggagaattaaaggagtattatcagtaatgaagtttatcatgggtcatcaatgagcatagattggtgtggatcctgtagaccctggtgttttctttgaagtgccctctcctaatgcagaggccttgaagcttacagtatacacttgaaaagtcacagatagctagaattatgatctttgaagttataactgtgatctgaaaatgtgtgtggtggtatgacagcataccattaaatacatttacatcacagctcaaaggactgtgatataatccatttatatcacaactcaaaggactgtgatataatccatttatatcacagctcacagtttctgaaaatgtataaaagaatctataatctagtactgaaattactaaattgggtaagatgatttaaatgattttaattttaacattttatttctagaatatatggctccattttattttatagtgtaaagttgtatttcctaaagtttgtgttttgtcgacagtatcttttaaatgagtcttaaaaataaaggcatattgttcatgtt

SEQ ID NO: 12848 - DNA, 41 bp, Homo sapiens
cactggagacaagaactaagcctctcaagatacttttagtg

SEQ ID NO: 12849 - DNA, 730 bp, Homo sapiens
tctttgcaagcgcattgattaatgtctgcaaaggaatctgctctttgaggtttctttctgcactagagatttttctgtttttgaaaatagttcgtgctcttcggtttttgttattgaactgtttcatgtattttttaaagacatttgaggggaggaggattattatgaatgggaaaaaaagattttggttgagactaaattactcatcgtcaaaataatgtcaaaatagttttggggatcaccactatattttgttttgatttttaacctttcaacattttcctaatgatttgcagagataactgcacaattttgcatatcaatgatactggttcttactcccaccagtgtttcataatactaacaagatggtctctcctagcaagattatgtgtttaatgcttgctttggggtaaaataaaagtacgaaaaaggtggaagtcaaatcagtattctgtaattgttagaatttattttttaagaacttacaactcagaaaagattgctagactcaccaaaataataaatgttctttattttacaggtagtgattattagtgcttcatccccatttaaaaaaacacagtactaatgggtaacacatatggaggtttgctgccatatatattgcatcaaaatatcattaattaatataaaaatattaaaatcattcctgtccattccacttgtaaatgggaattcatgaaattaaatattactttaaaaagga

SEQ ID NO: 12850 - DNA, 674 bp, Homo sapiens
ttcttcatggaaacttcaaagcagcatttaaacaaatggaaaactttgaacccccactattagcactcagcagagatgacaacaaatggcaagatctgtttttgctttgtgttgtggtaaaaaattgtgtaccccctgctgcttttgagaaatttgtgaacattttcagaggcctcagtgtagtggaagtgataatccttaaatgaacattttctaccctaatttcactggagtgacttattctaagcctcatctatcccctacctatttctcaaaatcattctatgctgattttacaaaagatcatttttacatttgaactgagaaccccttttaattgaatcagtggtgtctgaaatcatattaaatacccacatttgacataaatgcggtaccctttactacactcatgagtggcatatttatgcttaggtcttttcaaaagacttgacaagaaatcttcatattctctgtagcctttgtcaagtgaggaaatcagtggttaaagaattccactataaacttttaggcctgaataggagtagtaaagcctcaaggacatctgcctgtcacaatatattctcaaagtgatctgatatttggaaacaagtatccttgttgagtaccaagtgctacagaaaccataagataaaaatactttctacctacagcgt

SEQ ID NO: 12851 - DNA, 691 bp, Homo sapiens
ttgaaacttctctgtcattgatgttgcatttccaaggagataatctccttcttggtgcctaattttctagatgataataggctagttttgatttcttgctcattttcagaataactttccaggaagagatggcatttagaacttcagctttggtgctcaggtataaagccaattaaggtacaattgtaccataaagggaacaatctgtttctgattgcacagtttctaatttttaaaactgatgtggtttgcatttcataaaaggcaaagtttacagaaccataaacattctcaattttctttatgctagacatataaattatttttcaaactgtatagatttggggtaaaaagttgtctcagttcctctcccaattgcaatgagaaaaaaaagcttaatttttacattatacttaattttctaaaaccatgtaactccattgaacacatttttcaacttaaggtctgcatagcagacttttaataaccttgggatttatctggtagaacaatatgtgttctacatttttttcataattatatattgtgtatgttaaaactattttccagttgttttgtctgtaaaactgtctttatcaatatgcttaatggttctttgtacaattttgaaagtttctacctgtatataatggatgttaaccagtatcaataaatcacttcgtataatctt

SEQ ID NO: 12852 - DNA, 4204 bp, Homo sapiens
gtggcctatttcatgcagagttgaagtttacagagatggtgtgttctgcaatatgcctagtttcttacacactgtctgtatagtgtctgtatttggtatatactttgccactgctgtatttttatttttgcacaacttttgagagtatagcatgaatgtttttagaggactattacatattttttgtatatttgttttatgctactgaactgaaaggatcaacaacatccactgttagcacattgataaaagcattgtttgtgatatttcgtgtactgcaaagtgtatgcagtattcttgcactgaggtttttttgcttggggattattttaaataattggtttttgtgttttctgaattaccattttttcaagaatgtttggaatctttcctttttcaaaagtaggttaggagcaaattatcatacattctgtgacatttaaagcctttataggatagtgaaaaatgctggctgagtggattttaagagaaataattgtatttgttaacagtgtctttttttaaaaagttaaggcactctgaaacaaatggaaagtcctatgaaactgtattgtaaagaaaacattatttaattgatatgctgttttgtgagagaacaggcaagacagaactttgtcacttcagtgcagtacatttttctgaaagctacccataaaatcactttcatctcacctacctgatgcaaagcaggtgaaaccttaggagatgatccagtcactgacttgattgagggataagtgtgatttagaaatggaatggccttggatgtctatcagtgaagaaaaatgttctgttagaagatctctctaagagtttttttccttctgagcttccttttcaaaataaaagtgacaattgtagcattgacttgaagtgagacatggttatagataagagagtacaaaatgactctttttcctgtcaattgaaatttaaagaaaagttttaattatataaatagcaaagggctattgccaatactagggtcaaaaatgaatttgagggaacagtgggtaagaaactttatgcctgaataacatttagcagtattgtgattgaaaaattgccatattttgatgtataggacaagtcaactgagatccagagaatcctggatgtgaatgctaaacactggcccttaactcacattcaatgtattttcttcccataacatttagtatagttaatattttcttagaatttgagcccatttaagtggattaatattctacatgtgtgcccctaaagacacatttactcaatattggagaagtagataatgaattaagcaactggtctaggaaaggaaaatttgtttcaaatatgcaggaatgtttggatttggggagagtagaaggagagatttgcttgatttgttaacttctacctccaacccacaaaaaagatatttgatctgagtttctatcactaatttggatagaaaatttctaagggacatggtaatccagcattctcaaggacctttcgccaaaatgtgttttccatctatgtcccgattcccctaaattttgcctaaaattcagtatgttccttaagtttttaaaattctgagtgtgtacaaatatcttgacataatgcagttttatttttatcattctggtaaaaaaacaaaaaatagaagcaaaacacattgtattgccattattttgtatttggtaaaggttaatctaggaagttaccaactgtttaatgctatatgtattgtatacttgtattttcaggatattttattttttttgccatacagataaaatttgtaaggttgcccctttgtggcactggtgtgtaaaatacacagactatcactaaaataatagttatatatacatacaggtgtatacttatgcatgcatacataaatccttagtatagaaaaattgcataaagaatagcaatctttaataaacctttttattacattgtgatttagcagttatgctaaaatatgtacttatgctttagtagtttgtttggtcccctctagtatgtgtcactgagaaattttttaaagacatggtagatcgtgtttagaggctttgtatgtgtgtcattttaataagcaagaagatatatttagattagaaatggtttggtctgcctttgaatattgtttattttactttactagttgagacattaaaggaagctgggcaatgcctattttatttctttgttggatattttagttcatacaaagcagagtacttctttagggctggttaattggttcaaataatttttaatttcctttctagtatcttctcaagttggaaaaatatacatacagtcctccttcaccttactctgtatttatattacccataactagcaagaagttcttgttctagattttttgtttgtttagttataacagagtaacataccatttaattacaatttttagccagaaaagtccccactattttactaacttgttaaaagatatctatataattgcctggccttatatttttcagtagattagaccgtgccaatcacaatcctgggtggatttgtgtaagtcacttaacctctgtgtgcctaaacaagttgtgcttttttaaaaggagttatgtttgggcaaagcctttgtcttcaagcagaatgtcacagaaggcagctactttataagccccaatgggccatggagaccactgtcagaaatgggatattagtctagagagaaggtgatctattcccacatgtcatttctaatgttgagtttccatgactgaacaaagagaatatatttattcagcttcacttgcagatcactagtgaatgtgagatttagagctcattgagtatattgcttcaaggtacaaacccaggatgatgatgttgtcaccactgtctcttaattttgaataatagtttcctttaataggagtattagagataagaaagtatatgaaaatatactggaaatattggattcttggagaaaactgttcagtcacagatatattcttgcctagcagtgaagtgcctttattttcagcatagcaaataaatattagacctgttccaatttgatctacaatttttttctgtgtttttcaccagattgtactcctaaaacttaacaggccatcacaagcaattgtcttttgtttacaagattgatttaatatgagaggatacaaaatgtcatcgttatcctctcttatgaacaactgtagtcaaaataaggtggcacaatttaattgttttgtatcagaaatacactgacccaccttttattgagtcctgccacatgttaggtaccgtgctctgctgtggagacagagcagtgaccccaaggagctcacggtccctgaaggaggtgctagagaagagacttagcttctgatactgccaatttaatgtgagaacatggggtatactgcatcatttccattttcatcaataacatatgttttatgcaccttctttacctgaaacttactaagaatctaccagtaaacaaacatcctgtctttttgcaagtatgaatcacttaacctgctgatagttgaagaacactttaggagttttgtattcttgtatatagtttattttttccatgtgctagccaggtaaagattacacagttcttctggactgttaaattgtgcatggttttggaccccttctgctctactacagagagtgaagaagaaagtattaaagctcactttaccattccatatacttactaaaagcctgtgtaaacatgtcttaatgaatgttgttgaaagcaatgtaaatagttgaaaatataaatttatattacagtttaagaaaaccttatgaggcatcactagccactgttaatatctatttgtattcttataccttttcaatatatttgaacaaatatagtttctggcactatttttatactaggaaaaggagttactatgtatattatgcttagcttttaaggcattttaaataaccatgaatgttgatttcattactttcctttcctccatcacgagagtcatttcagatgactctttcatgacaaaatcactttaaaggaacacttacctccgattcctgtataaagtcatgagatggtcaaggtggttttccattgtgcaaattcttcacctgtcagtggtttcctcattttgccatgctttgtaaaaataaaaagaatgatcaagtaggtatg

SEQ ID NO: 12853 - DNA, 2360 bp, Homo sapiens
cttgttcgctgatatctaaattaagaagttggttcttgagtgaattctgaaaatggctacaaacttcttgaataaagaagacaggactctcaatagaagaatttcacatctccaagggacccttcctttcattttacactttgttactaatttgcagaactctattaattgggtaggatttcacccattcctagctaagttcttaaaattaaaccctttggttcgtgtttaaaaactttcaaacatctgatggctttacaggggctgaatataaaagcatttgtacttaaaggtcttgtgtattcattaagaaatatagtaatgtcttttaatgttttaagagttgatcagggtttactatgatgcaagtaataggatgattaataagggaaggtttttatgaattcaaaagtcaattattcaaaagcagggaaagattttgagagagggaacaaagtattcttagattgcgtagaagctgctaggttccagttttaatttttaggtttagttggactctgttatgaaaagataggttatgggtgggcgacaggttgatacagtcttagaaaaagcaggtaatatcaaagtattggaaagctagcatgcatgccctcttacctgggtatcttcccccttttttccttttaaactcttgagcctcctataacgaaggattatgtgtttcaaacctattttttttttactgtttcattaagtgtgcttgtgcccaaaatatttacttgtataatatctgtaacttgcttaaatacttcagcaaagtcagcatatttactcattcaacaaatatttgagccaggcattattttagacacagcagtgaacaaaacaaaaaggcattcttgccttcatggagcttacattcttattgttatttaaatctaaatgttataaaacaagaatttatattctagggttgatcagctagtatttaatcaaaaaggccacactcccatagcagctactctaagctgtagtagctaataaaaaatattaatgttggccgggcacagtggctcacgcctataatcccagcactttgggaggccaagggtggtagatcacttgaggtcaagagttgtgacaccagcctggccaacctggtgaaaccctatctctattaaaaaatacaaaaaaatacaaaaaaattagctgggcatgttggcatgcacctgtagtcccagctatttgggaggctgaggcacgagaattgcttgaatccgggaggtggaggttgcagtgagccaagatggggccactgcactctaacgtgggcaacagagaccctgtctcaaaaagaaaatattcctgttagccctaaaggctttacatgaggaatggtagaagtggtcttttgtttaaattagttgcattcagcatatatgaattgtcttaaatattttggggatactcccccgccttttaaacagggcataagatctggtaaactctctgtatatcttcctacctttcaaaatcgttcttagggttagtcaagtctggaatataattgctgactataaagttagcaattatgcttttaaggtgttgtcacatcaacctaaagagaaccatctatggaaggtatggttgaaacatctgtaggaacacagaactgggatttcactgagtttaccaaatcaactgtgtgaactgtttctgcactgcttgctaatggtttcatctaataaatgtttacttatatagctgagtttggttttattctaacaaattacctggtggtgtgattgtgaggtgattaacagttctcacatagtttactgttaggtcacacacagacttccgatcataatccatactgcctttttgagcctaaaatcagcctactaccacaattaccaaatattctgaaaatttctagtatggtgaagatggagagatcttggtgtgaaggttaattttatatgtcatcttgattatgctaggagatgcccagatttctgggtttgtccatgagggtgtttccagaagagattagcatttgaatcagtagactgaataaaaaagagccacccactccactgcgggtgggccaaccccttgagggcctagctggaataaaaaggcagaggaagggcaaattctgtcttctctctgcttgaacagggacatccatgttctatccttggacattggttctcctgattctctggctttcagacatggaccagggcccctggttctcagacctttgggtttggactggaactacaccattggctttcctgggcttactgtctgcggaaagcagattgtgggacttctcagcctccataatcacaagagccaatccctcataataaatttatttctatata

SEQ ID NO: 12854 - DNA, 1790 bp, Homo sapiens
gcattattcttggcgcacagtccaaaatacaaattggacagaagatctatattgtaccagaactatttatttcaccccatcaagtataaggttactgattgattggtccttttataaacattggtatatttccattcatgccaaagcaaaagaagtaaaagctaattaggatttaatttgttttatattctctaagatatatatttactaaaagaatttgtgacattttaaaaaacaaaaataaatattgcgtccatgttgctttatatgtagccttgccttttaaaagaaaaagtatgtgaatatgaattgacagactgttttcgtagagagagggtcttactctttcactcaggctggaatgtagtggagagatcatagctcactgtaacctcaaactcctggactcatgcaatcttcctgcctcaggcttctgagtagctaggactatgggtacattccacagtgcccagctaatttttgttttgttttctttttattttttttagagatggggtcttgctatattgcccaggctggtcttgaacccctggcctcaagcaatcctcctgcctcagcctctcaagttgttttttttctttacatttgataaactaaaagcataggctgcatatgagtctttaacatcttgaactggttgtgaataattttctggcactggttgtaagtaatatctattattataaaaataatatatgctcaaccagaaaacttagaaataagaaacacaaatgtaaaataagtatttccataactcataatccagagataattgccattctgattttgatagatatcctctcagctctcttccctgggggcagatatttcccaatacataccactttgaataggatgataggaaataaatgatgtactacattaaattaaattattgtattacatttttgtacacatcagtcattcccacgcttggctgaaaatcaggatcatctgagaaacttaaacaatttctgcattcttaatctccactgttattctattatatcagaatcgctaatagaaccaagaattctagaaaatttcctggtgattctgatgcagcctgtccactaacttgtctttgagaacaatggagatatcagttatcaatgttatttttaaccacccccttcttttttgttgttgtgggttttttcacataaacacatacattgccaattttccagggctcaaaaagtttccttttattcatattttcacatgacgtaaaattttatgtgcttcacataattgtattttagcagggtacatattaggggatggagagggggtacaatttttaagcatttgcagctgcaactctatagacttttgacaaattctttttcacactgatgtagataacagcttaacatttacatagttcttactacttgccacacactgttctaagtggtatatacatatgacatatatattaaaatgtaggaagaaaaatgtttgagtacctgatgaaaatgaatagagagtatgtaatctttgaaagctgaatactgcgtgttctcacttataagtgggagctaaataatgtatacacatggacacaccagagtgtagaataatagacactggagacttggaagagttggagggttggcagggggcgatgataatttacttaatgggtacaatgtacattattcagggggtgatggttacagcccagactttaccactatgcaatatatcaatgtaacaaaactatacttgtactccttaaatttatataaaaataccttaaatct

SEQ ID NO: 12855 - DNA, 681 bp, Homo sapiens
ggatgacatgaggaaaataatgtaattgtaattttgaaatgtggttttcctgaaatcaagtcatctatagttgatatgttttatttcattggttaatttttacatggagaaaaccaaaatgatacttactgaactgtgtgtaattgttccttttatttttttggtacctatttgacttaccatggagttaacatcatgaatttattgcacattgttcaaaaggaaccaggaggtttttttgtcaacattgtgatgtatattcctttgaagatagtaactgtagatggaaaaacttgtgctataaagctagatgctttcctaaatcagatgttttggtcaagtagtttgactcagtataggtagggagatatttaagtataaaatacaacaaaggaagtctaaatattcagaatctttgttaaggtcctgaaagtaactcataatctataaacaatgaaatattgctgtatagctccttttgaccttcatttcatgtatagttttccctattgaatcagtttccaattatttgactttaatttatgtaacttgaacctatgaagcaatggatatttgtactgtttaatgttctgtgatacagaactcttaaaaatgttttttcatgtgttttataaaatcaagttttaagtgaaagtgaggaaataaagttaagtttgtttt

SEQ ID NO: 12856 - DNA, 336 bp, Homo sapiens
taggggctgtaaaggaattaaactattcagaagggctcctaatatgaatcccagatttttatcacctgatcagcataacagaagtagccaaaagtgacttactggtctcatagttcttatttgcctacatttagagtctgtagatgcatatgcaaccaaaaaaaagtcttacttttaacaagaaatggtataaatggaaaaaaaatacaactccatagccttgcaaaatgcaacttgtgctctgtcttataaaaatggagaaaggagtcatggctctctttcttggccatccctctgtaatgaagtttataatatacttccctaataggccttttt

SEQ ID NO: 12857 - DNA, 637 bp, Homo sapiens
ttaccttcttatagagatatattatgtagaactccaggagggacattaaatcactttaagtataaactgactactcccacagttgagagaagttgtgacctgtacttgtactatggaaggaaggatatcaacgtgtgtatattgatgtttatataagtaactcttgaaggagacttgttctagcgtgccccatggtacctagtgtgtgtctgatgccggttggtgtcaaagatagagggcttcttgaaggaacttgccattccttgctttgaccactgcatgaactgcttctaaattattttattacctaaaaatttaaaatatgccattcattgcacacacccacaaatgcaaatcattcctctctgtagatgctaggatatatataaattattttataaattcttgttttaaatgtcagtgtttctatgattgtaaactattaaattcttttcctattaaagtacagatctaatctaagtattattaagttgatagccctctagtcagttatattgctattgtaaattcttgtttgttgagtaaaatgtttaaatactatatgtatctcatgtacaaagttgacatacattatattcatgtacataaaattaaagagattagattatatactgtt

SEQ ID NO: 12858 - DNA, 1219 bp, Homo sapiens
aagtacacactaacagagagagacaacaggcaacgagggagcgtggctgaggaccctcttctttgtttatactgaggcttgtttctgccacaaaggcacatcatctaccctgttatttgtgcctggtcatgttttcctttggtatgaatacaggaaaaggcttctgacagctaagatcctgatcaaattggaggagccagttattatacaaccaaatacaacttccagtttccttgaaatgagacttggcagatggatgatgcacgactccctgaaaatctcttcagcatattgctgttggatgcacaaaaatgattctatgatttaggcaactcagtgtttgctgcagggatattgtatgttgatttaaagtgcatatgtgtgtgtgtgtgtgtgtgtgtgtgtgtgtgtgtgtgtttcctggggtaaaaatttctgcagttgtaaacgtttaacattgctcccattcttcttccacagggccttagttctttagctatttgactacatattgttgacctcagtgatcctaaacgtagaattgaagaggtgtatatacctcattaaattaaataagtggttcaatctgaataagatggttaattggaagctattccttagacagatcatttctttaagatgatgagaaattgtgcgcctgcatcacaagacttgattatgaaagataaagtcttgggctgggtgcagtggctcatgcctataatcccagcactttgggaggctgaggcaggtggattgctttgaggccaggagttctagaccagcctggccagcatggtgaaaccccatctctactataaatacaaaaattagccaggctcgtggcacacacctataaacccagctactcaggaggcttgaggcgggaggatcacttgagcccagggaggcagaggttgctgtaagttgagatcgccactgcactccagcctgggaaatagagtgagcaagactcagtgccccctacccacccactccacaccaccaaaaaaaaaaaaaaaaaaaaaaggaagacaaagtcctgatgggatgatgatggctatatggctatgctgtgtccatatatacttacagaaatatttcagacatatggatttatagttaaatctgtgtttttccttcccttggatttgattaattttaatgaaaaacttaattctgacttctcaagccaattaaaatgaaaatggaatttatt

SEQ ID NO: 12859 - DNA, 475 bp, Homo sapiens
cgtgtcacggggaagagctccctgctgtgtgcctgcaccaccccactgccttccttcagcacctttagctgcatttgtatgccagtgcttaacacattgccttattcatactagcatgctcatgaccaacacatacacgtcatagaagaaaatagtggtgcttctttctgatctctagtggagatctctttgactgctgtagtactaaagtgtacttaatgttactaagtttaatgcctggccattttccatttatatatattttttaagaggctagagtgcttttagccttttttaaaaactccatttatattacatttgtaaccatgatactttaatcagaagcttagccttgaaattgtgaactcttggaaatgttattagtgaagttcgcaactaaactaaacctgtaaaattatgatgattgtattcaaaagattaatgaaaaataaacatttctgtccccctgaattat

SEQ ID NO: 12860 - DNA, 1364 bp, Homo sapiens
gaaatgtagtttttgtagctggatatataactgcctttgacaaaaatccagtttctcttgatgaagaagaagatgatggtggatcttgggaggacaactaacattttatgccctggctacagaatacagttgcagaggagcataaagttcaaaaagatcaaaactctagttccttcacaactgtcaaagctccaagcagcactgctcccctctgacagagtgagcagagtgaaggcatgtcaggtgttctcacaaaactcttgacagggctgacctctctcagtcaatatccttgtcccacatcaggattttctagagggccctgggtacctgtgcacttccttggtggccgtaacctctttgtggagggttggtgtaggataaagaatgttctattacgctgctccctcatctgtatcatttctctcctctctaattttcctgtcagttatattttggtggagtctgggtttgtgtatttgattcctatagaaagaccatcgctttcatgcatggaggaggggaatctacgcaaagaaaggctaccttactcctttctgtgactccaccaccagtctaggaatatcctgggagaagaattgcctctcaaagctgcttctataagcagcctacatcctagctaagcaaagaagaaacacttcccacatctagggctgtctaaaagaactttctgtgatgacagaaatgttctatatctgcagtgtccaatatggtaaccatataggcacatgtggctagtgaacacttgaaatgtggctagtgtgactgaggaaggaaaatttaaattttgtttaattgtaattaatttaaattcagatagccaaatggggctactagctattgtgttagatagcacggtatactttattctctttcttgtgttgtagaaccagctgggagaggtgtgggtcagtcatgggcttggtatcccctggtcttcactattctagcttgccattgaatttgtctcccagaggaaaagaaagaatggtatttggaattaaattcaagatgttaacttgacatctatatattgcacatattcctgtatagtgaatggatgacctcctgggaatagttcctgtgactgattttagtgataattgatcatgaagaaatggcagtactgctccacttcaccttcctagtgactattatgtgttcctagtcagagtgactcagcagagattattttgttctcttgtgcaatttattctgtgtcattttatttttgtaatattgtggcagctaaatgattattctgtgtatgtttttcaaaatattaggtggcttatattttttaaaaggctatgaaataaaaataaactatacgtaacacagtt

SEQ ID NO: 12861 - DNA, 268 bp, Homo sapiens
caatgaaagactgcctttgttttctaagatgtaaatcactcaaagtatatggtgtacagtttttaacttaggttttaattttacaatcatttctgaatacagaagttgtggccaagtacaaattatggtatctattactttttaaatggttttaatttgtatatcttttgtatatgtatctgtcttagatatttggctaattttaagtggttttgttaaagtattaatgatgccagctgtcaggataataaattgatttggaaaactt

SEQ ID NO: 12862 - DNA, 1376 bp, Homo sapiens
catacaaataaggtaaagtcccaaagaagtggtctgtttaaatgaaaaatgttaaaagagaattagaagttaactgtgtatgtactttaatttcaaatgcttttttatatctaaaaatatttgagatataatggctttttaaagtaatgcttctatttcttttgacaaattgaactttctaaaactaaaagagtctttttatttttaaaacacaagtagaatgatttaaataggattttaatgaatttttggcaagtggctgttttaatttttaaattgagaagtaatatgtggaaaattaaaatatattcaaatgtattacaaggtacataaacacataaacatgtagaccgctttataggcttcaaaatgtatttttatatattaccttatttgatcttcacaactgttgtaaaatttgtcaaatcatataagaaaactgattctcagtgaaattttgtgattaagaggacatgctaatattttgtaaagctgggaccagaacccaagtactggtacttgctttgtgtcctggttactatgtatgttgccagctagtggaaataacctaccaattgttttttctaggagataggattgatttgcaactgatattccttttgcttggtagtgttttatgactctgctgcagtttgtggaaatgctggacttggctcagtgctataaattgtagccaggaaataagaagagcttacacagagtcgggggatcttaattagacatgctgtaaccagtggagctattcagcgtgcttcaagtgaagagtgcagaaatagtgatgccatcttagattttcctacactagtatcttctagatctctttttatcatatatgacattaaggctacagaagttttgtgcattaatcttaattcatatttattaatttcaagggaatattgaaaggttttaaaatggcatacagataatggaaaataagctttatgtttcaagaagggcagactcacgaattttttagaaaacagtgcttcttaatgatatgctattatacttattagttatgtgcaagctttgtatattcttatatttatatataaatataaaaatttgttaaaggcacgtatagttaagagagttttattttaataaggtcatattgtttttactatgtttaaaaaactttacttctgaaaggaacataattatatctaggtcactagaacgtcattgtgttttttgttggttgccacagcttggggaaaaatagaaaaaaattaatgactgtatttgaatattttgtaatgcactgctatttattatatatatcaacagtagttcaaggtgccatcttaaattaattgcatcttcattaggaaaaataaaaagcataaaac

SEQ ID NO: 12863 - DNA, 413 bp, Homo sapiens
tggaccattctagaataccttgccatatttcttttcaactggctatttcccaaggatcatgtaagagaagctgggcagaaagataaaaagattacatcagtcatgattcatgaaccagtcatgaatcagttgacaacaaatttattgcacagaatatttctgtattttgtcaagctacttttaatatttaattcttttacttgataaaatgcaagtatattaagaaataagtatactgtgatgaattaatctatatatatgaacaaacctggtataaaatgaatgtaatctatgaacctttagagcttagactgtatttcacacaaataattgtcatgttttgttgctattgtgaattataaaaatgcagcatttaaaatttttaaggcaaaatttaataaaggatatacagt

SEQ ID NO: 12864 - DNA, 458 bp, Homo sapiens
tgcagcaacctggatttggctttgactatagcacaaatgtgggcaataatatttctaagtatgaaatacttgaaaaactatgatgtaaatttttagtattaactacctttatcatgtgaacctttaaaagttagctcttaatggttttattgttttatcacatgaaaatgcattttatttgtctgctttgacattacagtggcataccattgtgttgaaaagcccaatattactatattattgaaacttttattcattttagagtaaactccacatctttgcactacctgtttgcctccaagagactatcagttccttggggacagggaccatgtcttattcatctttgtgtctccagcatctagtacagtgcctggtatatagtaggtgctcaataaatgttgaaaccaactgaactgccaacaaaataaaaataaaaagtcttcactatgtagcat

SEQ ID NO: 12865 - DNA, 281 bp, Homo sapiens
taattaagtgcttcccacttaaaacatatcaggccttctatttatttaaatatttaaattttatatttattgttgaatgtatggtttgctacctattgtaactattattcttaatcttaaaactataaatatggatcttttatgattctttttgtaagccctaggggctctaaaatggtttcacttatttatcccaaaatatttattattatgttgaatgttaaatatagtatctatgtagattggttagtaaaactatttaataaatttgataaatataa

SEQ ID NO: 12866 - DNA, 81 bp, Homo sapiens
ggatctaacttgcagttggacactatgttacatactctaatatagtagtgaaagtcatttctttgtattccaagtggagga

SEQ ID NO: 12867 - DNA, 177 bp, Homo sapiens
attcacatttatatgtttagaaacatgtagactaacgaatgacataagaaatagtggacattttggattgattaaacatctgactgtgattttctaatgtatatgatttccatgaagaaattttgtttctaaacatgcacattttaaaagcctcttttcgaataaagcaaatgcgtg

SEQ ID NO: 12868 - DNA, 3202 bp, Homo sapiens
tttcctattctgtgaaacagaagacattgtgatggagtggttcttcagctactggatggaaacatatgcctgttgatttgctgaaaaaacaaaaaaaatgaagaatgtgatctctgcagtacagttaccttaattactgtaatgtgcctaaatagtaaggctgccttctcaatgtaaccctctgtgcttaaaaaatttcattttgtgtgctttgtattcactacacaggaataagcactttttaaaaatgcagatacatactgcagttccctgataaaagctgaaaagaaaatttgagtattttaagttaagatgtgataaaaaatgtgcatgtgccataatcaaatatatatgaaaaggcagtgttccttgtatttatttttttttctttttgtggcaaaagaaacttaaacatactgtttcagtcacattgcattgtagtgtatggcctgtttcttgtatctttaaagacgttgctcaataaaacaaatcttgcaactgttctatgttcactacaccttcagcattggataaaaatcattttctatataaatatcacattgaaatgaaaaaatgatttcttggcagtttaaaaaaaatattttatagtagtttagggagctgctttaagtagtttaaatctggattttcccagtagaattcttctcatctctggctaaacatgtcagaacaaacaaccaaccagtctgtaggcagaacaaagtcctatttcatccgctgggatacaatttcatcttccattcactttgtcattccacctctaagaagacagactatcattcctgaggcatgaaaattctcagggacaaagccatgcctcagtcacatgtgtgtgcagagagaaatgcacctgtctatctaagggtagatttttgatccctgaataattcattgactaaactgacctcttcctcctggctaaataaattaattttgctggcttctctctcagcggtttctattttgtaaattgctgcatgaccaaaatagccccactcaaaatcaattggattaattttaatggtttggttggatgaatattctggatgaatataaaatgtgctgcccttcacagatgacaccactcccctgtcaatcatagcacatgtgtactttttattgttacttaatagtgatggatttgcacttttctatcctcatactctttcctgttttcttctttgtacaattgcatgcaggagggctggatgccagggttaagagagaaattcatgacaaggaaggtaaaattggttcaaatgagcatgtgtcccacagccttagtctccttactcttaaatcagtggagctgtagcttagatgggtcgtttatatgtctggaaaagttgtcataacagtttagaagccaaggttgtggatttgatcttagaatgggcctgttaatcttatagaacccagaaattctgttcttttcatgtactgttgatgaggaatgaggaaagagaatttggagattcagcacaaaaccattgctacttctagaacaaaatctttagaatatgtcctaataacaaaggtcagtaatgtcatcttcatatatgaaggacacatgtgatacattgttcgtggaaatagaaatgtataattatgataaatgtttcacttgaatcttattgtaaggcttttcttgcttttattttttaaagtcagcaaaactcattttgtctgtcatctataagtcatagtgaggactacgagataagttgataagttcaattgatattaaggtgacatggcaatattaataactcaaatgtgaatgtttcaagtattgaattcttgtccctatgggacatttattaaataaaattaatgggactcttgcaaagtagccttaaaagtgttaatgagtctattaataaatatgaacacatactattattagaaccaactttactcatatctcaaatacagtacatttacattactgtagaggatgaagctctaatttctattacatgtaattttctttagaaagagaaccctgaaagctgccagtttttctattaactttgaattattgaaattgtatttatttaattttattgtttttacaaaattgcaccttgtgtccaaagggcgaagatatgacattgcataagggatttatgtttttcaaagagctaactgttttcatatccatactatatacacttgaagcaattggtaggaagagaacctattggaaaaatacgattttcaaaagtaagtattcctcgggatgtttttatataaattatgttttggaatagaacataaatgactttgagttaggataaggatgataggatgggtgctggagatgccctgccttgcttatttgtttctgtgggggatttaatactataaatgaaaatggcttctgctccattaaaaagtaaaaattgtcctccaaatataaaactccttaatagatatttttgaaattaaaatctttaaattttataaatcagctgttgccactacacaactatgatggcatgtgcttataacatttttataacattccgtctgtgtctattccctaaatatcatgagtttataataaggaaagtgataaaaatacagtaatgaaataaaaatctgaatgtttctaagaaaggttttggaaggaaaaatgacctgaaatcagtgcgtactgcaaagtacagccaataatttttgttctttgttttcacccccaccctcactggaattctcaccaaaaatagtttgatacttaaaaaacagaagtaaatacttttctcaatattgttttggctatgcaaatatttgttttgcttaatgtcctccatttacacttctcagcaaatgtagttgcaaacaaatgctttctttttatttttcccttggtttgaggtatgtaaatagccaaaaatgtacattgaatttcacattgtaaaagttttattttatcccttgtatgatattactcaaaaaatccctgtgtatatgaaagtgcataataaatatatttgctttacagagaagatcttgttttaattttgtccttgaaccagtagaacatgcatgatatgcatatagcataaacaactgttagttgttttaagttattatcttaaataaatcctgagcaaatgaatttggaaacattttgcaaagaagaaagtgaaatataacactgtccaaaggaaggtag

SEQ ID NO: 12869 - DNA, 208 bp, Homo sapiens
actagctaagactgtgatggaaactacttgctgtgtggcacttcctggtctaaagctctgctagacaattgcggtgagccagtctccaagaatcagactacagatattgcagattttgaagaacaagaacatatgttgaataacagagagaattctacatgtcattgtgaatagtaggttatataaaaacatactagatgataatttc

SEQ ID NO: 12870 - DNA, 1174 bp, Homo sapiens
actttgtaaacaaccaaagtcaggggccttcagaactgcaattcttactccctttcacagactgtccggagtctttgggtttgattcacctgctgcgaaaaacattcaacaaattgtgtacaagataaattaatctcactatgaagatttgaataactagacattatttatgctgccaaactcatttgttgcagttgtttgtaatgtctagtggggcttcatcatcctgaaaagaaggagacagggatttttttaaagagcaagaaagtcacaatattacttctttccttccttttttccttctttcctttcttctttctctttctttctttttaaaatatattgaagacaaccagatatgtatttgctactcaagtgtacagatctcctcaagaaacatcaagggactcctgtgtcacatactgtgtttttattttaacatgggtgagggaggcgacctgatcaggggaggtgggggtacacatcaatttgagttgttcaggctactgaaacattaaaatgtgaattcccaaacttttctttttggctttgtcagggaaaagaaaaatatctttataaagaaatctttggaaattaggagaaggaatttcaggtgggtttaagtcagagctagttccccaacagaaagatcatttgaaaccagtttttatcccttctctttccttccctttccctaaatcaaatcaatattaattgtgccttatttcacttaacatagacttgaattatttttagggaaagcccctataatgaattcagaaatcactacaagcagcattaagactgaagttggaatattctgttgaccataaaaccttgatatcattctgtgtatatagaatgtaaaaggaatattacagtgttaactgccatatatgtaatatacacaaactcaattagcattgtaatggccaaatgcattcccccatgcttttctgttttcaaaaaaattgaaaaacaaatcaactcttatccccaacagctgcctaattttaggagtctgaccctccacatctcactggtgtgggtgcatggggctgtggagtgggtgtcagtatggatgtgtctgaatgtgtgaggccttggaagggactctttctgcagatactgtaaatacaagtaccattttaataaagcatgtacaataaaccaa

SEQ ID NO: 12871 - DNA, 480 bp, Homo sapiens
aaatattcatagttcactcacagaactttagagttgggaaagcagttggactagaagtgtattgaaatggtaaagcctgcaaagtataatagttaaggcttgtgttatttcgcgtaagcattgttgttctgttttgagggttattggaaaacagagcagtgaccacttcctgtaagtaaagaaaatataatcctatattgagcttcagtggagaataaaccagctgagaagaactcattgccttcatcaatgtgtctgttttttaattcctcctttttcccttgaaaggacataataattttcaaactatgcaaatttctctttcataagaaagagtttttaagaaaattctagaatttaatatttcagtttccaagatttgagaattttacatctaattgttacttctaactcatttttaaagttcctaagtatccattttattatgaactcataaatgtaataaattgtgcactttct

SEQ ID NO: 12872 - DNA, 1348 bp, Homo sapiens
gagattttagcgaagcatttttgtttccatgtatatggaaatagggaacaacaacaacaacaaaaaaccctgaaagaactggcattgccaaatagttgcatttatcataaatgtgtctgtgtatattgaatattaaatactgtattttcgtatgtacacaatgcaagtgtgattattttaatctgtattttaaaaatacatttgtaccttatatttatgtgtaatttaacaaacaaattttatttttttactcccatgacagacatgtttttcctagtcgtgtagaaactagccactgttcaaatctgatacactattcaaccacaaagtgtaaaggcactgcttagattagttttgttggggaagaattattatgttgtatgaacaaccccactgaagcattatacaattcttaattccattaagtgatcccactttttttcaataactttttagaaattaagaatcattaaaattgttaagctattttattgttattttctctactttctactagccccaatagttgaactcttataggaaaatcgaaagataaagtgaaagtttatttcaggactgagaaatatcttgaaggttatttattagatgactatctcaaatgaactttttatagacaatgatgaaaacagaattaaagtcaatgtttcctgactcccaggcccctactattccaggccatcacactggcctgttccggagaatatttctctcacaatattattatctacttataattatggtaaacaataaattttattccatccttgtagtatgaaacatgctccaaggaaatggaatctgtcctttaaatggataacagtatgtgttctaatggcataaaatattactggataaaaacagttgtgtcagtgtctctcctaaggtagtaaatataattgacttattctgaacccattctattttgaatctcccctttcctctcacaatacttgaacattttaatcttttggaatattgtctttctttgttataactattcatttttagcttttgtctccagtgcatgatctcatatttttgcttttatttttagtataagaacatttataaaatcatatttttgttactgcaattgttttatttgttgtgtggcaaatgagaaatcctttatttattgtgctgtgatctctctgtgtggaatgccttggtgagagagatgcttattatgactattatcatttctgaccaagcttctattaatgttatttctaataatacactatcttgattgtactctccagaaaatttttctgtcagtgaaaataaaagaaaaattaaagtaaagctaaggaactgtctataagtc

SEQ ID NO: 12873 - DNA, 7860 bp, Homo sapiens
actaatggacttgagatcttggcaatctgcccaaggggagacacaaaatagggatttttacttcattttctgaaagtctagagaattacaactttggtgataaacaaaaggagtcagttatttttattcatatattttagcatattcgaactaatttctaagaaatttagttataactctatgtagttatagaaagtgaatatgcagttattctatgagtcgcacaattcttgagtctctgatacctacctattggggttaggagaaaagactagacaattactatgtggtcattctctacaacatatgttagcacggcaaagaaccttcaaattgaagactgagatttttctgtatatatgggttttgtaaagatggttttacacactatagatgtctatactgtgaaaagtgttttcaattctgaaaaaaagcatacatcatgattatggcaaagaggagagaaagaaatttattttacattgacattgcattgcttccccttagataccaatttagataacaaacactcatgctttaatggattatacccagagcactttgaacaaaggtcagtggggattgttgaatacattaaagaagagtttctaggggctactgtttatgagacacatccaggagttatgtttaagtaaaaatccttgagaatttattatgtcagatgttttttcattcattatcaggaagttttagttatctgtcatttttttttttcacatcagtttgatcaggaaagtgtataacacatcttagagcaagagttagtttggtattaaatcctcattagaacaaccacctgtttcactaataacttacccctgatgagtctatctaaacatatgcattttaagccttcaaattacattatcaacatgagagaaatcaccaacaaagaagatgttcaaaataatagtcccatatctgtaatcatatctacatgcaatgttagtaattctgaagttttttaaatttatggctatttttacacgatgatgaattttgacagtttgtgcattttctttatacattttatattcttctgttaaaatatctcttcagatgaaactgtccagattaattaggaaaaggcatatattaacataaaaattgcaaaagaaatgtcgctgtaaataagatttacaactgatgtttctagaaaatttccacttctatatctaggctttgtcagtaatttccacaccttaattatcattcaacttgcaaaagagacaactgataagaagaaaattgaaatgagaatctgtggataagtgtttgtgttcagaagatgttgttttgccagtattagaaaatactgtgagccgggcatggtggcttacatctgtaatcccagcactttgggaggctgagggggtggatcacctgaggtcgggagttctagaccagcctgaccaacatggagaaaccccatctctactaaaaatacaaaattagctgggcatggtggcacatgctggtaatctcagctattgaggaggctgaggcaggagaattgcttgaacccgggaggcggaggttgcagtgagccaagattgcaccactgtactccagcctgggtgacaaagtcagactccatctccaaaaaaaaaagattatatatatatatatatgtgtgtgtatgtgtgtgtgtgtgtgtgtgtgtatatatatatatatatatatacacacacacacacacactttttatatatatatatatatatatatagtggaacttacaaatgagagtaatataatgatgaaattttgaactgttatttataaacatctaaggtaaaatggttagtcatggccagagtatgtttcatcctttaatttttgtccatttgaaaataaggatttttgaaagaattataccaattaaaattattaaaggcaaacatagaattcataaaaaattgtccaaagtagaaatgatgacctataatttggagcatttccaattcagtaatttcaattttgctcttgaaaacatttaatatatatccaagactgacatttctttagctgaacctaacgtttgggtctctgagtgaatttataataactccttccttccttagcatagggttttcaaaatttgatttataattcctatttccagtaaatattgttcatttgtccacatctctccctatgatatgttgctggaggtaagaatttctttcatattcctattttttttttccccatagactaggctcatagaatttaaacaagcaaattttcctgagctttttcttgccaaatgaaagaagactggtaaattctcatagagaggtttgtgtagttcttggctcttcctggggttaatgtgcttatattcacagtggcaaattggtctcagactttaatttatttatttttgatttgaatttctctttaaaagtatcaatttaaaaggtaactagaattattctttctcattttcaaaagtgatttttgcattattaaatttccctgccattgtaatgccatttcacgcagaaaaaaagtcagccagtaattaagaaaaaaagtgatggagattaagtagtattttggcttatttttaggactcatcatgagaagacacagttcctttaatcaggaaattaatatccataattttcactcaaaattgcagtatgtaaagcagattctcaaaaactctcctgaacacttatttatatatatgtttttatataagtaaaatttttctcatatttttatacgatatgcacacacacacatacatgcacatactacttactacatgttctgtacttgtactttgtaccatgcatattcaaatgtttatatacataagtttattataacataaacagtaaaagtaatgaatactgtttaaaataactaatatagtattttttaatttttgtggggatggattctcaaatacttgtgattttaaaagattctaaagctaaaacacaacttgattttaaaaagaatgattctccttacacaattataaatatttgcagtaaatattttccttataatactgttttgaccccatttaaaaagtattagattatattcctttgatccaatgaaaactgaaccttataaatggttagctgaaagtagaccttattcttgtccttctttagaagagtaaagatttgtcctagggaagatggctgacttcggttcccaacatgcgtatgcatttagactgtagctcctcagccctgtggacacaaaatttggacagcttattaggttacgttagcaatgcatgacggtttctccaacactaagatattcacgttgaaacagatttcctgttcgtcttatgtgtctggtaaaattgtttccccaattacaatttgacatatcaatagagggttaacaagagtataattacataacagaattcctcatgaactgtaatcagtctacaggaaaatcattattttatcttgatttgcagatgaatatactgctaagaaagggagcaactctgacctttgttaaagttgatcttttgtaattgaggtataaggtatgaaaagataaaaaaccgaaggccagagaatcaggaaatgaaagatagtatggactgaaggtaacaatattttaatgttatgcaatatagtcagagaaatattaaaaattagttgtttgctgtgcataggtggatctcgcaggaagctaatgaaacctaagcttcagtgcctctcacttagacatgttccattcgaggtcctgaacctaactttgtattaggaattctgtactaattttgttgaagaagaccagcaaagttgtgtacacttctacccccacaaaatctgcattgtccatgtgagtaaagtaaaataattcctgttatttttttctgttagaaataagtatggaggatatgtttttaaaaatttatgagttaattgaaatatccatatataacaagtgactttctcacaatatatatgatgtgatatatagggagatagtttcactttcatcatattttatacgttgattctgaactatagaaaaataataaatgggattttaattatagctcttagttgggaaagaaatatagagagatgtgggatttgaatgcccatgaaagacattttattttacttgaatatattcttgcttcactttaccctccataatatgttgtacattagtgctgatcaagtttacagagttacattttgctttcctaaccattcagtcaggaattaaaatatggcattgtataacaactgggaagaagctcatagtggatataaattagagtagataatgggtcaccttgatagcctctgtttacattacttgtatatgggcaaaataattattacctatacgtgtatttaagcttaattttcatataaacagtatttttaatctatgttaaaatagataatatctaaaagtgtgatctctaggtagtccttagtttattagtactgtacttcaaaaagatttttaaataggtccggcacggtggctcatgcctgtaatcccagcactttgggaggctgaggcgggcgaatcacctgaggtcaggagttcgagatcagcctggccaacatggtgaaaccctgtctcaactaaaaatataaaaattagccgggcgtggtggcaggcgcctgtaatcccagctactcgggaggctgaggcaggagaatcacttgaacccaaggggcagaagctgcagttagccaagatcgcatcattgcactccagcctaggggacaagagcgcgagacttcatctcaaaaaaaaaaaaaaaaaaaaaaaaagatttttaaataatagctaaaggtatgctctctaggtcatccttagtttattagtactgtacttaaaaattattttttaatagtcaattttgggagataattatttctttccttatattttccaattagttggtgtctaaaaataaatgttttgtctaattttagatcaggtatacattcacaaaagcataaatcatagtctcacaggaaattcaccaattttccatatgtcgtgagataactgtcctttctacaacctcataacaatgaatttatataattacctagattttcttagtgtgaatctacccattagttttattttcttggtagttatttttttccctcctctctgttactattggccttaaaatacacagaggacggttacagtgtcctaatagctgttacatgtgtgtgtttcagcgtacttgaatcaagtgtacatttatagtaccaataaccgcctttacagctttacagttaacaattctctcacaaaactgtagagcattaggcatctgagagccatagagggccaactttgttccagagtgaacatgctttttttcctcaacatatacactactgattttttttaaaagtatgactttcaagtgaattaatgtattggttaggagaactgcttgctaagtccttattacctcttgttaaagcctcagaaggccgtgctgaaagccagaggggaaaaaaagagtaatgcacaggtatctcttttgcagtggtgactgtattttgagtaccttgtgtgacagggtattattacagcatcttgtgggaaaacctattaggcctttgcatgttaaagctgtataatttgttgggttgtgagtggtctgacttaaatgtgtattataaaatttagacatcaaattttcctactaactaactttattagatgcatacttggaagcacagtcatatcacactgggaggcaatgcaatgtggttacctggtcctaggtttgaactgtcttatttcaaaagatttctgaattaatttttccctagaatttctccttcattccaaagtacaaacatactttgaagaatgaaacagattgttcccatgaatgtatgctcatactcgactagaaacgatctatgttaaatgactgtgtatatgaattatttcaagtactaccccaaataactttcttattgctctgaaagaagaaaagcaatgtaaatcactatgattattgcacaaacaaccagaattctccaacaattttaagtaatctgatcctcttcttggagaaaattgttacctaatagtttttccttatgaatgttattactactggtataaatcaaatttctataaatttcctacttaagtcttaagaactgggttcttcctttgatgttattcatgttcagaaaggaaacaacactttactcttttaggacaattcctagaatctatagtagtatcaggatatattttgctttaaaatatattttggttattttgaatacagacattggctccaaattttcatctttgcacaatagtatgacttttcactagaacttctcaacatttgggaactttgcaaatatgagcatcatatgtgttaaggctgtatcatttaatgctatgagatacattgttttctccctatgccaaacaggtgaacaaacgtagttgttttttactgatactaaatgttggctacctgtgattttatagtatgcacatgtcagaaaaaggcaagacaaatggcctcttgtactgaatacttcggcaaacttattgggtcttcattttctgacagacaggatttgactcaatatttgtagagcttgcgtagaatggattacatggtagtgatgcactggtagaaatggtttttagttattgactcagaattcatctcaggatgaatcttttatgtctttttattgtaagcatatctgaatttactttataaagatggttttagaaagctttgtctaaaaatttggcctaggaatggtaacttcattttcagttgccaaggggtagaaaaataatatgtgtgttgttatgtttatgttaacatattattaggtactatctatgaatgtatttaaatatttttcatattctgtgacaagcatttataatttgcaacaagtggagtccatttagcccagtgggaaagtcttggaactcaggttacccttgaaggatatgctggcagccatctctttgatctgtgcttaaactgtaatttatagaccagctaaatccctaacttggatctggaatgcattagttatgaccttgtaccattcccagaatttcaggggcatcgtgggtttggtctagtgattgaaaacacaagaacagagagatccagctgaaaaagagtgatcctcaatatcctaactaactggtcctcaactcaagcagagtttcttcactctggcactgtgatcatgaaacttagtagaggggattgtgtgtattttatacaaatttaatacaatgtcttacattgataaaattcttaaagagcaaaactgcattttatttctgcatccacattccaatcatattagaactaagatatttatctatgaagatataaatggtgcagagagactttcatctgtggattgcgttgtttcttagggttcctagcactgatgcctgcacaagcatgtgatatgtgaaataaaatggattcttctatagctaaatgagttccctctggggagagttctggtactgcaatcacaatgccagatggtgtttatgggctatttgtgtaagtaagtggtaagatgctatgaagtaagtgtgtttgttttcatcttatggaaactcttgatgcatgtgcttttgtatggaataaattttggtgcaatatgatgtcattcaactttgcattgaattgaattttggttgtatttatatgtattatacctgtcacgcttctagttgcttcaaccattttataaccatttttgtacatattttacttgaaaatattttaaatggaaatttaaataaacatttgatagtttacataat

SEQ ID NO: 12874 - DNA, 1266 bp, Homo sapiens
aatagcagctccaccatggacttcaggctgttagtggcagtactgacataaacatttgcaagggaagtcatcaagaaaagtcaaagaagactttaaaacatttttaatgcatatacaaaaacaatcagacttactggaaataaattacctatcccatgtttcagtgggaaatgaactacatattgagatgctgacagaaaactgcctcttacagtaggaaacaactgaacccatcaataagaaaaaggatcgaaagggaccaagcagctcactacgatatcaagttacactaagacttggaacactaacattctgtaagaggttatatagttttcagtgggaggggttgggatgggtaatctcattgttacatatagcaatttttgatgcattttatatgcataccagcaattattactgtgttcgcacagttctcacttaactggtgctatgtgaagactctgctaatataggtattttagaatgtgaattgaagaatggatcccaaaaacttcagaaagaggatagcaaaaaaagatctagtgcgattttatatatatatatatatatatatacatacatatatatatatcatatagcttaagctgatttaaaacaaaggccttagactaattttcgattttctttcttgaaataagctaatggcttgtttgtgtaaagcttttttattaaaagaaaaattttaaaaatcttgtacctagcacagtattgttatagaatatacatgtaacattttatatggtagtttaagtctgtcagtttcttaattgtggacaaattaacagttggctctggccttttgctgtaacatgcctgtgtcactcacttagccttggcatttgtgcagacataccattttcagttctgctgtcacttggaagttcaggctcagcatgaatttttggcaggtagctctaatacctggagttttctttgtttttttttcttttttttagttgaagtttatgagggaaataccagtgttcagttttgaactataatagtttgtatattcaacatttgaagtatattctattttgttgtactcttgtttcaaagtgtattcaagtaggttttctgaaatatagaaatgaaatttatcttctgttttggtctctggtgatattttaaacaatatttaaaagtcagtatagaagtgttttagttaggaagtgataaaacatctctcttctccttcccaactactgcatgaagaaattctacttccattatattaatatttgg

SEQ ID NO: 12875 - DNA, 436 bp, Homo sapiens
tctccagccggtagacatttcagcaacaaatgccatagggtgtctgataagtgcttttgtgtttttagtacacttagtttaaaaaaaaaaagacttattttctagaaaacgttaatgggtcttgaagatttttggcatccactgatagattttaggactgagagacttgagattgtacatttcttactactcttctactgtctgagatcagaatatgacattgcagtaaagagcttaaatagtttcatctttggtttttttttctagacacttttcttttatcccagtcatctctgaatttacattttatattaaagaaattgagctatccatacaacctgtatttactttaatttcactatgctttcagcttactttattgtatgatatgtaggtctaaaatatagtttgagtcaaataaaattagaaaagcttt

SEQ ID NO: 12876 - DNA, 156 bp, Homo sapiens
gtatgctccgtatagtgattgtagctgttcctctggattcaccatctgttgagttgtaaatgtgagagaaaaagttatatgtgaatatatatcaagccagcatttgtattttgcatcattaaataaaaagaaataaaaatacttctgtattcttca

SEQ ID NO: 12877 - DNA, 5624 bp, Homo sapiens
aaggcctggctttggggttcagagacctggaatagaaacttggatctatgcactacgtttatctgacaatgggacaaccagggactgctcatgctgtgacgtcacatcctctcaccatgcgttagcaacgactttctcgcatactaactaggtttgactgtattactcataccagatttaaaattagctagccttgcaacaacgtcctactgagaggtattgtcgagcatttgacataagacagcgtgatgttctttggtggttcaagtctaaatctgtaccacattcggagatgccaaatgattagactgaaacagggaaacggggtttttcagtcatttttagtcagtggtttttccatagtgcttttttcctatggccagtgcaaattgtgttagcacacttgcatatgtgccgtattaagggttgacaattactacatctttattctctaaatgtagtataatttgccttttaacctttgatctgtatcttgcaatagaatggctttggtttttttcttagtaaataggagcccacttctaaagtcatttcacccctcagccctattctctttcttagataccctttacaagagaaaacttccaaatggatttttgcatcaatagcagtgtgtaggtctctctggttctttctatatcatcattttattattatgtcctaatataaagtactggctcatagggccagggtattattatagaatattattctcgcatgtaaacaaagatatctttgctttaagatgtgagaagaaatgaatttactttgtttgcattaagttatggaagagttgtaatatatactttaagaaagaagagaagaaaactagtatctctaagcggtaactatggcaattttgcaatattttcagtagtgctagtaattttttcctccttgagtacacattaaatgtacataacatagcgcggtcaggcttgtggcacagtgcattgaattcaaaagtcaaacagcaaatttgaattctaacagaattcaaaaaaaaatttttttagtcagtactactaaggcagacacactgattactaggtacaaatcaaaccttgatgctaaaactcttcatcattgtaatttcaaagcacttacctgcttcaaaacattgtaaactaagactgaacacctgtatagtttaaaagcaacactatcaatagcatttcagccattttgccagccatgtgtaatcacaactgcagaaataaggagaaaacccctgtttttttagtttagctaattagatctgtaacatcactgggattgctctgaatgaatcctgagagttttgttttttataagcaccctcaccacatgccatagctttgtctcttttagacacctcgatgcagcggctggaaggactggagagcagctgttgtgctgatctgtagctgtcagctgtgattcctgtcacctgagtcagtttggtctggaaagcgaaggccttccaagctgtagcagatagtgagctccagctgatgagagaaggcttcagtggaagaagagtgaggacataggcagaaggaagtttgctatttcttgtcagttgcacattgctttatgaagactacaacaaaagtgcttaatcccaggctgctcatgactttcatttcaggtggcccttgggcacattgacagagttgcccttcccttctttgcaacaccaggcttcctagagcacccggttgcatgctttgcagctaggtggcagtggtttcagggagatccagttggatccctgcttgaaagcttaagccaatggttcacccatgagaggaagttgtcagtgcttccaggaagattgcccaccaaaggaactgaatagtttttagatttaaaggcaccaggatagggtcactcttactctgtagaaagagaccgttctatacactgtgacggatgggccagggcctctggacttgcattctgataggtgctttaatttaaatgtgcccaaagggagtgactgtcttcaggagaaagatggcttgcattaacctcgatcaagtgggttgtgcagccaggtcagggaatacggtcagggagaggatagtgctggtcatgcccccgatgcagctatgctctgaatgatttcattcctgagagtgatagcattctggtcctggctgcagtggggtacaatttacgtcctaagtgggggctactctaattatcccattcaaatggaatttttttcaacattggatagaaggaattgaagagttgtaagtagtgattagtctgctaatcagttcttcagatgagatattgaatggtaacactctgagcttaaaactcagcagtgtgtctgtgacctccacgcaaatcagaggaagcaatgcatccacgctgagcctcaccatgtcttcctcccaactctcttcatactctctgtgtcttccagctcttctttctctggccggctctctttcctcttctctctgcatatgtgagaacgcctgggcatcctgggtaacagcagccccagctgccctctcctgttccctgttccaagtcccctgcactgacctttcttgagtctctctggctctgtgcatgtctttgggactctgctcatctggcttttcctctgtgtgtgcctctctgtttgcttatgtctctggctctgtcttccccacccctcccctcacacacacacatactcccaaatgtaaggctctgtggcaggttggaatcggagtaaggcttgagattcactgagttctgtaggtagggaaagaagtcaagggagtggaggttctataaggaattaacagctgaggacggaagggtttgtttcccgtttgaacctaaacgcaagtggaaaagaatactcagaatgtatttttctactttacatctgctggggaaggaaatgtgtcaggaagccgctgcatctggtcatttcatcgcatcagaatcacagcagacgtggaagattccatgtggtggggaataaagaaataactttatgctctcctgaaaaacagcgggagcctatgtgtgtgtgcgacactgtaatctcaaggagattcactcagagctgtctcagtccaactcctgcatgaccagatcttcccttagcatcttttctgtgatgaaatattatcttgtgttagagttaggaataggaactaacctgtaggagcatgtccccaaatggacatttgaatggactaacaaaaacaactggaaagactgaatttccgacacaaaggaatgatgggatcaaaaagaaagcagtgaggagttcttgagtcttgtagtacctattcttattttaacttgcttcatccttgatctacctgagacactaagaaggaaattagttttccaagagctctttgaacctgtctaggactgtagttaaacctatttgccctatgggggttcttcacactcgaaaaactatttccttatcaccaacgacccacccagaaaggccaatgaggccaaatgtaacaatttttaacatttaaatataactattaaaattgcattaattgtgaacagtgaattaaagggttgtcttctccaggagacagtatgtggcacttttcgtaaatttcatttaatatataaaaatttaaatcactcactgcaacatgcatttaaaatcttccaagaaggtagaggtatcattttctgttttgctttgttttaaaacagttgcctcaagcttctgtcttaagagtagtgacttagaatccagatatcttttgttttagaaaaacaagcaaaactatgttgcaagactgacagttgtaatgtttatttgccacagatcaaaggttcacaaagtatatcaaatttacatctacttggggtaccttgatagattattattgtttttcttttatctttcccttcaggaatttggaaactcgttgtcactttttttaattttaaaaatactaaattgtaatagttttcttttgccaaatgtgtgcgtacatattcaaagcaatgaaactatttcaagccatacaaccacaggggtgggaacccttttcacaaattttaatgtgtttgtatgtaaatagatgtttgtatgaaatattttcatgatagaatgaatatatttaaatgaagttgaattattccagtgctacttaaacacattacaaaaattttggtgagaattatctgagtctattgagatgtaatgcagatcaattttgatttttaaaaatcaaaagcctacaataactctgactctcagcaacttcctcggcgttgttgcacctgacgtggagagagctcgtaggcttccccagtgcctcagccgcttcctggtggaagttaggtgctaatggaggtgtgttcaccttttagtgatatcactgcaggcctttgaggggcctgagagtgaatcagaggcattagagacaccggtgcagttatctggagcacaatttctttgcagggcagcagaatcagaagccagacttggccatgtgaacctcgaaactcggtttcccggccgccatcaaccgccacccttactgcctagtcacacacgtcagggaggctgccctcagtggagttggggttgagaccccagggtgggacttcacagttttgccagcaatctctaccttctgacttctgcctcgcagagaggaaggagaggggagcatctggcaaggggcccatttctcagcacagtacatttcctgtctcagctctggaagactatgcacccaagcaccaaacttccaaccagagagagagacgtcctccgataacaaaaatccttgcttcctctgtctgtgactttacacacagttgttcaaagttgttaaatgtcaagagtcaatcacatccctaggacatacctcccaactctcctgactcttatgttattgaaaaaacaaacaaacaaaaactcctttatgatgatattcaacttgagtggggttttttttccactttggtcctggatataatgaaatgatacatattaggataaattttcactgtgtatagtagcaatacgaacacacatgccaatgtatcaacatatctacttggttacattttggtttatgataattaaccttgattcatgtattgggaagctacagggactacgtaatacctgcttatcacataggaaaattatgtccatgattctgagctcccttcttcaaaagtttcctcctgggtgttctatgttctctctttatcctgaaatacatttattaggttgtgaggtatgttgaagaagtagaagccaggggtatgctttcagcatttattgcaaccaaaagttaaccccatcacggttaacgagcatctttggtctcttgtggaatttgaactaaaactatgagccttattcaatatctataattctatgatttttttaaattatgggaaattaatgaaagatgtttacatgaataatgtttgcccttactgtgttatgaatgagttttttgtagtgtgtctgggtgcatgatgcaagagagtaggaaaaatgtttctgaaacaaaacttgacaaatatttgtaatgaaagtaaatttaaagattgctataattgcgctatagaaacaatgcaagtattaaacaaaatatacaatc

SEQ ID NO: 12878 - DNA, 2929 bp, Homo sapiens
tcaagagaggccccaagatccacaactcgagtggttaaagcttaaaaagtgaaaaagaaacaggatgttgacccatccttgttttttgtttttttgacccacgtaaactgagcaaaactgcagctggctgacaatggaagatccaggtgccaatccacagccccaccaggcctcatttcacctgattttcacacagcaatcgagatgagacgccatgcagatcccggctgcgagagagggagacacccggaggagcaggtgggaagatgaagccggccagagcccctctgcccagcatgccctgtgatcgcctggcccagcaggagctgcttcagccgagagggactattacccaagagaggtatcctcagcccctcctgccccaggtcgggagacagcagctttggagacacaaaagagacagagcctcagccagggagagtgagtcccccagaagaggctgggtggttgcacaggccaggtgcacaggttggaaatgcactgaactctgggtgccgagagatgtaaggctttgagacatgctactgaatttggagggcaggcacgaagaacagtgagattgtcaaaaggagacaaccacagatcctacaggactgtctgtctcctgccccatgatgaccctcaggaattgcaaaggctctgctgtcacaaggagagcaggctgagtttggagcagggtccatccggcagtcctgggacggcttccctctgctggtgcccctggtggcagtccctccaggtggggctggagcctgctggcgcccaatacaaaacccatacatccaggtgggtcacatctacttctggcggccgcagggcagggaaacccctactggaccctgtgtgtctgccagcctggagcctttgtctccagccctgcctttattcctccttgcctccacaccagcctccccttgcttctccttacagactatccaagaagtgaagcttatgtctttagggagccttgggcagagtccacataaatgcaggaagaacttagacaatgcctgaaatgcaaaggcgacactggagtcttctttctctaacgtgtagcgttgaatgaatatctgcctggaaccaagagggctgctctgatgtttgggagtcggttttttgtgagccacatctgatatttctgatatccccaggaaggagtggcctggaggtcactggttcaggctccctttgggcgaaatcctgggagtgatgctctaaaaatccacctttcccatcatccctactcatcagaaagacaaatataaaatcccagagaggtggaggagctaaaaaagcaattgctccaccttacaaatttggatagaaaggagatgtagtttatttcatatgggcaaagtagtcctcttccaaagtcctgtacagttgttctctgcaattgacgcacatctgccctaagcgaaatctgtcagaaggaatcaacaaggctccttgcctcccctcccaatcccccttttggaggacttgtggcttcggtgtcgtcctaagtgagagtggcgtgtgcttttttcctgtcccctcctccctccgtgtcctagacgctggctgccttctgtgcactcccaggcagatcactacggaagagtcggagcctgtggggttggactggccacactcagtcctgagaaggcgagttgccatggaaagctgggggcagaggtgtttttggagaggaggcggcaggcaaacattgcctttgacttgctctccgcgtacccggggttgtagagctgctcaggaaggggcaggatgtaaggccagaggtgcctggtgggtgagaagcccaggcaggggctgggcgccctctccgaagaggtggcagcagggtgaccctgaactccccaaatggggagtgatgccactggggaaactgagtggatcaaagagatgaaaccaaaaaaaagcaaacaaacaaatgagaagacacaaaacataattaccttttcctgaaaggtacaggaaataaatatataagcaatgatgagaaactggaggtggctaatggaagtgagacagacaggggtggggggctccattatcttttaaaagcttcctccaaatgctcagtactgggaccaactaataggtagattttaatatggtggttttgttttggttttgtttttactacggtgctgatgtatatgtaatgtctaaaaaaagttatttgtacataagtttttacaatactgcagatatcactgggtctactatctgtaaaaaatatacatataaatatatatatactgtttgtttaaaatagagtatttttatttcattccttaactcatcatcacagcagtggtattgcacttcagatgacatctaattactaatttgtactgtatgacctctggcaacttgctccattttattcagatttttctagttttctgtttttactttgtacattgagcattgcttatttccttttaagaaatgtacagaacgctgaaatgtagaaatgaagtgatgttgacataccacttttaaagaaaacaaaaacaaaaataaaagattatctgaatcaatccaaagtatagtttattttaagatcctcactggagctccaatcttaattaagcagacatattattcctgggttttaattaactgcagttcttttctcaaaattttgatatcattctttaaacatttatttaatgggagagatcaatcattcccagcctttgcattcaactgcacaactgatgatactttctgaatttactgccgcactctgaaggatgtggcaaagggaagggaggaaagtcaactttgcatggaacatagtgcaatccatttgtagattcagtaccataacaattccatttccaactagttcatctggaggtagggaggctccactggaaaaataaatatttttgtc

SEQ ID NO: 12879 - DNA, 769 bp, Homo sapiens
actagattgaaatatttttaattcccgagagggatgtttggcattgtaaaaatcagcatgccagacctgaactttaatcagtctgcacatcctgtttctaatatctagcaacattatattctttcagacatttattttagtccttcatttcagaggaaaaagaagcaactttgaagttacctcatctttgaatttagaataaaagtggcacattacatatcggatctaagagattaataccattagaagttacacagttttagttgtttggagatagttttggtttgtacagaacaaaataatatgtagcagcttcattgctattggaaaaatcagttattggaatttccacttaaatggctatacaacaatataactggtagttctataataaaaatgagcatatgttctgttgtgaagagctaaatgcaataaagtttctgtatggttgtttgattctatcaacaattgaaagtgttgtatatgacccacatttacctagtttgtgtcaaattatagttacagtgagttgtttgcttaaattatagattcctttaaggacatgccttgttcataaaatcactggattatattgcagcatattttacatttgaatacaaggataatgggttttatcaaaacaaaatgatgtacagattttttttcaagtttttatagttgctttatgccagagtggtttaccccattcacaaaatttcttatgcatacattgctattgaaaataaaatttaaatattttttcatcctg

SEQ ID NO: 12880 - DNA, 1413 bp, Homo sapiens
cacgggcgccttcccgggggagtgggaggagagggaggggagggattttttatgttcttctgtgttgagttttttctttctttcttttaaattaaatatttattagtacctggcttgaagcctagtgttttcataatgtaattcaatgaaaactgttggagaaatatttaaacacctcaatgtaggtacattacactcttgttgcggggaggggatttaccagaatacagtttatttcgtgaattctaaaaaacaaaaagatgaatctgtcagtgatatgtgtgtattataacttattaatcttgctgttgagctgtatacatggtttaaaaaatagtactgtttaatgctaagtaaggcagcagtcatttgtgtattcaggctttttaaataaaattagagctgtaaggaaaatgaaaagccacaaatgcaagactgttcttaaatggaaggcatagtcagcgagggtaaatcctataccactttaggaagtattaaaaatatttttaagatttgaaatatatttcatagaagtcctctattcaaaatcatattccacagatgttccccttcaaagggaaaacatttggggttctaaacagttatgaaagtaagtgatttttacatgattccagaataacacttgtattgaccaatttagacagataccagaccaattttgcatttaagaaattgttctgattatttacgtcaactcattagaattcagtgaaaagtaacagtcttttgtcacagagaatctgaaagtagcagcaaagacagagggctcatgacaggtttttgcttttgctttgcttttgtttttgaaagagtaaaagtactgatgcttctgatactggatgtttagcttcttactgcaaaaacataagtaaaacagtcaactttaccatttccgtattctccatagattgaagaaatttataccacatatcgcatatgaccatctttccatcaaatcaatgtagagataatgtaaactgaaaaaaaatctgcaagataatgtaactgaatgttttaaaaacagaacttgtcactttatataaaagaatagtatgctctatttcctgaatggatgtggaaatgaaagctagcgcacctgcactttgaattcttgcttcttttttattactgttatgattttgctttttacagatgttggacgattttttcttctgattgttgaattcataatcatggtctcatttcctttgcttctttggaatatttctttcaacacattcctttattttattatacattgtgtcctttttttagctattgctgctgttgttttttattctatttacaggatgatttttaaactgtcaaatgaagtagtgttaacctcaaataggctaaatgtgaacaaataaaatacagcaaatactcaga

SEQ ID NO: 12881 - DNA, 2690 bp, Homo sapiens
aacgacaaatccagaagcaaagagatagtaggacccaagggaaaggaagggaagagtgctccaagacttggaccaggcacacacacacctccagatcaccttggcaactccagggcgctccgttcaagaatgctgacgaaaagcaatatccaaagtcttgtcaatcaggatgcagtttctccatcggtatggcagtctgtggccttggcagctgggaagttgaaagctgatttccactcctatgtccatgtagacatacacttcagaagctcctaaaacagagactgaaaggccacctttaggatttcttagtttcatttcaattctttccatgtctcatcattcttgtttttggcatgttgtttgatttctttggcaatttttttaaagattatttgtagtttactttccatctattcctttgtttttcctttgatgcactccagcttttgtataggtttctgtttagaagcaccagttcctgctatgatcagtttgtattccatctctgagatatgtggtcttgacctcccagcatgaagtgtgcatggctttgagaagtgcctcagcaccctgaaatggactaaggccagctttcattaagaatctaagttcttctaagtgggcctttaaaaaccccagctgccagagaccccaacactaagccctaaatctgctgaggccactgctggttattttaagccacatcacacttgcttccacttgccgggcttgattaagggcccacgtgacatgagaagggagctctagggaagccgtttcattcttctgggtcttacagtctttggctgaaattctgaactcagaagtcccctccaaggcatccagtctttggtggttgtagggctggttttaaaaccagataccacattttcttcctattgaaaacaaaatgccagttgcattggtttcccctgggctagaacagtttttttcttacctctgtaagtgggttctgtaaaaaatggaggctttagagaaaagccaatcatttttaagtccaatggcaaacatagtgggggctgcagtagcacctagcttttaccttaatttcgacacacttctgttgaatctcaccagaccatgtgggaggatttaggtgaatccctagcagattgcttcccagggctccctgagtgtgtccagataccaagtgaggaatgaggtgtgatttgctgtatcatttgaaccaaaaagtatgcagcatgagaatttgctagatcgtttatcctgactgaaatagacaaagtaagagggaaaggaaaagaggtatcaagtaaatactgaaacccaatggtgtttttaaactgtttctgtttttattcatcttttgtaactatgacagaaatgtgctattttttcagtgggcaattttgtaatatattcagactatccagatacagagatgactaaggtcattgatagcgtctctgaacaatcagacggatcaccttatctctacacagctggcaaacaccaggctgcggcttggattaaccaggaaagaaagcttttctcactgagttgtttttatgtattgatggggacttttccacctcattagactaatactcattcaaaaagagtttggttctgctgtaaatccttgccgcctgctgaaacatggtgtgcaggtcaacggagaatactagctgctcctttttcaccacctttaccaatttcctatttgatggtttgtaagtagacagtaaggcaaggcagatgattattaccctcagaaaggttgcatctccctaggagtccaatgcttcctgtaatgaaatccactctctatgtgtgggaaaagaggcagggaggaatgaagagagctctgaatcgagaatcctagatgaaccacacgctttactaagcctcggcttcttcatctataatgtgaagggtttaataacatgagtccccaagctcctctggctgtgggaccacagatgagtctttcagaggcaggatccatttttgcagatagctatgacttgtggcaatcaggcttcgtagcttggggaggtagagttacttgacatgtatcatgtaataacagcctttgagacttggcacaactatggtgctgagaatgaaaatctaaatgattgaagttttaagtccaagtaggagttggtttgttttgccttgtttaaaaattgctgttagtcacagagtttgcaatctctggataccttcaaatcctagctctcactgtgggattcttgatctcagaggtgtttatttttcacagtcagcataggcttgcgccactgactcctccttcagtcggctttgcccaaaacaaattttagtattactggtattaagtttagtccagtggaattagaaggataattcaatagcaacagaaatataaattatattccattcccagagagagaatgcgctttggattgtttagtcctctgattaacgagtattttctcttcctgccaagaactaggtgaatcaggaattgattgcatatgcaagccctggccacagctgcacttacaggatgcctcatagacgatgaggggtctgaaaggccaacccgaggctggcagatctgaccccaaggaggtcctgctgcaaaccccctgagcctttgccattcactacttaccaaagtttgtttctggaggattttcctgtagctttgatagttt

SEQ ID NO: 12882 - DNA, 753 bp, Homo sapiens
gtttaccaacatgttaataaacaggaacacaaatacatttcagttggataatcttcaccttggtcttttttgtttgtttttattgtcatgaatttgtggtgggggagatgatcacagatgtttcccaaaatctaggaactacttcaattcatcatcagcatattgctctgaaagaaatccattttaaaaaatcttacatgattcagtactgtcatttctagttctaagcttctatgtgttgagcctagctgattgagattggttcacaaagtgtaaatttcattcatgagtatttaaatgtttctgaggaaacatggatcatttcaataggactaggggtgattcacagagcaccactctccaaccaaatggaagagaggagagggggaaaaggaacatattttttttgtgatacaacttaatagcctatgagaacacagtcaacctgagaatcaatgtaagggatttaaaaaaaatgtgtagccactcaattaggtagagttaactcatgatctggaatactgaggcagtttgcaggtatgttccacaatgatctctatcatccagtcaaggtgtgactcctcccttgcaacaggcatatgcatggagtgagtaaagtggtcaacagacctttcaaaaccatggcatcttttcagaactctgacttgggttgtgtgatctagctgtgaatgtagcaatatagaacgtttaatagaatgataagcaaaacactgcaatgatctaaaattacaa

SEQ ID NO: 12883 - DNA, 1387 bp, Homo sapiens
gttttcatgcctctgggattgagattagaggaagaaagcaaagaaaggacatttttttacttcactgttcatggtgtaattgtgtgcctgacggctgtagctactaacttggcttacgttgactggctactaagggactctaggagtcagaaactaaatgctgagtctctcaaaggcgtagagagaatttcagagggccttaccatgacatgaggattaaactccagttctgcccgattctcatcacgaaatccttatcccatgcctcattgtgtttggtgtccccttgcctaggggacagtcctcctgggtaagatcagcaagataactcttcagtcacattccatttgatactttgaatactctgaggtccttacccaccaaatggatggaattcagctgctcaatcactgcctttctcagaactcggttgtccaaccacaattccctttcccttaggatagggctatattggcaaaatgccgcccgaacagactgctgacagtaaaccaaatattagtttctctcaccttcttgaaggcatttacagtctttgtaagcttttctcctagattttccctttcctgttcctgcttagattctaagaatgaagtgcatccttctccttttcttcattaggtgaagtgggatttacccattaccatatattcaccaccaggtcactgacgagagactccagtgaatcgctttccctctgcattcctctccttgtacagactagagggtcacattgtgtaaagcctaacatagccctgcaaagagatctggccccagcagtgaacacaaactcagtaattctctttagagtgaggtggtaatcagtgcctcttggtttcagccgtggtcctagtggctacttatggaagaataggaatagttccacaacatcctgtaacattggcttacctgtatattatatgccacccgtaaccataaaaacaccaggatttaggttccttgaaggtaatgactatgggtccctctctgtggaagaatactgaatagaagagagaaatcactcaatatgtggaatgactgatatggtttggctgtgttcccactcaaatctcatcttgaattgtagttccaataatccccacatgtcatgggaggaacccagtgggaggtacttgaatcattgcggtggtttcccctgtgctattctcatgatagtgagtaaattctcacataatctgatagttttataaaggagcttcccccttcactcagctctcattcttctccttcctgccactatgtaagaaagatgtgtttgtttcccctttggtcatgattgtaagtatcctgagaccttcccagccatgcaaaactgtagatcaataaaacctctttcctttataaatta

SEQ ID NO: 12884 - DNA, 195 bp, Homo sapiens
gcatgaggatgtggcctgcatgctgcctgatcttgcctagaaccagctgcacctgctgttctcttgcttatgcaaactggctgcacctgctattcctttgcttatgccccaacccttggctatcctaactccctgttctcctgcctattactgtattctctacttctaaataaaaataaaacaaaatacaaatta

SEQ ID NO: 12885 - DNA, 195 bp, Homo sapiens
ggatgtggcctgcatgctgcctgatcttgcctagaaccggctgcacctgctgttctcttgtttatgcaaactggctgcacctgctattcctttgcttatgcccctacccctggctatcctaattccctgttctcctgcctcactattactgtattctctacttctaaataaaaataaaacaaaatacaaaccgtt

SEQ ID NO: 12886 - DNA, 2090 bp, Homo sapiens
gaatctgttcaccaaaccaaatgtggaaagaacacaaagaagacataagacttcagtcaagtgaaaaattaacatgtggactggacactccaataaattatatacctgcctaagttgtacaatttcagaatgcaattttcattataatgagttccagtgactcaatgatggggaaaaaaatctctgctcattaatatttcaagataaagaacaaatgtttccttgaatgcttgcttttgtgtgttagcataatttttagaattgtttgagaattctgatccaaaactttagttgaattcatctacgtttgtttaatattaacttaacctattctattgtattataatgatgattctgtcaaatgaaaggcttgaaatacctagatgaagtttagattttcttcctattgtaaacttttgagtctggtttcattgttttaaataaattaaggggacactaaagtcctatcattcatttccttcattgctgaacaggcaagatataatattacatgaatgattactatattttgttcacactaataaagcttatgctcagaaatgccatacacacacacacacacacacacaaacacacacatttatcatttaatgcataaatcaacacaaaaggttttcccattaatatgaaatattacatatatataagtgccatatttaaaataatttgtctaacagtagaactgtgtcggagcactcactgaagcttgcattccactgaaagagttatttgtgtaagtagagtatccggagaaggaaaagaacttacgacctttctttataacagaaactcaactctaaattcaacaagatgtgcaaaccggacatgcaggtgaatattttaataggttactataaggttctcaattaaattctttaatctgtccagtcccagtttctcttattaataaaactttggaaattgctttaaaccatttaaaggaaatttctagatatagaaactaaggactgtgactatacagctgtcactcatttgtagtaaaacttaaaaagcaaaaacaaaaaacaaaaaagaccttcctgtgatactttatttccgaactaataaaaatctatatgactttttattattgtgtgataaccaagtaaatgttttctattttgcatattttcaggcatggtaacagaaatttaccttttaataaattaaaaaatctaaattttaacctacttgtatgttcggagagtgtttttgtactatattgactacttaaaatagagaatgagactaagaagggaacatttctgttgatacatgttttttaaaagtaattttaagagcattattaggttaattaatccaattaatgacccaaatgccaaggtaattttaaatttacatttttaataaaagcaacatgttgaaacaagagagggtgagattaacctttttgctaaagtaatttacaagtcaaagacaggaagagatcagagtgaatgtgccttcttaaccagagctacagaatttagtgaataattaaagtacaaactgctttgacctccttgaacttttccaagcaatttctctgtacttctatatatgaatgtcttagccaattttctgctactataacagaatacgacagactgggtaatttaaaaagaaaagaaatttattttcttcctagttctggaggctgggaaggcgaagggcatggcactgacatctgccttgtaactgatgagaaccttcttactgcatgataacaaagcagcaaggcaagcaaaagcgtaagatgaagagagaggaaatgaagccaaacacatcctttcatcagaagcccattccctctataaggcgttattacatttatgagaatggagtcctcatgacctaatcgtgaccttaaaggcccctcccaacactgttacaatggcaattaaatttcaacaaaggttccagaggtgacattcgaatcagcaatgaaattttcatagttaaatttggtattcgtgggggaagaaatgaccatttcccttgtatttttataattaaatcagcaaaatattgtaataaagaaatctttcctgtgaagataccatgacccc

SEQ ID NO: 12887 - DNA, 212 bp, Homo sapiens
ctttaaaatgagacgaaaatcattaaacgtatctttgttttatcctgtatttaaataatatatcatgtacctttattgaacaaggcatccgttatatctaattttgtatatgtttaaaaatattttattgtaactttgacaaataaatttggggtcatattatctttattttctttaacatgtaataaagctcacatattttacattactaa

SEQ ID NO: 12888 - DNA, 3779 bp, Homo sapiens
tggttgttgccgaagtattttctaacagaaactcttaggtggaatgtttctgaaggctttaaaaaaaatacaataaagtaaaaaccgcagttggaactctttcctctccccagccccccttaccttcactcccatactggacaagacattttggacatgagttcaagggggcaggttaattcctggcattgccagttttcttcattcagaatctgtttgttgatcaagtgactgtccccgtaaaaagtagaagataagtttgttaaagtattttttataaacagcttaatataaaacattatagatttagtgtttggcttttttccttataagtttataagtttgatttcagatgttggaaatgtgtgctttatagtgtttactaaagtgacaagaaaatataccatttgacacactatagattccaaacataacgttgcaccaaatagaaatgtatattttattatgcaatgccttagtcataaactgggctcaaacaattctcagcctaaaacactgttgtcttttaaaatgcttccaacccaaaggcctttcatctcaatatctgtcaaacttgaataatgtcttctctttaatattcacataaggcagcctattaactgtgtcttagcaatgttgtatatagttcttttaatattcataaggtatatttttgaattttggtatttgttgagattgcatagaagaatagtaggaaatccaatgaaatggctgtttccaccaagaattcttagcactggtgtaaatatcatggtgcctactcgaaagaaatgtagatgctatgcattttgaaaataatctgcatcagttagaactgcagaagtttttttaatgccactttaacactaatgcactgacagattctaaatattttgtgagaagaaatgttaaaaatttttagcttgacaggtttctagagttgttttcttcctcccccccccccccgcaccattggttgtgtatcactttcactttacacttgcatgttctacttgtcagggctggaactattgtatagaagataatatgattgtgacttctagttcttttctagaggatgctgctagaaaatggttttgctttgtattttatagcttgttacccttaggtaggtaacatcttacattctgttttcttccagtctttgcagtattcactagaggttccctttgcatgttgcactctgttctcatttggagattgaactctgaattaacacagtattcattcatctgtgttattttgtaaaaataactgtagcttatattctttatttgtgcataccaatgtgaaaatccactcttttattatgttgagattatcttctgatcaggaagtttgagtgctatgcaaataacatagtagtaatttctctttgcatgccatgtgtaatatacctagccaaaaccagatgcggtgactttctttttttgtaaagcaaattacttaagaaaatacaattcacttgaatttgacaaactgaaacagatgggttttctgggttctctgataacctatgggaatgtttggatgccagttgggctagtgaatcgccactgtactgtaataatggttatttacctctgtgctgttttaattacctaacgtctgtgtaactgctgatttgagtagtgattagcatttagataatgtaacaggattttagagagcactttgaaagataacattttattatgatggtgctaggtaaaaaattgtaaagactgggatggttgtgtggaaaacttttcttgagagaacctattgaaaggaatttgttgtcaccttcttaactagaatagttgttgaaggtaccgcttaagccatttttttcttaacatcggtggctcagttaaggaatgagaagatagagggtcctccactttcagctcatgcttttttatgtaggactagcttacctgattttaatgaaaatcacattttgatacaaacaccagatttgaaagttcaatgtgtttgatctcaggagtccaaaataagttgttgcttctagtgtcctgcattttattgactggggtttgatctcagcttctgaaaatgtttaaaaattggaaggaaatactactcatatcttcattgtcactttgtcttacctcaattgagtaacagaatatagctcctgaaggaaacactgatttgctttctgtttcccatatctcacctctaggatatgatggaagaagtgcttgaaagagaattttagcagatggtacttttctcagtgacctctggaataaaagaactgacttttgatagttttaaaattaatctttgcatgaaggttggtttcgctttttttcctttaagtttgtttttaaatgtattagtccaggggattttgccttatgctgaggtcaaactaaggataagcaagcttttgtccttcattttaactgttatgtcatactgttatgttgacatatttctttataagagaatagaggcaaaagtatagaactgaggatcatttgtatttttgagttggaaattatgaaacttcaccatattatgatcatacatattttgaagaacagactgaccaaagctcacctgttttttgtgttaggtgctttggctgaacttgattccagcccccttttccctttggtgttgtgtatgtctcttcatttcctctcaaatcttcaactcttgccccatgtctccttggcagcaggatgctggcatctgtgtagtcctcatactgtttactgataacccacaaattcattttcatggcagacctaagctcagaccctgccttgtcctggcaagcataggttttcccagaccacaatgctgatatatcttatttaatgcagactgtattcttgcagcgtgttgtttcctttgtgactcaaggttgaattaaaatgcctgtgaactgcaaacttgcttatgattgacttggtgcaataaagttcctttctaaccatttctggtttagaaaacattcagccatcctagaaactagcaatatttatttttgcctctttcgttttaccttcatttttagatgaggtaaatgttttgtcttttacttaagggtactaagcaaggtccactctagtgtagctgaagagaatgcatatttggctacactatttctgtttactgtattttgcttcctactttatgtctaaatgctattgtttgtttaaaatcctaataatgtctcatttccaatatgttattttcagataactaaggttttgctactaatgtcagccatttactctcccactaattgggattattttttaaaagaggtctttctccccgaaatacaagttttagaaaatcttagaagaggggtgggtgcatgtcttaatgctgggaagcggcaactttggggttgaacttacttgaatggattaaaaattgcattgtgttacagagctagaaaattttatgtatgaaaaacgataatagccttacactgagtacaaataatactttaagagcatgtgaagatgtgatcatttgtgatgttacttgtaaaaaaaagtatatatacatatcttttgaagtgttaaaaggaaactagtactttatattctttatcatatcactttttgtaagtgttgaatatattcctgtttatttttctatgttctgttttgtagccttaagaagtgtttcaaacatatctgaatgtataaaataagagtaaatgccctacatggtgtgatgctgcattatatataaaactgtgtgcatatattaaattttgtctcttg

SEQ ID NO: 12889 - DNA, 361 bp, Homo sapiens
gaatgaaatcctaaaatacctttcttagtgccatacaaggaaagttaagtaaatgtctttacatttcagtaaatgtctttctataacatatattgaggtattaatggtattcataaaatacagcagtctgctgaagtttctttatccctgtcactaattttacctaatttctattatgggactgtttgttttgaaagttggtgtttttggttgatgagaatttacgtctgcaatctagatgcatatttgtagaataaatttggtcctacctatatgtgtgtgtattgtaaaattttaaagttaacttgtcaattgttcacatacccagtaatgaaataaaatggccgtttggatttccttc

SEQ ID NO: 12890 - DNA, 859 bp, Homo sapiens
gtgcccattctgcatttattccaccaaccgccccgctgccatggagtgccacctcaagacccactacaagatggagtacaagtgccggatctgccagacggtgaaggccaaccagctggagctggagacgcacacccgggagcaccgcctgggcaaccactacaagtgcgaccagtgcggctacctgtccaagaccgccaacaagctcatcgagcacgtgcgcgtccacaccggggagcggcccttccactgtgaccagtgcagctacagctgcaagcgcaaggacaatctcaacctgcacaagaagctgaagcacgccccacgccagaccttcagctgcgaagagtgcctgttcaagaccacacaccctttcgtcttcagccgccacgtcaagaagcaccagagtggggactgccccgaggaggacaagaagggcctgtgtccagcccccaaggaaccggccggcccgggggccccgctcctggtggtcgggagctcccggaatctcctgtctcccctgtcagttatgtctgcctcccaggctctgcagaccgtggccctgtcggcagcccacggcagcagctcagagcccaacctggcactcaaggctttggccttcaacggctcccctttgcgctttgacaagtaccggaactcagattttgcccatctcattcccttgacaatgttataccccaagaaccacttggatctcacattccaccctccccgacctcagactgcgcctcccagcatcccctcacccaaacactccttcctggcctatctcggactgagagaaagagcagagactgtctgagggcagccatgttctgtaccaaaaacagagagacaaaag

SEQ ID NO: 12891 - DNA, 1465 bp, Homo sapiens
caaaggaggtggactttctgtagcaatgtatatatgtacaggattgtacatactagcaattctgaagacttgtacttgtgaatgttgcctcaatgcatattttatttttttacacaaaaatatgagatcctgtttaagtgccttaaaatgtatttgacaagagcgttatttccaaaatatgctttgttgattactgccaggggtggtacaatatttgggggttaattttgctttcctaatgcaggaatcagtcatggtaagtgacaaaaagcaaacatgctttccctgcagcacctttgtgcaatacaaccctatagtagttactgtaatgtttgaaatgaggtcacaccatcaggaaaatgcccttctgatgacagtgaaaatttccaaagtcttattcatgcatactttgatttactgtgtgattctttttttctacgactgtgacatgcctcttccttatcaactcagcaggggtcatagatcgaatagatgctgaaaagcgtaagatatatgcattccttgacatcatttttaaagacattccttcaaatagtttccacacagaaattcctcactcccattatgagagattgtggttatatgtcttaaatttattataagctgcttcaaagaaagggtctgaatgtttgaattatgagtgaaatcatgtgaaattttgagttaaactctgtgatttgattttcagggtctttaaaatatatcttaatatcttcttcctctttattcaataatttctgtcttgcacttacacactcataacagccaaatatgaggcacaaaaatgttacaatcagtttgaaagcagcatcaattaatggtagattctattcacattccacaacccagaccaaatttttttcctattacgcagatgtgctgagcactttccagattgcccctgttggccaaaagcagcctgttacatcctggaattaagcacacttaaggtatttgagacaatttattaatgaaaatttccttggcagatttgacaaatgttggcaatatttttttagaagttaaatcatattgctttcatgaataaatgaaaatataaaggtcatggatgcaaacaaatgttacatatacacattctgtctctccagatgaaaagaacatgcaaaaccatttaataaccaaaatatcaagtaaaattagttcccaacggggcagcagctttcaaatgagtgtccaatatttgcttctgctatagctgcaagaactgtaactggacccaagtagagaatgaagccacgtatagaactacgagaacacttttctgtgtttcccccatgccgtcctgtcacatcctcttacacgtcctctcttgatttgatagacaatattggcatcctgggtctcactgaggccgtgctatgtcctcagcagctgtttttgttgtttcgttattatgcccacaacaaaaaatcattccttagaa

SEQ ID NO: 12892 - DNA, 1072 bp, Homo sapiens
tattgtgtatatgaaagatttagtgaaagctggatttgttttactctttggttaagtataaaaattgttgaatcttttcatgtgccagtatccataccctgaagaaaagtagttaatgaataaagcaaatgttctcttacaatatattttggaggtttgggttttaaaattccatttaatgaattcaaggaatcaattaaaacactatgtgtctccttatagaggttatgtcaatatattgatcatttaatgaggtcttttagattattattattttgtatcatgggactgaggattttgaaaaggaaacatgacccagctggtcagaaagggaatgctaatttacttgttgacatgccatttattttgtacatttcactgtcaaagaagctactggcttggatgcttctgagaaatctatgtgaaaaaaaatttgaaaggaagatatgactaatgagtaatttgcaagtaaatgttgtatctatatatatatatatataaagattcaaaagtagttcagctttcataagtagaaccaatataaggacgttgttttagcatttttaatcattatttttaaataaatgatgtaacagaggcttgatttgtgttatgaaagattgagaaactaaattttctgttgatttaatttttttgtgccttaaaactttgttaaattcctgaagttaattatcatattgtattttttggggcataactcattagcagatatgtagtgcagtgatttacaaataattgagagtaaaatcagtgatgtataaactagttcatgagtctaggtaaaatatcaattacctctgtttaaaatgctctgttaattattattgtatgtatttaaatgtagttaaagcttttaaacatgttgttacatagtgttaattctacatagtgctacacagcttttagtgtcacatagccttacagagtttataatgatgtagcatctgcaaaatatatgcatagcttatatcctatttttatagagccagtaatggtttttgtgatgctgtattacttctgggttttagacaataaagtctgtttaacaaaa

SEQ ID NO: 12893 - DNA, 131 bp, Homo sapiens
agcagcttttcacttaacatcaaagcaagaagaaatccatcatgtcaccttagacttcaatacttgtaataggagcatgttacagataatatagagttataataaaacggactatgactcttttcattgga

SEQ ID NO: 12894 - DNA, 147 bp, Homo sapiens
agagcagttttccaatgaaaactgtgtaaatagagcatcaacaagtacaaaattcttgtcttaattagtgggggtatataaaaattccttgtaatggtcaaatattttttaaaattgacattaataaagcatattttaaaagattct

SEQ ID NO: 12895 - DNA, 2575 bp, Homo sapiens
ctgcccgctgcccagaagaactttgccttaagtttccctgtgttgttccacacccagaaggacccaagaaaacctgtttttaacatgtgatggttgattcacacttgttcaacagtttctcaagtttaaagtcatgtcagaggtttggagccgggaaagctgtttttccgtggatttggcgagaccagagcagtctgaaggattccccacctccaatcccccagcgcttagaaacatgttcctgttcctcgggatgaaaagccatatctagtcaataactctgattttgatattttcacagatggaagaagttttaactatgccgtgtagtttctggtatcgttcgcttgttttaaaagggttcaaggactaacgaacgttttaaagcttacccttggtttgcacataaaacgtatagtcaatatggggcattaatattcttttgttattaaaaaaacacaaaaaaataataaaaaaatatatacagattcctgttgtgtaataacagaactcgtggcgtggggcagcagctgcctctgagccctcgctcgtccacggtcttctgcatcactggtatacacactcgttagcgtccatttcttatttaattagaatggataagatgatgttaaatgccttggtttgatttctagtatctattgtgttggctttacaaataattttttgcagtcttttgctgtgctgtacattactgtatgtataaattatgaaggacctgaaataaggtataaggatcttttgtaaatgagacacatacaaaaaaaatctttaatggttaataggatgaatgggaaagtatttttgaaagaattctattttgctggagactatttaagtactatctttgtctaaacaaggtaatttttttttgtaaagtgcaatgtcctgcatgcataatgaaccgtttacagtgtatttaagaaagggaaagctgtgccttttttagcttcatatctaatttaccattattttacagtctctgttgtaaataaccacactgaaacctcttcggttgtcttgaaacctttctactttttctgtactttttgttttgttcttggtctcccgcttggggcatttgtgggactccagcacgttttctggcttctgcttcatcctgctccatcggggaatgacacactgcggtgtctgcagctcctggaaggtgtcatttgacaacacatgtgggagaggaggtccttggagtgctgcagctttgggaaagctgcctcgtttcccttttcctctagaagcagaaccagctctacgagagtgagactgggaacttgatggctcagagagcatcttttcctcccattttagaaaatcagattttctcctgtgggaaaaaaaaattccatgcactctctctctgttaaagatcagctattcccttctgatcttggaaagaggttctgcactcctggaaccggtcacaggaacgcacagatcatggcaggatgcgctgggacggcccatcttggcaaggttcagtctgaatggcatggagaccgggagatagaggggttttagatttttaaaaggtaggttttaaaaataagttttatacataaacagttttggagaaaaattacagatcatataagcaagacagtggcactaaaatgtttaattcattaatctgtttgtttggcactgatgcaatgtatggcttttctcttgccccaaatcacaaacatatgtatctttggggaaactaacaatatgattgcactaaataaactactttgaatagaggccaaattaatcttttaaaaatgatgataatcatcaggtttactcagtgaaatcatattaattattttccaaaatctaaaagctgtagctggagaagcccatggccacgaggaagcagcaattaattagatcaacacttttctccagggttcaccatgcaggcaacattaccttgtctttcaaaagacacctgccttatgcaaggggaaacctgtgaaagctgcactcagagggaggagtttttcttacataatttgcaatttcaggaatttaatttataggcagatctttaaatacagtcaacttacggtgcacagtaatatgaaagccacactttgaaggtaataaatacacagcatgcagactgggagttgctagcaaacaaatggcttacttacaaaagcagcttttagttcagacttagtttttataaaatgggaattctgacttacttaaccaggtttgggatggagatggtctgcatcagctttttgtattaacaaagttactggctctttgtgtgtctccaggtaactttgcttgattaaacagcaaagccatattctaaattcactgttgaatgcctgtcccagtccaaattgtctgtctgctcttatttttgtaccatattgctcttaaaaatcttggtttggtacagttcataattcaccaaaagttcatataatttaaagaaacactaaattagtttaaaatgaagcaatttatatctttatgcaaaaacatatgtctgtctttgcaaaggactgtaagcagattacaataaatcctttacttt

SEQ ID NO: 12896 - DNA, 1278 bp, Homo sapiens
tggtgacagctgtacatcaactctgcccctaggatgagcagaagtacctggagcatcattctcttctaccacatctgaatgtaacttaaatttgctcaaagaagcaaaatattttttaaagttattaataattgctatttttgtagtctttgcttgacttttttgggggggattagcaaagcagaaaactggctgctgggttctgtagttttaaaaaatctatatttttagtcataatgagaagtctattttcaccaattatggaaacatacagtggagcaagtaaaccacttattccagctataatattatgaagaacatttcccatgcatctacaagcttgagaaataggattttcacagtggggaagtgggttacaatattggaataggaaaatttgatgctgtaatttgggtcctgtatttttccaaacaactgtgcttcttcagcactaatatttctgggatttaaatagtaatgtttaaattatggtaaatgtaatttaaaacatctcaattaagtctgtctatcaatattgttcttcaagcatgttttagacctagaaaagtatggtttgggggaggctattttattgtgtggttagcacaaggaatctaatttatagcaagtgtgaaatagttaccattttttcctgatctgtcatcttcatagcacaacaaaacgaaatgatggaaatgctcttgagctcacaacatttgtttttcttttaaagtaaatgcaagtaccaaagctcactactgcggtttgcctgtgcctggacaatgaggcggagccactgttgttttgttggggcacccccttccctccccgggtttgcaaatagaggctaccgggtgctgtattcagcaacacctgttttactatttgttattaaactatcatctccaccttccttttgattagcaatttgtactaagaaacgaaacaatgttatttggtggtgtataattctacttttctagtagattactgtgtggaattctgtgaaaaatatttgagaaaaggcctgtattgcataaataaattctttgtatgttgtgaactttgatctctatttctcttgcaacagacttcaagtggtccctctttttttcctacacactcagctcttctctaaaagcaaggatttggaatgaacaattcagtttgacagaaaaagctgaataaaatggcatctgtaattgaattgttggaaatgccttttttgctcctaaattttaaacatcattaataaaataatgattcacaaagaaagaa

SEQ ID NO: 12897 - DNA, 1806 bp, Homo sapiens
aggagaagcttgtctgtgttccttggcacaagaactcacttgaactatcaccttgactatcagatatgtttttgcactattttttttaactgaaaaagaaatatctaagctgtacatggtacactagaattttctgaaagcagaaaacgttcagattttgtagttaattttcattacaatagaaacatgcacatggaaacccatgagctaggattctaccgaggaaaacatctagtgggattagcaaggtgaagggaaagcatctggtggcatggcagcatggggaggctcacacacagaagttgcacgtggacatctgttttaatcagcacaagtgaattaaccatgcttcttcatttttttactttagttaaaaaagaggacatttaatattctacatgctgtaactatcaggacatggttagcaatctcaatttcatttttgatattcaaattaattcttacagcttgagcatatcagccttattaccagagcaaatccttccttcagatgggatagtttactgactagttggagcatttgtaagcacatggtgaaatcagcccctgcccaccaaaataatctttatgttaccaagtgattcccatttgtctaaggatttgaagggggtctaaattggatgtatcttacttagtctaaagaaccaaaaccatccctgaaatgccttgctaatacaactaatccttccatatatgtgccatacttatttttttcctcagtgtatactttatgttaacagggttattacaaagcacattttctgaatctgcaatcattcctttgacaattactggacccaaaggaaaattcattttctttgcattattccagtaatatataaaaactgtgtcttgttatagtagtacattatgaatcacatataaaatcttacaatacagaacaactgttaagatggaaaacagtgccaaacctccacagctcatttctttgtaatataatcagaatgaaaaataatttaagaggacagaagactggtacttttttgttttattttttctctagcttatccctgcacaattattagagtgaatgaaaaaccactttcctgctttccattgttataaattctaagcttaagataaaagtggttctttacatgactgaatcaattacaatttatgggctagagccaaataggttgaagacaatcatccaaacagatcaatggaatagaatttcattggaaatgtaaaacactttcccaacaatggtcatgactttcttctgtttttgagaagagtttcatatgctggaccacattttagcttttattgttttttttttcccattgtccaaaaagttaagcaacaagtggccacacttttacgtgactacaacctggagttctgcaaagaaggtaatatttacttggtctttgactaaagttatctccccattctatggttacattttattttggactatggggacttctaatacgttttggtaaagaagagagtataaagaaaattcttgtcaaatttcactcaaaagtaatttcatgagaaatcaatgatttaaagcattatccaaattaaattatcatttgcagcaaactgtacaacagcaggaaggatatggaatggaacatgaggtatatatctttgcctttataattttaacatcttatattgaagattctgaaaacctatctttattagaggaaaatctcaatcttcagttttggccttctgtcagcagaatgataagtgcaatagttgtaaatctacttgacactgtaataaactgaactgaactttcaa

SEQ ID NO: 12898 - DNA, 324 bp, Homo sapiens
gatgtttgggatccccttgcccaagggacaacaacaaacagtgcagcctgactgggaacaggatcctgtgaaagctgatgcccatgtgccctgagagctgcctctcaatccctgtcccaagccacagctatggcattaatgtcaccagtgttctcaccctctaggccctgtgcctggaggtgcctccacagccgaccagcagccaccccgcctgcttcatccacatcaggagggtccggtgaggctgcagcagtggttaaggagtaacaccttcttgtattaaggaattttaaactaaataaaatgtatgttggagatactgtt

SEQ ID NO: 12899 - DNA, 1623 bp, Homo sapiens
agagcagaaaagatgaatttgtccaattgtgtagacgatatactccctgcccttccccctgcaaaaagaaaaaaagaaaagaaaaagaaaaaaatcccttgttctcagtggtgcaggatgttggcttggggcaacagattgaaaagacctacagactaagaaggaaaagaagaagagatgacaaaccataactgacaagagaggcgtctgctgtctcatcacataaaaggcttcacttttgactgagggcagctttgcaaaatgagactttctaaatcaaaccaggtgcaattatttctttattttcttctccagtggtcattgggcagtgttaatgctgaaacatcattacagattctgctagcctgttcttttaccactgacagctagacacctagaaaggaactgcaataatatcaaaacaagtactggttgactttctaattagagagcatctgcaacaaaaagtcatttttctggagtggaaaagcttaaaaaaattactgtgaattgtttttgtacagttatcatgaaaagcttttttttttttttttttgccaaccattgccaatgtcaatcaatcacagtattagcctctgttaatctatttactgttgcttccatatacattcttcaatgcatatgttgctcaaaggtggcaagttgtcctgggttctgtgagtcctgagatggatttaattcttgatgctggtgctagaagtaggtcttcaaatatgggattgttgtcccaaccctgtactgtactcccagtggccaaacttatttatgctgctaaatgaaagaaagaaaaaagcaaattatttttttttattttttttctgctgtgacgttttagtcccagactgaattccaaatttgctctagtttggttatggaaaaaagactttttgccactgaaacttgagccatctgtgcctctaagaggctgagaatggaagagtttcagataataaagagtgaagtttgcctgcaagtaaagaattgagagtgtgtgcaaagcttattttcttttatctgggcaaaaattaaaacacattccttggaacagagctattacttgcctgttctgtggagaaacttttctttttgagggctgtggtgaatggatgaacgtacatcgtaaaactgacaaaatattttaaaaatatataaaacacaaaattaaaataaagttgctggtcagtcttagtgttttacagtatttgggaaaacaactgttacagttttattgctctgagtaactgacaaagcagaaactattcagtttttgtagtaaaggcgtcacatgcaaacaaacaaaatgaatgaaacagtcaaatggtttgcctcattctccaagagccacaactcaagctgaactgtgaaagtggtttaacactgtatcctaggcgatcttttttcctccttctgtttatttttttgtttgttttatttatagtctgatttaaaacaatcagattcaagttggttaattttagttatgtaacaacctgacatgatggaggaaaacaacctttaaagggattgtgtctatggtttgattcacttagaaattttattttcttataacttaagtgcaataaaatgtgttttttcatgtta

SEQ ID NO: 12900 - DNA, 2427 bp, Homo sapiens
acctgaatggcgctcatgttttccaagagaagcagcccctgagggagtctgctgaggctgccaacagaggatgaagaggatacaaatttaattaatttcaaatcaacatagacacaagaaccttttgctgtttcttccaacgcccactcttcctaatgatggcatcacttgcacttggaagaatgtgcaattgagaagtactaggaaaaggcctggctgccatccatcgctgcctctgagggtggagaaggaggcgggtgatgtgctcacttctgatcaacatgtgttgcctcctctcagccaacttctagctcactgaactcactctggtcatgataaatgttcgtcacctttctgcttcattccttagggcctaaatcaggaagctgttttatcgatggtttccttttgggtcagtaaccagctttggataatttcctctgattattcaagtcgtgggacaggtaaactacattcagcaggaacttttctcgaggagtgttatgtcatggaaaagacaccaaacacagcaagtattttaatgaatacaccatcccagggggtcagtaagctctgcctgccaagaagacacagtgagaggggtccacagtcctgatgaggtggcgtttggtaacttgtagaccctagcatggccaggtctggtcacccttaagaacttctcagagaaactaggaatcttcagtgaaagaactaatgttctcctcagctgaaattcccttgcttgtcagcatttctgcaaagctcacacttgtttcaccatacctcccttggatgtgacatgtaggtaggaagtatgtgcaggtgggagtcatctgtcagccttctatgtttcagagatcctgaaggtggtttgaaacaaacagaagaggagcaggaaatatccgtgcctgtggcagatctcactcatcatgcttagcattctctcccgccaagctgggataagcctcatgtcctaacacagcacaacaggaggtctctgtcagtccatcagagatgacattctatgtgatatttttgacatccttgtgctaaaagcaatggcacaaaatggaaaagggcctattgaccacacctactccagtaaaattgttcttcatttattccttaattttctaaatctgacccctttaaagcaatctagcaaattgagaatcctcagctctccttggatacctgatattttatttcaagaaagagacaaagaaggaaaattttatttattttactacccacatataaaccgaagggagatgggactacccaaacatttgctgctcaattttgtgtcttgtgcttgaaagtctgccctaatgcataacaaaaactacttgtctcctaccttttgggatccctttaacaagtatttgccttctgaactacgtggataatttcaaaggcagagttccagaccagagaggtctttccatacaatgaaagctataactagctggttgtgtttaaccactgctatcacgctatcctgggactgcatagaactttgacaaaagacagacttcatggtacacaacttcaacagattttctgtcatattctcaccagcacatctgaatgaggctttgtgttttccttgctctcttgcatgttccttttcaactcatggcccacagtgactctcagatatttatgccaaaattgcatacaattgttttctgaatcataacttgtctatttttctgcctatgtgtgctactttcagtttgtttctcatcaacattttgactctcagaagagcctccatttgcccctttctctctttaggtatctaagatctttgaacacctgggcctttacatttgatccaaccctatcaaataatgaacttctcagagaggcatctggggtcctggaacttcatgttgatgaagtcatattatataatatgataaaaatattctcatgcagtattttaaataatttcaaattctagaagaagcaaatttcagcgacatgtcattgagtttttatttggtaaagctataattgtgcagtgtacaaagcactttttaaaaagatagtttattctgtcagggtatatgaagttagtatacagccagaacagccaagcctcaattcttgtaccttgtgtctttttattactgtttaatcaatagatatcatatgtttatgacagtttcaagaattgtttttaaacccaaacttaattttatgtttcagactattgttaaaaaaacaaaacaaaaaccaaaaaaaccctcactaatttgccctaattggatagggcaatcagaacaaaatctgactttcgaatatttaaaagatatgtaagtttgattgcattttcgtacattttaagcaaactaggttaacaacaacatagcctagtcaaacttctcaggaaacttgttttaataaatatgtaaaaat

SEQ ID NO: 12901 - DNA, 110 bp, Homo sapiens
ctatgtattgtacatctaaagagtaatagcttttcctgatacattttattatataaggtatgtaaaggagttgtaccacaccacttaaacataaaaaatggaaaactgct

SEQ ID NO: 12902 - DNA, 209 bp, Homo sapiens
gacagcagaccccagaagcaacatactgcatggttgaaatccttggtccaacatttaatattaatttttttaattttagagatgatcccaagtgtttagaaaactaagtaaactttgttgtcaagcaatttgtccatgtggaaagaatttaaagagaagctgaacaatggaataaacaaataaagcatgttttttcatctttcccatta

SEQ ID NO: 12903 - DNA, 861 bp, Homo sapiens
tcccggcatcctgatggctccgacaggcctgctccagagcacggctgaccatttctgctccgggatctcagctcccgttccccaagcacactcctagctgctccagtctcagcctgggcagcttccccctgccttttgcacgtttgcatccccagcatttcctgagttataaggccacaggagtggatagctgttttcacctaaaggaaaagcccacccgaatcttgtagaaatattcaaactaataaaatcatgaatatttttatgaagtttaaaaatagctcactttaaagctagttttgaataggtgcaactgtgacttgggtctggttggttgttgtttgttgttttgagtcagctgattttcacttcccactgaggttgtcataacatgcaaattgcttcaattttctctgtggcccaaacttgtgggtcacaaaccctgttgagataaagctggctgttatctcaacatcttcatcagctccagactgagactcagtgtctaagtcttacaacaattcatcattttataccttcaatgggaacttaaactgttacatgtatcacattccagctacaatacttccatttattagaagcacattaaccatttctatagcatgatttcttcaagtaaaaggcaaaagatataaattttataattgacttgagtactttaagccttgtttaaaacatttcttacttaacttttgcaaattaaacccattgtagcttacctgtaatatacatagtagtttacctttaaaagttgtaaaaatattgctttaaccaacactgtaaatatttcagataaacattatattcttgtatataaactttacatcctgttttacctat

SEQ ID NO: 12904 - DNA, 174 bp, Homo sapiens
tgaatgtggaattttttctctctctttttttttctttttaattaaaaaaaaaaaagcttggcgttcatgaggatatccagtcattttgtgctctggctgggaatataaaggagaaattcacttgcttcaatcattgctgcttcatattttacaataaactgtcccctgtcccct

SEQ ID NO: 12905 - DNA, 996 bp, Homo sapiens
gctgaagaagtgggaatgggagcactctgtcttctttgctagagaagtggagagaaaatacaaaaggtaaagcagttgagattctctacaacctaaaaaattcctaggtgctattttcttatcctttgtactgtagctaaatgtacctgagacatattagtctttgaaaaataaagttatgtaaggttttttttatctttaaatagctctgtgggttttaacatttttataaagatataccaagggccattcagtacatcaggaaagtggcagacagaagcttctctctgcaaccttgaagactattggtttgagaacttctcttcccataccacccaaaatcataatgccattggaaagcaaaaagttgttttatccatttgatttgaattgttttaagccaatattttaaggtaaaactcactgaatctaaccatagctgacctttgtagtagaatttacaacttataattacaatgcacaatttataattacaatatgtatttatgtcttttgctatggagcaaatccaggaaggcaagagaaacattctttcctaaatataaatgaaaatctatcctttaaactcttccactagacgttgtaatgcacacttatttttttcccaaggagtaaccaatttctttctaaaacacatttaaaattttaaaactatttatgaatattaaaaaaagacataattcacacattaataaacaatctcccaagtattgatttaacttcatttttctaataatcataaactatattctgtgacatgctaattattattaaatgtaagtcgttagttcgaaagcctctcactaagtatgatctatgctatattcaaaattcaacccatttactttggtcaatatttgatctaagttgcatctttaatcctggtggtcttgccttctgatttttaatttgtatccttttctattaagatatatttgtcattttctcttgaatatgtattaaaatatcccaagc

SEQ ID NO: 12906 - DNA, 217 bp, Homo sapiens
actaagttaaatatttctgcacagtgttcccatggccccttgcatttccttcttaactctctgttacacgtcattgaaactacacttttttggtctgtttttgtgctagactgtaagttccttgggggcagggcctttgtctgtctcatctctgtattcccaaatgcctaacagtacagagccatgactcaataaatacatgttaaatggatgaatg

SEQ ID NO: 12907 - DNA, 699 bp, Homo sapiens
aaaattaactgctaacttctattgacccacaaagtttcagaaattctctgaaagtttcttccttttttctcttactatatttattgatttcaagtcttctattaaggacatttagccttcaatggaaattaaaactcatttaggactgtatttccaaattactgatatcagagttatttaaaaattgtttatttgaggagataacatttcaactttgttcctaaatatataataataaaatgattgactttatttgcatttttatgaccacttgtcatttattttgtcttcgtaaattattttcattatatcaaatattttagtatgtacttaataaaataggagaacattttagagtttcaaattcccaggtattttccttgtttattacccctaaatcattcctatttaattcttctttttaaatggagaaaattatgtctttttaatatggtttttgttttgttatatattcacaggctggagacgtttaaaagaccgtttcaaaagagatttacttttttaaaggactttatctgaacagagagatataatatttttcctattggacaatggacttgcaaagcttcacttcattttaagagcaaaagaccccatgttgaaaactccataacagttttatgctgatgataatttatctacatgcatttcaataaaccttttgtttcctaagactag

SEQ ID NO: 12908 - DNA, 127 bp, Homo sapiens
tggtcacttagaataaaatagtttccttttcatgataccttcagatttatcttgactaattcattgttacgtcacttttctatagttttgagagttcgataaaagccattaaagatatgtatctctt

SEQ ID NO: 12909 - DNA, 1910 bp, Homo sapiens
catgttgggcagatcaagagacagctacaaaaatgaaggttttcataatgcaatgtaacatagtacttcaaagtattattcaacttcaagtttcagcaactacctacaaaagattctaaggcctagtagtatttaaactaagtttcagaatgttcccttcttgtagagagatggacaaccaaagtcagtgggacaaactccagcacagaagcctgcgaggaagcctatggaatagtttcctgtcctgagacgaaattcagattaggagatattttaggcccctgcaactggggaaggctactgtttgtttttgtttgcttattatttatttgtttgtttattgtgagatatttcaggtgggatcaaagaggtcataagaatttattttcttttgtggggtgtaactactagctttagattacccctatacacaagaatggccaacctaaaattatgtgtgtcttgtacagttagttatattagcagccctctgagatggcgtatctatcggaaggatttcaaacaccaattgctttacctgaacaaatggtgcttaccctttgaacagcagagtgaccacgtagaaggaaggaaaagggcaaaatcgcttcagttaaactgaaattaaatgaacaataaggcaactatataagtaacttctagtagcattgcctgagagacaaattattgtttgataattttcattgtgaataggaatccaatagatcatattgcttactttgttctttttatactatagaataatattttgttctctagtatatcaaaataccaaaatattatctcatattttctccctctttctcttactctttaccaagttttcctggtggcttggcttccctgactaaagaattaagtctcatttttactttccatttctattttcttaccacttggttggctccctttgtctctgtacctttaccaacattaggatctcacctctttcttcctcccttaattcataagcaccactcctatcaaagtcccatctcttaaccctgggtatcaaacaaactgtgagttttccagaatctgtttcccagttttcccctcagctttcctggtctcccatccgaactgcttctttgtgcacctcttgttctttctcttggctcccagtcttgattcctgtgatcactcttgcatcactaattgcacaagtgatttcaggtgcaattctgattagcctgcgtccacacagtgatcgatgatcctatgtgcctagaaaggacactgtgtgctgctcatgacctgcaacaggaaaaaagccatttcttgttagcagtgtaagaaccttagagcaaaggagttgaccttctgattgaatataagcacaaccatattaaatgaatcaatacaagaaaattatttctgatactatgtatgtacatatttcttctctaaaatgtatcattcttttctaatgtatatgatctaacaaaaatgaaacatgaaatgcagtagcaaccactaaaaaaaaaaattcaaggacatctaactttttctctcacttttgccctttgtttatccttccctgtgattagataaacaaaataaaaaacaaaatgctgtatttctcttcttacgccagtcagaaccaatccgaaaagaatgtgtgttgactcaggtttggagttatttcaggaagacagatattgaccttttaattgataaatattcttattatcctggaatgccagaaaagaactatgtcctgcttgtctagtttgtattcgctgactttctatgtgatatagatgcatttgtaatactctttttcaagtgctaaaggatttctaaaatttcaaactgattaatatgtttctgctgttctggattttgatgacatttacaataaaacaacctacatttgactttggttt

SEQ ID NO: 12910 - DNA, 1478 bp, Homo sapiens
ccgcatcaccaccagcagctcttgcccagagctgtgcagtgcagtggctgattctattagagaacgtatgcgttatctccatccttaatctcagttgtttgcttcaaggacctttcatcttcaggatttacagtgcattctgaaagaggagacatcaaacagaattaggagttgtgcaacagctcttttgagaggaggcctaaaggacaggagaaaaggtcttcaatcgtggaaagaaaattaaatgttgtattaaatagatcaccagctagtttcagagttaccatgtacgtattccactagctgggttctgtatttcagttctttcgatacggcttagggtaatgtcagtacaggaaaaaaactgtgcaagtgagcacctgattccgttgccttgcttaactctaaagctccatgtcctgggcctaaaatcgtataaaatctggatttttttttttttttttgctcatattcacatatgtaaaccagaacattctatgtactacaaacctggtttttaaaaaggaactatgttgctatgaattaaacttgtgtcgtgctgataggacagactggatttttcatatttcttattaaaatttctgccatttagaagaagagaactacattcatggtttggaagagataaacctgaaaagaagagtggccttatcttcactttatcgataagtcagtttatttgtttcattgtgtacatttttatattctccttttgacattataactgttggcttttctaatcttgttaaatatatctatttttaccaaaggtatttaatattcttttttatgacaacttagatcaactatttttagcttggtaaatttttctaaacacaattgttatagccagaggaacaaagatgatataaaatattgttgctctgacaaaaatacatgtatttcattctcgtatggtgctagagttagattaatctgcattttaaaaaactgaattggaatagaattggtaagttgcaaagactttttgaaaataattaaattatcatatcttccattcctgttattggagatgaaaataaaaagcaacttatgaaagtagacattcagatccagccattactaacctattccttttttggggaaatctgagcctagctcagaaaaacataaagcaccttgaaaaagacttggcagcttcctgataaagcgtgctgtgctgtgcagtaggaacacatcctatttattgtgatgttgtggttttattatcttaaactctgttccatacacttgtataaatacatggatatttttatgtacagaagtatgtctcttaaccagttcacttattgtactctggcaatttaaaagaaaatcagtaaaatattttgcttgtaaaatgcttaatatcgtgcctaggttatgtggtgactatttgaatcaaaaatgtattgaatcatcaaataaaagaatgtggctattttggggagaaaatt

SEQ ID NO: 12911 - DNA, 2798 bp, Homo sapiens
caaaagaatcttctggctagggtgttagatatatttatgcatttttggttttgtttttaaatcaagcacatcaacctcaagcccgtttagcaatgaggcagtgtagatgaatacgtaaaataaatgactttaaccaagtagctataatgggacttagcactgtatgcatacttaaaaaggttttgaaaaacaaactacttgagaaatatttgtttatatttttctctaacatcatgctatgtgtcagtctgaacatctgacaacagaaatttcagttattattctagctaagttttgaaaacatttgtcatgctgtttaatagaaaactgcaaaccagagacactgactccattaataaaccatattttgtgccgttttgactgttctgaccaaatactaatgggaacaattcttgacgtttttctgttgctgattgttaacatagagcagtctctacactaccctgaggcaactctacattggaacactgaggcttacagcctgcaagagcatcagagctgaccatacatttaaacagaaatgctggtttatttgcaaaatcaccagtatattttctattgtgtctataaaaaatcagtcatttaagtacaagaatcatattttccattcctttttagaaatttattttgttgtccctatggaaatcattcacatctgacaatttatatgttaaagagttttactctctctattttggtccaatttgtatctagtggctgagaaattaaataattctaaagtatgaagttacctatctgaaaatgtacttacagagtatcattttaaaatggatgtctctttaaaaattttgttacttttaccaacaatgtaatataatttatgtatattttattaataatagtgaattccttaaaatttgttctatgtacttatatttaatttgatttaatggttactgcccagatattgagaattggttcaaatattgagtgtgtttcaatatattatctggcttatttcaacatgagtaatatgagcaaaataagttaaaacctgcgtctgatcaattttcctcatgactagaactaaaacagtaaatttggacaatattaagcctcaaataatcatctccaaactccttctaacactttttaaatcagattggaagacatggacaaatcaggttcatgtgttgcatctttatgtcctttgccaatatccaagatcatcacatatggtagatattcacatggagtttcaaattcagaatagattaccattaccttcctgcccttacacatcctactccttatttaaaagttctatttgtgacttttcatttcctgaaagtttaaaaatacaatttgagaatgtttataatacattctctcctgtcttttcacggttacgtctgttattgctgaaatacaccacattttctttgttctggtcaaggttaactcaatatctgtgtgaaagagaactactaacaacgttacaatagaggctagatttgaaaaaaaaaatctatagatctaattgatacaattgtagaacaaaatgtcaaaataatgttttaagtataagagaagatggaccaaggagagagagatcatttgaaaatctaattgtagcttttctaggctcacattcatgtactacttttagcacccttatgggctgtgctcgccccctggacagttgagctttggattatcttcctcttcaattttccctctattgacccgagtgtctccctctgcttctacagatttatagtactccttggctcttttgagtctccacttttactcactgtctctgggatttttaagatccttttcttctcttataaatcatcctcttaatgaaaattagcctaacaaaagtttggagactggaatcctactttgagccactgacttgaaataactcttttggcaagttgcctgacatcctgtcttaccaaggtggcatatttgcatttttactgcttaaaacatttttttttttttaccatctttatccaaatttatcatattgatggtaggactaacaggctttttagaagctggctttaactttgagtctcaagctacaatgctgttgggcagcctggtcttcccacgtgagggtttaactttgtttatttgcctccagttattccaaaatgcttattaaatgaaagtcccaggaacatgtttattttagtcacctttgctttttaacaattttgttttgtaatcaatgagtaattcatgatgaattatttttgactaatggatagccgaaggccaggcttttaattctaataggtaatgttcttcttttgtcttattgaaacaatgagaatactctgtgcatttcaaatgcactccgattatgctgtggttttattcacataagcacaatatgtgttttatttataacttcataacaaacttataatataataatttaccttagcagacatgcaaaagcttattcttgtgtgacttactttctttaagctaataatataaaaataaatatgtatcttaaaaatctataataaaacattagaaattaaagatatgtgctttttattttgcagatgagttcatttgcttttgtagatgtgttttcagagctaggtacagaggaatgtttgctacctttagcggtgaaaaaagaaagagagtcaagaattttgttggattgtgtttgtgtgtgcatatatttgatatcatcattatatttgtaatctttggacttgtaatcatagcctgtttattctactgtgccattaaatatactttaccttatacataacgaa

SEQ ID NO: 12912 - DNA, 2936 bp, Homo sapiens
tttggcatacttcgttgtttaataatgactgcaataattcatacttcttatgtcatattttgtacatgtaccacacatataggatgacctctgtccagcagttctgtatatactcagaatgaaatttttcttggttttcttggtttttgtgaaagcagaataccgatgctatttttgttgcggaccagtacttgtttgtccttaaatactttatgcctctgaactttcatagaatcctttatgaaagttaacttcatcaatagacggttaatattaatagagccacagtgctaccagtagcaaactaggtagaccattatttgttttgcaacaagatgctaagcatggcagactttgaagttgcgtttcatcttaaggaccaagggaggtaactttaaggttgccagtggtggatccagctccgttaggctaagttgtctacagctaatgattgtgtctttattctatatccccagcacctaaaacagggtcacacaacattcactaaatgtttgttgaataaaagagttaacaaacataattgaaagctttttttcttcctatatttagcatgaagactgtcattgtttctctaggaaatgtatgaatctgaacttttttgacttgaagaaaaacattctttttttacagagatttggactttgatgataggttttaaaaatatatgataaatattttttgtacttgtttgattttttttttaaagactttacttcagaaagggaaagactgtttagaaagaatgcatattttttccctatttatttctgtggttactgcttttgcagtttaacagtgtttgtatttgatatttgtatatgtttgattgctatctttaaagtgccttatcagatttatggctctgtgctattactttttgagctttgcaagttgtgtacataataattctaaagaagttactttgtttgcaatgcatcaaatttaaatgatgtgattttttttgtattatttgatcttagtgacagtgttctattttgcatcctgtatcttatgttgcttttggtgttttgtgttgtgtgtcaacgattaagccaactaattctctaccatatataacttctggacatttttgatacaacatcttaattctttgtagatatggagataggtacagaactatattctaatgccccacaatggggctatgagaggggacagatggatgggcaaagaatagttttgtttaacatattaggtcatagttcttgattagtttttttagttaaagataaacacatagggtgtgatttctataccaaagatatgcttatttcagtattagaaaaatattcttcttacatctcctgaaaattgcaatttttaaaatgtgtaaaaataaattattattaaaagcacattttatttccatttgtttggattcattaccttaaaactttattgacatatttcaaagatataggaaaggtaaatgatttcaagaaaatccgtgtatttctaccatgcagatgtaataaatgttagcatttggctatattttcttcagacacacatatgcatgtaattgcaaatgttagatacatttgaagtttgctttgttacctgtttgatcctgtcccgttcctccctccccagagtccccagaggtaaccactagagggggcataatatagcatgtgtttttatatttttaatacaaatatattttttaaaagcgctacaaaatattgttttatatatgtggtagccagcttccagatggccccagtgatccctggcctcctggtgttcatgccccagtatagccttctcctgcattttacagtgctgacttttgtaactaccaggatattgagcaaatgcagtgtgtgatttctgaggccatatcttttactcttttttttttttttaagagacaagatctcactctattgctcaggctggagtgtggtggcaggatcatagctcactgtaaccttaaacttggactcaaacaatcctcccatctcgcctcctcctataaagcactgggattacaggcatttttgctcatttttctatgttgttttttttacttgtcagtttttagatattacatattttgaatactaatgatctgttatgtatgttccaattatcttttttagtctggtttgtcttcatattttggttatgaaatcttgaatttttaaaaacgtaattttaccaatctttcataatgatttgctttttctggtttttgtataggaaatgtcataaaaatagtcctattcagccttccaaaagttacaaaatttttgtttttaacatttagatgtttagtccaactgaaatttgttttcttttatggcatgattttggaatcttgttttaattatttttacatatttatagctgttcctccaagtatcaatttttcaagtgcaacatctgtcatgcagttactatgtaagggccagattctgacctttctgttctttttatctgaaggaaatttgaacatgccacccccaaatatgccgatttggcatactgattatttcgagctaaaggtgcttgactaacagtagttgcagaaatggctattttaactgtcctttcctacctgtagcaagccatacaaacttctttgataaagatgctttcctgataccaagatgagaagatggctctaatcagctgagacagcaccagaggaatctacaaacaagaaactattagtttcttaacatatatttaccttccacagtttctgcctctggaagcctaaaactgctttccttcgtcttgtcacacttctctgaaatgtattctttgtggaagatgctatatagtccagagttgtaagccactacttgtgtttaccttttcattgagttttctcctgtgtgatgtacgttgcatatattaataaaattacttgtttttctcttgtt

SEQ ID NO: 12913 - DNA, 608 bp, Homo sapiens
aaaggattcagttttgcttattgtgtgttgattgtataaatgcaataagaaaatgtaaaggtttttgtctatgaatatgatccctaatgtgtttcttttgacaccttagttccttactgtttacagtttaggagtactgataggggttcatgcttaataaacatgtcacaatacagtaagtaaagtggttttgtttgtttctttgagatggagtcttgctctgtcacccaggctggagtgcggtggcgcaatctcggctcactgcatcctctgcctcccgggttcaagcaattctcctgcctcagcttcccaagtagctgggattacaggcacgtgccaccacgcccagctaatttttgtatttttagtagagatggggtttcaccatattggtcacgtcacgttggtcttgaactcctgaccttgtgatccaccccgccttggcctcccaaagtgctgggattacaggtgtgagccaccgtgcccggccaagtaaaatgttttttaaaatggttatgtgcattattcataaaaaataatggtgtccagtctttttaaacttgtaaagacacatcttattgaataaagagatgagagcttaagtttgt

SEQ ID NO: 12914 - DNA, 171 bp, Homo sapiens
cctctaaatcagcataactcaacctgcttttagaaggagaaactgcctactactgtataacaaaaaataagatcataataatccacaagtgcttctcatattgccccaggacagatgtcttgcaagagtacgcttcagcttaaagcccaaataaacagtttggaaaaaagg

SEQ ID NO: 12915 - DNA, 1848 bp, Homo sapiens
aaaccctacgatacaattattgaatgaagcgttttacaatacattgcacttaatccattgtttaaatttacaacttaactttccaagtttatatcctagtcaaacaaaatttacttggttggtccaaataaaataaattgtttttgactaagtgactaagacatacacaattaattatattggttaattagaaatactcagcacaatatttaatgagaaatcacatcagtcacaagaatcaaatatgtaaattatgctttaaacaataaagtaggatttaaatcatttaaaaaactaaactgcagggaatttcagatgacataaagcattatttcattttgagggtagtttattttttttctctgtccttttggtatgattaaacaagaaataaaaggtgttgtggaaacttaaaattcttaattcaaaatattcggtcctgtccactgtttataatattttgtgccttgaagggaatgtcacaggaggaaaaggaagactaaagcctgcatactaaatgctctcataactataaatctcttgttgttaaaaaacatctcttgcaccaaatcctgtcttcagtcttttgtttaaccctcaatgaactaccaattgaaggcataagttggtcttaggttgtatacaggtgtcaaactccacttgacatttactgtataatctgcagcatgctatagaaagtggggaggaagggaggaaaaataattacagtcaaaatatttgcaatctatctactcattttgctttcaatcactagagtgcattatgtttttaatgcaagtttgtctgggatgtcaactgcctacagatgtttattactagcagaatagattatttattaatagattgtttcttttcatatagtccaatgtttcatcatcaggaactttcggttttaaaaaagaaacattacttttgtctgctaaagtaaaccatatatagggaaattaacacctaggaaaagaaaactggcaagagaattgatgaggtattagtggcttagaagaattagtaatataagttgggaataaaggggtagcccgacagtggtaagtaaaaatgtagtactccattgtttttgctatttaaatataatgtatcaaaaacctttattctaaaatttccacaaatgattccttttatccatcttcttgtaatcctaaaagcatcttctcactatgtgctgtagtttgaaacctaacgaatcctcctacttgagacactgtagaaaagtaaaaattgttgcttctgttttgttttaagaggaaatgagaaggccagcagaagtagattaaaactagagagctggtttattaaaataagcagataattatccaggcttaaagtaatagcttacatgttttgaaaatccttgtacttatttttgtttttattgttgcaaaaaaatgttaatgggctgttgaaatgacctccatttacttaaggtaatccaataaggtcttttttaaatatacaaattttactcaagtttaaattgtataaaactgcttagaaacctgaaattttatagtgtgtaatatcttatgtgtatatagcatcctgagctgtgtgatacagtagatttcttcttagcagaaacatgcgaggtagatttaataaacaacaaaaatcagcttatgtttctacttattgaatctgctttactttttagcaattttcttccttgtgaacatgaaccatataaagtgtctgtgacttaatgatttcatgtaagtctgtcgcatacatccttcttttgtagcttacaccatgtggatgctctgtctgtagacactgcttgataaaaggagaataaacctcttacatttt

SEQ ID NO: 12916 - DNA, 224 bp, Homo sapiens
gtgactatgcatttccagagaaatgtggacttttcatattatgtggtaaggatttttttttttcaagagtgattatggagctagatttttaaaaacactgtaaaatactaaatgattccttctgttgtaagttgatatatatttgtaacctttgtgaaattgtattcatatgaaaatgtcagctcaaattcttgggagaacattaaattatgtaatatttaatt

SEQ ID NO: 12917 - DNA, 1338 bp, Homo sapiens
aactacttatagcctatggtcccggatgacatctgtttaaaaacaagcacaacctgcaacatactttgattacctgttctcccaaggaatggggttgaaatcatttgaaaatgactaagattttcttgtcttgctttttactgcttttgttgtagttgtcataattacatttggaacaaaaggtgtgggctttggggtcttctggaaatagttttgaccagacatctttgaagtgctttttgtgaatttatgcatataatataaagacttttatactgtacttattggaatgaaatttctttaaagtattactattaactgacttcagaagtacctgccatccaatacggtcattagattgggtcatcttgattagattagattagattagattgtcaacagattgggccatccttactttatgataggcatcattttagtgtgttacaatagtaacagtatgcaaaagcagcattcaggagccgaaagatagtctgaagtcattcagaagtggtttgaggtttctgttttttggtggtttttgtttgttttttttttttttcaccttaagggaggatttaatttgctcccaactgattgtcacttaaatgaaaatttaaaaatgaataaaaagacatacttctcagctgcaaatattatggagaattggggcacccacaggaatgaagagagaaagcagctccctaacttcaaaaccattttggtacctgacaacaagagcattttagagtaattaatttaataaagtaaattagtattgctgcaaatagttaaattatatttatttgaattgatggtcaagagattttccattttttttacagactgttcagtgtttgtcaagctttctggcataaatatgtactcaaaaggcatttccgcttacaatttgtagaaacacaaaatgcgttttccatacagcagtgcctatatagtgactgatttttaactttcaatgtccatctttcaaaggaagtaacaccaaggtacaatgttaaaggaatattcactttacctagcagggaaaaatacacaaaaactgcagatacttcatatagcccattttaacttgtataaactgtgtgacttgtggcgtcttataaataatgcactgtaaagattactgaatagttgtgtcatgttaatgtgcctaatttcatgtatcttgtaatcatgattgagcctcagaatcatttggagaaactatattttaaagaacaagacatacttcaatgtattatacagataaagtattacatgtgtttgattttaaaagggcggacattttattaaaatcaatattgtttttgctttttc

SEQ ID NO: 12918 - DNA, 759 bp, Homo sapiens
actaggcttatttctaaaaagtcaagtctattggctttggcccaaaagcactggtatctttgtattaaattcatgtttattgtcacaaaaccattatttatacctatacagttgtactgtttcttttaaagcaaagccatttaacatctttcttcattcctaatttggaaattaaagtttacctttctgttaatctatgtataaatgttactctgagttattaatgtggattttaaaattgtaagcaatagaataggaaataaaacaactacctaatacaaatatttctgataagactacaaatatctgactgagctggggattaaagtagaggtaactgtatcttaaatgagtatgatttccttgtaagttaaaaaaattgaaatttaattgtagacttcaatagtccaagttttgaaggatgtttgagcttttgtataatgccatttatacctgcagttttacagataatgtttgactgcagttgccttggaaattcctccaaagtttgccttcatctctcctctacagtttggaggtgatggtgcagcagtggaacatctcttgatgcaccacactacttgtgttctgtgaagtgatgaaagtataactggttctagtttgcacactacacacatagttttgtgaagcttcagaaatgttttttcttttccttgtggccaaaccagtttgttaatctgattatattcatctgctaatgatactaaagttaatgtaataaagcatttaaaaatcaga

SEQ ID NO: 12919 - DNA, 851 bp, Homo sapiens
tggaacctgttgggagtttcttcaccgaagaatatctttctagccctcagccactacaaatgacagaagtgatcttgaattatttactcccttcagctcctcctttctcctactgacacatttttcctgactttgttcaaagaggaaaggagaaaaacaaacagaccaaatgcccaggagcccatgaagtaatagcgtaaagtaaagtatgatatggaaatgtgaagtttgcaagagaatgatttccaagacaattaagaactactggggcaatgaatgcttttaggcagtaatcaaagattaaatggacccatgatactcttcttcacagtaacaggggaaaagttcaagaatacagacttgaattgcgatgtgtattacttctagggccttgtaatgttaactgtctcatctggaaataactaacatatttggttttaagcctgaaattgtctgcattatccctaagtcacattggaagtgaacttggaggatgcatattttgatatgctttgacagctaacagatttgtatggtttagtggagtctggttattttgacagatgcatgttttttttaaatagatgcaatatacatttgaagacattgatatttggaattaattacgtttgtttaagtcacgcaaaagattttcagaaaatgttcggatataattagctctgttaaatacccacagaactgttatcaggtcttatatttattttcatctggttcctctaatacagtgctgtccaatagaaacacaacagccacaaatgcaggccacagatgcaaatatttaacttcccagtagccctattttaaaaagtaaaaataaatgtttgtttgtt

SEQ ID NO: 12920 - DNA, 323 bp, Homo sapiens
agatggttgcccaggctggtctggaactcctgacctcaagcgatcttcctgccttgacctcccaaagtgctgggattatagccatgctgccaaccatgtgtagggtatgtatatgttcctataccataataaaattttaattacatttgtaaggtatgtaattatatgtatttctgtataatatgtacatataaatatgctaattaatacaagaacatattgaattataatcaatatatataattttagatgtatattggaatgtttatctttctaataatacaaaactgatggttaaaaaataaaatgcacaaactccccaa

SEQ ID NO: 12921 - DNA, 1238 bp, Homo sapiens
gaggctcacggtcatgacagcaattgcagaggaacccagagtaattgagactgactgaccacctgacaagctgccacggggaactgcagcttttgctgaatagcattttacagtgtttgttggaaacctgaatttggttctgacttctgtggctgtttaaaatatagggcttgtgggtcacttgaaaagtacctgtagaagcccggataacttgaggggaatgtctgtttgtacttttggaaattatttaactgcttggtttatcctaggatcagaggctaaacaactccatagtcaacacttttccacctgacattagaaccctgtaatgatttcattatggataggggaagtctaacaagacaatcgattttaaacagggttttaatcaaataagttcttcccacttttaagctgatgaaagaagtcattatttcttgtgaatattttttcctggagagccttatcatgtattttatatgcttatgtggtgttggatgacatcatggaccatatagcttttatagagaatttttctcaccataggactgaggtctcaccaggtgatctactatgcaaattcctacagttttctattcttaagaaataagggctgggcacggcggatcatgaggtcaggaaattgagaccatcctggctaacacggtgaaaccctgtctctactaaaaatacaaaaaaaattagccgagcatggtggcgggcacctgtagtcccagccacctgggaggctgaggcaggagaatggtgtggacccaggaggcggagcttgcagtgagccgagatcacgccactgcactccagcctgggcgacagagcgagactccgtctcaaaaaaacaaaaaagaaaaagaaaagaaataagatatgatgattgattacttggaccagtgttagaccgacctgtgttagacgaacctgtgttgcctattatattggcagcaccttccattagcaatagctgaaaaattcagagaagaatttagaactttcactttatttttgccattcttcaagaagttgctgtatatttcagtctggttataccttcaattgatcaataacttcaattataggaaaggcatcttctataattttaaattactgtaaaaaaaagataccttttaaagccttggattatacttaaaaattgtaatggaagaaatgcatattaagttatatgcagatattaaacatatctgattctgaagataaaactg

SEQ ID NO: 12922 - DNA, 1534 bp, Homo sapiens
ttgatgacagttgaaatcaataaattctacatttctaatatttacaaaaatgatagcctatttaaaattatcttcttccccaataacaaaatgattctaaacctcacatatattttgtataattatttgaaaaattgcagctaaagttatagaactttatgtttaaataagaatcatttgctttgagtttttatattccttacacaaaaagaaaatacatatgcagtctagtcagacaaaataaagttttgaagtgctactataataagtttttcacgagaacaaactttgtaaatcttccataagcaaaatgacagctagtgcttgggatcgtacatgttaattttctgaaagataattctaagtgaaatttaaaataaataaatttttaatgacctgggtcttaaggatttaggaaaaatatgcatgctttaattgcatttccaaagtagcatcttgctagacctagttgagtcaggataacagagagataccacatggcaagaaaaacaaagtgacaattgtagagtcctcaattgtgtttacattaatagtggtgtttttacctatgaaattattctggatctaataggacattttacaaaatggcaagtatggaaaaccatggattctgaaagttaaaaatttagttgttctccccaatgtgtattttaatttggatggcagtctcatgcagattttttaaaagattctttaataacatgatttgtttgcctttctagatttctttatctttctgaccagcaacttagggagcagaatttaaattaggaagacaaagggaaagattcatttaaaccatatttttacaaagtttgtcatttgccccaaggtcaaattttaaattcttaattttcattttatttcccattttaggtaaaagtttgcatttaatcttagaattatgttatttttgttagtagtgtggaaacttagagaacttattgtatggtgccttgcaaaaatagagatagaaagattttagcatgcataccaatatagtatattacgcaatatataagcacacctaattaacagattaatatcagtaaaggtattgctgctggaatgaagaaaatgggatacgtttgtttctttttttctattgttacataattgccatgtggacttgtttatgattattgtgtagagtagcatttaagatttaactgtagcaaaaattactttaaccgctgtatttaagttagcatgttaattaattgtgtagacattttggcacaccatcacttttaactatatcataccaatggttttgtgcccataataaaaatggaaaaacctgttgaatgttacgtattggtatctttaatttcaacagtgggtaaactggtttcccagtatacaattcattgaaagcaaaattgattaattatttccatttaatttatacacactcaatacaaaatttaatgttgactttacgtaataaagtataatgcattttcttttttactgtttatgtatagtttacaaaataaagaatcttgtaacc

SEQ ID NO: 12923 - DNA, 637 bp, Homo sapiens
aaacaaagtctatgcaaaccacttaaaaataattccatagtagtttttcaggtcacgtttttgattcttatgcttcttgccagaaatacattatgataaagtggaaatacattacgatgaagtggaaagagcaaacactttggaatcaaacagagttgcaatcaaacctgccatgttctgtcatgaatactcacaaattatttagtatacctgaatcttggtttctttttataactgagtaataatggttacatctcaggtagtttgaggattgactaaaaaaatgcgagaatgttgtatgtgactgaataacaatttttactctgcgaagccaaagtaaatataatattatcagtaactttatccccagtgtcagtatttataaaatgtttattaaggctagaaaaaatgaatacaatatcctgaaggtgaaatatattctcttcaattagcataaatatgatttacataagttagctatacagctattgagatagtactttctagtaaacttaaactactttttaaacatacattttgtgatgatttaacaaaaatatagagaatgatttgctttattgtaattgtatataagtgactggaaaagcacaaagaaataaagtgggttcgatctgtt

SEQ ID NO: 12924 - DNA, 2557 bp, Homo sapiens
tttgcagattattcagttataggggtgattagcatcaagggcacactttggctactgattagacaattatacctacatgggtaacatgtgctaatcaaacctgctgatgctacaaatgttaatttctgtctttataaaaatatgtctcaaaagaacaatgtgtgacaaattgtggtttttttttttttggtctaagttacatcagtgttgttttgtttaaaaagccttcatgagatacaattcacataccatataatcacacatttaaaatacacaattcagtggttttaacatatttaaatacatgtgcaatcatccccccagacaaattgtgttttctaaaggatgtgtatcacttacctttggttacctcatagactgtagcaatcttagtgtatagacattttgcaagtcatataaacaagtattgatttatatattttgtctcaaaagtggaaaaattatattgtctaattatgatgaattattttcttgtatcaagctgaattttctaaaagttaaccttgtgggctgttgccaaaataagagtatttagaggacactgattagttgtcaatactttagcaagcccactaaagataactatattccttttgcatgtgcttgggtgatcagtttttatacaggttgcaaaacatagtattcattaaagacatgaatttagaattgatttctttgagtggtatttctcttgattgagcagctagacaaaataatctgcaaatttaaatgtggcgcatttgactcattcttgagaaattctcataagtgaagaggattagcccttaaggttttaatacctggtacagtagtgaaccgcacagatttcatgaacttaggatgtgttttttattcatgaaaaacttagaatagtgaactattaatatttaaaaacgagaaatacaacatttaaaaaattaagagtattttgcattagtgattatgattcttatcccaaaattctagaaagtaataaattctgtatgaataagcataaaaaataaataaatatgcaataacattaaattaaatgtctttacaagaagcagtgaaggcactggtcttaagtgagaatatttgcctgggagtagagataaagacacaaaccgaatgtgaaataccaggtaataattattttgcattaaactctttttatcgggaatagtatgatattttcagtgtcactccattcatgttgatttggagctgacagttattttgtgtaagcagagatttaattttatattgaaagtcagtgcaaaattatgaataggatatactaataaatacaaagtaataacaaaagtcaaagcagtgttctaaataaaaattctgggttccttaaaaattattttaaatttatctttgaaatagttttcttagattaatctcaggatatgagaaagtcaattaagtgtgagtaaagttagtatcattaaacaaattgtctattaaatgcaagacgtggtaatatacagaatttatcaggcattaccaagtctaggcacatataggaaatgcagcactcagaatggtttcaatgtagtagttgatgcttgtaaggtaggggagcttattcagacatagtagatagtttctctaatgctgtctcaattgctggcctttggctacctgtacttccccattatggcagcccattcagtcttgagttttcttctctggacaccttatgctctgaaatcatgagcgaggctgattcaattggtgatttgggtagaaagcagtatgttttgctgacattaagatgtaggttatagataggtttagcctttaagtgtatgtttttatactttaaaataagaaatataaccttttaagctattccacctcctcccccagcctatctcaaactggtggaatatatggagagatcttgaaagaggtaaaataaaccttcactgctccactccaggtgaatccgcccactcccactgacctagtagaatttgtaatttaatacttaccttctatttctgaaatcagttgtgaactgttgccttatgttcagaggtttaagaacctcagtgaattcattttttaaaatctgctattctgagaagcattgaatgaattcttaacaagaagactcatctgtagctgtttgctgactcctatgagcccataagggttctgtgcttagcattaacaaaataaggtttataggtaaagccaatgtattaatttttttttgcatggagggctttaaaatttgtgctctttttcatattttattcatattcaatttatggtttgtaactgctttttagggagataattatatgttataaattagttttggggggaataattgtgcaaagaggataatttaatttacgtgcttctgttattcagaataaagagagaagactacgctgcatattcaagagttgtaccttaacattggtgaaacattttttctaagattttcaaaaggaatatgtgtaaattgagaaatcataaccactgtcctaacttggtaaacaaactgttcttaaataaagtatttaatgatttt

SEQ ID NO: 12925 - DNA, 2263 bp, Homo sapiens
ggagactgacactgaagaagcttaaaatcacttcacacaacaaagtagcacaaagcagtttaacagaaagagcacatttgtggacttccagatggtcaggagatgagcaaaggattggtatgtgactctgatgccccagcacagttaccccagcgagcagaatgaagaagatgtttgtgtgggttttgttagtctggattcggatgtataaggtgtgccttgtactgtctgatttactacacagagaaacttttttttttttttaagatatatgactaaaatggacaattgtttacaaggcttaactaatttatttgcttttttaaacttgaacttttcgtataatagatacgttctttggattatgattttaagaaattattaatttatgaaatgataggtaaggagaagctggattatctcctgttgagagcaagagattcgttttgacatagagtgaatgcattttcccctctcctcctccctgctaccattatattttggggttatgttttgcttctttaagatagaaatcccagttctctaatttggttttcttctttgggaaaccaaacatacaaatgaatcagtatcaattagggcctggggtagagagacagaaacttgagagaagagaagttagtgattccctctctttctagtttggtaggaatcaccctgaagacctagtcctcaatttaattgtgtgggtttttaattttcctagaatgaagtgactgaaacaatgagaaagaatacagcacaacccttgaacaaaatgtatttagaaatatatttagttttatagcagaagcagctcaattgtttggttggaaagtaggggaaattgaagttgtagtcactgtctgagaatggctatgaagcgtcatttcacattttaccccaactgacctgcatgcccaggacacaagtaaaacatttgtgagatagtggtggtaagtgatgcactcgtgttaagtcaaaggctataagaaacactgtgaaaagttcatattcatccattgtgattctttccccacgtcttgcatgtattactggattcccacagtaatatagactgtgcatggtgtgtatatttcattgcgatttcctgttaagatgagtttgtactcagaattgaccaattcaggaggtgtaaaaataaacagtgttctcttctctaccccaaagccactactgaccaaggtctcttcagtgcactcgctccctctctggctaaggcatgcattagccactacacaagtcattagtgaaagtggtcttttatgtcctcccagcagacagacatcaaggatgagttaaccaggagactactcctgtgactgtggagctctggaaggcttggtgggagtgaatttgcccacaccttacaattgtggcaggatccagaagagcctgtctttttatatccattccttgatgtcattggcctctcccaccgatttcattacggtgccacgcagtcatggatctgggtagtccggaaaacaaaaggagggaagacagcctggtaatgaataagatccttaccacagttttctcatgggaaatacataataaaccctttcatctttttttttttcctttaagaattaaaactgggaaatagaaacatgaactgaaaagtcttgcaatgacaagaggtttcatggtcttaaaaagatactttatgtggttgaagatgaaatcattcctaaattaaccttttttttaaaaaaaaacaatgtatattatgttcctgtgtgttgaatttaaaaaaaaaatactttacttggatattcatgtaatatataaaggtttggtgaaatgaactttagttaggaaaaagctggcatcagctttcatctgtgtaagttgacaccaatgtgtcataatattctttattttgggaaattagtgtattttataaaaattttaaaaagaaaaaagactactacaggttaagataatttttttacctgtcttttctccatattttaagctatgtgattgaagtacctctgttcatagtttcctggtataaagttggttaaaatttcatctgttaatagatcattaggtaatataatgtatgggttttctattggttttttgcagacagtagagggagattttgtaacaagggcttgttacacagtgatatggtaatgataaaattgcgatttatcactccttttcatgttaataatttgaggactggataaaaggtttcaagattaaaatttgatgttcaaacctttgt

SEQ ID NO: 12926 - DNA, 1232 bp, Homo sapiens
tcctcaaaatgttttttaatcctcaactatatgaaagcatttgaatttggcttatcagaataacaagcttcagtgggaaatacagcaattatttatttaaaaaatcagatttaagatggactttcttattgcatgaaaaagatggagaaacatgccatttttcagtgaagattctaatattttatctattttgttcattgaattccatggttaaatctcataaaatatatactttattaaatcatccaaccaaagcataggaaacattgacccagaacctgacttaatggttttgaagatttactatgcaatagggtaactttgagtttcagcaaatgtctttaggttgaaggaattacctatgtcatgaaggacctgtctgtggtttttcaatggagtctttaagcatgatcttttttctgtctagtacttgttttcattctggccagcagttctacattaaatcaccttgtcaagggctctgtttacatctatacattttgaagatgaaatttttagccttaaagtttatattctcaagtccttttacaatcagtgtgtctcctgaactagcacacaggctgtagaaacagtcttagaaatcattgaaagatttgattatgaaagaatagcaaaattatatttcttgacatataaaaagttggtttaatgcctttatttctctttaaggaccagaaccaggaatactatatcgaaaaattagtctgtggatttaacactgacttagcatatagcttaaagttgctcttttggtttttaacttcctccatacataagcttcaaggacaataagatgttaaaaaggaggaaataattatttttattttgacactgtgacagttttggtaactaggatcctagggagggaaatgtttgcctgttgaacttctttctgttatgagaggatttagttaggtcattaagatgttgatcacacagcttcaatcacaatatgccaagtataacctggtttcgttagaggtgtctacagtccagatgttcttcgtaataaaagcaaagtttttgaacctctgagtccaaagcaggctggttggcataatatgtaatttgaaaaataaaatcttatcttgcagcactatcagtatgttgaatttattatgtatattatttctaatatccgaaactaaatacttgattttttaatatgtgtgtttattttatgatattgctattaaatttttattatctac

SEQ ID NO: 12927 - DNA, 109 bp, Homo sapiens
gtaaggtggctttgattggtgtacagtatttcaaaggactagtattaaacttgtgatttttgttttgtttttaaggaatacaaaaaataaacatttactaaaaacgttt

SEQ ID NO: 12928 - DNA, 4781 bp, Homo sapiens
taccaaccccgaaaagctatgcatatcaagaaaatcaggggctgctccttgtaatacagatgtagtacgcacttgccgctaagccttaccaggagactctcatcccttaggtaggagtgatgccactttaaaaggagaaacacctgcctgcagtgaatgggactggaatttccccagtagagaagggtgcgagaaacatcagggtgcagaattgataccagacagaaggtgtctatgtgataatgagtttcagaggctgatctctgccaaataccttaattggtgatgccttcttggcaaagagtacaccactgtaagatattctgagttcaagaaccctgtccagtgccccctgcattgcttttccttttaaaaagtataggtctgctacaatagcaaatgcacgtacgtgggttttttgcagtttcttctcagttttaattttgcttttcctttataatggggtcattgttattaatactaattgttctttctggtttagtcctcattgccacttttgtccttatgtttccctagaacacgtacctcagagactttggtatcagtcaccagtaccagggctgatatctacaagtcacattacatttgtcatgttccaaagtagttacgaggcttgttatttttttttcattccccaggcctatttccatagatagctttttttgtttgtttccaacgaagctgctgttaaacgaaactgagaaaaactttgccccggaatagcactttaatagtcaaaaatgtgtttacctgtctgattgagtgagccttttggtgagctcagctgagatgtagagggagattgtaaaaggttaaatatacccacaccacccatgaaagtcactgtttaagttacatcatcctccaaataaagactgattctttacctggaaaatatattgcttccaaagacatcagattcagtggattcctgtaggttatagaatattggcttccaaacaggcttgcagggaccatatgctgttggatgacatataaccaggtccacttttatgaactgcatagctgacttggttgtccttaaagaggaaagcgaaaggttagggtaatagcaaagggaactgtgccatcagattttatgccaaaactgttgaataattatgcagtcctgcaagaaagtggttatatgtgaggtgcgtgatgttatggaaagaagacaaaattagtcatccaaaggcttaatacccactgtgccaataaccagctgcctggctttggacaagtctggacctcaggtcccttatctgtagaaggggcagatgacatgagctctgagcactgttgaaatggtatcactgtcacacagaaccaaaccaatattcacatccttgctccttttcacaatgactttaaagatttttgctttcatctcttggtccacctaacattttcatgcttcattacttaaataagaatgttggttttgagaaatagcattttaaacaaattgtggatcttctccttccaaaaaaaccattaggaccacatctgcaattaagatttaatattggtgagaatgagtggttttatttaattttcccttaaaagcaaaggagacagtaatcttaataaattcataggggccgtggccacatcaggtaatggggttatgatgtccaagattgcatggatcacattggtgatgagagcagacccagatgtttagtcctcactctgtcaccatctgaggaggtgaccttggacaactcccttcctctctctgggatttaatctttttcatctgtaaaatatgcaggtagtactcgagggtctacaggatcccttctagttgaaacatttatagttcacagaaagtttgcagtcttccaggataaccaacccccgttgcatgagacaagcaaaaaatgggtccatgaaattggatacttttgccatccaaactttacaacaaacattatctggctctgtaattgagagcagtgggcttggttttaaacctagccttgattagtttgtttatagataactgttgtggaaggtgatagaactagtcatggagtttgatgagacatctcttgaaaaggactgaactgttgacttctggttagaagtgctttgggcagtcacataaagaaatgagcagtgagaaatcaggagaaattatgactcctgttgggctttctggactagcattgtatgtttttgggttgcagaaaagttttaacaccacctcttagaatataaaaattttccagttgtcatggaggtccacagattcattaccatgggtttatatgcccaaagcaacaacagaggacttaagttcattttgtgatactgtatggatgttaccccatcctattcagttgtcattccacccaaacccatgtgtaggtttccacatggaaaggagaaggcatccattccacctagacattgaatagtgataataagctaaaagtgggcagattttcagtggagcaagagcagaaatatgcggccaaagaatgtttcctgattggttttgctgctttagactgcagtggggagagcttatgtagattttcaaaactttctccctctttaaggcatcataatgctctcggttttgataacaactgacataaagggaggttgacttaaaatgggaatttctccttccaaaaatgctacactcttcctatccatcctacagcttctttatgaaatgagaggccctcctgctagaatatgaaatgcagaagacctcatgactttcagctgatttttcaaagataaagtgaactgttcagcttcatagaaattcatgcgagtgtgactgaacgtgtgtgcatacacactcgtgcacattggactcatttgggcagttttaaaagcttcacactaaatccaaagcctcgtcctttgggtcgtatgtagtcgtttgtaaaatcaatttctggcttctgagtcatcctggtcatatctctagcaatgtttttcttgaaattctgaaaatgattcacatatgtgtgtacatttaattcacttagatgatctgtaaacttggatggtatttattctaaatggggaaaacaattttatatggaaaaatctatgtaatttataatggttttgttttatatattatattttcatatctctagggcacatctatcctcatctttttgtataccatacttagcaaaaagaaatactaatacttgactaaaatctctaggaaccaaacgtgatacatgtgatatatagcttctagaaatcgctctaaaaatctctgaatgtctcatccatcccaagcattattgtgctgtgtcattatgtccagaatgatttgtcttggatgcttatgagcatttgtttttcacaactaaggttgaaagacctgacatctcacacaatggggttctggaattcccctttcctcctttatctgtttttattgtttgtttcatttttaattgcaccagtctatgttgtcgaaactttgttttgaagggcaaatgtgagataacaagaaagcaatgtgatggaaagactggatgaatttacctatggctatgtaaattattttaatggactgataagatgtttcaagtctcatgcttggatctttatttattggtgatctaggatctgctcagctctttagcacatgaagaaaatcaggtacaaaggacatttgcatgtttggaacagcatgctctaagccccgtgcagccaacacaaattaacttgactgtagaaacaccaattccagctgctggaagaaatggtttagaaaggcaaaccagataccttttattctgccctaggaaatacagtgttgatcagtgctaaaactcttcagtggcagtcactgtggttcttttaactggggatttcctttcagtgtttcatttggtaccaaaacagaacatttaccttacatttcagatactctgttttctcagcattgttcagatactttcctttaccgctcttcacgtacccttttggcattgagtaattctataaatgtttctatccttggtttttaaaccaagttattcatactcttaaaatatctaccaaatctcattgtattttcacatattttgagcatcaagatactggtcattttaaaaaatccttcagtaaatagcacagtttattttcctaatgacatttttagggtttcttcattgatcaaccaggtttgggttacacaaatcaattgtgggggaaaaatcaaataaaacaattgcttattatattttccaaaggactgagcatttatcttttattcacgaagatatcatatgaggatgataatgatctttaacagattttttagagatagaatttataaagaggctgatactaagaatactacaatcaaaattgaagctagagaatgtaaaaatagaaagtaaatagttctaagaatattctggcataaattatttttatttagccaataaaatagcctccaaatgtatatctcagacaccatagagctgctaacaatgagaatcaaggaagatgcttgcacttagatttcgtttgttgtatttcagtagttctggatgtcctttgttaaaattggaaaatggaaaaatgtctcgacagaaatgtcaatctggtgattctgtgaactgtaaaatgttcacttttaaaaataaagttgtaaacaagttactcatataagttggtattacagtagcaaaaacagaaaaccatgtgatccatcctgtattttgattgatgctttaataaagggtttgcacagctgtgtggaa

SEQ ID NO: 12929 - DNA, 705 bp, Homo sapiens
agaaattaaactaggttgggcatggtggctcacacctataatcccagcactttgggaggcagaggagggaggatcacttgaacccaggaattcaaggctgcagtaagctacgatcacaccactgcactctggcctgcatgcactctggcctgcatggcagaacaagaccctgtctctaaaaaaagagaaagaaatcaaactaatcatgctgctcatggatttttccaataaatttcttgttttggcaggaagaaatgaacactggtattagacttaaagattaaatttcctcaaacatgtcctatctgtagtagttcaactagacaccttttaaagtgcctctaaattcatcagatggccaaactgtatttataatccacttaggcattttgaaaaactttcaacctgtaaaaagttacttttatcttggatttattatgaagaactttgtagttgctttgtaatttcccataaattgtctttgaaactaacattttacactgaattattttgagattttaaagaagtaattaagtgcaaaatggtatataatgtgtactttttctacttttaggaaaatttaatgagagcttattgcaaaaattgttataatttggtcattataagtgacttttagtaaaagtaccataaaccttatgttatgccacagaaattcctttaaaataaaattcttaaactaaacat

SEQ ID NO: 12930 - DNA, 443 bp, Homo sapiens
atggctatcctttaatgatgcgtgtggaatgtgtgtgtgtgctcaggcaattattttgctaagaatgtgaattcaagtgcagctcaatactagcttcagtataaaaactgtacagatttttgtatagctgataagattctctgtagagaaaatacttttaaaaaatgcaggttgtagctttttgatgggctactcatacagttagattttacagcttctgatgttgaatgttcctaaatatttaatggtttttttaatttcttgtgtatggtagcacagcaaacttgtaggaattagtatcaatagtaaattttgggttttttaggatgttgcatttcgtttttttaaaaaaaattttgtaataaaattatgtatattatttctattgtctttgtcttaatatgctaagttaattttcactttaaaaaagccatttgaagacc

SEQ ID NO: 12931 - DNA, 192 bp, Homo sapiens
gaatcttcatgtattctggagaacaccattcctgatttcccacaaactgcactacatcagtataactgcatttctagtttctatatagtgcaatagagcatagattctataaattcttacttgtctaagacaagtaaatctgtgttaaacaagtagtaataaaagttaattcaatctaatttttctctgtgg

SEQ ID NO: 12932 - DNA, 775 bp, Homo sapiens
ggaggaggagaaggaggaggaggagagcgcgagtgagcaggggccaaggcgccagatgcagacccaggactccggaaaagccgtccgcgctccgctctgaggactccttgcatttggaatcatccggtttatttatgtgcaatttccttcccctctctttgaccccctttgaggcatctgctccccgtctccccctccaaaaaaaaagtggatatttgaagaaaagcattccatattttaatacgaagaggacactcccgtgtggtaagggatcccgtcgtctcatagattctgtgtgcgtgaatgttccctcttggctgtgtagacaccagcgttgccccccgccaacctactcaaccccttccagataaagacagtgggcactagtgcgtttgtgaagtgtatctttaatacttggcctttggatataaatattcctgggtattataaagttttatttcaaagcagaaaacagggccgctaacatttccgttggggtcggtatctagtgctatccattcatctgtggtcgttccctctttgaagatgtttccaacagccacttgttttgtgcacttccgtcctctaaaactaaatggaatttaattaatattgaaggtgtaaacgttgtaagtattcaataaaccactgtgttttttttttacaaaaaccttaatcttttaatggctgatacctcaaaagagttttgaaaacaaagctgttatacttgttttcgtaatatttaaaatattcagaagtaaactaaattatcatg

SEQ ID NO: 12933 - DNA, 751 bp, Homo sapiens
aaagcacaattgctaggacttcagtttttacttcagactaaagctacccaaggacttagcagatatgggggttacatcagtgctggtcattgtagcctgagtatacaatcaagcttcagtgtgcaacctttttttcttttgccattttctattttagtaatttccttggggaactaaataattttgcagaatttttcctaattttgtttatcacgttttgcacaaagcagagccactgtctaacacagctgttaacgaatgataaactgacattatactctaaaagatggtgtatttgtgcattagatttgcctgaaaaactttatccatttccattctttatacaaataccatgtaatgtgtacatatttaactaaagagatttatagtcataattattttattgtaaagattttaactaaagtttttccttttctctcaaactgagttctgaaatttatttgattctgatctgaaactattgtcttcgtaaaagttagatctgacttcagacagaaaccaataccagcttccttttcctttaaactttgaagagtgttgatttgttactatattactatgcaaaactggcagttatttttataatataaatttataatttgattttttattttaaaaactgggttaatcaagtctcggtaagtcctttaaaccatttaggatttttaaaacatcaaaatttatgatttacattcataggaataaaataaaatattattagaactctggt

SEQ ID NO: 12934 - DNA, 1726 bp, Homo sapiens
acagcttatgtgttagccatagctgaaaataagcacaaatagcttatattcagatcctatcttcatttgaatatagcttttaaatgaaatgttacagtttgaagttttccttcatgcacttggtgataaacgttttctaaatttttagttaagtatatggataaaaagttatgaactattaaaaatgtgatgtggaccaaaggctaggttgtaatcttgatagtctaaaaaatgatcaaaacaaatgattttcaaggaatattcaatattctgcctttcagaaagtgtatttatatctgtgcttcataaatattaatgttcttcagaacatcattttaaaggagatacttgaattgttatttaaatcaaaccagatgtaaaacactcacatacaagttcatactttaaaagaggaaagctacttaacaatgacaaatatttcacaataataatttttacttatataccatctttcaactgaacatttcagttcttccaagagcttcttagagtagtatattttgggggcagtcaaggaataaactacagtgtaaacatatcccagatgaaaactgctgtatggaaaaatgacagaaagtaactgattgacactgttgattcacagttcagcctcctatctgggaaagacatttctttcctctgctcactttaagaacttttaccgactccaaaaatctcaggaattaaacttttaacagttacagcaataaagaatagttagtactccaaaaatattatatttaagatgctcaacaagaaaaaaatgcaaatgtaatatttttttcaaattacttctttattgacttgtccaaatttcaaaagtgcctacccttcaataaaacttttttattctgatctccataaattacttagtcttctatgtatagctatcaaggaaataaaaccaattttgccacagccacaactgtaaatgtttttgtacccatgctgaaactcataacaacacagacataaaaatagctgtgaggttttgctttttttgttgtcagctatcttaagaatcattaaatacacctgctttgggtaaaactctttgcaagcagtaattaacactagtaacagtgaaagcacaagatttccaaatcagtcgttttctcaaaaaaatatcgtataagtgactcatcctgtctgctaactccagacctcccagcttgaagccaaatctttccatgtgagattgatatggatttcctagaagtactggaatgttgtcatatcttgccctattttaattctgctatagaaaacaattgccttcacttttaaggagtaatttgaatattaataactctggtctagattttcatataatgtattaaagacaaagtagtgaacatcaatgaacatctgatagagataaactgtaatcaggcataagcttgtttgtatgttctggcagtgactaatcagtaaatgatgtcggtttgcccagtatcacttatcttctgtatttttcctctgtcgtgtaaatagtataaccttttcatttatggacaattttttggactagtagccttcaatatacattctgctttgaattaattttttcaaatcaataaattatgtagacatttaaaatcaaatatcaagtagaattgaaaaatgtgagttacataagttaaaaacttactttaaatcttaccttctataggtagctctaaataaattcatatggttatatggc

SEQ ID NO: 12935 - DNA, 1739 bp, Homo sapiens
gtctctgggggcatgcaaatgcaaatggtcaattcagaagaaagtgtctctgccataggtgtgtatgtgtatatgtgtgcgtgtggtatacaaatgatgaccattgtattaaaatggcatatggaaaagctttgtattttggttagctatgcaaagtcatgagaaagatgagattcttttaatgaatataaaatatttattaggggattctatttcatattaattccaggtgatttgttttttcacagtaaaccatgtaagtggaagctttactgccaatgtgtttatatgttatataatatctcataatagtagacatgaaaactactttgaaattccttgatttgtaattcaatgctattaaatcatacaaaagcaaattttgcacagtaaaccaatagtttgagatttaaaactattttcttatagtatagttacaaaatgggaaaataattagttacagtgggaaattcactcatattaatggaggattgtacatataaatactatttaaacaacatatgtaattttgaaaatttttaaataagagcattaaaagactttaatgatttggaatactaaatttaattgtttagaatattaagttttcctctgtgcaaatttaaaacaaataacaagagatcgtgttacagtcacaatctacttttcttaaactttgtatctctaggaacgaaggtggaaatacgggaaacaactttgtttttaaataagtattatagctatgtatttttagttattgccaaacattgaacaattcaagccagcacccttgtttttgttagacttttaatagctacttaactgtatgtgattgtgtttaataatttgatataacaggacaaaattcagtaagacttttatattttagtttagaatgtgactttaaaattcaatgggattaaagtatttacattttgataaaaatgaatacaatgaaaacaaaatggattcatggaagattttttaataaaaaccattttcccatcaatgttttatgggtctcaactcctatctccaaatataagtagggaaagttttaattttaaatgatataagtaagtcatttctataaagtgaggactctttttctatttctgaattaatgatttcaaaatctaagccattcgcaagatgtgaataattttaaatgaaatttttacataaaatttttcaatgaccccatgggattacttcaacaaaaacagagcattagtaacttgttttttgcagtgtaattgggtgcaaatgtatgatagagttcttggtaaacagaaccagactctgactctttttcagttttgctatttttttaactatttttaccataaatttatttggaaaagctttggaatgctttttaggtattttaattattggtcagatgcacaaactcagtccaccaaattattcacagagaaaactttaaagattaagaaaacaatgaactcagatgtacaatagaaaagccagttctttaacaagatgctattttctacccttcaaccactttcaaattaaaagcaaaaactaccatttaaaactaaaacctttacaatgttattgtacatcagcttatacaattgtaattttttaaaataacattttaaaaaatagtaaatgttaagcagtttttgctagtaaaagaccaagttcccctcctttataagtaacttaaaacaacactataaggaaataatatcatgtttggcattatgtgc

SEQ ID NO: 12936 - DNA, 1967 bp, Homo sapiens
atgcatcttcctgttctttctaccatttgaatgcattggtgtttaactaagggccatccaaccatccaacctttaaaaaacaaaacgaaagtgcttctcatcaatgatatgtaaggtgacttatgaatcacctgagtacaattctttgttgtttagcacttaaatttcccaatttattaaattgatgtaaatcagatcttttctacaagctcctatccagccttttttttgaaatttctcaaactcatttactagttctgtaaaatcaaagatactaacattgtcaaatgcaaagatttgtttgatttttaaccacttcccatgtgttatacataacaccttttgcattatttcttatgttttgaaaagaaaatagctttttatactttttagttttgatttcggtaactagtttaactacaggtaaccttcaaagggaccattgtacattatgaacaatagatagagattacatcttgatgactcttgaaatatggaaattttgtctgaagatcagtggccatattactgtaggccctggttcatgttttcatcaatctaaggtgcaatttctaaatttgtaagagtaggtttaaaaaaaaaagtgcttcttatctttgttaacattgtacttttccttgatgttcttaaaaggtatttccctcagattactcatgtttatgttgtgagcatgtagaaacagtaatgctaatgcatggctagttgcctttttaagattgtgacaccaggcttaccttttaaagtttagtatatagagacaattttaatggaaataactactgtagactattgaagaatgatctctttgtgatttaagaagtggctggattggaacttttaatatgctaatgtggaaaattaattacctttatgaaggtggtttattacaaataagcacactaacccctcggaagttgttttacctactttaaaagttttaatggattgcacctctgtaaactattcctaaaatgtgtatgatatatttgaaaaggcttccattaatataatagctttgcttgcagccttccaatctatgttggtttacctgtagtgttttataaagtgtggtcagaggcccctatagaatgtattgtttgaaagtgtagtgatatatttgtgtttttatttcaagtaagtcattttaaccgaatgttcattcatattcatttataaaaagtacctgtatcaaaggaattttaacaaagagcaatcagtattattggaccaaatttggtgtttgttttcaccttgacgctcttcttttcattatttctaatgctacaagaatgctgtaaagtgtcttctaaaatgatgtagcctgacaagacatttttttcagtgtataaaactaggtagtattgtgcactgatttgaccattgtgaaatcctttctcagtgtaactgcatttctaataaaaatttattgagtgaaacaatctttgtacaatgactagtcatgcatcatcagtaattttacaagttcttgtagtaggtagggggtactactagggatatctgtggcatgattatgcattccgtagtattatttaattaatttggggttcattttgcttccttttctttatgcttagattatcttactggttcaacatttttctgatatatgcagtattacagatattcagcaaaagtattaatgggcttctttaaattctatattatagtatttcagttccgtgtcttaacagtttgtgataatttctaaaactgtcttttcaacttatgtaatgatgttgacacttttggcttttatttctggtattagagtttgtattttcacagagtgctttgtagcaggcattacaattaatctgttttgtacataaatgtgccaacagcttgatggtggcgtttttgaaatgtagaacagagtgcttgcaaaatgtaataaatacacttgtgtactttgtgtacttattatt

SEQ ID NO: 12937 - DNA, 206 bp, Homo sapiens
aaagcacctgtcaaatggctttgaagaagtgatgccaccatctctagccataataaagaaacagaatcacctagtattggatgtatttcaataataaatagagtggtgtcttttccataattgtgttaaagaacatttcttttccattcaatttgtttattaaactcctatgccaggcattgttgaaaatacaaaattaaataaat

SEQ ID NO: 12938 - DNA, 1923 bp, Homo sapiens
aacagtaaagtaattctaaataccttgaaaatcaaaatttctatttcttttgcttaaggaatagttcatataaaaatatgctaaagataggataaaagtgagtgtgagatcacccagggaagcagtaaaatatcaattttcattttaagtgtattagtactattgttttatcatttatgctgtctttggattatagcatatttataatatctattttttgttatttcaatataccctcctgtttattcaggaaaaaataataaagtcactatcttatgttttcttttggattggaaagaaataaagctcctagtaaagttattcatattatatttaaaaaggtctatgttcttcaactaatgggttaactttttaattttggctattgtaattggctaacttgttactgatattgacataaaatatgaatatggcttagcaaagagcaactaatatgttttctgaaaccaggatgatgctcattcaggaaatccactatgttgaatgtccactggtcattagaatgaacacttcataaagataaattgcccccctctcccccacttacccctggcaaaggactcacaagtcacttctcttctccatagtacatggacttgttacagaaaagtgataggatgaaaggtcaatactgccctctcaccctgagatatttagaacattacacaccttctaaggctatgttaagactgcctccttctcaggagtagcccctgatgatctcttatcaaggcggttatatgcatattactccagccttcttccatttcagaaattgtcaatagctagtgatacttggacttaagaaaatgaactatatatctaattaacaaacaggccctggatcatattccggggatcatcacatcagtccaaggatataaaaaaatggaagattaaaaactcaaattgtggagtttttaaagagtgggtgccacttaacacattggagaccttaaaaaatgtatatagagaacttaatcgcactgtttctaattctttttacacaaaacaagggcttagagtatactgtatttgcaagtaatagcaagagagtattgtataaaagaagatattactaagctagtcctctgcaagggtaaatactacgtttattctcttcagctttaactatacttgagtgcaataaaaaacttaataaaattttatgcctgttttgtaattcagggcctattatgattttagaaataagataatcaacgtacaactctttgtaaaacaaaagcaactttgggtgagttttatagatttattaaattttgataaagtaaatattttgaccactattttcaacaacccagggcttattttcttctgacttcttggctaacttccagactatgggaaaataaattatgattgtatgtgacccccagatcactaagcttgcattttggcagaaagaaaaaaaatcagttgtgatttaaaacgtttgttgagattttcaaacatagaaataaagctgtagcatattcactaaacaatgttttatatgaggatagggacctttaaatatgtgttttatagaatatctcacacatttgtaatggataacgtgcattaaaatggagttcttattatagaataacctggttaaacagatattaaagctgcttttgggtaaaacaggtttccaccagtattttccctgagctagaggagaagtcttagattttaagagtaatacaacccatctatcttattagtcttgtgccaataagagaagtaaatatcaaacattaaaatggtcactttacaatttcagtatgtctgtaccttgtatcttagcttgagtatgattgtcttatcaaagtagtgttctaactttaatgtattgtatgtttgttattatattaaagtgtgattattattcattggaat

SEQ ID NO: 12939 - DNA, 386 bp, Homo sapiens
gattgtactgttttccagttcatcgattttctattatggaaaactgtgttgccacagtagaactgtctgtgaacagagagacccttgtgggtccatgctaacaaagacaaaagtctgtctttcctgaaccatgtggataactttacagaaatggactggagctcatctgcaaaaggcctcttgtaaagactggttttctgccaatgaccaaacagccaagattttcctcttgtgatttctttaaaagaatgactatataatttatttccactaaaaatattgtttctgcattcatttttatagcaacaacaattggtaaaactcactgtgatcaatatttttatatcatgcaaaatatgtttaaaataaaatgaaaattgtattat

SEQ ID NO: 12940 - DNA, 938 bp, Homo sapiens
tccatctttactgtcaacatctgtatttaaagaagaaagaaacaaaggctgaaaaggctgctcactctcatcatctagtgttcctcatgtgttctaaagtctttttgtaaaataaacacaaaaataaatttatgttgaattggcactttctatatctgaaattgtattatctatttttatttaacctttcttatattatctgaagatgaatatgtatgtggctgtattttgtatatatttaagttttaagtgacacttggatttctgatcagtgttgcaaaaaattgctactttgagatttatttccacagtgatatattaaacccaaaaggaatcatcatatttggatgcttaaaatagagtatacaagttttttagacccaaagaaaaaaacagcagagtctcagcatgatcagtcctgattgaatttcattatgtcacagtgatgcatgtcttagcactgattattggttttacttaatattccctaaaaacttgaggaaggaagatgatagaacatgagatactctttgttttgtacatactagaaaatacagctatcttctgatgagcaattgtgttgattttctttgcttttttcctcttatggagctctcagtgtgtgaaagttctaaagccacaagaatcaatgatgttttagctgctaatatttagtattgatcgtttcttttaaaaatgatttggggaacttgatctgtactgtaattttactaattccttgtgcagaggtgggtatggcaattagaagtcaagaaatgggttgtttagcttggtttgtttccctaacttctgattaactctctgtatgacaactctacagaagttgtgcgcgtgctttctcagcagcatttttccttcaaaatcatctttttaatcaacagtcattaataaatgtacatgtacgatattcaaacttt

SEQ ID NO: 12941 - DNA, 1307 bp, Homo sapiens
gttacatctcattcaatctccagaagattgggattatcgtcttctaagaggttgctaatgcctttcatcttgaagttacacataacttcttactagccagtatggcaaaagtaggcatctaaagaatataaagcctcaaatcttccttactgtctctcttgtcacatggaatctacatgtgtttgaactattgctttagggtttaaaataggggagcctgtggtggcctggtgcacagggctagaacgagagtgcctccccttcttgtgtcctggctggctgggatgctggtggctcttcagaggagcatcagctgtctgtcatctgctgcgatccggcagcctctcttcactgctacatgtgctggaaggacaaataaataattgtggttgtgttcttaatggggacgagcagacacactgatctgaacatctggcccaagtgaagcatggcatatagtgcccttggaagaaaattaggcctcaaatgacagtagcattgaagtgtttgctgcagagttgagggaaacccccagccaccctcccggaatccgagatagggtggcacatctgtcctgacagacgaggagtgtaactgaaccaggaatatttcctccattcctgctctcccactgcacacagggtggtggcacattatccctctggggggtggggacgcctgttgttttggctcaatttgggtttgttggtcacatggagctcttccatttcgtttagctgaataatgagttgttcctagaggagacagcctgtctctccttgttgcccccaaagcccatgccctgccgtggtggcagctggggctgtggatgggaggggtccccaacatggatgtgttgcccctcctccgcatgccaacgcagttcatgtacaaggcccctctgcaactggagagaaaattaattcctatcccgtgagtggattgtgagaaattccacccacgtggagacagcttactgcagcactgttggtgttcggagctcttctgtgccctggctccatgctttcacctacacaagcatcaccttcctaatcaccgcggggcggggagcgtgtggctgtgccccttctctttaatctcatttaatttttattaaacatgctcagtacctgtgttgagaaaaggctttctttatcctaaagattattacctttttaaagtgctcttatattttcatgagtttttattttgtctctgagattttgtattccacattctagggtattctgtaatttggctccttaccaatattattaaaatcttattaaaatctaccctaccaaagc

SEQ ID NO: 12942 - DNA, 964 bp, Homo sapiens
aatagcaacaccgaggaaggccccgaagcccagtcttgcacctcgtggtgtgaagtcgtttaatcctgcccgctaatgcgtaaggactttccaccgtgtgcaggactccgcgctgggcaggggctctcgcagggtttgaaccgacctccgcctcccctgcgggttcacaggcctgcgaggaagtcgcgtgaaggagattcgctactgtgtgaggctggcctgcgcggcgtgggcagtagctgtccggggctggggacagctttcggctccccaggccatcccgtcggggcatctgcggccaatctcgaaggtggagaggctcagggttggaacagacttcacggaaggggtcctagaagaggaaaggggtcgtgtttgcccttagagcagtctgggcgtgaagcggaaactttaaaccaccagaaactctggagagcttggagcacctgggaaggagcaaccagagtgggccggaggtagggaaggaaggcacccacggcgaatttgcccgctttgaccgcatttagggcggccgcttgtgcagccagccttctggaaggtaggctttgcgcttggtgaagagaagcccccacctccggatctgtgttccgccccagtccattcatcaggaggtgatcacacaagtcaagcttctctagttcccggtggaatgagacgccctggtggggtcttaaggttgaacgtttgaatactgtaaaaaagatgggacctgcctacaattaatctctcacactactgagcgaatgtgcgttgttttggacttccctaaattggcccaaatgcatagccaacacttgaattgcggtgtactaacaacatcattcagcaccaaaccaaaccattcttatttaaaccttgcttcctagcttatttatttcccaaacaacttgaaaacatttgttatactaaaatgtctacatcttactattaaaaaaaaaaaacc

SEQ ID NO: 12943 - DNA, 1800 bp, Homo sapiens
cacttggaatttgagacaaggaaagagcattctttaaagagtaaaactgggttcaaaatctttcattactattttctggtattgaggcgactttttataaaacacaattttttgtatgtttcttacattaaaaaggttgtaagttgaaagttcatgaagagatcttgttgtattaaattattttcacaaacttgccttaataaaaggtgaaaatgttactgtttagtatactttatgaagccccttgagctttataaatggacaggcatggggaataagaatcagtgttaatttaaatgatcttatcctggtggatgtgctattttcttaaaggagtatgaagcccttttcaaactatcatcccagtggagcggagtactcagtgaacagttactccatagtgcaatccatattaataggcttcttctcttaagtcttcatctcttcttttgcttaattactgaaccgtaaattacttcagagaaatttaaatgctggtatttgaactttatacatgatactttttgtagtttcttttaatttttgaaagatgaactgcttccttttaataaattaatatctatttatacttttctcttgatttgggtcaagatgtttgatcatgagtgctttgagtggtatgtggaataggagaatataaaaacaaatctgccaaatacactagaaagcattttagtaagaaatgctggccctttcttaaaacatttctcttgcatataccaggatgggagtaaaagatgccttaatatttagtttttgtattgttggagacattgattttaataaaatcctatttatctgctgttgtgtgcttttagttgttggataactgaggtctcctaaatggttcaacataaaaccacatttcaagtcttgtttctttttggagtgtcttttcaagtattcaaatgtatttctcaacctgagcatctttttaatcatatacatgggagtcttttaaatgctgaactgttacacatgcttgatttaaaaataataataatagaggaaactattggtctagttgtgccaagaaaagtttctgatgtttatgtgtgatgtacagtgattttgtatatgcgcccagctttaagaacacataaaactattacgtctggtaggaagattgttagtgcctcaagttacacctgtgcagcttgggtctgagttttgatagaacagtaaacatttaaagaagttaagagcagtttgagctgtatccgcggtttttactcgttaactgacttcagctaaatagtttgaattatagagtaagtataattacagcaaaggagttaatctcattttcaaagctgtttctcattttatttcttgaattaatgtagagcaaaacatgttaaaattcaggaccactggaatatggcaacttatgtttcagggttgtgtgtgggtagtatttgtggttgtattggtttgttttttgtttttggagaaacatctgctagtggaataaaatactttgttttgctctgaagagactgaaattgttcaggcttattatggctcatagattacagagaatgatgctagttacatgccaatgaactatttttactctttttatatgaaatgtaaaaatttgtaggggttctggtgatggtggtacctcttattaccttatgtaaaacacttgaacagcctcatcaatattgccgtcatctgtttaacactcccagtatattttctcaatgtctgtttacttaaaattttgtggagtgacataattaataagcaataaagtctgaattatacacagcg

SEQ ID NO: 12944 - DNA, 2470 bp, Homo sapiens
ctgatcatattgcttgtctcagaaaaaaacaccatcagcaaagtgggcctccaaagccagatgattttcattttatgtgtgaataatagcttcattaacacaatcaagaccatgcacattgtaaatacattattcttggataattctatacataaaagttcctacttgttaaaaaagatacaaaccttgtttttccagaaggtaggaaaatcctagctttccatttgtgcagttatatgtcattttctcctttcttttcacgttactcaggatgaactctctgagcagggacctgctcctgcagcaaccaaacttggagtggttattgcagacagacgtggctctgggcccctctctgtcccaccttgcacaaaggaccccctcagaccaggcccttgtctgtgccctgtccacacccaggagccatcctcagtgtctgtggccacaatcctgtactgttccttccatccctgataaaaggaggtctacatgaaagcaaaagctactgtctatttctgacccagctcatggaattttttcatcttatactgagctccagaaaggacgtaacttagcatggatcaccaatcaatcaaaaaataaataaatcactaaggattggagaactcatagaacaaggtgaaagacatgagtgccctcccaaagtctgagtgcacgaaaatttctctcttgccttgaggagcagaaaagcttctgatggacatgggcttctgtgagacttatcacacatagtgtatcgtggcatgaagcccggcacatagcaggccctgcatattgatggacaaatggatggcctgcctgccttccctgtccgttcacctgtgcaaaggcttcctcagacatgccactctgtggctcccaatatagggtgcagacaagagcaatccctgacatgacattatagcctgggaaagggctggctcactgatgagaatgtggaggcatcagcaaggatctcggtgggttgctcagagaggtgatgcactaagccttaatcctggacaccagtacccctgcagcatggcttgctcaacaacagtctttgagtggcatagaattccaaagaaaatggtgctgggtggagaatggagagagcatgatggagcagagtcccagtcactgaccaactaactggtcgtttgattaggaaacagtttggccaaagtaccacctttgagacctaagttcttttgatacctttgagaagagccactgagcctgagttgaaatatttttagcttagtcatctgtgtttgctataggagaaattgtaacacaagaaataactcctttttacatgatcatttatatctatatacatatatatacttgcatacactatcactgcattaaaaaatgagtttgggctgggcatggtggctcacacctataatcccaacactttcggaggccaaggagggacaaacgaacccttgaggccaggagttccagactaacttgggcaacacagggcgacccccatctctacaaaacataaaagatttttaaaaaattagccaggcatggtggcacatgcctgtggtctcagctacttgggaggctgaggcaggagaatcatttgagcccaggaggtcaaggctgcagtgagctttgatcacaccactgcactccagcctgggcaacagagcaagaccccatcctccaccccccccaaaaaatagaaagaaaaaaaaagtttgcactaattgaggtacatctgcaagtgagactttttgtcaggaaaaggcaatatatcaggtctcctcaggacgatggaggccttatatggtgtgttaccttgaaaactgaatatcaacgttcaccttgattcaggaaagctgggtgctgtctccatgccatgaatcatgagagcaaaggatcactgcttaaaaatactgaatttaccttcacaaaagatttctaaagatttatgtaatgtgttttaaaagcgccagtaaaccatcggatcaattggaaagaaggcaactcttcagcctttgttatctagctgaaaacaaatgacaactttcaaaacattggcagtagttgttgaaaaagacgtctattgttcaaagtttctttctccttaaaggacggtgttccaatgaattcagtagagcccactttcctccactgtggaggaagaatccctaagagatactcaaatgattaaattaaaattggatcatcaaactcaagagaggcataaacttagacacagtcttgcatttttgtctttcctgaactcttctgccattttcctccttcactcgtcctgaaaatctgcaagttacataataaaactttagatatttgtctgacaaagtgtaattactcaactgaataaatgactgagaacaagttacaaaaggaatcatgaatcctggtaaacaataaagaagattcagacactgagggaaaaaaataaagctttttacttaaataatgc

SEQ ID NO: 12945 - DNA, 1036 bp, Homo sapiens
gcctctgactctccgcggtggttgttggggcttcttggctttgttttgttgtttgtttgtattttatttttttctctctgacacctattttagacaaatctaagggaaaaagccttgacaatagaacattgattgctgtgtccaactccagtactggagcttctctttaactcaggactccagcccattggtagacgtgtgtttctagagcctgctggatctcccagggctactcactcaagttcaaggaccaacaagggcagtggaggtgctgcattgcctgcggtcaaggccagcaaggtggagtggatgcctcagaacggacgagataatgtgaactagctggaattttttattcttgtgaatatgtacataggcagcactagcgacattgcagtctgcttctgcaccttatcttaaagcacttacagataggccttcttgtgatcttgctctatctcacagcacactcagcacccccttctctgcccattccccagcctctcttcctatcccatcccatcccatcccatcccatcccatcccatcccgctcttttcctacttttccttccctcaaagcttccattccacatccggaggagaagaaggaaatgaatttctctacagatgtcccattttcagactgctttaaaaaaaatccttctaatctgctatgcttgaatgccacgcggtacaaaggaaaaagtatcatggaaatattatgcaaattcccagatttgaagacaaaaatactctaattctaaccagagcaagcttttttattttttatacaggggaatattttattcaaggtaaaattctaaataaaatataattgttttttatcttttctacagcaaatttataattttaagattccttttcttgtttatcagcagttgttattacatccttgtggcacatttttttttttaattttgtaaaggtgaaaaaagcttttatgagctcatgtagcaatcagattttcctgtggattgataataaatgaatatgatatatagttaaatttttaa

SEQ ID NO: 12946 - DNA, 1574 bp, Homo sapiens
agaaatggttggttggtggttttttttagtttgtatgccaagtgagaagatggtatatttggtactgtatttccctctcattttgacctactctcatgctgcagagggtactttaagacatactccttccatcaaatagaaccactatgaagctacctcaaacttccagtcaggtagttgcaattgaattaaattaggaataaataaaaatggatactggtgcagtcattatgagaggcaatgattgttaatttacagctttcatgattagcaagttacagtgatgctgtgctatgaattttcaagtaattgtgaaaaagttaaacattgaagtaatgaatttttatgatattccccccacttaagactgtgtattctagttttgtcaaactgtagaaatgatgatgtggaagaacttaggcatctgtgggcatggtcaaaggctcaaacctttattttagaattgatatacacggatgacttaactgcatttttagaccatttatctgggattatggttttgtgatgtttgtcctgaacacttttgttgtaaaaaaataataataatgtttaatattgagaaagaaactaatattttatgtgagagaaagtgtgagcaaactaacttgacttttaaggctaaaacttaacattcatagaggggtggagttttaactgtaaggtgctacaatgcccctggatctaccagcataaatatcttctgatttgtccctatgcatatcagttgagcttcatataccagcaatatatctgaagagctattatataaaaaccccaaactgttgattattagccaggtaatgtgaataaattctataggaacatatgaaaatacaacttaaataataaacagtggaatataaggaaagcaataaatgaatgggctgagctgcctgtaacttgagagtagatggtttgagcctgagcagagacatgactcagcctgttccatgaaggcagagccatggaccacgcaggaagggcctacagcccatttctccatacgcactggtatgtgtggatgatgctgccagggcgccatcgccaagtaagaaagtgaagcaaatcagaaacttgtgaagtggaaatgttctaaaggtggtgaggcaataaaaatcatagtactctttgtagcaaaattcttaagtatgttattttctgttgaagtttacaatcaaaggaaaatagtaatgttttatactgtttactgaaagaaaaagacctatgagcacataggactctagacggcatccagccggaggccagagctgagccctcagcccgggaggcaggctccaggcctcagcaggtgcggagccgtcactgcaccaagtctcactggctgtcagtatgacatttcacgggagatttcttgttgctcaaaaaatgagctcgcatttgtcaatgacagtttcttttttcttactagacctgtaacttttgtaaatacacatagcatgtaatggtatcttaaagtgtgtttctatgtgacaattttgtacaaatttgttattttccatttttatttcaaaatatacattcaaacttaaaat

SEQ ID NO: 12947 - DNA, 1204 bp, Homo sapiens
gaagagcagtctactaaaatgtgcctataggaagactagtctcatgctgttaccttctgaaactgtacctttataaatcaattgttttgcaaagaagttatggcctacttagaatctaaaatttgttattcaaattaaatggctgtgaacaatgttaaatagcatcagtttgtccaatagttttaaaggccataatcatcttttctggttaatatcttgagtaattttaaaatgttgacaccttaatcggtcccaggtatgagctataataaacttgtaaaattaagttgatgtgaacataattttgattaattaataaggcgatttctcctgaatttacaccaaagctaatttttaatgaaattggtttacagaagtaaaaaacaaaaattggaaagcaaagtaataaaacttagtttatataaacaggttgaatgatatatttatcaaatctcacagacatcaggcaaattatagcctggtgacaaaagtgttcatagtgaattagttactcttgtaatacttctataattagttcatcaggaatttcatccacttcactgttataactgagaagactgttctctgcagcttcagctaattcagcatcttcagtagcttctaaaaaataagcatcatcaatgccattatcccagacagcatcagcagatgcacctgttgacagcctgctaggtgatggtttatgaggattctgggtttcattgctcctagtttcatctgcttcatctgttgtaaactcttcttcctttatttcagtggtgaagggatagagagtgggataggaaaatatttactcaggatatgtgatttaaccttatactctatgttgaagtaaggtattaagtgacagatactaaagtgaatatgcaggaggaatgctgtctccgatatctcaccgtgggaatgagtgcactgattcaaacgttgctgcactgaagctcagacacacttgaaactccaaatttgaaattacctacagttctgtgcacatacttttcaatactccccgacggaagagcaagggtggatttaattttttaacaagtggacagtccagctgaagacaaatcagaagataaatttgctatcttgacaatggacttagtacccatgctttaaattttaaagtatttagcaaatcgtaaacatggattgaaaaaagattaaaaacagttgccaaaat

SEQ ID NO: 12948 - DNA, 1529 bp, Homo sapiens
tgtgaagaagaaagctcagaggaaatggcacagttccacaatctcttctcctgctgatggccttcatgttgttaattttgaatacagcaagtgtagggaaggaagcgttcgtgtttgacttgtccattcggggttcttctcataggaatgctagaggaaagagaacactgccttacagtcacctcatgttgcagaccatgtttatggtaatacacactttccaaaatgagccttaaaaattgtaaaggggatactataaatgtgctaagttatttgagacttcctcagtttaaaaagtgggttttaaatcttctgtctccctgtttctctaatcaaggggttaggactttgctatctctgagatgtctgctacttgctgcaaattctgcagctgtctgctgctctaaagagtacagtgcactagagggaagtgttccctttaaaaataagaacaactgtcctggctggagaatctcacaagcggaccagagatctttttaaatccctgctactgtcccttctcacaggcattcacagaacccttctgattcgtaagggttacgaaactcatgttcttctccagtcccctgtggtttctgttggagcataaggtttccagtaagcgggagggcagatccaactcagaaccatgcagataaggagcctctggcaaatgggtgctcatcagaacgcgtggattctctttcatggcagaatgctcttggactcggttctccaggcctgattccccgactccatcctttttcaggggttatttaaaaatctgccttagattctatagtgaagacaagcatttcaagaaagagttacctggatcagccatgctcagctgtgacgcctgaataactgtctactttatcttcactgaaccactcactctgtgtaaaggccaacagatttttaatgtggttttcatatcaaaagatcatgttgggattaacttgcctttttccccaaaaaataaactctcaggcaagcatttctttaaagctattaagggagtatatacttgagtacttattgaaatggacagtaataagcaaatgttcttataatgctacctgatttctatgaaatgtgtttgacaagccaaaattctaggatgtagaaatctggaaagttcatttcctgggattcacttctccagggattttttaaagttaatttgggaaattaacagcagttcactttattgtgagtctttgccacatttgactgaattgagctgtcatttgtacatttaaagcagctgttttggggtctgtgagagtacatgtattatatacaagcacaacagggcttgcactaaagaattgtcattgtaataacactacttggtagcctaacttcatatatgtattcttaattgcacaaaaagtcaataatttgtcaccttggggttttgaatgtttgctttaagtgttggctatttctatgttttataaaccaaaacaaaatttccaaaaacaatgaaggaaaccaaaataaatatttctgcatttcaggtg

SEQ ID NO: 12949 - DNA, 3301 bp, Homo sapiens
accacaatgtatttcaacaaagatcatcaatgctaacacctcacaatgtgtgtatttttacagtagctatgtttggttattttgcacatcacaaattacactatcctgggtattttacaggtgacatgttacttcgttcttgaattcgtacgctgttaagttttgcaacttgaaacctagacacaaggtcaaattgctggaagagtcctcagaggtccacctcttaccctacagactggccgagaccatatcaagtattaaaaccattctatacagcaagtatcgtttatcctttcttaaacaccgagtctccaaaaatacttagtttagctttagtttagtaagttcagaagtagaaacaaacttatttaaaaccatcatttgaaagtttaattctttaaatttgtctcttagttttgtgaattttgaataataatgtttaaattttgtttcagtcatttaaaatttaaattttcagtcatttaaaattttaaaaatttaaaatttcacaaaactaagggtaaaagacatttaaagaattaaacttaaataagtgtgtgcagcatttctacttctgaagttattaaagctaaaactgcactaagccttttgagacatcctttattcttaaaaagctcataaataattggcttattacatataaacttcaaaaaagtgggttataagacattgctttagaatcttgcccctccaaatcttccctcaaagatcttaatgagtaaaacaactgctacatacatatgcagaatgtgtaataaaacaaaaagcaattgctatatgaaaatattcgtaagaaaagtaaagcaaattgtttctttgtgcttcagctcattttccatatttttaaaaccctgtggtaaaagcctcaatgaaatcatttacaagaactacaattaaatattgttaaaattagcaaaaggctttccgtatatagatgacatctatgaaggcaaaaggtgacagtaaaaacagtaagatccatatgcataagattgtacaaggctattcatttgtgaaacaaatatacatatcgaagacaggtctcagagataccttaactattcctttttttataaacatattaaaggatgtggctttattttataaatcacaaccatcccaacagtggatttaaacaagatttctttttagtaatgggaaaatgcaattaatatggaggtgatagtcactaagaactgttgaatggcagaaaagtatttgctctcgttttatgttctggcttgtctgtattgcctgaacttcattttgtctttgtgtaagggaagaaatttcaacagactcgggtttgagatatcctcaaatggtcatgtatttctgtctcaaatctcttaataccacccatgtaacattccttcaaccacttgaagatccaaattcccaactagtattctcttctccacacttaatccagttcctaaagattattattattattattattattatttttttttttttgagacggagtctcctgacctaatcttagcccggcgcagtggctcacgtctgtaatcccagcactttgggaggctgaggcgggcagatcatgaggtcaggagtttgagaccaggctggccaacgtggtgaaaccccgtctctactaaaaatacaaaaattagccgggcgtgatggcggacgcctgtagtcccagctactcgggaggctgagacagaagaactgcttgaaaccaggaggcagaggttgcagtgagctgagatcgcgcaaattgcactccagcctcggtgacaagagcgagactccatctcaaaaaaaaataaaaagaatcttaaaataggaacataataaaagatcggccctaagtaaagagcactttttaaactgccattaaagatgggtttcagaaatcataaactttgacgtgtgccatacatggtaacatgctatgcttatatgtcttctataaatccaatgcagaatttaaaatttcagtttactctagttaccataaagctaatgctctggcacaagcgagtccctgcaaactaccactgctgaggacagtagtaaaccccttgacctgagactgcggtgagtctgtaactcgagtgcattgagacttccagatcattactcttacacacacacacacacacacacatacacacacacacactccttctctaagattccttgtagctgatatctcatggaaaaatgacattttatcataaataaatatagagacaaaataatagtgatctttctcattcgcaatgtaaacttaacagctacagtttaaatgatagcatagaattatgcctaaaatagacatttcccataattgtattgtgataagttcttcaggcttgacaacttcacattgcctctcttccttgaatgtattttatctggtcttttctatatagtcttttgaaggataatttttatcaatagccaactttgggtatttttttaagtgtcaaatatcatcatggtttgaaaaaaggataaaaaagctataactaaaaaaatcttaaggataacatttggtttactaatttttaatcatttatctttcagaacttgtttcttatcaagaagttagcaggtatgatatgtatatcatacgtatataaactggcataggttacatcctagggcatgaggggagtatctttcagggattcaaatggaatttttacctgttacttgtttaattgttttgttttcaatattcttggggattagacaggggaaggtattttattactgcataatagatggtgaaacccaggaaaattaagtacttgtgcatggccccactatcaataacacaaagtctgtactctggatctcccctaatgtccctgtggtctaaacggcttgataatacaaccgagcccctgaagtagctgccctcctctttccgctcccccatctcggccctgcccatactccaagggtcagctcccatctctcctccctaatgcctcacttcaagcactaatttggctctttctgctcactaaaaatcatatattttacagatttattttgtttctggagaaggcagcaaacttttacttccctgcagaagtagttaagtacatagtgttttctctaaaaaggcatttgataaatatttgaacagcctgtagagtttcaacctctttgagatataagtatcttaaatatcatagagcactgtgattcatttttatattttattgctttgaatgctcaaactatgggaaatctttggtaaaaataaagacaataaaatcttcacaataacttt

SEQ ID NO: 12950 - DNA, 103 bp, Homo sapiens
aatatcttggagtcaaagactgcagtagagtggtattataaatttgtgaataaagaatcagtttaatttttcacattaaatcctggttctagtttgacgattt

SEQ ID NO: 12951 - DNA, 309 bp, Homo sapiens
gattcctcaagattgctaagaaactcccttcgagaaatagccaatgttaattgtactgctaactgaactatgcatatctaactcatctcaaatgactcataatgaggcgctatatatttgctttaaaaattatgcacagaatggtttggtgcagataacttaagctttctcagctgggaatttcagaagatgggggagaacttctacaagggagggcaggtacctgtacatggaaggagctgagatgtctaaagtcacccacatttgtcatttaaaaaagtatatataaataaaagatactattttgaa

SEQ ID NO: 12952 - DNA, 537 bp, Homo sapiens
gtctctgcaggcgtggcacgcacgcacgcacccacccacgcgcacttacacgagaagacattcatggctttgggcagaaggattgtgcagattgtcaactccaaatctaaagtcaaggctttagacctttatcctattgtttattgaggaaaaggaatgggaggcaaatgcctgctatgtgaaaaaaacatacacttagctatgttttgcaactctttttggggctagcaataatgatatttaaagcaataattttttgtatgtcatactccacaatttacatgtatattacagccatcaaacacataaacatcaagatatttgaaggactctaattgtctttccttgacaagttgattttgcaattgtggtaaatagcaaataacaatcttgtattctaacataatctgcagttgtctgtatgtgttttaactattacagtgcatgttagggagaaattccctgaatttctttagttttgtattcaaacaattatgccactcgatgcaacaaacataataaatacataaaagattt

SEQ ID NO: 12953 - DNA, 2182 bp, Homo sapiens
attgcgctccctccttctgtagaggccgcctgccagccatgcacctgcgtcaacgcgcctgaaacaccccgcgggcctcccgttgtcatgccttacggtttccaatgcgccgtcaccatctccacctgccaccaaaccaccagcagagtagccgccgctgctgtgagcctggggacgacatggcaggctggtccccctccgtgaaagtgtggattcctacttcctgctctaagctttgacacgtcaaaatgtgggatcagaaagaaaaaaatcatgatatttaaaaatggtcaaatatttgaggcaaaaaaaaaaaaaaaaagtgtctccaggaggctgtccagcctcgtggctccatttcaacatctccccccaggcgatgttctcccccaagacgaccagaaaattgtttattggggaatgctgtggtttgcattttcatattcttcgcttggcagtgtgtattcttttcacaagtttgcctagtgtcttggtttacacaatatgacaactgtaactgtactttagctattgtttgcctgcacatacatgttgtaatatgcacagtgattacaacctttaaagcaagaggaggcgagttaatttggatgagtgtgattttgctgattgaatgtgagttttcaaataggagtctttttctgcaatttgtttgcattttttagaagtgcaaacagtaagtaaataaaagccttcggtaataatcatgacaatacaagaggctgagctaggctacaggggaaaactattgtgttgtaaagttgcatcgctattttatattaaaatgtaatgatcagcatcatgaacaatgagctcttagtgttttatttatctgaaaaaatgtaagtaaaagcagtgttagtgagaggtgcaaagaattattctaacagacacctgaaagtatctgtaagcaatactagtaggtaagatttcactgtgtgtacacatacacatttgagattgtatgagaacatataatccatatgatatgttgtacattttatggaaatgtaatagaatctcacacattattttatagaaatagagtacagaagcatcacaagtattaaagttggttttagcaaggattaggattactacaattatttttactataataattatttttcttctatggaactcagaatcctggctacatttgaggacaggaatatgttgagcctgattttcctggtgtgtgtaaaatatttcctaggaataaattaggcactttttagaagcaatgttaaatcattcaggttttattttctgccctgaagcagaaatttaaaaaatgatattgggacctggaaggtttaatatggttcacagtgcctgaattacacctgctccgaaaactagctttgtatttcttatgactttgcataagaactgttcatctttggatcttgagcaccttacagataaaactttttatggcatctctttcatggacagtgatattgatcttttcacaatgtacgtagcctctagaattttgtacatatgtttgctctttttttgtacagactagttgttgagaaaacaggggcgtttcctaatttggtctttatcctgcgacaacactttcagcagactagcctctccttatctcacagatcacaagcacccctagatagtgtgattctgtcagatagcatttatgcaaaaatctatgaagttaaaagatcgtagaagccaaatgaaatgtacatatctactgactgatgacaagggaatttcattaggaagaaggtaaagaaacatcgttgagtagcctaccttgatttctgtcaagttcataaccagcttcatattttaaaggcttcaggtttgaaattaagtcaactgcatgcagctttgctgataaatgaataattctctttgatgccatttatgagaaaagacttcaatatctgttgcctgtcatatttaagaaaaattactgtttctactctctgtatctgattttaaaagaaaaaactattcatacctggcttccaggtaattgactttgaattcttacaagcaaaggtcattgtgtttttcttgaatagacatctaataaattttgcttggaagtatacttcagtttttcttcttgacatttatctttataaaaattgtgtattttattccaacttgttaaactaagagaaaatgc

SEQ ID NO: 12954 - DNA, 34 bp, Homo sapiens
aaaagcaccacgttccgggtgagatggacacgct

SEQ ID NO: 12955 - DNA, 808 bp, Homo sapiens
ctctcaactccccccaaagtgcctgactttagtgaacctagaggtgatgtgagtaatccgcgctgttctttgcagcagtgcttccaagctttttttggtgagccgaatgggcatggctgcgctggatcctgcgcctctggacgtgctagccatttccagtgtcccaactactgtcatcgtgaggttttcatcggctgtgccatttcccaacgtcttttgggatttacatctgtctgtgttaaaataatcaaacgaaaaatcagtcctgtgttgtcagcatgattcatgtatttatatagatttgattattttaattttcctgtctcttttttttgtaaattttatgtacagatttgatttttcatagttttaactagatttccaagatattttgtgcatttgtttcaactgaattttggtggtgtcagtgccattatctagcaccctgatttttttttttttactataaccagggtttcattctgtctttttccactgaagtgtgacattttgttagtacatttcagtgtagtcattcatttctagctgtacataggatgaaggagagatcagatacatgaacatgtcttacatgggttgctgtatttagaattataaacatttttcattattggaaagtgtaacggggaccttctgcatacctgtttagaaccaaaaccaccatgacacagtttttatagtgtctgtatatttgtgatgcaatggtcttgtaaaggtttttaatgaaaactaccattagccagtctttcttactgacaataaattattaataaaatacttgagcttt

SEQ ID NO: 12956 - DNA, 100 bp, Homo sapiens
tcttctgtgtgtaaaatccaagaccacgagacaccagaaagttggagaacaagactttgaaagaatttgtgtaaactaacccaataaaaagcgttccagg

SEQ ID NO: 12957 - DNA, 7649 bp, Homo sapiens
tgactgtcagggtggcagtgcccatcatgtggctagaacaatacagagggagcagcacgccaggcctgatgactctgggggtggcggtgcccatcgcgtggctggaacgatccagagggaatagcacagcaggtgtccaggtatttcccaggattttagacattccctaacattttcaaacaaatttataattttgtcttatttaaaaaacaaaccttccacttccacccaagacaacagcataggaaacagacctaaaacaagacaaaaaaagactaaacatgaaacaaaagatgtcaagacacaagacatttggcaacaaaggaccgcgatccctgagagacaggaaaacgggaggtgagcccggtgatggcctcagacctccctccgccttgagagtttgcaggcctcagtgcagggaggggcccaggaagagcccagcagcctccgtgagttgaagagaccaagtcagcaggagttggcaggtcagagtgccagagagagatgcctgcatggggaaagactcaccagatcagcccctccagcacctagtgggttgctacccattcgcacactcaaacagggaggctaccaaggctgggagcaacctttgaaaagaccaaagatcaattcctggtactcatgtgggctggggacaggacccgttcccaccagccagactagggaaactctcaatagatcaattcctgatactcatgtgggctggggacaggacccactcccaccagccagactaggaaaactcccaatctgtgagcattaggtggagttctcagaaaatcttgcctcaggaatggggataattagccctagactgagccctgctcctgactcgcctacaaaatcataaaagcaagacctaaaatgatcaaaccattcccagataattcactttatcccagaacaaagctccagatgatctaggggttaccaaagtgtccacaccctgcaaggtaaactcacagtgcctgacctcggagtgccaggcgtgcagaggagcagccaagggcaaacactccaaggagagtcgcctggcaaagccaaccacccagagccagcgtctgtgctagaatcacagaattcaaactgtggctgaaatcgcagcccaggcgtccagaaagttaaagttaagaacctataatcccagcactttgggaggccgaggcaggcggatcacgaggtcaggagatcaagaccatcctggctaacatggtgaaaccccgcctactaaaaatacaaaaaattagccgggcatggtgttggccgcctgtagtcccagctacttgggaggctgaggcaggagaatggcatgaacccgggaggcggagtttgcagtgagctgagatcacgccactgcactccagcctgggcgacagagcaagactctgtctcacaaaaaaggttaagaaatgacttaatggaagagattcagaagacccagaccgaccttacagggatgagaaactacaatattgacagtggaaactatcctggatggggtaacagattggatttcacagaagagaccatgaggcaccttgaagacacatcagtggaaactatttgcatttgttgggcctccagagagacagaaccaataggagatagctagatatatatacagacagatagatagatagatagatcgatagatagatagatagatagatagatagatagatagactgacagacagatgagaggggccttaggggcattggctgacacaattttggcaggtcaagagccccacaataggccatccacaagctggagacccaaggaagctgctagtgtgcccagtccgagtcctaaagcctcagagccagggaagccagtggtgtaattctcagaggccaaaggcctgagaacctgggggccactggtataagtctgagtccatagacccagtgaactccaaacacaagagatacgagtgcacatcataatcaaattgcatataaccagtgataaacagaaaatcctaaaaccagtcagaggacaagggcatgttctgttgggaggcacaaagctgatgaggatggctgactcctcaggagcagcatgggtgagaggcagtggaatgtactaaggagaaaactgccaaattcacattctgtacctgacaaaatctttccgaagcgatggtgacataaagacattttcatacacacagaaactaagagtttcatccccagcagacctgcactacaagaaatgttaaatgatgtgcttcagggaaaagaaaaatgaagagcatgtgcaccatccaggattttcctcgttatttaaatccctttagcccatctcccatttgccccaaggaatgagtgctggcagtgagctgcactttttttttctctaaacgggaaatgggttaaaagatgagtggcttggccgggtgcggtggctcatgtctctaatcccagcactttgggaggctgaggccagaggatcacttgacttgagcccaggaactggggggtcatgctgggaaacatggcaagaccgcatctctattaaaaataaataaaagttaactgactgtttaaacaaaagtattaacgtatctgcggtttgtactatacgcacaggtaaactgtgtgaccacagcagcgtgatggctgggagacgctggatgtgatacgtgaagtgaggggtatcacttgaaggtagattgtggtaagctaaagatgtactgataaacccttgaaacacccactaacaaagaattacagctaatagaccaacagaggagataaaatggaatttttaaaaatccagtccaaaaatacgtagagaaagagggaaagggaagaatggacttgggggcgacacagaagacaagtggagagagactgaagcagccactggccatcacagcaaacacaagcagggcgcaggacgccggcaagccacagacaggcctgctctctgaattggtgaccacatgagtaacttcacgggtctgttctatgtccagagttgtcaaactgcatgctttaaagatgtgcagtggatcgtatgtcgcttaaatcccaacaaagcagtatttttttaaagtacaatcatgcacacagcacttcccctgggaggcaggggctgtgcccacagaagtcgttacctctgcgtcctgagtatggacagccaccatcacacagccccagaggccgcccaggctctagccacactctggcactgcctgggacaggtgccctcaggaacccaaatgccactgcccccgtgaaagccacttcaagcgtgttgcttcaaatcagaaggcatctacgcctgtggaagaggaggctgctgggggcccaggtgtgcagggggcagggccaggtgcaggggcacagcttatgcctgtggccaacccactggggagcaaggctggggatatgcccaggccagcagggccagcaggagtgactgcgccatcctgaacacgtccttgggcctcccaggaccttggtgcctcccatctgggctggcacaagcctccagtcaaaagatgggtctctctctcctgatagcatggagcctggatgtgggaatggagccacaccagccccacgggagccccacgacccatcgggctgtgggatgcatccccacggccgggacccctcagcctgtgacttggtctgggcagatgcaaaggccaccctgcagggctgaggtgtctgtggggaaggaggtgcccagccctgggaggccatcttgctcctgctttttatttaacccatggggctctttggcctcattttctgttttttgagtttctcgtgcactccaaactgtcctggagccagccctggtgtgaaacagaggcttcctgctggcagaagaggcccaccgagttacgtccacaccagctggccctgggcacctctctctctggccttctgtccacactgggatttggctctgatttccagaaggcagggttaggaaacacctgtttccaggcagagtaatgcttctgtctgaatcaggcctcatgggcttcaccagcagacacgaaggtttcatttagatggcgaacacgtgttctcatttctccagggttctggacccgtgagctgaagcaggtgctgagaagtgggagaggcggccactgggtccctcagggtcactcaccccgccacgtgaggccacttccgcccagcactgggggcgctgggagctgaggggcccacaggggacgtgggagacagccccgatgcgtccccatccgcagtgacgctagcgcggagtcgtcgccaagcacgtggagggacagccctggagccctggcctggcccagcatctcccagagtcacttcctgatgcctccccagccctgcccaggaagggtttgtggccacagccccacagcggccccctcgcctcgaccaccagtgcctccttccaagctgcctgagcaatcctgggtggtgagctccaccactcccacccacgcctcagcactgggaccccccagggatggtgtggggattcctgccccccgtccatgcctcagcactgggagctgggaaggtgtgtgatttcctcccccacctcagtactgggacccccaggaagggtgtgtggccccaccatcctgaatgctcagggctggtggtcagcgaggtggtttctaaaccaagccctgggaggagccatcctgggactgtgcttggacaaggttggggctcccgcagtgagctctagccctccccaggaccctcccacggccccagggtgccggccttcagattgaccccattcgtggatgagtctacaaggctccccagtgcccagcaagagtgtttttacattcagaggtgaggaaggggtgccggcatctgccccagacacaaccgggcaggtacagatgtcatccccttgaggacagcagggaggcgactcaggagaggctgatcagacgggagccgcatccccatcaccttccagagagacctcttcttttgccaggtgtcgtgagggctgtggcttagctgggcctgcgtccatccccggttctggggagatgcccgggcccctcctggatggcagcagcagtggaggtttgggttttgagggagccctaagaacctgagagacttagatggagcatggcacgccctggagagtccacgtccccagacccctcatgccaacaccattccacccagcagtttcttccctgtggtcagaacaaaacccccaagcctcaggcctcaggctggttttctgacaggcaaaatgctccttacataaggaaagacctttccttggctgaccctaaagtagccaaggggagctcacatcgcctggcctgccgccaccaccaggctgcctgaccagctcaccgccttgttctagatgcttctgaagcaacagctcgcctggccccacccccatcaagcatctgctgggcagcctccctccccggcccgcctgtagctcccaaaggtctcaagcctcaacatcctggtaaccaagtgcacccagagggctggcagggtcacatggaggcaggggacccttggccccagggtggtcgtcttcccaggaggtccgcctgtcaggtcagagggcagcaggaggccaccccacctccccgggttccctcgagcattcctttgtcaggagcagctcccccaggatccaggcatccctggcccccctttgcccccgccctgctctcaggagccccctgccaggtgctctgaccacaggaaacaggagccctcagggccactgccagaggacggattctgctgccaaccagaggtcctggggctggcggcgctggtgtgcctgccctgggccttcagcagcccccataaggagaaagctccagcctcccgttcagagaaggctccatcctggggacacgcctctcccaaggtcacccacgtgggggctttgttactcatgcttcccagactgcgtgctgtgtcagagttttcacacctgcctgatgtcctgggggggctcacagaggaccgaccctgcagggagatgctgacccaccctgagacccaggagaagaaaacggccagggtccaggctgctcccaccatccctgggggattagcaccttggctgagcccgaactgaccacctggggcgtaggtccaagatttaattacaaaacgataggtgaatgtgggttctgtgtgcctgtgacatagagaatgttttccacaccgcgtgtgaaatgacgagagcttttgtgtcacacatgtagctgctacgagacagacgctcttgttccggatcagagcagcagacagaaccggcacttttagggtccaaaccctgttgcccacagaacgcccatgacaccagctgggtggagctgccgccgagtccacgccccgtctggctgggacctggagctcccctcaagctgcagatccactctgcaccacaaggtggcctcgcagaggagcctcccgagctttggaaccagaggcaggctcagcgatgctctccatccggcctggccccaccgtgtgtatcaggtgtcagaggccttgctgggtgccaggccacgtctgtgctgtcacagctttgaggggccagcgggtcctagggagaggcccgtgcgacgtgagtaacagcagtttttcttctgacagctgggatggaggtgggtcctccagggagtgccccagtcctcgagagccagacttgtgcacgggcctggaaatgaaggtctcaggcaggggctgcgcacaccgatggtcagcattgccgttcggggcctgcagtcgcccataatgggccctgccccctaggcctggcctcttttgctttcctcctggatggttcctctacccctggtccagcagggactcagcagtgcctgccagctgcagacccccatgctcctgcagcctggaaccctcctgccctccaaaggtcatggggtgacccagggtgggaacaccagaccccctcaccccgtgtccaccgcccatggccgggctcacagtgtctcagagccgtggtgagccatcctaggaccagtgtacctcacaacctttcagaccagtgaaggccagtgggctgggtggtccaggcatgtccccaacgcaggtccagccatctctgcacagaactggaatctcggttcatttcggtttcagcaggtcccatgtagttagcaggacagcacttgagttaggtctgagaaagaacgcctgtttgtcatggcatttcctgtaaggagcccagagccgtggccccaggttgggacggcggcgccagagctgggcctgagtctgacccaacctgtgctgagtggtcctgctggaatgggaaccccaagaggaccacccctctctaaaagaagggaaaacagtaagcgagagggaggctgcaggggcccagaccttggctgaccttcctagccatggtctccaccctccgagacccaggggccccgcagtgacagcagggtgttgggccacacagagcccgagtaggtaaaggaaggttctggaaaccacttttcagaacccaaaaggtgtctgggaaatggcgttacctgccactgttgttaagtgtttactttgtatcaatactgaattgttaaaaattttaatcataaaaaccaatggaacatgtttttc

SEQ ID NO: 12958 - DNA, 257 bp, Homo sapiens
tgagacaagatgtggtgatgacagaatcagcttttgtaattatgtataatagctcatgcatgtgtccatgtcataactgtcttcatacgcttctgcactctggggaagaaggagtacattgaagggagattggcacctagtggctgggagcttgccaggaacccagtggccagggagcgtggcacttacctttgtcccttgcttcattcttgtgagatgataaaactgggcacagctcttaaataaaatataaatga

SEQ ID NO: 12959 - DNA, 459 bp, Homo sapiens
ccctggcctctcgtgaagagcagcacaacatggaaagagccaaaatgtcacagttcctatctgtgagggaatggagcacaggtgcagttagatgctgttcttcctttagattttgtcacgtggggacccagctgtacatatgtggataagctgattaatggttttgcaactgtaatagtagctgtatcgttctaatgcagacattggatttggtgactgtctcattgtgccatgaggtaaatgtaatgtttcaggcattctgcttgcaaaaaaatctatcatgtgcttttctagatgtctctggttctatagtgcaaatgcttttattagccaataggaattttaaaataacatggaacttacacaaaaggcttttcatgtgccttacttttttaaaaaggagtttattgtattcattggaatatgtgacgtaagcaataaagggaatgttagacgtgt

SEQ ID NO: 12960 - DNA, 3454 bp, Homo sapiens
cgcagtgaccaccatccaagctcagatctgtgtgtctacgctcagatgcgtcggtggctgggctgccctgctcctggtcaggccggagcccgtcctaagacacacgctttgcagagctgtgcatgcgcagtctgctagtgtgtgtgtgcagcatacgcaggagcctatcctgaattttgtaaaatatcccaacagttcttaaatgaaaactggccttaagtctattcaagcatgacagcatttctctttgaggaattaaaatctttaggaaagtgatcatggctggacagcttcatgccccagaggcagcgagcacccgtcccatggctgccaagtccacagtcggggatgaagcagtcgggtgatgctcccaagtccgcagtcggggatgaagcggtcgggtgatgctcccaagtccgcagtcggggatgaagcggtcgggtgacacacctagctcagccctcccaggccacctgcagctcccagcctgtgctgtgcaggcagggtcagcccatcgccacagtgcactgtagaggccagcacacggcaaattagaaatacaacacgcggagaaaggggtccgtgagcccactcatagaggaatctagaacgttccaggcagcagaggctggcagcgtgggtcccacactgccccacaccgtgcggcaggtgctccatggcgccatgacagagtctgaggccagacctggactggaattgacagcataacccctgttccttctggacatctcccgagttctcagtgggtctctgcggacggttcttcctaatctgcctcttggtacatcacgtaatacagagttcacagactccgggtttggaagtacagagaaacacacaacgtagagagaagacacaggaaactgcgctgcctgtgggggtttctctctggctggctgtacagttcactcaaatgagggttcccattgccatcctaggagaataattagggacaagacagacaagtattaatagcattaaaacagttgtaaaggcgatattttctgagagtaggaaatttggatacaaaagcataagtcagaaagtgaaggtcaccaatccaccaacccgagaacctacagctgatggtgcatttcaggcttcttccacggtctggcctggaaccccacccggctggtgcaggcatcagatcagggtgtagaagtcaccccaagcaagaggaagccaggcagtgaggccctggggtgtggctgcagctgggcccacctgtgcgggggtgggaaggccccatcctcagggagagggcatcggcgccctgacgtcagctccactgggagtggcaggagctgtgggagcccatgggtgagggacccaccaccccgctgcactgtgcattgtgcctcccgtgtggacgccctctctgttgttggcccgcgggtgagggacccaccacccctagggacccaccaccccgccgcactgtgcattctgcctcctgtgtggacgccctctctgttgtcagtggctttgaggtgtcagtgcttacttagatgctggtttaatgctggacccatttgttaaacgcaccttcactttgtcaaaacccaggtttggttggcaggactgggtcttctgcccaatgccaggtgcctgcgcctctcagtggcctggttcttggacagtttgcccccatgtggcagggatagggataaggatctcctctcagtactggaagagaacagccaaccatctgagcccagagtcacagatccatcgtggccccctatgacccccaagccctaccgagggggcactcactctctgcttagccagggggcgtctttcaaaaggtgacctccatgctgtgctgtcgtgggtgtgagacgtgctcatggccttccactgccatctctcccttatctgatgcctaaagtcacgatggggacagagctacccaggggccagccatggggtgaccagccacctgagggtcagtcacctgtggagagcaggcacctgtgaagaccaggcacctgaggactggcgcctacttcccactttggccctacactggcacagagcccctctttattcatttctcatgctgagcatggcacacttctggcctctgggcatttatggatttaagaccaggatggtatttcagaagcttcccacttccttcctattctaaccgagtgcccagctcctttgctgatcatggaaagacccttaataattaggcctgcaggccaggcgcagtggctcatgcctataatcccagcactttaggaggtcaaggtaggaggatcgcttaagcccaggagttcaagaccagcctgggcaacacaggaagaatgtgtctctacaaaaaataattaaaaatcagatctgctgtatccctgaaaaagtctcaatcaacatgcatgttccactcttggagttccctgttctgagggccagccacgtcctgtgtcctggagcttagccctcagcagctcccttcagcctgggcgccgcctgggtcccaaacgtggcagctgctcttccagtctcggggccgaggagggcagggagctcagtgactgagagtcttgtgtatcacatgtcttgagtgtcctggagccaacggctgtcactgggaaaaacaccaggccccaaagatcgaatcagagacgtggctgcgtgtttgcgattgtagccaggcccttcagtgtcatcaaaggagcactggggcctccttaagcacagacggcagcccctgcccaggaggcttcttcaccacgtcctgccctgcagcctcccagacctttagatgcgcccctgcccaaggccctcctggtgacaggtgccagattgagtggtgggttgctgccaggcaggccacgctgtgttgacgctgcactcagcacgtgggtgttggctctgccggttttgtggtgtggggaccctacaggaggctgcggccctgagagcctgggatcagcgaggtgtccgacatcccttcctcaacggcaacaaaaactccccaagtcagcactttggttattttatagccacaaccctcttggaaaacagtggggaagactatggaacatagaaagtgtggatgtatcacttctctctaaaatgtcattgttagcactaattacaggttcatgtttttctgtgtatgtagcttttccctatatagctgaaaaagtattaaagtcaaatataaggtgggaatgggatggaagggaggagatcaatacaacttatatttttgcagtttctactggaagaaaaaagttttcaatacctagaccaacttgttgaatttttaaaacttatgcactataaatgcaactttctctactgctttctcagtgcctttaggaagctttcaaatttttttgtactgtggtttgtattaaatttgcaatattgatgtaaaatacatgacatgctagtacatgtttaacaaaaattt

SEQ ID NO: 12961 - DNA, 394 bp, Homo sapiens
cctccgccggcctgccctgctcgcccctccacagcctcggtccctgcctttagaaacgcgggacagctgattgctctccttggccacacgtgctccttttagctgcacggcctgtctttaggtgccagtgtgatgcaccgggtgtgcgtcgagtgagcgtcccgaggccacgtgcggaggcccctcactgtgctgtcaaaggcctgtgggtgcagggctctgccgcacagcctctcttgggtgcttgtttgttgcagtggttgaaagtgtgtggggcacagaggacgtgcacctccctgccctcctcctccctgggccttcaccgcaccccatctgcttaagtgctcggaaccccgtcacctaattaaagtttctcggcttcctcagagaaatg

SEQ ID NO: 12962 - DNA, 396 bp, Homo sapiens
ctcctgccgagaagctgggccaccccttaagcttcctggtaaagttacattgtctgcacctttgtacttctttattgagtgtactggctggcaagagttctctcttctgttggtaattatttaggatttttggaatgtattcaggacctgtagcttggttttctaaagcacctcgtaaaatgatatgattactccaagccctctgcatgttttcagacagaacacattgacatattttgagacaaactgactattaatcttgtatccagtatcctgagatgaagtaaatgcagtgttctactgcctgatgtgaaagagagctatgtatgataattaaagaaaataattttctgtgtaacaagcaatctttatttaataaacaaatacattgttctg

SEQ ID NO: 12963 - DNA, 940 bp, Homo sapiens
tcctgggcttccccatctggtgcttttcccatggagaacacacaaccagtaagtgaggttgccccacacagccgtctcccagggaatcccttctgcaaaccaaacgttacttagactgcaagctagaaagccaccaaggccaggctttgttaaaagaagtgtattctatttatgttgttttaaaatgcatactgagagacaaacatcttgtcattttcactgtttgtaaaagataattcagattgtttgtctccttgtgaagaaccatcgaaacctgtttgttcccagcccacccccagtggatgggatgcataatgccagcaagttttgtttaacagcaaaaaaggaagattaatgcaggtgttatagaagccagaagagaaactgtgtcaccctaaagaagcatataatcatagcattaaaaatgcacacattactccaggtggaaggtggcaattgctttctgatatcagctcgtttgatttagtgcaaaaatgttttcaagactatttaatggatgtaaaaaagcctatttctacattataccaactgagaaaaaaatggtcggtaaagtgttctttcataataaataatcagacatggtcccatttgcaggaaaagtgcagactctgagtgttccagggaaacacatgctggacatcccttgtaacccggtatgggcgcccctgcattgctgggatgtttctgcccacggttttgtttgtgcaataacgttatcacatttctaatgaggattcacattaatataatataaaataaataggtcagttactggtctctttctccgaatgttatgttttgcttttatctcacagtaaaataaatataattaatggtttgcatgtgaaattcacttttgaaagaacatgttaccttaccttttgttttagaagttttcaagtattaaaatattttttag

SEQ ID NO: 12964 - DNA, 437 bp, Homo sapiens
cgccactgccaagcacacctcgctcccagcacaccacagcccgcgacctcagggcagggagcagagcagctgccggctgtgtgcccatggggagcccagcccccaccccccacctccgacagcaaacagcaactgactgcaggtgctggcatgatggaggtggtgcaccttggacacgtggacaaggcccaggcgccctctgctcttctgccctcgatgccacatggcggtgaacacatctgaagccactatgtttcctggctctaaggctcgtctgtgtaacccataaaacctgctttgattccaaaatgaggccctggagtgcgcaaggagtgcccggatgcttggggtgggtgttcctcccggggcttcaaggggtgactgctgtaggctgtcccagtgcgaggccgggagcgaatggaaaagctgaggctttg

SEQ ID NO: 12965 - DNA, 110 bp, Homo sapiens
agccggccggagcggggcctgcatgggcgggtctgtgggggggcttggcctgatggtgggcggggccccgcccacagggccgaccccaatacaccagcgactcaaccttg

SEQ ID NO: 12966 - DNA, 133 bp, Homo sapiens
agcgtgtggcacgccgggggtcccgcagcatcctgtgagcatttccgcggggaagctgagcacgtgaagctcgctggttctgtgcgaagggtattcctggtgctgaataaagggtgttgctgtcaaggctgac

SEQ ID NO: 12967 - DNA, 357 bp, Homo sapiens
aacgagtctacgtggacacgcaagtttcagcgagcggggatttcctgcgaggccgagcgcgaggaacagccggccccggaggctcgggctcggggtctccccggggacgcggccgactgagaaggccggggcgctcgccgggcgcggcgccgtcctccgtgtcgcggggacggaaggaggcgacgcaggccaggagtcgtgcgcgcgggcggcgagggggcgctgtggcccgtgtctgccggcccgagtcccggcaacggtgggcgcgacccacctcctcccccggcggcttaattcggggaagaagaaaaaacggcatcgaggcatttcaataaaacctaagcgactcctgatcct

SEQ ID NO: 12968 - DNA, 362 bp, Homo sapiens
ttaagggtcttcttttacttttgcgggggggaggggggaggagttggggagggagggaatgtgggaggaattaagacaaatatttcagactggtgtaaaggacaaatatgacaacgacgtcaaggactcgcatccgtcgctttctgcagaaaggggcttcttcggtcccgagctcgcgtccaggtggccaggcctctgccggcggctccagtggctgcgattatcgggttcggtaaatgcccccacgtgcttgtgtctctttccccccttttctgtatatagagtggtttcagattgtaaatagcgcgtcagcgaacttgtctaaatcatatatttttgtctaataaactaaatgaaatgac

SEQ ID NO: 12969 - DNA, 1160 bp, Homo sapiens
gttgggaccgctctccgtagcagagaaagtgcctgcgtggcacagaaatttcccacaaatgagctgtgcaatctacgtcggaatacatccaaggaagagcaaagccaaaagaagaaaaccgtgttaggctctttgaccaggagtgtatgtatgtgtttcactgtgagcctgggtgcagacctgtgtccccatgcacacagtgtctcctgtcaggctgaaatgtggcaccctggcagacagagctgtggctcgtgaggcagaaggcaggcaccacaacgggagaggcagcactcacccctgcctgttgcagctaaatcaagtcaaaaagacaggcgaggctgaacttgctaaatgtctggtgccttagaaaaagaaggaaaggccatgaaataaggaaaacatacaaaatatgtaccccctagttcaccagcctcccctcccactaggagggcccctcgagccatcaggagtgaccaacttcctgggtggaggtcaggggagctccaggaggctgcccaggctcctcctcctcctccccagcggccgagcatctcttaccaggaacctggagccaccgccggagccagcgtcatctctagggtcactggccaggggactgcattctggtttgggactttgcctatggaaatgggaaaaatgaaattcctgctaaggtgcttctatctctttcagattcatgcattgaaggagagattttttatactttatgttttatctttctcagttatttgcaagtgagtgtccttttaaaaacacacttcttcatgcttttctttgtaaatgacagatcgaagtataggttacatcaaaaccctaccatcctgagaagagttatggttctattatagcagacgtcagccacacagcctatgtgacaataaccttagagtcctgtgttttgtttttgtgtgttgtgagattttaatcttttttttttcggtgagtctggccatttctataatgccaggtgggaagccaggctgcgggtgttagggtgggaatctgcccggcgtctctggcaccctccctgccatcctcagtgcggctgctgttctcctgtccggtgctgtggctccattccaaaggggcacctggatatttatatttgctgaagttttataataaagtttatatggtac

SEQ ID NO: 12970 - DNA, 1292 bp, Homo sapiens
gtgcgtttttcatgaaattatcttcaacttgaagctttccaatggcgcttctctatggactttgtaaataagttatatctttgtaattttcctgctactttatcattttcaagatgtcctctaggaattttttttctagtaattttgcaatctacctaataagtacctaaatacgctgaaatggaggttgaatatcctactgtgtaacaggtcagaatttcaagctctgggtaataactgctgatattttttctaatttcaaatttacctcttttggctatgtcttgccaagtgtgtatgagactagactttacaactgtctttgatggcattttcagaacaataaatgtcacaatcccttctatagccccctacagtgatctcttcaaggtcaactgcagtgttgcttccctccccctatagggctggaatctgtctaggagccctctctcggaggccacagaggctgggggtagccattgtgcagtcatggcccgggggaaacttgccaaccttcgtgtcaggtgctgtgtgtaagtggagaacttggggatagaggaggaagctcctcgtggcccttccaaggtgaggcaaaggcatctggacttgttccagcccagcccaccgggtgacatcaccgggcagggaggggtgctggtggtggttcatacggagtaagctgctctgcctgtgtgagtggctcctgggccctaaacaggcacctttaggccatgggtcactcaccgtgagccatcaatgtgctctggtctgacatggtttctctctgtcttctagtctagacctagtttttttgttctgttccccacgtatggatatagtagagattgttgtctgtgaaatttctcttttgtagattttgagttttcccttgtagtgtaaagaatgatcactttctgtaacaataacaagaccactttttaagatttatcctgtttgttctttgttgattgaaacataataattgttaaaattctctacagccttctttttcttccatagctaatcttccttctaatagtttttgctttctgttttgctgttgttgctttgcaaagctttcccctcatagcctgtacctgttatcaatataaaataatcttcctgttgaatgcttcatgacttgaattctactttgataaaaacattgccatactgctttttatcttgatgaattcatctggcattgctttgccttatcatctcatctggagtttttaaatgccatttgtttcagttgtctttaacaacataataaatagactttgccattt

SEQ ID NO: 12971 - DNA, 2103 bp, Homo sapiens
tggctcctggctgcgtcagcctcccccacccctctgcagactgccccgcggcctcggccaccggcaggggaaccgagaccagcaccccgcacgtcagccgggctcgcggcacgcccgccgctgatcactctgcatgtttcttcgtgtggtggtcgcgtccatcttcaagaacagctcgttgtgctcatctgtgaagccttattaaacgtggacgttgttttctgccttcccaggattcttccttcagtgctgaggcaggtcgggctcaggaactgcagggacgtgaacatgcgcttgcggtttgaggtagccgtgtctgttccttcgcggtttgctattttcatttcctgttcgtcaaagcagcagaggagatcaaaccccgttcgtgtgtctttcctccacggataagcttgggaggtcattgttttactgccctcacattttgtttgaaatttcagaactgtttttctatgtaaatattgaaaacttatgatttgtgcaataactcagatattttttatttaatttcctattttcacataagttatatttaagggaggagggaattttttttaaacaagcttaggtcctttcccgagctgcattttctaagttgggtcatcgtgtcggctggttgtctgacgagcatcgttacaaacaccatgatgaggggtttggggttttattttgatgtcttttcttttggtcggaagtgagtgaaggagccaggtcgccctgaaggttttccaaagggcttggctccagagccacctggcagactgcccgtggccctgctgtcgggccccaggccgttgtcctgctctgaccacagagttttaatgttttggttttcacttcttttaaactggacaacaaatccagcatttcaagtgccagaagtataactttctaaggagagaagggttgtcacattataaaatctttaggaaaatgtgaactggaaaacgcttcggtcagttttagtgacatagcctgtgatgatgggtctggtgactattattgcggaccgtggtacccagttttaggaatgtggagaaaggaattctgttgattccgttgaggaatctgtagcgtatgcattcgttctgttaagagcaaatctaggagaagtgcttcagctgcccagtgcgccgtggggagtgttttaacggatcgtgtcgcaggagagcacagcccagcgttggggccgggaccgctggcgcccgacgtcggaagcatacaggtatactatgcaagtgtattctgccacaacaaccactgtctttgttacctttttttgaacaagaatatatccatcctgcctaaccctgagtttttggagcaccacagttgtcctgggagttggttgcatcttgtaggccatctgacttcctgtttttaaaacgggggtctggtcttgctaaacactacaggtaggttggtctttgaagtccactagtggagaatgtcaagacaagatacttattaccatgacatctgatgcatgtgcagcagtggggagttctagattgatctctgaatgtgatcgacgcccagcaaggacaagctttaaaatgtctgcggtctgcccttttgaagcaggactggctcactctgtcattgggagctgtcagctgcgactgcaggttctctaggaggcattccagaatagagtagcacactgtgtctgcagttctcgatgaccgaaagttatcaaaaatatttaaaatatttaaattgtgaacctattgataaagaatatttataaaaactgatctgtaggcctgtactaatctctacgcattagcaatattgactgtaaacccacattaaggaaaccactacgggtctggcagtgcgtgtcccgtggggtgtgcattttaaaactcgattcatagacacaggtaccatgttccatttccgtcatggtgaagcaaatgaattggcctggctaccactgtggtcgcgtgctacaggtttgacaaaaagatatcatgtttcgatttttttgtgtgtggacaacaatatggaagctaaaattgacatatttttatgtaaagtttttctattctttgatttttaataaactttggaaaccagttt

SEQ ID NO: 12972 - DNA, 3210 bp, Homo sapiens
agagtcaccttcattttggcaagaagactgtattttcaggaaggtatcacacactttctgactgcaacttctgtcccttgtttttgatgtgcgtgctgtctgtcctatggagcctctgcagactcgttctcgtgacccagtggcataccgtttggtgtctgatgtgtgcccagatcgttctgccacttgcactgtgcttgctcctaagcaaaagggaaaaggagcgcgcgtgatagaagaaaagcactgggagaactaacagaggagaaaggtgaaacacacacacattcttaaggcaataaaactagggggtgtatattatcttctggtgcatgttcttttctggaaaatatggtagctcgccaaccgcatctgctcatctgatattcaaacacacagtattcgtgaataagttgattctgtcccccacgtggactctgtgctcacccattgtctcattgccagtggtgtccaagggcccccgttgggacccacggctctcgtccctctgctccgtgtgtctcatgccagcagcacgtcgccatccgtcaccagaattagtcctcacagcctaggaccagttttgtatcaaactcgtctgatgttttgatgccatttgtcttttgtaaagttaattcattaaaagttttatgtactttgatttacagtgcctgtatcttttattttcctgtcttctttctcctgtggtttgctccagaattaaggtttgttttccatccattctcccttttgacacagttgtttcagaaagagctctccagaagccaatattgagatgtaattcagattaggacacagtgtgtgacgcagataactggttactcagctccctggaaagcaggcaagcatgttgaatgtatctagtggtctgattttaatttgggcatctctagagaacgctttcagggaaaaatactttaatagtaaaaagattctctgcgagcaacagtgccccctccgtccactacgctcctgtctccaagaatgttttgctagagctaacagacatagactgcaaaagaataatttggaatcagctatgcaaatcagtctcacaatagcgtgagctaactgagagaagtactaagacccacaaactgcctgttaagtctgagaaggctaaagaagacacacagccaacgttcatgcatttttaaagacagaaggccttgaagaatttgttcttgtaaatccaacacaagttgtttggtacttttaacataaagaaatcatactttgccaaatagtgaaaagtagagcaatcgtgtataagctaatgtttaaaagcaaaactgcaaattgtagcccagttggtcaaacttgttttctttttataactcatggcaggcatctgtaagaagtagagaacccagatgatctcttaggaagccttttattcgtgggaactcgaacttgaagcacaagttcctggtttgaatcctggctctgattttttactggctgtgtgactttgaacacatctcttagtccctcttaggagtactttccttattggcaacttatggactcgctagtgattaaacgaggcaatgactgtgagcgagcctggcaggtgccccgtggtacattcacagcacgggcacagctgctgtgccaggactgtgactcattcccagtaaaaggcacttatcgaagctgataaccgtccttcatcaccgaagtgtgagtagagcatgacttatttagtattctgcctcaatggggaattttttgatcctgtaatcacaactcagcattggccttaatatacctaaatctccaaaaacagtgattaaagcaagagaattattacaagggcttttctctttcctctaactcattcttcacggatgccgtagcgtttccgtgagctcaaactggccttggtgtaaaatgtgtaaggatgagcagcaggcgtgcctcgtgggttcttcctctgttacatcctgctacactcatccgcaggtcaccttagttcacctaccctgagtgaacacccccagctgggtggtccaccaagttctcataaacagagtccctcccattcccccacggggtgcaccgaacttgggtttgcgctaaaaagaactcaaaaggagaactgtgctctcccaaagccatatcaccagtcttaccaaacaataggcttttaaaagcattgagtcattgtcagaatccactatgggaagctctgtgtgtacctggtcccttctaggtgtggtcccataggagcagccttagcatcccctgtgaacttatcaaaaatgcaaattctcaggccccaacctgaaggaggaccctgaatttgagatccccggggctggggcccagcacaactgctgtttagtgaacaggttctccaggtgattctgatccctgatcaagcttcagacctccctccctccccagtgtttttgcaggtgaggaaacaggggcagagtaattcaggcacatgtgttcagagttccacagttgattagcagttgaggccaggctagaatggaaaactgcctgttccttgaatctgaaagagcattattcctggtcaaagctccttaaagttctgggcagctaaaagcatccctgtgagcaaaaatgccaggcagaaaactggcagtgcacctctcatcagcccaggtcccagtgccattggcttcaagaaaaaaaaaaaatctctccccaatgctctccttaacctttaagtcttacaggaagcctctcatagaaattgcctccagtccagtttcccaaaaaccccagtgttttacatatctgtttaggagtgtctaagttttgtcatcaatccaggatgttattcttccttcccaactcactgtgctcctaaaggcagcaaccattcatctttcctttgctctggatacaccgaatgaccaggtaacatcatcaggccgggtgcagtggctcctataatcccaatattttgggaggccgaggagagaggatcacttaagcccaggagtctgagaccagcctgggcaacatagcaagacccccatctctgcaaaaaaataagaaaattagcttggcatggtggcacgtgcctgtagtcccagctacatgggaggctgaggtgggaggatcacttgagcccaggaagtccagaacgtagtgagccttgattataccactgcactccagcctgggtgacagagcgagactctgtctcag

SEQ ID NO: 12973 - DNA, 1062 bp, Homo sapiens
aaccagaaattaaagaaagaggattaagcttttttgactgaaagtactaaaagtcagctttactagtgccaaacctttaaattttcaaaagaaaattttctttcaacatttcttgaaggacatggagtggagattggatcatttaacaatataacaaaacttcctgatttgattttacgtatcttctatctacgcccttcctgtgcctgtgactctccccaaattgccctgttgccttgagctcttctgagctaaggcagccttcagtccctatcagcgcctcctttacttcccagagaacttcacagagactctgtccttccatgcaaaggcttcctgaaatagggagactgactgagtagctcattcttgtgacttacagtgccaacatttaaaaaagtatgaaaatgatttatttttatatgatgtatacccataaagaatgctcatattaatgtacttaaattacacatgtagagcatatctgttatatgtttatgtaactatcaaatggttatttgttactaaagctatatttctgataaaaaatattttaggataattgcctacagagggatttatttttatgatgctggaaatatgaaatgtattttaaaatttcactctggcatatgatttatctatcaccattacttttttttaagtcacaatttcagaattttgggacatttgcattcaatttacaggtaccagtacgtacatattttaatagaaagatacaacctttttattttcactccttttatttctgctgcttggcacatttttgagttttcccacattatttgtctccatgataccactcaagcagtgtgctggacctaaaatactgactttagttagtatccttggatttttagattcccagtgtctaattccctgttataatttgcacaaacaaaacaaaatgttatgataatctttctccactgttctaatatatattgtatttttatttgatagcttgggatttaaaacatctctgttgaaggcttttgatccttttgagaaataaagatctgaaagaaatggcataatctt

SEQ ID NO: 12974 - DNA, 1605 bp, Homo sapiens
agacattgagaaaactatgtagcaagatccacttctgtgattaagtaaatggatgtctcgtgatgcatctacagttatttattgttacatccttttccagacactgtagatgctataataaaaatagctgtttggtaaccatagtttcacttgttcaaagctgtgtaatcgtgggggtaccatctcaactgcttttgtattcattgtattaaaagaatctgtttaaacaacctttatcttctcttcgggtttaagaaacgtttattgtaacagtaattaaatgctgccttaattgaaggggtttgggtggatttttttttctcaaaataagctgtagggactattttaacagcttaaacaggagctctcaagatgcactttcatattgagaggaatatgggcttgatcctcttcctatctaaatgggtgggccatttgattgtagagggtccaccacagaattatgggatgccttaagtgctgttactaggttgctcacagcctaacctggcgtgttgtttagggctgatggagacccatgtgagcctttgctttcctctggccccggccccaccctgaacacagctcatacacagaatcaggaccagcatgtgcagagctggccaccagcacaggcttagggcagttcagaacccacttgtttccctatcagagggacacagtgaagtggaggttaaagtaaattacaggaaataagggagaaatcttgcagttaccatgttcagatagagtgactgaaattaattgtacttactaaagtattaactagctaacagtgatgggccaagacgctccgagaactctaccgggattgtctgttctgacaacccagtgaggcagatacactttcttactgctcacatcttacaggtgagtactcataattggccagcatctcaccaccagcaagtagtagggccaggtcaatcccaggcagtctgaccccagagtggcccagctcatcccctactctgttatttgcttgttaatgattctctagattttctaaaataatgtttcttagcattgtgatgataaagctcatgatgaactttatcactagttatgccaccttaactagtcagatttcctagaattaggaaatggtgactcttgtctaaatttggttaagtgatgaatttgggttaccgtctcatgtgaacctggagattcaccagtcttaacttttgggtcattgtgttttctctacattcatgcattggatgttttgctaaataactcctgtggatttaggaatgtgtgctaatagcaatcttcctaattttcatgtttatatggaactatgcagttgagtattgaaagctttaaactgagtttatttacaaggactgagtctagcctacagagaacatacagcagccttctttggaccacagtcttatccgaggggtctgtggttgtatcagaagagccactaaaccaatccccctttccaaaattgaacctcacagacgttcctgttttttgtgattgagaaactggtcaatgaacaggaagacttagagatgtttcacaagcctttgatttttgtttcatttatttgtaataaacctcttccacgtg

SEQ ID NO: 12975 - DNA, 1695 bp, Homo sapiens
agtagttgtctcaacaacttgaccttcccctttacatgtccttttttgtggacttctctctttggagatttttcccagtgatctctcagcgttgtttttaagttaaatgtatttgacttgtgttctcagcattcagagagcagcggtgtaagattctgctgttctccctggatcttctgacattactgctgtctgagatttgtatatgtgtaaatacaagttccttgataccctaaaaccttggattaaacagaatgtgcattgtacatctttaaacaaaatgtatattaatttattaaatctagttgtcactttattttggacctgctgtgatctcgacaggaaacgtgccacagagcagtagtgcgcaggcaagacttttcagtgacgccttgtggaacgcagttcatgatgtcctagcagctctcactaagggaactgtacattctttctttcttggctattcagaccttaccaagaacgttaaaggaaacaagtagaaatcagcagtggagtgtctgtggtaagaaaacatgaactttatgcttcactgttagttgtttgtggaagttattttgtataacaccaaagctgttgtacatttcctactgcctgatttttttcatgtgtctgtgtttgtaatattgtatagtatcttgtgctaggtgaggaaattatttttaattttgataatttaatattcctagtgtgatcagcattgggagttgggtttcagtggggcatgtctatacttagagaaaaaaagtccaaatgaagattttcatgagtcagcccccccgcccgcccccaccccacacccacatcctctcttttccacacacaactatctgtttattttttgtagcagtggccgaaagtcctgcaaggtcataaatctttcagagtgacatcaccaactgtactgcatcttactggatttaggacttctgagatgcttgtgaagtatagatgtggttgtggtcttagattgacagcattagagaagactggttagaacatctggtctcgctggttagtgcctcgttggctgaggactaggtgtgcatttctcctagcttttcatcaggaaatcccaaagtttccaaagctttttgtttacagaataaaacttcaaataaaaccaattcattatttgtccagaaggaagcttggctgagctggccttttaacataggaatgtatttcgttggaaacattctgaaaaatctcagagaactgaacccttacaaactttgttttccctcataaccaaagcttcaggttagaagtttagaaaaatagaatggttgggtacatgatctaaatgtttaatgctaaaggtatatcgtaagggtagtgtttgtttttgaacgataatttagaagttctcatagaaagcgtataacataggtcttcagaaactataaaagaattttcatatagtattaaaatccatagactaaaatctgagaattttttaacatatgcaagtcagccaaacataagctaccaaaataaagagcaatgtgttctggctgttttatacttcaacaattttttccctaagtggtaagcaattactttaaaacatatttttaaaaacatcggtatcgggagctgcggtggctccggccggttgtcctggcacacaaggaggcgaggctatgcgttcgaggccaacctaggcaaaattgg

SEQ ID NO: 12976 - DNA, 78 bp, Homo sapiens
tacagagaagaatacattttaatgtcaaaatagtgctctttaaaattctggcaccaaatacaacttaccctgaatcac

SEQ ID NO: 12977 - DNA, 919 bp, Homo sapiens
cctatccagaagttctttctcattctctttcacctgccaatcagctgttaatctgaattttcaagagaaaacaagcaaacataactgatcagctgccggtatgttcatcgtgtgaaattgcattccaagtgagctgtgctcagcagtgcttggacacagagctgcaagctgcgctggggtggaggaccgtcacttacactctgcccaaggcagaggtcgcattgctgtatcacagtattttattcaggtttctgcaaaaaaataaaaagataacttttttaaacaaacatgaatagaattttgcaaatttaacgttttcaagatttattcaaggaaacaaaatgcctatgttcaaccactggtgttaatgaacaaagatactgtgcgtctctggggaagacgcacctaggtggcggccactcccatggccttgtctaggactcagagaccactcggctctgagcttccaggcgcctcgtctgtgtgcatctcacgcccgacgtggcttctgaaacgtgcattcaacctcaaacttttgcataaaatagaatgaatcgttttgctctgatgaaatgtaggccttacttgtatataagactgttcctgccttcggtctgtcattttcccacctgcctcccctacccaccccccacccaccacctggggcttcctctgggggtccgagggtcttcccatcacatgaagacatcaggttgggtcctgccccactgcccctccccctgttcctgccccaagccgtcaatcagattgtggagcagtacacagtcagatgaaaatactgtaaatgcactcattgggggttttttggttttacttcatatcatgtgcaatgttgtggctttaacattttatgcaactatttatgaagacctctgttgtacctgtaataaatatatag

SEQ ID NO: 12978 - DNA, 782 bp, Homo sapiens
gtccgctgggggccgaacagcagtgctcaccagtgacggtggtcacagttgcaataaagtctctctctgaaaccaaagctagcatttcagcatggaaggaattaggaccttttcttcaggattacaggtacactggatgcagccatgcatggatggtttttctttatttttcagtgatttcctctgaagcagctgcactgatacatttgggagttggtggcttgactttgtccataaggggcgtggccacttcacatgatggcgggcctttaagagcacaaagaagtttaatatggacaacaacaggaaaaagcaagaagaaaacaagtagggaaaaacagctaacctggagagaaagaatttctttaacctttatgttcttcattaaaaatcttatcttggactgatttgagggatttttagaaacatggccttattttatataagcattaccttcccaggaatctttgttgtatattaatttttgataaccatttgattaactttaaaattaagtatatgtgtgtatatatacatatgtatgtttatatacacacatgtatctgtatagttttatatatacatatatacacatagacatacagagaaccactactttgtaatagtgtacagtttgttttatatctctttactttttttgttactattttatctggccagcttaatagttttatttagattttttaaaattctgtagattaaagcaaatgacagttattgaactatcacaaaactattaaactgtggtacatttaatgtgt

SEQ ID NO: 12979 - DNA, 6684 bp, Homo sapiens
gagacgcatgctcctgacagcctggcgacgtggcgaagatgcacaggtggctcctgggcttgggctgcaggtttgggggtctctaagaacaatctctgagaagaacccttgggcccctgggagccaagttggacaggatgtcctgaagactagcttttgataagagaaattaaccaagtctttcccctcatctatgatgcaatatatttcagtgggggccttcagagcacacctgttggacggtgcaaaccatatcttctccagaaggcaaatacttttgtatcagaggaaactcagttttggagaggaatatgttctttatgtctcaaatcaaaactctctctaatggtaaactggcttctaatttttttaagtacagtatttttttttcccctttagtagtaacgggtttctatagatcttcctatacagtctgctttaactcaggaccttgagattatgagactgacgtgctgcccactgcactgagggggcttctaacagtctgctttaagtggtataattctgggatagatctgttactggcatagtcatgacaacctctggtaatcttaccttctcctttttatgaagggaagagcaatggtttggacttacatcttaattaaggctattttaagcagattgttttgcaacagattaagaattgggtcccaaagtgggttatttcaaggcatttttgaagactggaggagcgtaggagggagtggtgagggaacctagaacttcttgctccttgtgactatgacagatgtctgatgcccccagcgcactggagtctggggcttggtgcaggtggtgccccatcagtgtggacagacactacttgcctttgtggtttagtgttggaagctttaattattctacagttccatagattcacaattttatagccaaacagtttgtatccacctgctttcagaggaggaaccaaaggccaaattactttgaggtagggcttagctggacctgggttttcctatgctcttttcatgctgtgttggagggtgtgtccactgccagatctgtgtaacccgtctgggtcaggggatgagtgacagcaaaccatcttaaaatttttcatgagtacatttaagcggaagcatacgggaatatgagtgcaaaagtgtggctgagccgcgtatgcccttgattggttttgggaagcctgagggaggcagccttcctggctatgagccatcgcctgcccaatcaggctaagggtggtgactggggtggtgaaggggcagctctgctgagcatggtctgccttatggcctgaattgtcctcaaggggtgtggactgcagatggtgttcacatgaaccggagacatcactctttaggattctactggcagcccctgaattggctcaacgtttgtggaggtggtatttccctgaagtactgagctttgttttataataattaaaatccttatttggtccaatttaatatagtttagaagctattttttttgaggcaaaccgtttttgaaaatgtaaattttgtttttaattaaaaataaagtcttagttaagaaaactcaggatgcacaaaactattcagactgttactttagctttctcccattacctcatcagtaatattcaccacattttgctaaatatttattgattagagtgttgaaatcaaattctgctctaaatgtgtgtgaatatgttggagaggctttgtgttcttcactgtgaaatgcaattgtgccttgaataagaaggtacctagaagccaaattaaagtaataatgacttcttattggctttgatttttcattgcagtatatgggattgtacagcaggaaatgcttatcattaatttctgatgttttttaaagcacaactcgaaacatttcgatcatacatacatagcagtagagatctgtgcccttcaggtacattgaatctgaccatcagtttatatatgtcattgaattttaagaatactcatgttaataatagtcatctatccttgcattttgaaactgttctaatcttagtgaacttgaattggatttctgggtaaaagaatgtgtttcttttatgttgcttatgtccgaaggccttgtcagaatctgtcagactcttgtttaggtttagtgtgatcatggcgtcagagaagcaaagctttcaaataaatagtacttcaggaaatagaaatgattgaccaactttaaaaataatttttttttaattgcaatatgcagcttcagttgcccagaatcttagttccgtttctcattcttggtcttgagctggtcaggtgacatcagcagattagaagttgaatggagattaagtggattcaggaggatgttccacttagagcagtcttcaaaatgataaggtgttctagaagaaaggaatgtagtaggaactatactatgcctaactttctatcccagagtgtcttgcaagagtttaggagttttggaccctgtgtattggcagaaaagttatctccatcttaagcaggcatgacttttatacctgtgagctcatttaaggtgcatttaaacctaaaataatttccctgtattatgcttcatgggattaacactgcttttccagaacattttcagattcccctccttacatcctgagctccttctgtatatacatctgttgattttatccatccacaaggaacaatgatagtcacattagagaacaagaaaccagtaatacatggtctctaactgatgattcgggcctggatttgattgaaagtgtttgcagttcctcttccgtagaatacagagtggatgaaaatgttttcaatgcacagaacaggatgaatccttttttctttatttagcgatttacacttttgttactctattatatattcagttagtgtctgataagattttctttgcttaaggagaacggacattgccttggtatgtttttttttttttttccctccacttttggagcttatcaggtaaaaatctcaagccacatgaattgttaacacctctgttgggaaaagcctttgtgagtttttatgtacttggtctttgtttttgttattcatcctgtgtcctccctcttcccgatgtgctgttttacctaggagttagtctgctttctgaggatcttttagagagaggctgtgaagtgctgaatcacctttaatgatacagcacttctgccatctcagcatctacataggacttacatagacttcctgaatgtgtcttcttcagatactaaagtacagttggatcattttcttatctccttttcttaagcagtactttgcaggtactcccctttgaaagccagaagcataaaccattggggaatcttaacttgtagacatgcagtaaaagaaatgcatttatgtaagatctgtgagtacttaaaaagaaagccctcagtgtgtgtgaagtgaatgtgaaatgtgtgtgaaatacatagaattcccaaatagtttagcaaaggcagggcgcaatatcaagtaatttaaaaatggtccaaggaactgtaagaaggaggaactaattctagaataaatgttaaaatgccattcaagaacaaaaccacagatgccatacagacctcctgtgcttaagttatagaagaataaaaatctgaatgaatggaaggccttacgtgtatacagtttacaaattcctatttctaaaatttaagtcccttatttaacagaagtatgtattttaatgcttaactgtctcgggaaacctcatttgtgacatcatctaaggggatgggaagactagggagccagtgccacgttgaacagaacagtggtttagtgaatgtgtgaggaaagacatgggcaactgattattaatgtttttgtaattcagtttataacttggaaccaatgaaaagcaacaaaactaaactggtttgacagcctgccacttctggcatttcctgtaagtcactagcagtaggtgtgaggtgggcttgcccatgaccaggaggggtgtgtgtgtgtgtgtgcatgtgtgtatatgcgtgttggtctgcagtcacagcatacctttatgtgcatgtgtcctcgcagcttgggactcagcagtattctgggagggtggaggtgaactgtcccatgtattgtattatatattttttgagatggggtcttgctctgttgcccaggctggagtgcagtggtgcgatctcagctcactgcaacttttgcctcctggttcaagcagttctcctgcctcagcctgccaaatagctgggattacaggtgtgtaccaccactcccagctaatttttgtatttttagtagagatggggttttaccatgttggccaggctggtctcgagctcctggcctcaggtgatccacctgctttggcctcccaaagtgctgagattacaggcgtgaactaccgcgcctggccccatgtattgtatttttttcaggttatattgaaatctactaccaggaatgtcggaatgggttttggtatgtataatggaaatagatagagtggttaagtctagaaacacatacattaattgtattgaaatgttatatcaatacatcatttatgatgtgtgtgtggtcccagacctcatggccaccagtttgtttaagcattgtgaatgctttttaatagcattcattagcattaatggaggaggacactgtgttttctcaattaatctcattgatttgtttggtataagtttgggtcagaaatgaaactgccaaaacatcgatcagtacaaggaagggacacagggcttaaaatgtccacagtcttggcagtggacttggcagttctcccagtaagcagaagtacttgagcttaattctgaacttcaaagtaatattttatacttaattttaggagttttcatttacatattgaaaaatgccttgactgtattcacataaatggtgctaaaacattgtaccccttataagaactgcagcaatccacagtaatgttggttacttctgagtatttgataaaggaacaaagtcaaaatgaatgtatttaataagcttctttctcatttccattgtttttataaaaatattttggtattgttgcctgcattttagccacttctaactttttgtattatgaatttggagaggataacaagccaactttagaccctctgccagtggcgatggtgtttttcttccatgggtaagccattgtgaatggaggctggtggagcagcacactgtgtgaacctggcagcgctcatcttggcttgtttagcagtgcctctgtttacaccataagatgttccgcatgtgtccaaaatttcgcctgctctgaaaaacatgcccccgaggctctgtgcagtttggggccttggttcccacctgcagatgcggtcagttgcctggctcctggggccagagtttcctctgttacttgttgagtctcttgtcttcactgtcagaagctgaactgacttgggggctttgctgttgatccactttagcaaaccctgctgcagaggactgtaaaaacaaataactaaaaataaacttagaaaatacaactcagaagcctggctctgttgctgtggtcaaatgcttgcctttgaggactttggcagattgtgctattacattgggctctaactttctggcacccgcaaggcagacctatgatgtccacatggctgactcttgacccctggccattgtgagcagaggaatcaagggtttagggaggcagtattgggcagtgtggaagagttagatgagatgaagcagttagcacagtgcttaacccatactaagtgcccccaaccctgccagccaaattaggtgcatagttttcagcttgggtctggattcaacagcattcccgctgcccactaaaagggtgggcttggacagttcctgaacctccctaaatctgtttcttcatctttaccacacacagtctgtctcagtggtggtgtggattaagtgaggtgctagcacttattaggggaagatcctccagacctgcaaagcagggctgcagccccaattctgacccagccctgctgtgtgtttgccgcaaagaggtttggtgtgtgcgagacatttctttatgaaccatttacactgctggaaatgtacccactaatgtgatggcaagaacttcaacaaattgcttatgaatcaggctctcaatggaagaagttaatcctctgaagagggggaagactggactttcagaagtatgttggggatagagaatgaagtttgagtcagcagagctctgccttcctgtttgtcaaagaactagagtctgggagtcttgcaagatggagctgggcttctgaagaacccagtgggtaggtactgggcatccattagacggcagtgctaagtcggtcatgtgcagcagaaagacctccccactgtgaacaacaaaccactttcctcctccagtggcccattcatttggattgatacactttttcagtgtcagaaatgcactttctccctctacttgtctgaattacgatgctctgctcaactctgtggacagtgtttcttgaatttccttttccaccgccttttcccactcaagaaagtggagagaaaaacagggatgcaggctgtgggtcttgtggaagccctttacaaccattaaataaagaacaccagctgcattatgtgtgtttagaacgag

SEQ ID NO: 12980 - DNA, 2605 bp, Homo sapiens
agggacagagttcatccggcgttgtattcacacaaacctgaacaaagcaaatttttttaaaagcagcgtatgtaagcaccgacacccactcaaaacagctctttcttccgggaaggttattaggaatctggcctttatttttcctcatttctcatgggcaacagaggccaaagaaacgaagcaagacaaacagcaaacaggcattttggtcaggtcatttgtaggcagtttctcttctcacaaaagatgtacttaagcaggctgatcgctgttccttgagcaaggcgcttactctcctccgctcaggcccccaaggccgccctttccctcgcacacaggccccacccccacagttccacgccccccccccaaggccacaccctccctccctagagcagcagcgaggatccatcatcagaatcacagtgctctccagacctcctctctaaactgcttcattgacctaagtcactctcttcaatcccacacccatggacattcttgtcaactcaataccatagcactttgcataggcaaaatacttttcaggcctttttaaaaaattcattacagcaaacagctggggaaggacatgcagtcctcccccagctctgtcaatgactatgaccttggccaaagcacttcactgctctgggctgcagcttccagcactgaatcagaggccacacagcccaaagattagcttcatgtccattatagcattgagggagcagagatacccatacacagaagcaccttggcatagagcacccaggcatcgacctcttccaggagaactgattctgtggatggatgtgatttcaggagattgtgcagtgccagcatcagtgcataaagggtcctgtatgtcctttggctgcaaatcacccacttccctgtgtttcagtgggagaatttcctctcccacctcctcacatcctcttttgccaggctggatgctgtcgtctctgtacacaaatactttctgcattcccccctccacaccatcctagcgaggcaccagcacacctaatcacagcaaagcccagatccccccatcagttgcttttactcagtgttttcaaataggagtaaaggcccttgcaatttttaattaacaagcaaggcccaagggaacacatgtcctcaaaagtttttctgatccctcgccttgcacacctggcatgcatcaggcacatctgtcctacagctggcagagacagatgcctcggttctttgtcattcagattgcatttgacctcttctcatctatttatttctttatacatccagacttcatcacatgaagcctattggggttaagtttgtaagtgtttaattgtgcaaattgccaccctgtgtacctcctccatgtctgtctgcgtgttttccaccaaagaatgcaaagcagacttccaggtgtttaaattctgttcactcaacaatgccagatgaatggaagagggaacacactgagatgacttagactctggtccaccaaccagacccttggaaaggaatactaaaatcattacaaggtatggattttaaatggatgaaacttcaaattatcttatttggatagaagtctatattctagcctcatttgcatgaagtcagatagccagaagaaattccattgctggttttcacgaaattcacttgtcttttgctaataaacacatggccctttcccagattattctctagccaagccccacctttgttacgttgaaatccctcatttattttcttctcaaaatgcccattatccaaatgcagaacctctgcatctccaagccagttatgctgaatttgtcaaacttagacacccttgacaactgcactcctactgtaggctcctgtgcatactgtcgtcttctgtgggggatggagaggttagtgtgatgaggtggtgtctgcccaggaggtttctttcaaacatcatggcctcccatccaatcaacatcatcaaattacatgtgtaatcaaggctctgtgccatgggggaaatgaatcatttagctaggccaggatctagtgaaagccacagagtttaaaaccatgaaagaagttgaaggcagcattcctcagctctgtgacttgtgaccctatttgaagtttcaggatttgggtgtcacaaaggattgtccctaatccttggccctggggtcttccgagtgagctggtttaatactctgagaatgagcagggagatccagagaatgaatccctgaccgcatcacctaaactgtcttccaaacatgagacaaagctgactgttcacactgattgcccagcacataccgtcttgccagtttcttcttttctcccagtctcctgttcatccattctgttctcccttggggtgggaatctatgatggaggttactggggaaacagctcagcagatttttggagaccaaaccaaaggtctcactaggaaatttatctgttttaaaacattgcttccttcctggctctgctaaattgaatgctcattgtttgttgttgttgttttttaattctaatgttcaaatcactgcgtgctgtatgaatctagaaagccttaatttactaccaagaaataaagcaatatgttcgt

SEQ ID NO: 12981 - DNA, 926 bp, Homo sapiens
caaggacagcctataggaaaaacaataccacttaaaacaatctcctctctctctctctctctctctctctatctctctctctatctcctctctctctctcctctcctatctctcctctctctctctcctatactaacttgtttcaaattggaagtaatgatatgtattgcccaaggaaaaatacaggatgttgtcccatcaagggagggagggggtgggagaatccaaatagtatttttgtggggaaatatctaatataccttcagtcaactttaccaagaagtcctggatttccaagatccgcgtctgaaagtgcagtacatcgtttgtacctgaaactgccgccacatgcactcctccaccgctgagagttgaatagcttttcttctgcaatgggagttgggagtgatgcgtttgattctgcccacagggcctgtgccaaggcaatcagatctttatgagagcagtattttctgtgttttctttttaatttacagcctttcttattttgatatttttttaatgttgtggatgaatgccagctttcagacagagcccacttagcttgtccacatggatctcaatgccaatcctccattcttcctctccagatatttttgggagtgacaaacattctctcatcctacttagcctacctagatttctcatgacgagttaatgcatgtccgtggttgggtgcacctgtagttctgtttattggtcagtggaaatgaaaaaaaaaaaaaaaaaaagtctgcgttcattgcagttccagtttctcttccattctgtgtcacagacaccaacacaccactcattggaaaatggaaaaaaaaaacaaaaaaaaaacaaaaaaatgtacaatggatgcattgaaattatatgtaattgtataaatggtgcaacagtaataaagttaaacaatt

SEQ ID NO: 12982 - DNA, 824 bp, Homo sapiens
gtcattagtaataaaacctcatctcaatagccacaaaaagacaaatgtggtcaccacacacttgcacaccccagctgtgaggtggcttcagcggaagtctgctgaccccttatattccccgagagtataaagagatcggaaataactgattaaacaaatccgccactttcatgactagagatgaggaagaacaagggatagttctgtaagtgttcgggggacatcagcatgtgtggttctttcccgcactgatcccctccattttttgtttgtttttttgcctcctgttctaataaattttgtctccatacaaatctgaaccccaagtgtgtacctcattcttcccttatcactgaaggcaagaagagtccagaagggccacagagaactcatgtgttcagctcaagactccacaggaattcaacccccagaaagacataaacttggagtccgtctggtttaattattggagaatcgattcccaagtccaggaagagaaatgtaagattctagaaagtcgcagcaggaaagggagttccctggtctcctgggaagtgtggcttcttctcctaatggacacctctcctctgctgccatactctcccttggctccccagtctcctctcctgatctcctccaatctctgtagcccaagatgtgaaagccagacaagaacacgcgtgtgtgtatatatgtgttcgggtgtgggggtatgtgccctccgtgtaggtaactgtgtgagtgtggggggtttcaagggtgtgttaggaacaacgctcaaaatcctaaggaaactgaacactcgaacgaaggattcttagcaa

SEQ ID NO: 12983 - DNA, 1822 bp, Homo sapiens
tctgttgcctttttcattttccaatacgacactgaaatatgtgaagtggctatttctttatatttatccactactccgtgaaggcttctctgttctacccgttccaaaagccaatggctgcagtccgtgtggatccaatgttagagacttttttctagtacacttttatgagcttccaaggggcaaatttttattttttagtgcatccagttaaccaagtcagcccaacaggcaggtgccggaggggaggacagggaacagtatttccacttgttctcagggcagcgtgcccgcttccgctgtcctggtgttttactacactccatgtcaggtcagccaactgccctaactgtacatttcacaggctaatgggataaaggactgtgctttaaagataaaaatatcatcatagtaaaagaaatgagggcatatcggctcacaaagagataaactacataggggtgtttatttgtgtcacaaagaatttaaaataacacttgcccatgctatttgttcttcaagaactttctctgccatcaactactattcaaaacctcaaatccacccatatgttaaaattctcattactcttaaggaatagaagcaaattaaacggtaacatccaaaagcaaccacaaacctagtacgacttcattccttccactaactcatagtttgttatatcctagactagacatgcgaaagtttgcctttgtaccatataaagggggagggaaatagctaataatgttaaccaaggaaatatattttaccatacatttaaagttttggccaccacatgtatcacgggtcacttgaaattctttcagctatcagtaggctaatgtcaaaattgtttaaaaattcttgaaagaattttcctgagacaaattttaacttcttgtctatagttgtcagtattattctactatactgtacatgaaagtagcagtgtgaagtacaataattcatattcttcatatccttcttacacgactaagttgaattagtaaagttagattaaataaaacttaaatctcactctaggagttcagtggagaggttagagccagccacacttgaacctaataccctgcccttgacatctggaaacctctacatatttatataacgtgatacatttggataaacaacattgagattatgatgaaaacctacatattccatgtttggaagacccttggaagaggaaaattggattcccttaaacaaaagtgtttaagattgtaattaaaatgatagttgattttcaaaagcattaattttttttcattgtttttaactttgctttcatgaccatcctgccatccttgactttgaactaatgataaagtaatgatctcaaactatgacagaaaagtaatgtaaaatccatccaatctattatttctctaattatgcaattagcctcatagttattatccagaggacccaactgaactgaactaatccttctggcagattcaaatcgtttatttcacacgctgttctaatggcacttatcattagaatcttaccttgtgcagtcatcagaaattccagcgtactataatgaaaacatccttgttttgaaaacctaaaagacaggctctgtatatatatatacttaagaatatgctgacttcacttattagtcttagggatttattttcaattaatattaattttctacaaataattttagtgtcatttccatttggggatattgtcatatcagcacatattttctgtttggaaacacactgttgtttagttaagttttaaataggtgtattacccaagaagtaaagatggaaacgtt

SEQ ID NO: 12984 - DNA, 1277 bp, Homo sapiens
aacaaacaaaacattaggctcctgttgtatcttggtttagtaacaggcccttaattaacttatttgtacatgagtcttccagagaacactgttttatattaactttcagttgaaatctttcagatattttgaatctctgaacaaccattgtcagttgtgaatgatggtaaattttttggcatcaagtctcataaccccaactgatagaactgttgcttatctgtcttccttaagtattttttagggttttgtttttttttttgtttgtttgtttgtttgtcttcacttttcccccaggtctgttgagctgtatgagattcattcatacttcatttattcattcaactaatatttgttgaacacttacatgtaccagacattattaagtgctgggtatatggtaatgaacagaatagacaaggcccctgcccttttaggggagacagatgagaagtaaattacgggttatgagaaatgttatgaaggaaaggacaacaacagacatgtcttagtacttagggtatcatggctttataggaaagtaacattctctatctttttttttttttttaattttataaaaatagagatggggtctcaccatgttacccaggctggtctcaaactcctgggcacaagcaatccacctgccttcgcctcccgaagtgctgggattacagatgtaagtcactaccccagccagaaactaacattctcaaaagctactaccaaaaaaaccccacaaatttgccaatccatgaaagtatcataggaagtctacctttccaaggaatttggcattgtggccctgctcttgccaaatgctctccagcattgttggtatcaaggtggtctggttgagtaaacttgaccaaacaaaaattaactgttttttgcttttctgtttttgttttgctgatcaaaaaagcccttcagggtctcttgtgcatccaggaggtcattgtagatatcaataatatagtgcctaagtgccactttattgccaagtctagattgatacttttttcagataaaccagctttttatgtaaagagtaagggaaaaagttaaatctttaattctgacctgccataaatacccaaagatataaactgtcttccaccacccccctcataactaagacatccttcctgagtcactcttaatcatgaaacttgattttctcaattggccagtcttctgatctttagtatctctttagttcagtaatttttacctacctacttgatttattttcctttaaaaggtgaaatgac

SEQ ID NO: 12985 - DNA, 2796 bp, Homo sapiens
attttaacaagaatcattttctcagttctcttctttctttagcaaatcagagtgacttctttaaaccacaggttgttgaaatggccaacactggtacagacacggactataaaaatctccaagcttgtgcttacacatgaagcctgacttaactgtatgtgcaacagcaatgaaattaactccagaagccttccacctgcgtcacccaggccgggagggttccttcgttccagtgcctgtcccctacctttatgttatgtttactgatggggatacaagatgtgacacacccttctttatttgaaacaaacaaacatttagctagacctttgcttccttcttgccagctctcccaacatacccaatcctggtgatcagggaactaaaagtctgagggggacacaaatgtcacacctaagaggacaatcaatcattttgtatgattttgtaagtaaatgacagaatgcttttaggcacattcaatggaaggaggagatgtaggtctgtatatgttaccctgaaaagagaataagacttacttaaaaaaatgaattatgacctgttaggctgagctcaggaattgtccaaaaaggaaaaagcaaaataattaattgagagtattttttagtgagtgtaatgtataatgtacgtatgcaaagttcaactcaataggttattgatcaccatgaagtattgatcattttctatctcaaaagtgtaagccataaggctgttttacagaatagcacttctgataagctgtattaaatagccatgagcttcactgcttagagggagcagaaaggtcaacatctaaaagcaccttacaactagtttttgaacctgtcttgataagtgcttgaattcaagactggtcagtccaagagcagacaaaaatatcacaagtcagtcagtcactgggtttccatttctgaattttatgcactccaaccatgaatttaaactaaatttttagaaatcaagtatctttctaagtgtccttggatttatagacaatgtatgtacaatccaaatagaggagcttaatggaatccttttaggagactggttggtttttttccctctttcccaacatgtttaagaaatgtaacattctaagtattggatctcttttcttgacctagtataatgacaactgcagtgacttaagtttttgctgttttcgttttcccgctttgcaatttcctccttttgccaaaaatgttttcctacagaagactgtcgtgactcacgctacttgggaaactcactctggccactcctcctctggtggcatgagctgcttcccagtagctattccgattggatattccgttcgtcgtcacatagctggcttttctctcctcatgatgtaccttattttcttaggtaaataattccaaactctcatcgggtcataaagaggaggagaaacagggtgagtcaaggtaaaggagcagaaatgtagttacaagccaggtcgtcttcagtggcacaaaccaacccgttgagccctgacaacatgagtggagagtgcatttgccatacctgtgtgcatgacactaagattttatgttggagatacttctttaaataacctacagcttgggtctatggctgtgacccccagattcatggaggggctttagccatcagctttgtacatcatcatttttctgaatgaccaatcccactaaacatctttgaagtcggcctagagaggtccttcagatgagagagaaatagctggcttgtctgagtccagatttctcatcaactggcaatacaaaggaaaatatggtacaggagttagttagaaaggtcttattgattttacttctacttttcactacagttacaggtagaatactgtaggaagtcagtgcaaggtgcatgcttgattgatagatattgattgattgtttttcagtctctggggtcagttttgtggtttctgctttcttgcctaaatcaaagactatttcaagtcaacaacactgaaaactgcttttcgcctccactcttacagctgtgcctaataataattaattaataaacgcacagccctatgtgaacagacaggaatttcttgtgcaatgtggagcaaatggaatggtctccttccgcaagtctttttaatcctcatatctggagtacaagggtagacctctggcttaccacatacactatgctaaagtcatcagccactgctactacatcttgccagaaggtttccctcgccaacaaacagttgaaatttaagggaagaagcaaaagctaaactgtctttgaccctaagatagatagaaagctatttatttgtcttcagtgttcaaggcatgactagtatttctaattagcctaataaattcccacactttctgaagtgaacactaatggtattgtcctactaaaactgtcattgtttctttttttttaactggtcagtcattcacaataagctatgagggtaaataaatatgtgttataacaagtaaaccgtagttgcaagaatataccatgaagattaaagtaggctgggtttcatttccatcttcccacacatctcattgaatttgatggttgacttaattggcaccataactttgtatgatattatacattaacctttatttatgtaaagtaaaatgccttatatattaaagagtaagtgcaataatatgaaatagcctgtacattttaaaaatgttgtcaccaagttatataaatccacatctctgtaaacaaccttttttaagtaattttaaaaaaaataaacactctgcttactacttg

SEQ ID NO: 12986 - DNA, 872 bp, Homo sapiens
aattcgagccatataaataaaacctgtactgttctagttgttttaatctgtctttttacattggcttttgttttctaaatgttctccaagctattgtatgtttggattgcagaagaatttgtaagatgaatacttttttttaatgtgcattattaaaaatattgagtgaagctaattgtcaactttattaaggattactttgtctgcccaccacctagtgtaaaataaaatcaagtaatacaatcttaactgttgtggccttttttgatcataagagttggtactgtttaaggccaaaagtaacagtttttatagatcttttagtttcaactcagcttttacaataaaaaggatttgtattgcattgagtttataaacttttggtttgtgaacttcatatttgatcttttctcttccaatcaaatgtctaggcttgtttgacttccacccccaatggtttttcactctttttatttacttcattttcctttaataacttaatctcttcatgttcagtttttacttcactctttattcttttctttgattatggtatgcttatttggaaagtcagtgaaactgtcaaaatgttatctcaataagatacttatatgagaactacaatcaccgaatctactgtattcaatattagcagatctaatttgataaacaacatggcttgtgtgaaaactgagcaggtgtttgtttacccatagtgttctgtgtagttattgcttagtctgcagaaaataatgacttagatgagatgtctgacttgctttcacttattaaacatgttcaccatgggatgatgtctgtaacatcagatattgttcaactagactaggatttaataaaaattgtgaaagctt

SEQ ID NO: 12987 - DNA, 801 bp, Homo sapiens
aggaagccccccactttttttttttctgcctgagattctttaaggagatagacgggttgaaagacatcaatgaaacagaaggggcgttcttgaagaattcataattttaagcagttagtaatttcattttaaaatttctgtagaagctcaggaattatgattaatcaccatctgcctccaggcctttcatctcatgacaaacaaatataataatgatatcgtgtcactctgttaaatgttcatactgtttcaagcccatatgattagatttatgtttttaaaatctgttgtctccatatcttgatggcttttgggagcatttcacacaaggatataaaatgcggttttcttaaatgaaatgttttgtagctagaataaaatcatttttacaagtacagcattcttggaaagaatttaacacccaaaaaggggaaaatgtaatgaaaaatctcaaggttggaaatacagccttactctctctagagctggaggacaggtttgtggttgaggacttctctgtccgatgtctacattcaggttctgacttcatatcttgaaaaaggatttcctccctgtctttttcagtgtctcataaacgctactctggattgttgtaaatattagtgagatgggaggatttacagaagaaaagcaagtcaaaaatatttcctttttgatgtaaaaaaaaaaagccctatttcgcactaacattttattttacaagtattttaatcttatattttggtattagaaaaatttgtctattttttcattttgaagattaaatgttgcttacatttt

SEQ ID NO: 12988 - DNA, 1946 bp, Homo sapiens
atctcatgcagatagtgatggattcagaaagtaggttccagtggcgtcactaccttcttgtaagccagtatacactggctatttgtggaaatctctttgggagatcaaatagagtattatgccactgtgagtgtttataaactggaaggaacaagtacctgtgtttcttgggacacaaagcactcagatcctgagtggatgcagacatgagagtaaatgtcagcccaaattaggcccctcgacctacagacatttcatgggttttatttaatcacaccccatggtttggggctacatgaggaagttggtaatgagctgaatttcttattcagtggaaaaaactgaaactgtctaaaaacacgggatatattttagaggcaattgtggaagcggagagaatgagatgatggtgttcagagggaccagcttctttttcagttgtctttagaactcaagaataatcaataatttagtgccccttcaacagccatactcagcaagaagaatcagaagcttgatcctctaacagaaatagaagagggtagctttgcccattgccactgtctttactgccccttctgcccctccacccacatccacattcagcatcactccaaggatgtgtcagcatcttgcccatgcaggtagaaatttgtgagtaggcctccatacttcctcgggggaagaaagagaaactagtgctggttttaagaatgtagctggcttttcatcagaacccttatgctaacctgaccacacttgctctcggggaagttcaagcctgtgatgtgcataaactccaacaagcctggctttggtgttcagcatgcacattccataaatatctcttgcaggcataccccacagctagactgcaggattaaaataacttccaaaaggtgctggattggagtttgttcaaatttctcattaaccactaatgttaattcataccaaatgcaaagtattctaaaccagctgatgctgtcagtgttcaagttttaagtgacttcaaacacaatggaagtgtttcaatgggagccagatctcatgagtaaaaatccattttataatagctctgtgatatatcagtgggagatgattcataggggagagatttgaacaagcagaattaagtgttagcaaaaatgctgcattgctttgattcatgtttaaagacctaaatttctatgcacaaggaataaagggcctacttaccaagtgtaaatcacaacataggctaccaaaatatttcttatttgctaggagaacaaagctgtcacggtgcatgatagttggacagagatggctaaaaaagaggcaaattcagatttggaaacagggtggcctcttcattatttattgccaagatctgaaaatcttcaacatcttataagacaacaatgaagtagcccctgaacagcatggagttgctgtgagtttgttcgttgcagacctttgtgttgggtcctgggaatctgagctttgttccctgtgcatggtggataattgaaaccaagaggacatgggatagaccttgtgacagaccaattctgtgacccctgtcttctgggtcacattattcattgttgatttaaatacaggactaccaaacagtacaaatctatcatgagtctggtagaaaagtaaaagtaaaagctgcacacgttacatactgtttattgttctaatgtacaactaactatttgcatataatgtgatttaatttattgctgttttgtgtagaaaaggagaactaatgactgtggatataacccatgttttgtataatatattttatttcttgtgcgaactggtcatttaaaatatctacttcatttgatgtttggatataaatgtgtatgtgtccttgtaaatgtttctatcaagcaagaatgccacgtactcagagtataacaatgtgttctcattaaaaaatacatccc

SEQ ID NO: 12989 - DNA, 381 bp, Homo sapiens
tgaaaaaattacccagattggctccatggaaaaggaggaacagcgtttccgtaaaattgactttgtactctgaaaacgtcaatttatattgaacttggaggagtttggcaaagtctgaataggtcaacctgcaggcgtaactatttttgacctagtcagtttttaaacaatgtgcatttgaaggagttaattaaaagagagccaataaaatgattttactcattcagtatctgagtactggaagtgaaacatgaggaatgctttagtgtaatgtgggagaacttttttgtaaatttaatgcaattgaaaaagttttcaaattcaattaagataactagaattggattatggtgtaaaaataaaaaaaaaatttattcacat

SEQ ID NO: 12990 - DNA, 87 bp, Homo sapiens
cgcaggcctcaggcccagggcgcgccgtcggggcaaggtggccttccccgggcggtaaagaggtgaaaggatgaaggagggctgggg

SEQ ID NO: 12991 - DNA, 1846 bp, Homo sapiens
agtggattccttggcaggacactgccccttgtcatctgtctttgtgttagatccagagttgtcggcagccgctgccattgttctcattcgtggtatgcactgtggcctagcgtagcttcttccctttccaaaggtttctgaggacttctcccaggagaagactgcccgcctcagaactgcttagagacttcaaaccagcagaggtgaaagtccctgtcatcccttcagattccagagctgggatcagccatgcccagaggtctggtcctgatgctggcaggggggccccctcctccatccctgactggctgagtggctttatcaccaccgagtgatgtgctgaggcctcctgcagtgaatgctccttccattcctgtactcgggcagtgccattcagcacaggagagctctttttgcctttggctttcaattccaaaacatgatttaatttctaactaaattagtatggcactagttatgaagtatctgcttaaaacccttcatcatgatatcctgtggatttaaaaactctaattccatgttttcttcccatctgccttatatatctcatcaccctgcttatcaatattcagtttgatgagcactattaactaaaatatgaaacttaaaaacaaaagcaagttgtccttaaaagttctttttttaagtaaattgttgacatactgcaaattttctatgcaaacttgcctcctgctgttatctgtgaagctcaggaaatccaaacatttgtgtttcaacaagggacagtaaactgtgtgtttacagccaaaagaaatgcctcatagttcttaacctcaacttttgtagaagtatttttttctctgtaatatttttattggctcataaagatgttttcatatctgaactcctaaataagtgaaattacagtagattatattaacaaaatactttttaggtagccatgcttgagactttttaaaaatataactttttccttaaagttttcagctatagcaaaaggtagttatgtatgccagacctaatatgagctgccaccaacacccctagaactttcagccatggtgtcttcagaattgtagcgcatttctgaatctagcaaatcctccttttacccgttgaatgttttgaatgccctgactctaccagcgcccataaatgatctctagaaggactgttagtaccaatctgtttttcaactttgaagctaaaaaccctgatatggtaatattatggtgcatagcagaggtctcggaaaaaaaatatttctgttcactttactttcaggttaaaaatgtttctaacacgcttgcaacttcccttatggcattaatcttgttgagggagagagacagaatcctggactctccaaagtatttaactgaaagtagggcctgctctgacagggcccatgtcccacaaggctgcttggcctcagtgggtgcttggctgtgctggatgatatgttgatctgtattggataaggaccaatgacagcaaagcaaaaatggctttaaagcttggtgttacttttcttaagttgtttaattatagttaagcaatttcaaaaatgctccaaagaaatgtgaaaggaccttttgtcacagcacttcagaaaatacacaacagccccttctgcccccgcacagaaatgctgcagagtatataaaacttgagacatttttgtaggatgcctgacgaggtgtagccttttatcttgtttccggatgcatatttattacgagtactctggttaaatattgaaaagttatatgctgtagtttttagtattttgtctttgtaatttacagaagttattggagaaaataaacttgtttcattttgc

SEQ ID NO: 12992 - DNA, 68 bp, Homo sapiens
gtcttctgttatcaaattgaaaacctctatacaggatagccaacaataaagacaaccttgttgatgat

SEQ ID NO: 12993 - DNA, 185 bp, Homo sapiens
gtcaatggaaacctgatttgtttttcagttactttatatttattttgtattcaatgtgtaaatacttttattatctaatactatcttacgtctaattagtgtagcatttacaagaaagaaaaattaagatcttaaaatcagtgattatctttttctaaataaaatatcaccagaattcatcagtt

SEQ ID NO: 12994 - DNA, 4249 bp, Homo sapiens
agattctgcctgtgcttttgtttgactgtctctagattttgaaaccaaaaaactgaactgaaatcatctaaagagttaaaatttcagtgatctgcaattaattacattgtggaagattattttttatcttgtaaaaacacttttttggtttaatatatatttttaaaacatttcactagtgattgaattctacttttgccatctgaattgacttgaatgtcttaaaacaggtaaatactgtaaagtgtgtattcttgatgtttattggctcatgtggacagaaatgtacagggagaattacattattttaacacacagaagtgcaactttctgctttattttctgaatttcacattacttttacttaatgcttttgtgttttgttaatacttcataatatgtgaaaaactcggatcttttaaaaagcatcatagatcatttttccatatgacactggttccgattttaaaaattatttttaaataaccgattattgattactgtattttttttctcaagaacagtgataggtagaaactaattgaacatttggtagtctttcaagaatagtgtctcttcaaggttttacttgatttaatttgatattttactggtttaccagtaaggtgtattgttcagttttttgctccgatttgaattgtggaggtggaagcaaattagtttacatggcatgtcctccctaggcacagtgacagctgtaaagtatgacggaacaaggtagcagatggtacagaatttatactatttaagaagagatgtggtgttcttcattgagtttttttcttcactattttcagaagtttttgttcttttttttttttccatcactcagtggagaaaagctttgttaatgaaagattttgtgatagagctgatgcttatacatctattctataacagtgatgaatattaacacaaaggaaatatggagaactgttataactgagtgttagaacagtcgtgtacattgatcagtattgagtccatttttaggatggattagtcagttcttttcattggtcttgaaagtaattttggctggtcgcggtggctcacgcctgtaatcccagcactttgggaggccgaggcgggcggatcacgaggtcaggagatcgagaccatcccggctaaaacggtgaaaccccgtctctactaaaaatacaaaaaattagccgggcgtagtggcgggcgcctgtagtcccagctacttgggaggctgaggcaggagaatggcgtgaacccgggaggcggagcttgcagtgagccgagatcccgccactgcactccagcctgggcgacagagcgagactccgtctcaaaaaaaaaaaaaaaaaaaaaaagaaagtaattttaaactcactggcttgaaatgtgtgctttctgtacaatgaagttattgctttccatatatccttgaatcttcagattaacgaaatgaacaaattttcggttacagatcagctctcaaacactaaagtccttaatggcaaggtcttttctgatagcttcatggatagtattgatgatcagatttcttctgtgttattgtcttaaaaataagcatttgaaccttaatttaaattcttttcttttccatttagagatatgtttttttctttaccttcatacctttctatttcttgctaatttctatcactaattccttataattgtccctgctccccttcttgatctcttcagggggaatactaggcagttttgtatcttctgatctcgtaccctgagacttcatctgaatgtgctctgccgccttcttatctgaactagatgaattggccataattatgaataggaatattaatgaaccagaggacatactagtcacatgttattatacactaaaaaataggaagtcatcttgaaaggcagttaatgtactgcaaatgtccctatgacttctttgctttctcttataccaaacatgcaggtatttaatttgtttaatgagggttgagtggagttatgtgtcgcttttattcggattgacgaaaatcaaccataattttcaagggatcttcatgggttgtgactggaagctgaccttagtcttgcgtctcatcctttatgatgttgagaaatcatctaatttctcagaactttttcttatctctaacacagttattaccataataatattgtctccatttatcatacaggatcattatgaaagtaaaatgaagtagtatatatgaaaatgctttttaaacacaaaagctttatacaaaatattgttgaatttaaataaggtaaatcttttttagtttatatatttgcagactatacatgttggattaaatgggcaattaagttttataggaatttgcttcctaagtctacttttgaagaggaaaacaggaacgtaccatatattttgctaagggtaaaatatttttggtgaattgcagacatttaatttcacttgtctgaggtaaaacaataaactaaaatacatgggcatgcatcttacactgatcttattagaggtcagtgctaagtacccatcttgattgaagttagctcagatgtggagattcatagaatgagggtccaggagaagaaagttaggggaaatctcattttctttctgtaattcattcagtggtgccaaagctgggggttccctacaatggctatttagactttccctgcttcaaaataagagcagtatccttagctctagccaagcatttttctaattcctgcctttggtcacaaagaaggaaaagcagagctgtgaatgagttagtggaggtcaagtcacatcagagttcatgacctagtgattgctggtgaagtaatattggaattttggtaccatgagaagacttataaaggatttcatcagaagttttcattttttctaaatcctcccctacaaaattttcagattggaaattactcttgtatttgtagaagattgtctctaaaattgtggtttaactcacgcaggaagtaaaattcctatagcaagacatagtttcattttagaggacccccaaaatcccgtgaattctctggtgatgattctagcctaaccttcaacataaaataatgaagagaacttttaaacttttttatgaattcctaaacattaccatttatgtggcagaagttctgttccctataatctgcaatgctgaagtatctctattcaattcccttccttatctgttaaatttaatgtctttatactaaaaatataggctcttgggattggagaggaaaaattagaggtgattttcagatttcttgttctatggaagaggaagctgagctcagggagatatgagctccacagccacagctggttaggggcggctgccagtagaacagggcagatgcctggactcccaactcagtaggccttctgttacacctcaaaatgtgttacatgggaagaaaaagattaagaaaaagcaagataattttgaagaaggacgagaggaagaggcatgaacttgtcctaacaatgtcaaagaatattttaaaggtataccagttaaagtagtgtgtggctggtgccagtagaggtcagtcaagggatccctgacgagaataaagagcccagaaacaggtccatgtttatatgggaacttgatttttgacagatacggcaagctctatggggaaaacaatatgtactaccttatacccttccccaaaaacaaagggattaaagacctaaatatgaagacaaaacttttaaatgagaatctataaggttattttcatgattttgcaaatgggaaggatttctttaaagcaagacacaaaagcatacacaggaaaaaatgatgcataaaaacatggcttctgtagaacaatagagactgtaaaagaacaagctacagacaaggaaatgtttgcaatgcatggaactgtcaaaggattcgtatctggaatacattaaagaagcaaaagaacctcatacaaaagtcattgagtaaatgacagccatgcattagaacagcaattctcaaaacttttggtctcaagatccctttacactcttcaaaagtgagaaccccaaagagttttcatgtatgtgggttaaatctattgatattttctgttagaatttaaaaattatgttaaaaaaataagaagaatgactatttttcaaaacaaaaaatgagaagagtggtattgttttacatttttacaaatctctttaacatttagcttaataaaagatagctggcctctc

SEQ ID NO: 12995 - DNA, 1326 bp, Homo sapiens
ttagaatgctacataataaatcctttttctttaacattaattttgtgatattccttatttcatttctactaataaaaatagacatgttttgtttgcattttcccttgttttaatttgtatgtttgtactactttttagatgcttaaactatacataagctattatctattgttcctagtaatcttaggggagtggtctgaaaaaacatcaagcatagtaattgtctgggtagacagatttcagaatttttaaaatgctttaatttatttattagcatttttctttgtatgggctgtgtacttttgcttcaaaaaccattgttaaaaagtatttcttttgtaatcaatctaaataatagactttttttacaggcaaaatgaaagaggaggaagtctgggttttatgaatagcatagattcaaacaatcttttattcaaagattgaaataaaaagtatcgggtgccaactgtgatttttagaagaactgttgtaaagcctttgagattagacagactagagctacattactgaaattgccaactactaactgtgtgaccttaggtgaccagttcattaagggctaatagatttccatttttcaattaatggaaagggaatgctactatacctacttcatttaaaataacatgagttaaacacttagctgagtgcacttcatgttggatgcatataatacatatccatttctttcctcaccatcctactctccccatcccactccatctcacccttagaagtaaaggtgtaacaatcatagcttttggatagaaattttgagtggatcaacagcaatggaatgaggagtgaggctttttattagaaaaattacaaaatgagtcccggaaggtcagtaagtgcaacatgaaaaaaatctatgaaaagattatttgacctaattattcactgatagtacatactcaacaaaggtttgtgggacaaagggtgaataaaatgaatgaattacaatgaacaaagaaaagtgcaaaataacactaacaagtaaatattacaagaagataaccttgtggttaaaagataaggaaaaatatgagattatgagaaattaaatgtatactatattttaattaaatgaatctgtatttgtagcactaagagaattattattaaggattgactagaaccttaaaagatatatgtggatgtttgttttgtacggttgtaaaatatactagacctattacatccacctaaagtataatgccatgtaagaaaatgctttgacagtatcaacctgtgttaaggtatttctttccattgtaaattaaaagtcattttatttgacag

SEQ ID NO: 12996 - DNA, 58 bp, Homo sapiens
agacaaaagagtgtgatttttttaattctgcaataaatcttccaaaaattaaatgtga

SEQ ID NO: 12997 - DNA, 333 bp, Homo sapiens
agtgtaagaaacccagactgaacttaccgtgagcgacaaagatgatttaaaagggaagtctagagttcctagtctccctcacagcacagagaagacaaaattagcaaaaccccactacacagtctgcaagattctgaaacattgctttgaccactcttcctgagttcagtggcactcaacatgagtcaagagcatcctgcttctaccatgtggatttggtcacaaggtttaaggtgacccaatgattcagctatttaaaaaaaaaagaggaaagaatgaaagagtaaaggaaatgattgaggagtgaggaaggcaggaagagagcatgagagg

SEQ ID NO: 12998 - DNA, 143 bp, Homo sapiens
agtatttattgcaggatggtgtctcttctttagaacagggaaaataggcaggaagcccaattgctggagtacttagctagttttattcttggttttccctttgccttcattctgcaagtatactagggagccatttgagaggg

SEQ ID NO: 12999 - DNA, 32 bp, Homo sapiens
aacacatttttataaaaatgagtgcttaaact

SEQ ID NO: 13000 - DNA, 2063 bp, Homo sapiens
actaacataaagaaacactttcttgagcaccaggtgttaaaaaccattataaaatctttccatctcattacagctcattcgctccagcaagcccgtcatcttccctttcctcccttctgataagactggaaaatagtcctccaaaacacaagggaggattttgggtggccaaagtgtacaattttcatcccacaattgaaatttttaaatcatttcatgttagtcttaccgaataaggtaccaagatcacaaatagtgttgatcagatcttacaagtttatgtggcacacaatcctataaatgtgatttttttatataagttaaagagacaaatagtaggctaaaaacattttaaaatcaacttttgaaatttaaaaatctttcagaatacaattcagttttagtttcaaaatgttaacaacttgaattacaaccggttatcagttggacagtaagattttatccctttctcttctgactggtatacctatttcattagtagctaggtgcacatatacatctagcacagctgtgaggacagacagaaggcaaagtttccatgtggccttgagcaagtcccatctcacctctaggcctcagtgtcctcatctataaaatgagggacttccctagaagtcttcatggtctcttccagcccagacatcctgtgatgtcatgaaagcacctgccctctgtttcccctcagaacaccctgtaccatccatggagcacgaggccttcagaaaagacacttcaatgggagtgaacatttctaactaaggacaggatggctgtgtgtggtggtcaccaggtcctgtgagcaaagtgcaggttatgcaagtcgccaggcaggaggccattccaggagtgggattattcatcaaactctttgcccagttcatcccaatgggggaagtattcccttctttcctactctgggaagaatgtctcctgccactcctcaactgatgatagacttcgaaaacagatgagaagactagcagctagcaagggtgcttgtggtcacactgtggaacactaaagagctaggaaagagttgagcacaggcaacattacaaacaaaggatttgaaaacaccaagagtacaggtcttctttaaggaagaataaaaaagaagaggttcatttttctggctttttttttcacctgaaacactttttctcgagtccaaaatcattccccccgtgaagtctgcttaccaaaacataagacgacttatatatttgaaagaagtcaaatgaatgagctctctaatagaagtccatgagttgagtgggtatttcttatttgaaagtgtttttctttaatcaaaagtccttagaatgagggaaacaaaatatttatttgttttggaatcccacttatcaaatcattcaaaactttcagctggagtggggtttgcttttgttttgtttgtgtccataagagaaatggtagaagatgaatcagtatgaagacactgtcaatgaggttatgagaaaaaaacagcaggggcattagtttcaggcaaggcagctcccaggtttagagattaatttttaccccctaaggaatatccagtcaaagacgctgagtgggagctgtcaggcagtagcagctgtgtttgagtttctggctgaaaatggtgaagaatggacttaattatgctaacaaactgaaaaatctagacatagatcctctgatatacaattagagatatttttatatagaccccaagcattctgtgcataaaagttaacattaggctgtggtgcagtaaccatttaatgtcgaggctctatttcggaaatacactacaaatgttaaagtacgtggctgtcctcttaagacactagtagagcaaagacttaatcatatcaacttaattctgttacacaatatgtgttttttaatatactaaccatttcttatggaaaggtcctgtggggagcccatcctctcgccaagccatcacaggctctgcatacacatgcactcagtgtggactgggaagcattactttgtagatgtattttcaataaagaaaaaaatagttttacatt

SEQ ID NO: 13001 - DNA, 926 bp, Homo sapiens
tgaatttgtacatgcagccaaatttacaggaatttttttaaaaggcagaaaaacttgaaataccaacattctggcaaaaaaaaatcagttttatgaagagtaagtggaacctgggatgcaggaacaaaagaaggaaatgttgggcaaacatttttgtgggagctcccttcgctgttgtgcagcagaaacagattctcagttcatttttactcccactgtattatagtttaacaaaaattgtttatatcttggaaaaaaaactttctgtttaaaaaaaataaacaagtgaatgttggaaattagtctgttaatgttcttaataaagtgttcttggagtttaacctagcagcggatggctttctttagcttagcccagtttccagggaagcattgttttttccaggctgtaaaatggcagaatctcctggatatataatttattctgttgaaaaaaaaaaaagcatgcagtatctatgacctatctgcagaaggagtttttgtaaatgtagattttgatgtattaggtcaccctgaaaacaatacaagaaaagggatccccaggtaatctggtggagcgaatactgcaataaatttttttacttctctttgttacttgtctgtttccatttgaatttcttattgtaaaaatctgtttaaatccatttatattattttacagtcttttatgtaaaatttattatatcactggttttcaaagcaaaacataaaatattgtttatacagtttgtataggctgacttctgaataattggtatctattattttcattcccataagagggtgtaaacaattaactccagggttttattgtatcctgcaatatttagtattaactatatatgatttagcactgtgccaaacacattttcaagagtacattttgatataaaaagaaactatagttt

SEQ ID NO: 13002 - DNA, 174 bp, Homo sapiens
aatgatttttatgtgcttatatatgtcagtctattaaatgtacaccaagtaatgtaatacttaaaagagaaaacattttgtagatagagattctctacttacccgtttatacatccttttgtagaaagtttaacataaaagacaataaaaaaacagaaatgagatttatccagc

SEQ ID NO: 13003 - DNA, 97 bp, Homo sapiens
agaatctcatttgagagctgtttgcatgagtgggaggggtatgggacaggtttgggttttttttttatgctcatgaaattaaaaattcatttttatg

SEQ ID NO: 13004 - DNA, 1493 bp, Homo sapiens
caccagctggccttgtccaagggacagagccttctattctgagaatcccaggggccctcagaccctgcctgatgctatatgcagaggcccagggaccaggtgtgtttcctctcaccaagaagaaagtacacactgatgagaaactgagaaccaagacaggcatccctgggtggcctttcctgctgacactccacgagctgacccagcagaattctctgtgtaggaagcatcggactttgtccattgaatatgtagcggctgccagagatcacacatcaatgcaaattccagagcctgtctgctatagctcagtgactgtgttgtgattcatagtacattaaaaagagagagagagagaaagaatcccacagggcactattaaaatacttctctccttccctgactcatgacactcttcctgacagcagaatgactgtgtgaccttgaacttcacatttcccacattggcccttggattgttcggattaaccccttccactcctcactggctggttcactgtgttctgactagtccataaaaataaagatggaaggagatcaaacacagaatcataatcataatgcggcccccttccccagagcttacctcgaatgtgaaatccctacttcttataatgcagagttaaggagctgagcccccatgattttgtagctgtacttttgtatgtgtatatttttatagctgcagattgtccacacagtatacttttggaagtttgggtggatgactctgaattcttgcacacctttcctaaaaatttctcccaagagagacttgtttgggccttttgtggtgtcagtggaatggataggtaacttgggtgggcaacttggggagctgaccattctcttttggtaaatgttgacggctcaagaggatgaatatgaagctttccaagataagcagattaaaaggaacatgtgttaccgaggtaggtcactgtcatttttgttttaagagttggggggagtatctatagtaaacttgaataaaggggacaaagctagaacttattcattcattcattcacttatggagttgttactgattttgcggaggtcaggttcataccaatggacactaatacaatcagtgttcccaaggctgtgcaggggtggggggacatgctgtcaggatggtctgagcatctgggtgagaaccagagaaacaggacttcttccttctgtaccatgagctgtgtccctttactatgcaagcacatgaccccagagacagctggttcactggcagatccccatgatggacttactaagggaaaggtgagatgaacactgcccccaaggagggggtgaaatatgatctaacttatgcaagagcctataattagtcccagtctcgactctacatttgtttgtgcagcattcattcagcaaagacttttggggtttgtgcaaggcacagttttaagcacataatgtaattctaaaagatgaataaactagagaggttc

SEQ ID NO: 13005 - DNA, 856 bp, Homo sapiens
ccagcatgccgatttcataccttatgctacacagacattaagaagagcagagctggcaccctgtcatcaccagtggccttggtccttaatcccagtacgatttgcaggtctggtttatataagaccactacagtctggctaggttaaaggccagaggctatggaacttaacactccccattggagcaagcttgccctagagacggcaggatcatgggagcatgcttaccttctgctgtttgttccaggctcacctttagaacaggagacttgagcttgacctaaggatatgcattaaccactctacagactcccactcagtactgtacagggtggctgtggtcctagaagttcagtttttactgaggaaatatttccattaacagcaattattatattgaaggctttaataaaggccacaggagacattactatagcatagattgtcaaatgtaaatttactgagcgtgttttataaaaaactcacaggtgtttgaggccaaaacagattttagacttaccttgaacggataagaatctatagttcactgacacagtaaaattaactctgtgggtgggggcggggggcatagctctaatctaatatataaaatgtgtgatgaatcaacaagatttccacaattcttctgtcaagcttactacagtgaaagaatgggattggcaagtaacttctgacttactgtcagttgtacttctgctccatagacatcagtattctgccatcatttttgatgactacctcagaacataaaaaggaacgtatatcacataattccagtcacagtttttggttcctcttttctttcaagaactatatataaatgacctgttttcac

SEQ ID NO: 13006 - DNA, 1355 bp, Homo sapiens
taggcaaggaaagaaatacagtactgtttctggacccttataaaatcctgtgcaatagacacatacatgtcacatttagctgtgctcagaagggctatcatcatcctacaactcacattagagaacatcctggcttttgagcacttttcaaacaatcaagttgactcacgtgggtcctgaggcctgcagcacgtcggatgctaccccactatgacagaggattgtggtcacaacttgatggctgcgaagacctaccctccgtttttctactagataggaggatggtagaagtttggctgctgtcataacatccagagctttgtcgtatttggcacacagcagaggcccagatattagaaaggctctattccaataaactatgaggactgccttatggatgatttaagtgtctcactaaagcatgaaatgtgaatttttattgttgtacatacgatttaaggtatttaaagtattttcttctctgtgagaaggtttattgttaatacaaggtataataaaattatcgcaacccctctccttccagtataaccagctgaagttgcagatgttagatatttttcataaacaagttcgagtcaaagttgaaaattcatagtaagattgatatctataaaatagatataaatttttaagagaaagaatttagtattatcaaagggataaagaaaaaaatactatttaagatgtgaaaattacagtccaaaatactgttctttccaggctatgtataaaatacatagtgaaaattgtttagtgatattacatttatttatccagaaaactgtgatttcaggagaacctaacatgctggtgaatattttcaactttttccctcactaattggtacttttaaaaacataacataaattttttgaagtctttaataaataacccataattgaagtgtataatataaaaaattttaaaaatctaagcagcttattgtttctctgaaagtgtgtgtagttttactttcctaaggaattaccaagaatatcctttaaaatttaaaaggatggcaagttgcatcagaaagctttattttgagatgtaaaaagattcccaaacgtggttacattagccattcatgtatgtcagaagtgcagaattggggcacttaatggtcaccttgtaacagttttgtgtaactcccagtgatgctgtacacatatttgaagggtctttctcaaagaaatattaagcatgttttgttgctcagtgtttttgtgaattgcttggttgtaattaaattctgagcctgatattgatatggttttaagaagcagttgtaccaagtgaaattattttggagattataataaatatatacattc

SEQ ID NO: 13007 - DNA, 906 bp, Homo sapiens
agagctaactccagagatctataaagcatatcctttacccaggccattcctatcatatagtaagcagaagagttgccatgaaagtaaaagactactgtcattagcatgtaaaacaaagaaagatatacatgactgaattggatatctttgtttgtttgtttgagacagagtttcactcttgttgcccaggctggagtgcaatggcacgatctcggctcaccgcaacctctgcttcctggcttaaagtgattctcctgcctcagcctctcgagtagctgggattacaggcatgcaccaccacacccagctaattttgtatttttagtagaggcagggtttctccatgttggtcaggctggtcttgaactcccgacctcaggtgatccgcccacctaggcctctcaaagtgttgggattacgtgtgtaagccacagtgcccagcccgaattggatatctttaagatatctgtaagtgttatatccctaaccaagaagaaaaatatgaaaataattaagactagaatcaagcagtagataattgaatccaatcttgggtattattagataatgtataacttgcacccagggaatgggggtctatgagacaaccccacttggagaagaatggggttagggtctctaattgcaaagtgactgtacaataggacgaaagttgcctctgtgtctgagaaagtatcttagttgttggctgctccagaggtatctttgtcaaaagcttctggttcaatatcagccactgagcagataaccctgcttatttggtgtggttaaatcaactagcttctgctaatagccccaatttgcttgaatgggaaaactctctcatttgacccttataggtagaaataatgaattaacaaccaataaaattaatcatttggcatt

SEQ ID NO: 13008 - DNA, 1364 bp, Homo sapiens
gctcctggaggccctggtcagcttgcttggaatccagcaggcagctggggctgagtgaaaacatctgcacaactgggcactggacagcttttccttcttctccagtgtctaccttcctcctcaactcccagccatctgtataaacacaatcctttgttctcccaaatctgaatcgaattactcttttgcctcctttttaatgtcagtaaggatatgagcctttgcacaggctggctgcgtgttcttgaaataggtgttaccttctctgggccttggttttttaaaatctgtaaaattagaggattgcactagagaaacttgaatgctccattcaggcctatcattttattaagtatgattgacacagcccatgggccagaacacactctacaaaatgactaggataacagaaagaacgtgatctcctgattagagagggtggttttcctcaatggaaccaaatataaagaggacttgaacaaaaatgacagatacaaactatttctatcctgagtagtaatctcacacttcatcctatagagtcaaccaccacagataggaattccttattctttttttaatttttttaagacagagtctcactttgttgcccaggctggagcgcagtggggtgatctcatctccctgcaacctccgcctcctgggttcaagcgattcttgtgcctcagcttcccaagcagctgggattacaggtgcccgccaccacgcccagctaatttttgcatttttagtagagatggggtttcaccatgttggccacgctcgtctccaactcctgacctcaggtaatccgcctgccttggcctcccaaagtgctgggattacagacatgaaccaccacgcctggctggaatacttactcttgtcgggagattgaaccactaaaatgttagagcagaattcattatgctgtggtcacaggggtgtcttgtctgagaacaaatacaattcagtcttctctttggggttttagtatgtgtcaaacataggactggaagtttgcccctgttcttttttcttttgaaagaacatcagttcatgcctgaggcatgagtgactgtgcatttgagaatagttttccctattctgtggatacagtcccagagttttcagggagtacacaggtagattagtttgaagcattgaccttttatttattccttatttctctttcatcaaaacaaaacagcagctgtgggaggagaaatgagagggcttaaatgaaatttaaaataagctatattatacaaatactatctctgtattgttctgaccctggtaaatatatttcaaaacttcagatgacaaggattagaacactcattaaagatgctattcttcag

SEQ ID NO: 13009 - DNA, 4336 bp, Homo sapiens
taagttcatctagtccttttcaaatagaaaaacaacaaaacccatgaaatggaaaagagagttccaaaaaagaagacctgttgatactgaatatgagaacattacactgcataaagatatccagcttgggtaccctactaaaacaacatcaccatctttttcattatatattagtaaacctatgaagggatgattctttaatttctaaagtgttgttcaaactcaccttaaaatacagatgttatgtcactaataatgagtagtaacccaatttagctttacaaagattttttctattactttttttttttattgtggtatatgtaacacaagtttaccatttttatcatctttagattatttttaaatctcactaccttgaagtttgccatgcttcagaaattaaagtcaagttacttcactgctttgaatacatactatggatataaatgtaggcaaaatgaaagattatgactaatattcagattccattttcaataaggtaaataatgaaagatctcacaaaggaatcattgtgtttaattattttgccatgtattactaattgtatttaaaatttctacttcccttaggcattttataaaaatttaaaaattatttttctattttgtttaaaagacaatgcatggcttttcaagtgagtaatgaagataaaaaccaagctaggttagtctaccattagttcatatgtttttgtagcacatcttttcataacatactgaaattttaatgttttttgcctttaataataggggtgagtgttaaaggccagagagcctaacttgatatcttgctcatggtctttctgtctacctcaactcctgttgtcatctttggatgatctttctgataccttgctgataccttggacttctgcccagtgactttattacattccagcagcttactcccgtggccgcactttgaatgtcaccaccttgagtttctctttctggtaaaatttcagtaactgataactgccctcttttcagttttttcacttccttattttattgacttttctctcctttatgctcattccacattcttcagttccttcttacccccttttcttgactgctccccttcctcctaaactgtcagcccctttcaggctttcttccctatccaccctcagctttatgggatactatatgaactaatctcaccagttattcttctttccctggtcttttagtctagtcctttggcaagccctcaacctcagattaatcctatttattatctaccttttcggggatgctgagttctttgtgatgggtagtccttcaaagtagaatcactacaagtgtctcacttcagccttagaaaagccctcaatgtaaaccttatgtttgttactagggtggcctctctcccatttcccgctgtggctgagccaaacttcattactttccttaggccctctgcccctcccctagcatatggctctttctcctattgaacagaaaattgagactatgaagaggtcaacttgtatttaccaactttactcattttcccattttagaggaaaagaggttgcctgcttcctatcaaaggcgactctgtgctacatgttggtttcatcttcgctgtctctctcatttccccacaaagtgttgtctcactttctgcctaccttttaggtattgatcttcactatatttttttctctctctctcttttttttttttactttacatattttatacaatgtcattcataactatggcttcttttaccacctgtaataacagactgagtctcaaacctgtaacttgtatcctgacttatctcttgctttctaaaccttgtttctaactgtctatcaaatatcttcattagacatcccacagtaattttaagctcagtgtttccaaacgtcaagtcctcatctgttatataaaatcctttctgctttgtaagttttctctttttgggattttccgcagatcagggcaacacagaatgactaccttcccagccatgtctctgcagtcatcctgtgtaatcatgttctagtccagtgttgctcaaacagttaaaatccaggctgcttttggtaaacatacaaattctgatatagagcctctgtggcaaagggaatttctcagttcctgccccagcccccttgtttatcattacacagctaagatttttatttaacttagcattttagcaagttttcttatgaaaatacctttgtgctttctaagtataaagatttaaattatttttaatacggtttttagaaccacagactatccctctttttagagcatcctgatcaattgcaagtacttccacttcttccctaaatgcgctttgtgtgttttccacctcagtagccttgcacacatcattacttctgcatccttctttgtgaccaagtgaatacctacctacctcttaggactcagcttcagtgattctgttttcataggctttttaaagcccttttcagtcaaattagatgctcctttgttctggtcctttactcttcccctcccatgttgtcgcactgatcacactgctttgtaattattttctttattgttggtaaactccatattttaaaaatttacctgtatacatagtgcttaatgcatggtaggcccttagtaatgtttttgaattaatgaggcatgattctaaatgccaaactttgcacaaaaagttgttgctattggattccaaactgctatgccctctataccagtggctgacaaggcatatagggatatatgccatcctgagaggagtaaagtgtttagattctgaacctgagaaaagagaactttctcttaagaagttggaaacttcattttaccttcgtgaccctggtagaccacttggtctcactggttggtacaattatgagggtagtactgggtgctttttatacaactttccatcccccacacagttggagaataatttgtagaccatggcagttaaaatgctttttactctggtgtattatagaataatgaacacatttttatatatgttaaagcctgctaaatcattcacttagaatgaagtaacctcaaggtaccaaataccccacataaggaaagtactacactaaattcactcaactattgtatgcctaccatatgccagattttatcctagaccctgaggatatagctttttaaaaccccctcctgtttcagagcttatattctagtggaggaagttagacaagcattttaagtaataaatgtatagagagtgtcaagtgatgagtaccatgaagaagaataaatgagggtaaggggctagtgtgatagggagaggggtgggatgccatcatatttaggggtggttgggaactgtctactgctttagcatttgtgtcttcaaatttctctcctttggttatataccttgcgtattccgcacattgataaagtttctttcttacagaagttctgatattgaattaaggaatgggtcactacttaagactttatcatttcagctacacataaaaggtttctctcccctatggattttgctaatggttgagtgatacctaaaggccttgttgcattttttacacttggggtttctcttcggtttgaattctctcatggttaccaaaactctgttaaaggacttttcacagtcgttaaatgtgtatggctctttcccaatatgaatttttttgatgttaactaggcttttagacttagttaaagacctgtgtgctctgctgcatttatagggttttgggctgctgagaataattgatgctgattaaggtgcaaatcatgactaaagacttttctttcttcttttgcatatagtagagtgaggtgagggtcgtggctaaaaccccacaataactttacattcctagctttacagtcttgctgtgaattctctggtgttcattaaagtgtgagctgtgttaaaaggcattcttagattcattttaaccacatttttaaaaactcacagttggttaacatgatggtttcagattgcttgcctcttttctctttctaccttacagggctccttttctagcttaaataagggtactccatctgccacagaatccaggattctatagttttttagtttcacttccctatgttctttttttttttttaatttttaacaatgagatgataccatgttacagcggtattacattaagatacatttaatatagccacaattaaagtatgtattatgtatttatgctggtgttctttcatgttatttcttctagtgaaaatttccaagtaaactgttattgagcatatacatttttaaaaaaataaaaccatacacccct

SEQ ID NO: 13010 - DNA, 747 bp, Homo sapiens
gcacattgttcttttcaaagcaaatggaaaatacctttttagactttactgtggcttcttaagaatatgatggcttattttatcaatgtgattttctgacccttactattaatagtgtgttctcacacttttgtgtgtattaggatcacctgggaagcttgttaaacatgttaacaagctgattcctaccctggtggattttattcctagatttgggttgtgtgaatcagatttgggcatctgttttttccaagcacccagggaattctgatgcattccaaagtttggtactagagctatacaatatttttttgctttatgcttctgcatttttttgatactgacattttgtctgcttctggctttattcaaataatctatgcaaataactatgaaaaattttatctttgttttatccaaatagtaaagagatgtgatggtagggtgttaagtagattagttgagaacactattcatatattctgaataattgccattcagaatgctatttttgtgtgaaatcaaaatatcattgggccatgagctagtattataatatctttcccaaatcctttgtgaacaaggtagaatataaatacataatatattgtatatatattatagttctctaatacactggtttgaatttctattcaatttattttccctgtgatctgttaggcatgaaagcagttgcaattactttctgttattacagggctatctataaaaagaaaacttagaagc

SEQ ID NO: 13011 - DNA, 280 bp, Homo sapiens
ttctcttttcagatcttgggaactgaaaccatttgaaatttattactaaggtcgtgatgtgaatatttgctcagtcagcccaccttgtcctgcctttttgcagataggctttcatttggacagctataactgctgtgttttttatattatttttactctttaccataaatcaattacaagaaaagagtttcagtcctagtatttagccccaaaatgaacctttaaacatttttttggtaatttttatattttctgtctttttaaaaatattaaattctgg

SEQ ID NO: 13012 - DNA, 2399 bp, Homo sapiens
cctttctttggtttcccaagagctacgtatttaatagcaaagaattgactggggcaataacgtttaagccaaaacaatgtttaaaccttttttgggggagtgacaggatggggtatggattctaaaatgccttttcccaaaatgttgaaatatgatgttaaaaaaataagaagaatgcttaatcagatagatattcctattgtgcaatgtaaatattttaaagaattgtgtcagactgtttagtagcagtgattgtcttaatattgtgggtgttaatttttgatactaagcattgaatggctatgtttttaatgtatagtaaatcacgctttttgaaaaagcgaaaaaatcaggtggcttttgcggttcaggaaaattgaatgcaaaccatagcacaggctaattttttgttgtttcttaaataagaaacttttttatttaaaaaactaaaaactagaggtgagaaatttaaactataagcaagaaggcaaaaatagtttggatatgtaaaacatttattttgacataaagttgataaagattttttaataatttagacttcaagcatggctattttatattacactacacactgtgtactgcagttggtatgacccctctaaggagtgtagcaactacagtctaaagctggtttaatgttttggccaatgcacctaaagaaaaacaaactcgttttttacaaagcccttttatacctccccagactccttcaacaattctaaaatgattgtagtaatctgcattattggaatataattgttttatctgaatttttaaacaagtatttgttaatttagaaaactttaaagcgtttgcacagatcaacttaccaggcaccaaaagaagtaaaagcaaaaaagaaaacctttcttcaccaaatcttggttgatgccaaaaaaaaatacatgctaagagaagtagaaatcatagctggttcacactgaccaagatacttaagtgctgcaattgcacgcggagtgagttttttagtgcgtgcagatggtgagagataagatctatagcctctgcagcggaatctgttcacacccaacttggttttgctacataattatccaggaagggaataaggtacaagaagcattttgtaagttgaagcaaatcgaatgaaattaactgggtaatgaaacaaagagttcaagaaataagtttttgtttcacagcctataaccagacacatactcatttttcatgataatgaacagaacatagacagaagaaacaaggttttcagtccccacagataactgaaaattatttaaaccgctaaaagaaactttctttctcactaaatcttttataggatttatttaaaatagcaaaagaagaagtttcatcattttttacttcctctctgagtggactggcctcaaagcaagcattcagaagaaaaagaagcaacctcagtaatttagaaatcattttgcaatcccttaatatcctaaacatcattcatttttgttgttgttgttgttgttgagacagagtctcgctctgtcgccaggctagagtgcggtggcgcgatcttgactcactgcaatctccacctcccacaggttcaggcgattcccgtgcctcagcctcctgagtagctgggactacaggcacgcaccaccatgccaggctaatttttttgtattttagcagagacggggtttcaccatgttggccaggatggtctcgatctcctgacctcgtgatccacccgactcggcctcccaaagtgctgggattacaggtgtaagccaccgtgcccagccctaaacatcattcttgagagcattgggatatctcctgaaaaggtttatgaaaaagaagaatctcatctcagtgaagaatacttctcattttttaaaaaagcttaaaactttgaagttagctttaacttaaatagtatttcccatttatcgcagaccttttttaggaagcaagcttaatggctgataattttaaattctctctcttgcaggaaggactatgaaaagctagaattgagtgtttaaagttcaacatgttatttgtaatagatgtttgatagattttctgctactttgctgctatggttttctccaagagctacataatttagtttcatataaagtatcatcagtgtagaacctaattcaattcaaagctgtgtgtttggaagactatcttactatttcacaacagcctgacaacatttctatagccaaaaatagctaaatacctcaatcagtctcagaatgtcattttggtactttggtggccacataagccattattcactagtatgactagttgtgtctggcagtttatatttaactctctttatgtctgtggattttttccttcaaagtttaataaatttattttcttgg

SEQ ID NO: 13013 - DNA, 120 bp, Homo sapiens
attgcactagactgcttgtaactaaccaagatgattgttgctgcttctaaatttttttcaaggacaacttgagtggagacatttttgtaatttttaaataaacttaaatttgagatatgc

SEQ ID NO: 13014 - DNA, 1162 bp, Homo sapiens
atattaaggatcaagctgttagctaataatgccacctctgcagttttgggaacaggcaaataaagtatcagtatacatggtgatgtacatctgtagcaaagctcttggagaaaatgaagactgaagaaagcaaagcaaaaactgtatagagagatttttcaaaagcagtaatccctcaattttaaaaaaggattgaaaattctaaatgtctttctgtgcatattttttgtgttaggaatcaaaagtattttataaaaggagaaagaacagcctcattttagatgtagtcctgttggattttttatgcctcctcagtaaccagaaatgttttaaaaaactaagtgtttaggatttcaagacaacattatacatggctctgaaatatctgacacaatgtaaacattgcaggcacctgcattttatgttttttttttcaacaaatgtgactaatttgaaacttttatgaacttctgagctgtccccttgcaattcaaccgcagtttgaattaatcatatcaaatcagttttaattttttaaattgtacttcagagtctatatttcaagggcacattttctcactactattttaatacattaaaggactaaataatctttcagagatgctggaaacaaatcatttgctttatatgtttcattagaataccaatgaaacatacaacttgaaaattagtaatagtatttttgaagatcccatttctaattggagatctctttaatttcgatcaacttataatgtgtagtactatattaagtgcacttgagtggaattcaacatttgactaataaaatgagttcatcatgttggcaagtgatgtggcaattatctctggtgacaaaagagtaaaatcaaatatttctgcctgttacaaatatcaaggaagacctgctactatgaaatagatgacattaatctgtcttcactgtttataatacggatggattttttttcaaatcagtgtgtgttttgaggtcttatgtaattgatgacatttgagagaaatggtggctttttttagctacctctttgttcatttaagcaccagtaaagatcatgtctttttatagaagtgtagattttctttgtgactttgctatcgtgcctaaagctctaaatataggtgaatgtgtgatgaatactca

SEQ ID NO: 13015 - DNA, 310 bp, Homo sapiens
aaaagcatatttgattgagaactgtgggaatatttaaattttactgaaggaacaataatgatgagatttgtaactgtcaactattaaatacattgatttttgagacaaatatttcttatgtcaacctgttattagatctcttactctgctcaaattcatcactgaaagatttaattttagttaccttttgttgatttaaaaataattgcatttgtatattgctaactgataagacaaattgagttattgagctattaaatgcacattttaatataaatgcagaaatcccaaataaaatgctaacatactg

SEQ ID NO: 13016 - DNA, 267 bp, Homo sapiens
aggaccaccatttaattaacatgattcgaaagccttcctcgggttcaaagctggattttgaactgaagaagattataaaattatttattgttattataaacaaaattaaccctttgaatactgattttttttcttagtatttctaagtatctcattaaatacctaaaatggtataagatttatcaattgtagggttatggaatctagtaataaaatttcaacagcacttaaactgaagtttgggttgctcatacaataaacagattg

SEQ ID NO: 13017 - DNA, 1113 bp, Homo sapiens
ggaacattcattctgtattttttttccctgttggagaaagtgggaaattataatgtcgaactctgaaacaaaagtatttaacgacccagtcaatgaaaactgaatcaagaaatgaatgctccatgaaatgcacgaagtctgttttaatgacaaggtgatatggtagcaacactgtgaagacaatcatgggattttactagaattaaacaacaaacaaaacgcaaaacccagtatatgctattcaatgatcttagaagtactgaaaaaaaaagacgtttttaaaacgtagaggatttatattcaaggatctcaaagaaagcattttcatttcactgcacatctagagaaaaacaaaaatagaaaattttctagtccatcctaatctgaatggtgctgtttctatattggtcattgccttgccaaacaggagctccagcaaaagcgcaggaagagagactggcctccttggctgaaagagtcctttcaggaaggtggagctgcattggtttgatatgtttaaagttgactttaacaaggggttaattgaaatcctgggtctcttggcctgtcctgtagctggtttattttttactttgccccctccccactttttttgagatccatcctttatcaagaagtctgaagcgactataaaggtttttgaattcagatttaaaaaccaacttataaagcattgcaacaaggttacctctattttgccacaagcgtctcgggattgtgtttgacttgtgtctgtccaagaacttttcccccaaagatgtgtatagttattggttaaaatgactgttttctctctctatggaaataaaaaggaaaaaaaaaaaggaaactttttttgtttgctcttgcattgcaaaaattataaagtaatttattatttattgtcggaagacttgccacttttcatgtcatttgacattttttgtttgctgaagtgaaaaaaaaagataaaggttgtacggtggtctttgaattatatgtctaattctatgtgttttgtctttttcttaaatattatgtgaaatcaaagcgccatatgtagaattatatcttcaggactatttcactaataaacatttggcatagataaat

SEQ ID NO: 13018 - DNA, 1203 bp, Homo sapiens
aatattttatgaaagaaaataataacaattattcaataatctatcctcaggtttgcctcaaatatgtgacaagaaatgtataattcatgacatagtcatgtaactatgtaatccatcagggattcattacttggaaaatgacaggtcatgcattatccaaaaacaataccaaaaagacatattttataaaatgacaaaaaatattttacataattactcatttttgttgagtaagcaaaattacaaagtgtttttaaaaaaacctgtacaaatatgtttatgtattaaatcaccatccaaaatatttaaggaatatataaaaagatttttatgatcatagaaacatctattttcaaaacaatataaattaagcttttccccttgattcctgttggatatccatgttcagcatgacagtcagcactcgtaaatgccaagaaaagaattacctgaaaaagatcatttctccctattcaaatgagaatattttcccttggtagaatccatatacaatatggattgaaaattaagtcaccaagaatacatttagcatctttgtgttgggttctatacctaaaaattttccctccctgcccaaggtgattggaaagtactgcaattgagctaaaattttatctaggatggaaaatcaggatagactcgtttaaaaacaagtatattaaatgggttaaattaagcttttacagaacatgcttaattttgatattgagctctaaatgcaaaactcttttatactgaaaaaacacttaaagtagttttgtgtggcatcacagtgatttgtcatgaaaagccatatatgggggacatgctaaaatggcttctgaatgaaatacgacagcagagaaagatgccactgaaatgctgaaattatctttgctgagcagcttttgaatgctaagggttccagtatgtgacccaaagaaagagttgtctcaactccttggtacagggttcattcaaacccccaagctgtgagagtgtgtttatttttaattttttaaaaggtatttaatttccaaccacacttcttatttttttgaaaagacaattttccatttcagtattacattttaccaagaagtcactgctttttaggtgtgttgcatcaatatttaaataaaatcccagaaatgtattttaaagaatttcaggtttgaaaactcaaaccaacaggaagatatc

SEQ ID NO: 13019 - DNA, 775 bp, Homo sapiens
tgattgaaacttaaaattgagacaatcttgtgtttcctaaactgttacagtacatttctcagcatccttgtgacagaaagctgcaagaatggcactttttgattcatacagggatttcttatgtctttggctacactagatattttgtgattggcaagacatgtatttaaacaataaactaaaaggaaataatctccacgtactaccatcttgattaaattgtgtaattttttataggaattatgagttatctgtagtacttggaaacagaaaatgtgtgtatttaaagacgatgcctatgcagtatattgtttgggatagattgcaaaatttcacactgcatgctttgaaacagttttccttagaaaaagcttttgctatcttatcctgtttacattatttctttattttaattctgcttggtgttcttgcattgcatttaatgatcccttttctccccacctccacacactacattttttttagatttaaatagttttactattttaaatgattgccgtacaattagtagacttgaagacaagttttaaatatttttcttcaaaggcttgttaaaccaatcatgttaaaaggaaattcttggttttggtttgttgttgttagcattagtcatatttgatttagagggtaacttaaatcagttatttttagctttttagaactttgatctgctagggattgtcaaaataatctccttgaggcatctttatttttaaaatgagattaaagtatgtgatttgcttgttatgtggct

SEQ ID NO: 13020 - DNA, 4179 bp, Homo sapiens
accagcagacctacctgcagtgggaaccggcagcatcccagccagggtttgctgtttgcgtgaatggatttctttttaaatcccatattttttttatcatgtcgtaggtaaactaacctggtattttaagagaaaactgcaggtcagtttggaatgaagaaattgtggggggtgggggaggtgcggggggcaggtagggaaataatagggaaaatacctattttatatgatgggggaaaaaaagtaatctttaaactggctggcccagagtttacattctaatttgcattgtgtcagaaacatgaaatgcttccaagcatgacaacttttaaagaaaaatatgatactctcagattttaagggggaaaactgttctctttaaaatatttgtctttaaacagcaactacagaagtggaagtgcttgatatgtaagtacttccacttgtgtatattttaatgaatattgatgttaacaagaggggaaaacaaaacacaggttttttcaatttatgctgctcatccaaagttgccacagatgatacttccaagtgataattttatttataaactaggtaaaatttgttgttggttccttttagaccacggctgccccttccacaccccatcttgctctaatgatcaaaacatgcttgaataactgagcttagagtatacctcctatatgtccatttaagttaggagagggggcgatatagagaataaggcacaaaattttgtttaaaactcagaatataacatgtaaaatcccatctgctagaagcccatcctgtgccagaggaaggaaaaggaggaaatttcctttctcttttaggaggcacaacagttctcttctaggatttgtttggctgactggcagtaacctagtgaatttctgaaagatgagtaatttctttggcaaccttcctcctcccttactgaaccactctcccacctcctggtggtaccattattatagaagccctctacagcctgactttctctccagcggtccaaagttatcccctcctttacccctcatccaaagttcccactccttcaggacagctgctgtgcattagatattaggggggaaagtcatctgtttaatttacacacttgcatgaattactgtatataaactccttaacttcagggagctattttcatttagtgctaaacaagtaagaaaaataagctcgagtgaatttctaaatgttggaatgttatgggatgtaaacaatgtaaagtaagacatctcaggatttcaccagaagttacagatgaggcactggaagccaccaaattagcaggtgcaccttctgtggctgtcttgtttctgaagtacttaaacttccacaagagtgaatttgacctaggcaagtttgttcaaaaggtagatcctgagatgatttggtcagattgggataaggcccagcaatctgcattttaacaagcaccccagtcactaggatgcagatggaccacactttgagaaacaccacccatttctactttttgcaccttattttctctgttcctgagcccccacattctctaggagaaacttagaggaaaagggcacagacactacatatctaaagctttggacaagtccttgacctctataaacttcagagtcctcattataaaatgggaagactgagctggagttcagcagtgatgcttttagttttaaaagtctatgatctggacttcctataatacaaatacacaatcctccaagaatttgacttggaaaaaaatgtcaaaggaaaacaggttatctgcccatgtgcatatggacaaccttgactaccctggcctggcccgtggtggcagtccagggctatctgtactgtttacagaattactttgtagttgacaacacaaaacaaacaaaaaaggcataaaatgccagcggtttatagaaaaaacagcatggtattctccagttaggtatgccagagtccaattcttttaacagctgtgagaatttgctgcttcattccaacaaaattttatttaaaaaaaaaaaaaaaagactggagaaactagtcattagcttgataaagaatatttaacagctagtggtgctggtgtgtacctgaagctccagctacttgagagactgagacaggaagatcgcttgagcccaggagttcaagtccagcctaagcaacatagcaagaccctgtctcaaaaaaatgactatttaaaaagacaatgtggccaggcacggtggctcacacctgtaatcccaacactttgggaggctgaggccggtggatcacgaggtcaggagtttgagactagcctggccaacatggtgaaaccccatctctaataatataaaaattagctgggcgtagtagcaggtgcctgtaatcccagttactcgggaagctgaggcaggagaatcacttgaacccgggaggcagaggtttcagtgagccgagatcgcgccactgcactccagcctgggtgacagggcaagactctgtctcaaacaaacaaacaaaaaaaaagttagtactgtatatgtaaatactagcttttcaatgtgctatacaaacaattatagcacatccttccttttactctgtctcacctcctttaggtgagtacttccttaaataagtgctaaacatacatatacggaacttgaaagctttggttagccttgccttaggtaatcagcctagtttacactgtttccagggagtagttgaattactataaaccattagccacttgtctctgcaccatttatcacaccaggacagggtctctcaacctgggcgctactgtcatttggggccaggtgattcttccttgcaggggctgtcctgtaccttgtaggacagcagccctgtcctagaaggtatgtttagcagcattcctggcctctagctacccgatgccagagcatgctccccccgcagtcatgacaatcaaaaaatgtctccagacattgtcaaatgcctcctggggggcagtatttctcaagcacttttaagcaaaggtaagtattcatacaagaaatttagggggaaaaaacattgtttaaataaaagctatgtgttcctattcaacaatatttttgctttaaaagtaagtagagggcataaaagatgtcatattcaaatttccatttcataaatggtgtacagacaaggtctatagaatgtggtaaaaacttgactgcaacacaaggcttataaaatagtaagatagtaaaatagcttatgaagaaactacagagatttaaaattgtgcatgactcatttcagcagcaaaataagaactcctaactgaacagaaatttttctacctagcaatgttattcttgtaaaatagttacctattaaaactgtgaagagtaaaactaaagccaatttattatagtcacacaagtgattatactaaaaattattataaaggttataattttataatgtatttacctgtcctgatatatagctataacccaatatatgaaaatctcaaaaattaagacatcatcatacagaaggcaggattccttaaactgagatccctgatccatctttaatatttcaatttgcacacataaaacaatgcccttttgtgtacattcaggcatacccattttaatcaatttgaaaggttaatttaaacctctagaggtgaatgagaaacatgggggaaaagtatgaaataggtgaaaatcttaactatttctttgaactctaaagactgaaactgtagccattatgtaaataaagtttcatatgtacctgtttattttggcagattaagtcaaaatatgaatgtatatattgcataactatgttagaattgtatatattttaaagaaattgtcttggatattttcctttatacataatagataagtcttttttcaaatgtggtgtttgatgtttttgattaaatgtgttttgcctctttccacaaaaactgtaaaaataaatgcatgtttgtacaaaaagttgcagaattcatttgatttatgagaaacaaaaattaaattgtagtcaacagttagtagtttttctcatatccaagtataacaaacagaaaagtttcattattgtaacccacttttttcataccacattattgaatattgttacaattgttttgaaaataaagccattttctttgggcttttataagtt

SEQ ID NO: 13021 - DNA, 384 bp, Homo sapiens
atctgcccgtaaaacctgagccattgattcttcagaactttctgcagtttttgacttcatagattatgctttaaaaaaatttttttaacttattgcataacagcagatgccaaaaacaaaaaaagcatctcactgcaagtcacataaaaatgcaacgctgtaatatggctgtatcagagggctttgaaaacatacactgagctgcttctgcgctgttgttgtccgtatttaaacaacagctcccctgtattcccccatctagccatttcggaagacaccgaggaagaggaggaagatgaagaccaggactacagctttcctatatcttctattctagagtggtaaactctctataagtgttcagtgttgacatagcctttgtgc

SEQ ID NO: 13022 - DNA, 116 bp, Homo sapiens
gttggcactgactatatctctgcttgactgtgaataaagtcagctgtgcagtatttatagtccatgtataataaatacatctcttaatctcctaataaattggacctttaaactac

SEQ ID NO: 13023 - DNA, 135 bp, Homo sapiens
catcgtatcggttcctgttcagatgacatggggaagatgatggttcagccactggtactacgagaatgtttgtattacccacatttgaaatgatttgctatgatttttatgaagattaaaaatatatacacagtt

SEQ ID NO: 13024 - DNA, 206 bp, Homo sapiens
gttacaaataattttattggatgcacttgcttcttttttcctaatatgctcgcaggttagagttgggtgtaagtaaagcagagcacatatggggtccatttttgcacttgtaagtcattttattaaggaatcaagttctttttcacttgtatcactgatgtatttctaccatgctggttttattctaaataaaatttagaagactc

SEQ ID NO: 13025 - DNA, 48 bp, Homo sapiens
ataaccgtttcctttcatttactgtggcttcttaatcttttcacaaat

SEQ ID NO: 13026 - DNA, 705 bp, Homo sapiens
gaatgccattgcgtttctaatagaacagagaaatgtctccatgagggtttggtctcattttaaacattttttttttggagacagtgtctcactctgtcacccaggctggagtgcagtagtgcgttctcagctcattgcaacctctgcctttttaaacatgctattaaatgtggcaatgaaggatttttttttaatgttatcttgctattaagtggtaatgaatgttcccaggatgaggatgttacccaaagcaaaaatcaagagtagccaaagaatcaacatgaaatatattaactacttcctctgaccatactaaagaattcagaatacacagtgaccaatgtgcctcaatatcttattgttcaacttgacattttctaggactgtacttgatgaaaatgccaacacactagaccactctttggattcaagagcactgtgtatgactgaaatttctggaataactgtaaatggttatgttaatggaataaaacacaaatgttgaaaaatgtaaaatatatatacatagattcaaatccttatatatgtatgcttgttttgtgtacaggattttgttttttctttttaagtacaggttcctagtgttttactataactgtcactatgtatgtaactgacatatataaatagtcatttataaatgaccgtattataacatttgaaaaagtcttcatcattttcagt

SEQ ID NO: 13027 - DNA, 205 bp, Homo sapiens
agtcagctaaaggaatgtgagattttaaattattgaccacctgtttgattacagttgactacaaatgcctgcaagtgtggatttggttctcccatacattttaatatgtattatatttaaatcaaacatcattcatagaaagcatattacatacatgtttatacataagcattacatttttttaataaaaatgtatacaggtggg

SEQ ID NO: 13028 - DNA, 238 bp, Homo sapiens
agccaaaacatccttcaagtctgtggttttgatgcagagaagaaaatagttttgatttttgagtttttaacagaagtataaaacttaacattctcatagctcctgtccttgtattctcactcctacacttaaaaaaaaaatccttactgactagttatgtgagatgctaaaacttacaacattgcagttactgatacaaatggtgttaactgggaatattaaagcattctaaatgtct

SEQ ID NO: 13029 - DNA, 32 bp, Homo sapiens
atgcgaccatagcatgagaccctcggggcctc

SEQ ID NO: 13030 - DNA, 281 bp, Homo sapiens
ctctgtgaatcagaaattattaggttttctactcagctattaattctaagtgttttttgttaatcacttctctgagttctacctgtaaaacaaatattttgagacttaattggaataggaatttcttatgtttttgttgatattatatttatgttccaatttcatgataaaagctacttgcttcattacaatttcaaatttgtaatgcaattccaagtttaattggttttcacctaaatacacaatagcttattaaattaaaacctactctttgaacttat

SEQ ID NO: 13031 - DNA, 330 bp, Homo sapiens
aggatttcctaacagctttagaaatcttagtgtgatacatctctcatacagtttggggtgaattgtaaaaatgaagaactataatttatgtagtgaaataccccattagaagaggattttttgggggacttcaatatgaagaaaaccaagaatgttttgttgggctgtgttgaacattatttctttgtaaatgaatgttgtaggaatgaggacttgggttggtccaacattgactttcttcatcactgcaacatttctctgactagcaatgtgacgatgtaacaaatgagattttctcatttaataataaaaaattgtgtaatgttttgc

SEQ ID NO: 13032 - DNA, 1348 bp, Homo sapiens
cttttcaaaatattgacttttgttattggatgataaatattcactgtaatttttcaacagcaaagacaaggaatcaaactaaatgttgatcaactgtagactggataaagaaaatgtggtacacatacaccatagaatattatgcagccgtaaaaaaagaacaaaactaacatgggaacagaaaatcaaataccacatattctcacttaaaagtgggagctaaataataagaacacatggagagaaggagaggaacaacagacactggggcctacttgagggaggacagtggaaggagggagaggttcagggaaaaaaaaaatatcaggtactatgcttagtacacacatgatgaaataatctgtacaccaaacccccaagtcacaagtgttcctacataacaaacctgaacatgtacccctgaacataaaattataattaaaatattaaaaataattcactgtgatttttattgtactgatgccattcttaatcaagttctgataagtggatggtctctgcctatctccacctttctgaatcctatgtgtatcgctgtggattaattctagatatcttctccaccctccttgcaccagactaaatctgtattatgtgatattgattcttccttctaaatattacccgttatctctttcctttatttctaccattatctttatctggctcagaattattgtcataggctcctaactgttcctcctgcttctagtttctacccactcaatcaattaccgatggtgttgccagatttatcttcagaaaatattcctaacagccacattatttctttcacttaaaatgttttaatgccccctctttgcaaaagacataatacccataatttgaactccaaaatttatggttttccacaattggttccaattcacttttccagtgacttctcttactatctctcatttctttgccttcagcagaatcatcttaaaacctgccaaacttatccttccttcacagctttgcttttctgcctcttctctcaagcctgcttcagatcataagttcttccacacatctcctgaatcactccaaacccgcatttacctttttattttctgatataagctttgatgcctcttcaattcttaggacatttaaacatatgaatgttgccacagcattttattacctagcttcatatgaaaatgtcttaaattcccacctaaatgaaaagaaactgcccaaatgcctagaacatcacataaggcactaaatgcctcatgttttactgacgggaattgaattgtacattttgctgagtagttttgagaaaaaaatctaataaattcatctgttattcatccat

SEQ ID NO: 13033 - DNA, 227 bp, Homo sapiens
tgtccccgtgcacacaggcagctccagggggctctggttgccaacaaacagcatttgtaaatggtctattagccttcatttatactgcctaacaattatttgaaggaataaattgatgtcaatggctcgtacgcattcaattcttgggagctttcctgtttaatatgtggcaaatatgtgatcttaaatttataaggactatccatctataaacatctggtacctgc

SEQ ID NO: 13034 - DNA, 71 bp, Homo sapiens
atgcattatggtcaaatcttttcatgtatatggatgtgactattttaacaaataaaagaagtgaaaagtta

SEQ ID NO: 13035 - DNA, 2502 bp, Homo sapiens
tgaaggtctgcccctgtggtgttgggacaacttgctcatggagttgcagttcttgcctaacaggaacccaccatggtaagaaaaagactcaagctggtttatttgtttttaaggttgcaaggtaatcaagtccataaccacacttgctctcacatttaccaaaataggccaatctcagaactaaatgataaaaatgaaaattaatcagggactcccatgggcctcacatatatggcagttttgaatctgttctttttttcactatcataattgtttttttaaactcattttctctgcttgaatacacaactgtaaaaaaaagtgggggtagtggtggtgatagaaatgaataaacccatggaaacagtgagacatctacagagacaaaattaggaaggaaggaaacaaaagcaatttcagtatctctgtgcaaggcctgcatacctttccttgccaatacccgtggattgggcttgtctcaggaggtagcaggtgtttccttgactcacacagaaaacaagcccttgggcttcttgtgctgttagggcaagttacgttcagcacatgaacactggaccctgctttgcctgtccgtccttcccagaagagacacagatcacagatgatcaagtagttgagaaaacagttcaagaggaggctttgtatcttttctttcttttctttccttttttttttttttttgaaacggagtctcgctctgttgcccaggctggagtgcagtggcattatctcggctcactgcagcctttgcctcccgggttcaagtgattctcctgcctcagcctcctgagtagctgggtttacaggtgcctgccagcacgcccagctaatttttgtatttttagtagagacggggtttcactgtgttagccaggatggtctcgatctcctgacctcatgatccacccgcttcagcctcccaaagtgctgggattacaggcataagccacagcacccggccctgtgtcttttcttaatttgagcgaacttaaagtaaaaacgcttcttaacattataaagtaggactatgtcccctccattgaatttttgtaaaaaagtcgaatagggatagaaagcaagcaaccagatagaatatcatgccccagaacatcatttaccttggtagaacattaccactttaacacatagaaaccttttcacactagttaacaaatagcattaagcatgattcaagtcaagattttaaaaacttggctgatgcctctcattaagagttgaaaactatataagactcttgctccaggaaactgtgttctgacattttaatagtattgcgttagcaagagcagaaaatccatgaacttagattcacagaaagtaaatcaagaatccatccaaaatggagtgcctcttgctgagtgatgggatggttttcatgtgagatgtcagtgcagcttctatacttgacataaaagttcccattaaaaaaaacggaactgctgctcaatttttttttcatcaagcagagttacctaaagtgctttttagaagagactattaggaaaggaatggaaagtagtcattatgactaatctgctttaggagttggggtaaccagtattacaggagggactttcagagccatggggaccttttaggcaactcaaattccttcaattgtttgcagtggtcctctcgaggggatgtaatgagttgacatgcaccagaacagatagaatgcactgccagctggtagtttactcttgtacaggaaggctgcttttctaacacacaactctttgttgtgttaaagagaaataaatatataaaagcctaaaagtaagctttcaattctttatgtctggcaaaattgtcagtacaatgtgccttgaggatatatccatggtgctgtcttacaaggttattacgaaagaataagctcatactataataaccaccccatacactttacagtttatgaagaacttacatatacattttctcagttgaacctcacaacatcagtgggaggcaggggaggcagatattattatctcttgagagggagtgaccctgctgctgctgctgtatatgtgtggcttttggtttaggaagactaagttgattgtgttgtattttcaagtattttatatcgtacaaggatgtttattgcagcactgtttataacaaggaaaaattggaacctactcgaatgcttgctaataggggactcattaaactatggtacaagcttagatatgactctgtagtcattaagaattttgatgaggtattagaaagaaatgtattgatgttgaagtatatttattgatgaaggaaattgttcacaatatttcagccaataaacaatagtatatgcatttttttgtaataggaaaaaatgcacacagtaaaatagtggttatctttgtgtgcggtgaatatgtatgatacttgttttctttttcatgctcacctatcaattctaatcttagtgtcaataaatattaaaaatgtact

SEQ ID NO: 13036 - DNA, 814 bp, Homo sapiens
accggcatttgctgctaaaggatacccagaaccctcactactgtaacatacaacggttcagctgtaagggccatttgaaagtttggaattttaagtgtctgtggaaaatgttttgtccttcacctgaattacatttcaattttgtgaaacactcttttgtctacaaaatgcttctagtccaggaggcacaaccaagaactgggattaatgaagcattttgtttcatttacacaaatagtgatttacttttggagatccttgtcagttttattttctatttgatgaagtaagactgtggactcaatccagagccagatagtagggggaagccacagcatttccttttaactcagttcaatttttgtagtgagactgagcagttttaaatcctttgcgtgcatgcatacctcatcagtgattgtacataccttgcccactcctagagacagctgtgctcaccttttcctgctttgtgccttgattaaggctactgaccctaaatttctgaagcacagccaagaaaaattacattccttgtcattgtaaattacctttgtgtgtacatttttactgtatttgagacattttttgtgtgtgactagttaattttgcaggatgtgccatatcattgaacggaactaaagtctgtgacagtggatatagctgctggaccattccatcttatatgtaaagaaatctggaattattattttaaaaccatataacatgtgattataatttttcttagcattttctttgtaaagaactacaatataaactagttggtgtataataaaaagtaatgaaattctga

SEQ ID NO: 13037 - DNA, 1263 bp, Homo sapiens
gagcacatgacatgtggctgcctcccctttcagaaacaagctgagtaacccagcctgccgtttgtatgtgagagcctgctgagatgaagaaatcacttcatgaaaataagcaaagaccacacattttttactacaaaatgtaaaggataaatgtaaatcctgcataactaaaatcacaaacctattcctcaaaagaatttaattttatatttatgagggggcccttcactaaaaagtacatgtaaaagtacatttgatgacaatagctgcttagtttcctgttaagagaagaaactttatcttttaattatgtgctcttaatatttgaagatgagagttaatacctgagatgtttttctgcaaccaaaattcattaaatttggctgccttatcctttttttaagctaatgaaactacaggtttgaaaaatgacaaagctgttcagatgatgctattaaagaaatgtgtgtactaagcaaaaatatataaatagtgacaaatacacattaccaagcttatcttgcaagggagttattttcatctaacatagaaagtgtgttttatcagacaaatgcttttattttcattctaataatttgatacagaaattagtaaaggcatttttttctttttttttccagtaaatacattgggtctataaatgtgcatttgtaagggccacaaaagtgaacgtgtggtactgtagtaccacgtgggagacctctggttatggtttagtcctagttcctttgttactcctgtgagcaccgagaagaactgggcgactcccagtcccacctgtgctgtgacagtcccacgtggctatgacagactgtttagtacttacccttctcaggttcctcagtgcaggggtgcatcagggcctcaataataggggtatacctgggaggatccagcagtaatccccagggtactaggattactagtactctgatggaactagtcttccttccttattcctcgaacatgcagtacataaaaaggggaaaaggagaaaaaaaaagccttactttgttttacttgccatttattgtaaggaaactttaaagcattttttaggaaatactcaaaagcaaggttggaaaatgttttatctttctatagaaagttgggtacagtatgtaactgcgggaaacccactgcccctttgtaagctgtggaacccaaactgtatggggatatttgatgttttcagaaagaggaagaaaatatggtccaaattaaattttccaaagatacctc

SEQ ID NO: 13038 - DNA, 366 bp, Homo sapiens
gaaattgtcaaattgttttccagaatggctgtaccattttgcattccaagcagcaaagacttccattttctgtgcgtccttgaaagcaagcactggtattctcagtgttttaaaattttagtcattcaaatacatagacagttgtatcacatcatgactttaatttgcttttccttaaggatgctgaacatatgtgcttattttacatttgtatatattctttagttaagtgtcttcaaatcttttgggctggtgtggcagcttatgtctataatcccagcacttttgagaggccaaggcaggaggattgcttgagttcaggagttcaagaccagcctgggcaacatagcaaaaccttatctctac

SEQ ID NO: 13039 - DNA, 3040 bp, Homo sapiens
gtggctcctcctggaaacccactgagaacatctgaaaaaaaatcacaaaacccgaggacctccagacagctgaaccacacagttattggtttttgactatgttttctatgcttccttattacttttatctgcctccccctgcccttttaaatgattttacacttgaaagcagctgccgtcaagaaaaaaaagaacagattcaaaaaccaggctgtttttaaaagggaattttaaagctgacattgtgcatgtctgctccaaaccacgccatgacagatgcaagaattatgatttttaaattatttaaaggttttttaaatgtattatacagaggaaaaatatttcacatataatagtatatctatagctcttgctgatctcatgttaaaatttatcgtatatgaaagaagtctttaaacatagaaatctatttaaaactgaaaaactgtgttcaaaaatccaatctatcaatatcattagaaataatattataagcaaacatataccacctcacctattgctttctctgcactcatttacatttagtcttccattctgtcagaatctaagagcttcaacataaaagtatcttaatttataaagcaacaaaaaccacatatgaaaagtactaaaattttgtaaatacacaataatcctaataccttcgtacaaatgcatatgggcaactaatttctttttgatccaatgatgtctttttcagcttcttggagaatgaagtaatccagttaggaaatggtgtagtaacatatacaattgccctcaaatgtaaaatcaaatattattacattttgttctaattgaaatctgaagcatggtgtctgcacatcagcatagtgttaaatcttatagggcatgctggaattagctcagattataaaaatatttaacattttacattgttaataaagttttttagttaagctaagcttgtctcattttagatgactatgcagataagatttttccaacgtgtacttggtgtcttgtcttatgcttagactcttgaaagcaggacacattaagcaatactatattttagaaaggaggaagccacatgctttgtttttctgctcacagctttgttgtgatcttccttcactaaacttgtaacatggtacaaattttgttataccgtctcctgttcttcctttggcccatttcccagacagaatttcccatgggttgagagatcaagtctttgcactttttttcttgttttccatagtctgaaaaaccttcaagtcagacaggaggcaccagtgtccagtacaatagaaggatgagctagatgccgataagtggtttatccaagacacatctttagtcccaaccctgttctttaccaatacttatgtgcacaggcatttatatgtataccaatatttttacctaaaaactaaatatattaaggccttttgctttagtgaagatgaactactgtaataattattgtattaggttgaattatatgaaatttcctatatgtgactgttttgacctacaaaatggcaatttcttatagttcaccctaatatccaatgtggaaattatacttggaattgtcttctagctcttttgattgaaagtgaaagaattaaagggttggaagagaacgttatacaggtctctatttagatcataccagctggtttttggccttattctttgaatctagagttgtgttccaaggaaccagtaattaatgcatggttataggtatacctggcttcaaaaaaaagaagtagccgtggaaagctatatgagaaaatcacaattttctgaatcaaatatttgtaaaacaatttggctatttaaagactcttagggtaaatactccctggaaaagcaagcaatccagacttatctggtctgcaaaccttgatttcagcttaatatcctttcctgaatctaattcattttcacccactaaggtcatttcatttaagatccattgtttttgaaattttgaagtagcccagtttggcagctctcagcacctgcctctgccctctcctatacttcaactatattgaactctagcttcaatctagttcctactaatccatgcaaaagttattaactgataagcccaatcttgttcagcacgttcttctaaatgcctgacctaaataacttctgcttggttaacttgtgttcattctcaccttagcctcagtgtgaaagtaacacttaccttctgtgcaattgtcctttgtacaactgaagactgttaataaattcaggtctcacctccatgtctgaaaaggctatagtagctattcatggagatgggaatttgtctaattacctagccagagtttgcatatttaaggtaatatattcagctaccgtatcttttattcatagtgcctgttttccagcctttgatcagttttgtagttcccgtggataaactccaagatctaaagatcctctttcagtagcatatactaaaattaagtttagtgctcaaaaccctggtaacctacactggcccaaggttacagtaggtaattcaccgtctcacattagacaggccaatgcatcccttaggagctgccccactctcctctcacctaccaaaggattttctcaggtgtggttccaagcgataaagttctactgtctcggcttcctgctggtaattcgctttcagattagcaataacactgagctgatctctagggttaagaagagaacattgaactcattttgtcgcatgtacccacaggcttgaaacagaaaatgatgtaaacttttgtggcatacattcacccattttcccaccatatctttactatcctgtgttgatttttttttcaaattacaaagacaatacatgttctttgtgggaaatctgaaaaatactaccaaatagaaaataaaaatcacctgaattccaccacgaccacattgtttaaaaccacatttctgggttttaaatcagtcagtggctgggcccaaaggcacttttgggtaagataagtgaagaaatgcccacaaggccaaggtgtcactt

SEQ ID NO: 13040 - DNA, 442 bp, Homo sapiens
aatgagaataatgataaccagaacttgctggaaatgtgcctacaatggccttgtaacagccattgttcccaacagcatcacttaggggtgtgaaaagaagtatttttgaacctgttgtctggttttgaaaaacaattatcttgttttgcaaattgtggaatgatgtaagcaaatgcttttggttactggtacatgtgttttttcctagctgaccttttatattgctaaatctgaaataaaataactttccttccacattacatgttaaccattgcagactgcaagcctgtttgtgtccttttaccctaaaatatatgaaggcttccttttcaagatttttttataagaagttcctacagaaagaatatttgtgggaaacctccctttcactaacttcagaatataataaaatattataaataaaatatagaatataaatatg

SEQ ID NO: 13041 - DNA, 145 bp, Homo sapiens
aataagatttgttttaatgtacttgcaaataaaaatacaatattaaacagattattttacattaggaagcttaggacttgctgaatatacagatcatgtttcaaagatacagtatttttgtattttttattaaaggctatttttt

SEQ ID NO: 13042 - DNA, 1516 bp, Homo sapiens
aggaaacttccaatgttaggcttttcatttagtttcacagaactgctctttttgttacctttgtaaaatgatgacgtcaacaacgaagtaaatatgttacttaaattttctttcctgtaaaatggttaaaatattaaatatttgttttgaagagatctgattttatcttgtaatttatatttgaaatgaacatgtgtatattttctacacctattatttaatttcatttcattttagatgaccattggactttgttctccaaaagctgtgtatctgagaccatttgtccctagcaagttatctagaacacgagtcagcacactttttatgtaaggtacaagatactaaatattttaggctttgcaggccgtaaggtttctgtcacaaatactgaactctgccatcgtacttcaagagcagccagtaggcaaaaaaagtacagtggtgtacacaaaaagaagcagttggactcgggaagctgaggcaggagaatcacttgaaccggggaggcagaggttgcagttaagccgagatcatgctactgcactctagcctgagcgacagagtgagactctgtctcaaaaaaaaagaggcagctgggcagatttggcctgcagggtatagttggctgacctcaatctagaagatagagttgtttcttagaactttgtaatattttggttagaaatatttcagttaactccagttttttcctagctattcggtcagcagaaaaagtttgcttaaaacaaagggggtagtcctcttataacctgatatttgtcaacacagtataagctttctagttgttttcaaaattactgtaatggtttgtgtctgtatttgtatattatacctacaaacatacatatctttcagctactgaacacatcagaattggttttactttttaggttgttgattttttttaattaactattaactaagaataatacttattttctaattataagccaaaaacccctgggtttttttctcattgattaagccacttatttttataaggtatatttaaataattcccatcttctgatatgattttaaactctaaatcatgtgttactgttacaaaactttctctctccatgtaatcacacttagttatgagcaaagcagtgagaaagttgaggtgataaacaactttgcagcattaatgtaacaaaaagtttcagtatttgtcaggaaaacaaaagcttaggctgttaaataaaagctattctattttggtaagttgaaattcaagaatgtatatataatttcttaaatgtaagagtgcattaaatcaaatacaaaaattggtttttcaatgcatcattatttattgccataacaaattgtttggtccaaaatgaaagctatattcagaaggtttgcacctcaaaattgagtaataattaatgaaatgtctgtacaaaataaagtgcaagcagtgtaaaattgaagtctgtctttgtttcaaaatgattaagattaaatgatgaaataatattttata

SEQ ID NO: 13043 - DNA, 646 bp, Homo sapiens
actggggatctttggtagccgtccatgtctggaggacaagtcgacatcaccatgtgttactggcctggaaactgaagggagttttgcaagtgaaaatttagatttctattgacatccttttgttttctaattttaaaaattataaagatgtaaatggaattataaatactgtgacctaagaaaagacccactagaaagtaattgtactataaaatttcataaaactggatttgatttctttttatgaaagtttcatatgaatgtaacttgattttttactattataatctagataatatgatataagagggctaagaatttttaaattgaatcatatatatgatataatttgatccttcttgtatcttgaagttttgtacttgggatttctggactgataaatgaatcatcacattcttctggtaaatattttcttggagctctgtgtcaactttgatcctttgtctcccaggaaggtgtgacctctcctttgcctgcatacctcaaggccaggggaatatgcctcagtgatgcatttatctttgtatatcaggccgcatgattcccaactttctgccacacttaaattacgttcctccatttcagttttgtcttttctgtctaaagttcagtcaaagagtatcaa

SEQ ID NO: 13044 - DNA, 2492 bp, Homo sapiens
gcactgtggacaaaaaaagcggggaagacagcaagatttattggaagatacttacaggggaaattaatattttgactatttttatatataaagaagaactcaaaaaattatgttcaaatttgtacattaatgaaataatggaacttgtggttagagggaaagaaccactgtacagaatataaaggagactgttgaattcataccatataaaacttgttaggtttttaaacatagcaatcaaggctacaaaaacaaacctgtgttgtttttgtatagattgtaggtttatttttggatttcatatacatgactgaactgtgtgcaaggcaatagttagccttgattttagcccagagacagatggcagagctatctctctcatagcttttatgcccttatttttattcaactggtattaatgtttttctcctgaaactactttttttgatgtgggcaagagatttgaagtgttggcttttgctatgtgcatattgaattgaagagtgagtaggtgaaggtggtgctggtgggttcactttccaaggccagactaaaacagttattttctataaaaatctggaagcaaagaatggggatggggagagctacgtggtagtatgtttttattaggagaataatgcaataaaatatgtaatgtcttttttataaagcaaaaaagacaataattgcatttatgagctcggcaggatctgttcttgtcatagccattgactatacatttgctactggtgattcagtttttaattttttagtcacaggaaatttttaactctactgtagatgcatgtccatgcattttctgtgttatggaaatccactgatttttttttttttttcaaatggtggtacttgcaatctgttttataattagtgctccatttaaatctaatttataatttttattttaagcagcaaatgaaacaaaaatggccagttttaagattgtgttgcctgtaacacaaaatgttacgaaggtttaggaaagcctctttgatttttgtttggccttgcattgccttggtaaagtaaaaggaaacagtacacttggagctaggaaaccaaagcaagctttgtgaaactggcacagtgatagagaattgctgtggagagttatagagcaaagggatgggtccttgaggcctgccagtgtgtaaaggtgttcaaataaagggctgtttctacaggtaacattaaatgtgaactcaacacttccagagtctttaaagggtttctatgtgtatcagtgtaatagtgttttaccaccaactgcctttctttgttcctagttactgtaacaaatatttgatgatagaggtttattaattttgtttatccagaccattaattttatttgtttttgttctatgtaatcaaataaaatttgagtaacatgtaatggtaaggattaatgcatggttatttggaccagaaaaaagtgccatagaagaccaataactgtttagttgaggctagtctggaacctttcattagagcaatatttggttattgcacttcatttttatttactaagaaatgcaatttgggaatttttaatctgttatgctttgtttatcaaccttgattttaattaagacttttataagactagcttaaaacaccaaccaacattatttttgcaaaagtgagttggactcactttccattcttgctagtcagagtaagtaggcagcacttttaaaaatatgtgaactcaaatattgcacttctttcaagatgttatcaattggttattgtactgtatagttttaataattttgattgaaaccctttaacaactctttgtaaattttaactcattttagttgattttcagtactatttacataggaattgatttttatggatatagtagaagaaatgtgctgtattttgataaaattcacttattgtatgtgtgttgtaatctaaaaaaaaaaagaatgacaaacagcttctttaagacaagtctcggtgttccctttattcttagtttgtttttaaatattaattttggcattctaaaatagctaacatttcttttattgatttcagattttcacaggcacattctacttttaatcagaaatatatttaataagtataattgtgaagttttcaactactttaccttgaaccacatataccaattataattttggaaaaggaattaagcctcacggaacaatggatcttcagcaaaccttaacttcattgtctgcacattacattgaagtattataaatgcaacagatgttatatgcactggcattttatcctactctagttagttaaaattttatagtattcttgcaacacataaagttgcgtaagaaactttaccaagaggagtattatagccaagttttctttgaaagtattggaaaactaaaattaaatgacaaggactttgaattagaattttgctgtaataaagtttcaaaatttgaataaaataattaaattttttgagg

SEQ ID NO: 13045 - DNA, 2016 bp, Homo sapiens
gaccgacaagtgtacctctgcactcaatgctggaatcaaatccaaagcttttaattctctcaacaagatgtaaacaggaaagaaatctagttgagcatgaagataggatctaacagcttttccagttgttagatgactttgtggccatcttgttattgagtaagaaaataaagcatggacatcatgaaaataacagatgttacccaaactcatcttctaaaatctgtgcatttccatggtggctgacacacttgtcatgtggtctgttagtgtttgccaagaaccattgcaaataaattgaacatcaaagatccaagtttgtactatccctaaagactggagataagcattggaggctcttttaaaaaatgctagttactgaattttgtattgttttacttttttttttatttcaatatatacagtttgatgatgtgcttgaaattggtgcaaatatatacacacccttgtaagtgcaaagtatgtaagaagttttaacatttacttcacaggacttgtgattgtgttaaattctcactattgtgttttcttttgctcactgtttaggacaatttttctttaaaatagttttgcagattaaaattgcttaaataagtggattaaaaaactgacaatgcatgctactgttctctttcaaaaggaagagcaaccgtgttgaatactaataatgatgaattagtattcagtgtttagaatcattgggactacccacaaagtgagcatttctttttaaattttcttgacatttccaagcttattatgaataatattgcagtgtgtcttgtcagctgtaggtggcaaaggtgcccttataaaaaaggaaactggcttttcaaaatgggctatgggagcacaagctgaagctttagtgccttctacaatgtggtatactgttttctagaattttatatgtgctagtcattctcaattcatatggaatctagatggatatttcatgcatacccatagagaagtgtgtaagtgatatgtcagaagagcttcttactgatttcacctaaaatgagaaggaagtcctgttttcaagaatgacattagagtcatgcagctttgggaccatcagttttatactgtgataattgaaaatgaaacatgttcttattttccttaaattgaagaaaaccctttagttgtctacattggatggccttattacctctcaatcatcttttcataaatgatgtgcagaaattgtacttaaggacttaggagtatatgggaggttattggttttatgtttaaggatacgtttacttgagtttaagatacaggtcatccatcattcttaggctcactttttacagaaagtatgcaaatagtaaagtgacagcactgctaatgtttttccccagtactataacttgtggtttctgaactcattattgttgtatttccaaaaaagtaataccttttaattagtgtattaaaagttaagtataattattttaatgcaatctaatacaatcagattactcagttgccttacctcatgggaagagttacttttttagatctaaaaagctgaatagcatgttagttacttggtttcaacttgagttttcttttaatgttaataagattgaaactttagtatttagtggggaatggaaagagttgcccttgttgcaagtaatgaagcctgatttgattatgaagctgcttaatcactcttcatgtgttcagaattactgttttttttgtttgtttttcctttttgtcactgtgtacattaaaattttggaagatgctttactatgtaaagtatagatggtcattttaatcattcagccacatacggttggctggtaaacagcttattctgatacaagaatgcttgggtgcatatggaaagattgtgaaagagtgtgtcttgcatcaacagctgtcttatttatgatatataagtagaaatagagcaaatgttggaatctgttatttttagtaccatgtctttaataaagctaagtattttagagg

SEQ ID NO: 13046 - DNA, 37 bp, Homo sapiens
attgccaccacattaaataaaacatatccaaagctca

SEQ ID NO: 13047 - DNA, 4218 bp, Homo sapiens
agcgcttactctttgatccttctcctgaagttcagccaccctgaggcctctggaaagcaaagggctcctctccagtctgatctgtgaattgagctgcagaaacgaagccatctttctttggatgggactagagctttctttcacaaaaaagaagtaggggaagacatgcagcctaaggctgtatgatgaccacacgttcctaagctggagtgcttatcccttctttttctttttttctttggtttaatttaaagccacaaccacatacaacacaaagagaaaaagaaatgcaaaaatctctgcgtgcagggacaaagaggcctttaaccatggtgcttgttaatgctttctgaagctttaccagctgaaagttgggactctggagagcggaggagagagaggcagaagaaccctggcctgagaaggtttggtccagcctggtttagcctggatgttgctgtgcacggtggacccagacacatcgcactgtggattatttcattttgtaacaaatgaacgatatgtagcagaaaggcacgtccactcacaagggacgctttgggagaatgtcagttcatgtatgttcagaagaaattctgtcatagaaagtgccagaaagtgtttaacttgtcaaaaaacaaaaacccagcaacagaaaaatggagtttggaaaacaggacttaaaatgacattcagtatataaaatatgtacataatattggatgactaactatcaaatagatggatttgtatcaataccaaatagcttctgttttgttttgctgaaggctaaattcacagcgctatgcaattcttaattttcattaagttgttatttcagttttaaatgtaccttcagaataagcttccccaccccagtttttgttgcttgaaaatattgttgtcccggatttttgttaatattcatttttgttatccttttttaaaagtaaatgtacaggatgccagtaaaaaaaaaaaatggcttcagaattaaaactatgaaatattttacagtttttcttgtacagagtacttggctgttagcccaaggttaaaaagttcataacagattttttttggactgttttgttgggcagtgcctgataagcttcaaagctgctttattcaataaaaaaaagaaatgaaaaagatatatgaatatgacaaagtattgctgagtccaacaatgttgttttaagactcttaaaatacggtacctggcaatgtttatttcataaagaattgtgaacttcttgaatctagggagggggaatgtagtgaagggatgtatcaagtggggtggtgggagggggaggcaaggttatatgcactttctcatgatttacagagaagtgaataactgcaaagtgaagttgcttcttctacttcagtcttctctcactttgatttgctagttgttatcaattaatgacaattacaaacctactgtatctctaatacagtgtgactggtcaggtatttcagttcttaggaaggaagtgccaagtttgtttttgggttcctggaacagcgctcacctttgtttagaacactggtttaaagggataatcatctctgtcacattagactatccatcatgaccagcaaatactcattttaggaaaaaaaaaagcatgatctgaaaaatacttttggtggtatgttggttaccctcctagctttccatttggtttagaacataaagcaaatagacacagtcatactgtcactgctctggactgtgtggagctcgctaaagtcatggtcattgcaggaatccaagtggcagtccttctcattcattctaatcattgtatgtgcttcactacgggggggagaaggaaacgttagcatcatgtttcccatttagggcaggagtgagaggtctctcttcctgatttagatatgcaaaagctggtatgttcagtaggaactgtacatgtgttgggaggcataaagactaattagcaaccataatatggtcactaccctaatagactaaatgaaatcttgcaatttcaaattactctttctccatattagatttacccacagctatatttctgtttaagtactagggtgagggttttctgttactttgttttttaatgttgttccttttgaaagaatcagtcttgcagctgagtgaaaaatctgtggaatgtattatttgtcctctttacatgaaactactcatacttaagcaaaagtcagtcttatagcaagactgttagccctcaaacttgactctactgatctgaccatttccctctcatcgccagacaactgacgatttccctggttttagtctgcgtctctgctttaaagttattgtgatatccttctagatcatacacaagtctaacagttaattagttaacagtttttaaactaggtttgtgggtatttttttggtagcacatgtatgctattacatacaaatttttatttctaaaatataagatctgagattgaatattttcattaaaagctacagttttgtgaatctttgtgcttcaacattctttgcaagatgatacggtatttaggcatttgccttatttttgcatctcacaaacataagtgcaatagatcttttcattgaacagcaaagtaggattcatcattccatatgacttgagttacaccagacctgttctgcccaatgcctttttgattacagtgtagcttgcccaccgcatttgtcgttttagatactttgctagccggccactttggatttcatcagacagtcctaacaatattgtctgaacggctgaatatgaatagatacagcagaggcactcctgatatatgatttttatccatgcgtcagtttttcccacccagtgtagcatcctaaagataaagccagaagctaagctgcagtgaggctgtgattgggcgtagaagtgggagcattgggacctcacattacacacacgagagatcataaccatgtgaaaaggcaaaaagcatgtgtttgcaacatctgataacttcatggcctttgataaatgtatatatgtatatgtgcatggactgtgtttccagtacacctttcagccaaaacagatccacagtagttgttgagttcaagtacataaagtacataacaagcgaacgtctagtacaattcttacttatgtgtatgggatttttccctttgaggttgctttgttttgtcttacaaaggtgaaaattgtttgtaagtgaagtgagaagttcatatttctttggcttttttgtgtttttaaaagttactccttttagggagctggtctgatgacttgcttagcttggaaatccttgttttcagtgtgtcgagtcaaaatgtgtttatgtgagctgtcactgtggggaaccaattgctttgtcatatagctggttatgaactagtaacatgtttgggaagtcctactgatgttcctttggaagaaaaaatctgctggttttaacaactgtgcttttgctatgtatggtatccaagttagttgaaacgcagacactgagatctgtttgagtttagggtcatttttagaaaggggcagtttaaagcacaatgtctcacatgggacaaagttccaaaatgccaaattcttattttttaaaaagctagttctataaaatactggtattatgggtggggaggaaatagaattgagtcaattggaaagactatccaacttaacatgaaacttgtcaccatgagatagcattagctgcccaggatgctgctatatatatatatatatatatatatgtgtgtgtgtgtgtgtgtgtgtgtgtatatatatatatatatatatatatatatatatatatatatgtgtgtgtatatatatatatatgtgtatatatatatgtatatacatatatgtatatatatgcacatatatatatgtatttaaaaaaatcaaaacaaaaaaaaactcatttatacctgtgtattttttaaagctacaatctgttcaatgtttttaaaaatctgtttatatgacattgttaaaataaagttggtcttttgacgagagggaggatgtcacggtcagttgtaactttgccttcacaaggcaactggggtggggggtgggggtagtgtgcctccttgacatttcgttcaagttatagattcaatggagctatgtcttgttttaagttgctttaatgcattgtattagatcttcaaacagaataaaggttgttttgaaactg

SEQ ID NO: 13048 - DNA, 693 bp, Homo sapiens
gaaatcataaaattgtactctgaagaaaaagatttcaaaatctaccagcagacaagaatatagataatggaaaacagaatactgtcctttttttttttctttctttttttgagaaagagtcttgctccatcgcccaggctgcagtgcagtgacacgatcttgtctcactgcaacctctgcctcccgggttcaagcgattctcctgcctcagcctcctgagtagctggaattacaggcacccaccaccacacccagctcatttttgtatttttagtagagacggggcttcattcaccacattggccagcctggtcttgaactcctgacctcaggtgatctgcctgcctcggcctcacaaagtgctaggattacaggcatgagccacagcacccggcccagaataagaatactgtcttggaaatctagacttagtcaagggatcttatgttttctatttacaaaatatgtaatgatttcacctttaaaatatttgttattattatctttctgtattttatttaaaatttggatatatagcaaaatatatgtgactgaaatttttaatttttttgtttccatttatagtggatcaaaatatttaaacatgcagttgctgggtgtattatttcactcttgtggttttttggcctcactctttgtggaccactaaggtaaataaaaatgcatattttg

SEQ ID NO: 13049 - DNA, 435 bp, Homo sapiens
gataactcaagaattacccctggagaataaacaatgaagattaaatgactcagtatttgtaatattgccagaaggataaaaattacacattaactgtacagaaacagagttccctactactggatcaaggaatctttcttgaaggaaatttaaatacagaatgaaacattaatggtaaaagtggagtaattatttaaattatgtgtataaaaggaatcaaattttgagtaaacatgatgtattacatcatcttcaaaaatagatatgatggattctagtgaagaccaaaattacttctgtttactttctatcaggaagcatctccattgtaaatatgtatttacatgtttattacaaagacccaaatgaaaaatttttagtccattttttgcatagcctaaagataaaataggaataaaagttctatatttatgg

SEQ ID NO: 13050 - DNA, 608 bp, Homo sapiens
cttgtaaacttgagttggagtactatatttacaaataaaattggcaccatgtgccatctgtacatattactgttgcatttacttttaataaagcttgtggccccttttacttttttatagcttaactaatttgaatgtggttacttcctactgtagggtagcggaaaagttgtcttaaaaggtatggtggggatatttttaaaaactccttttggtttacctggggatccaattgatgtatatgtttatatactgggttcttgttttatatacctggcttttactttattaatatgagttactgaaggtgatggaggtatttgaaaattttacttccataggacatactgcatgtaagccaagtcatggagaatctgctgcatagctctattttaaagtaaaagtctaccaccgaatccctagtccccctgttttctgtttcttcttgtgattgctgccataattctaagttatttacttttaccactatttaagttatcaactttagctagtatcttcaaactttcactttgaaaaatgagaattttatattctaagccagttttcattttggttttgtgttttggttaataaaacaatactcaaat

SEQ ID NO: 13051 - DNA, 557 bp, Homo sapiens
taagaattcatttctgacatattttacatttctggcaatctcaactcttatttggaatacttctgtgcatttgtctgtccaccgtaattttagaaaagcatatccataacgtttacagttgtagtacagttgtggttagttatttgtagtgggattgaaagtaatttttttctttttatatttctatatttagtttgtttttttgttgttgttgttttttgagatggagtctcgctttgttgcccagactggagggcagtggcgcgatctcggctcactgcaacctctgcctcccgggttcaagcagttctgcctcagcctcccaagtagctgtgactaaaggtgcacgccgccatgcccagctaattttttgtattttagtagagacggggtttcaccgtgttgcccaggctgctctcagaactcctgagctcaggcagtccaccgcctcggcctaccgaagtgctaggattacagacgtaagccaccgagcctggtctagtttgcattttttttctatcagttttataagttaagaaataaaaggaattaatgtt

SEQ ID NO: 13052 - DNA, 931 bp, Homo sapiens
ccatggtggctgctgtttgtcatcagacaatagaattgtctttacaataaaggacttccaaaatgacagatgagaaactgtatattaaacacctttaataaatattatgaaaaaaatgaaatatagaaaatttagatggacacttgtatttcctaatttatgtatcttggtcagcttctccacaagcttacctaattgtttatatactttatacttattaaagtatacatttttaaatgttagcctattaatttactcttgattatcaaacattaccagtgttgaactattaaaagcacacaatgtgtagtaaactatcataggattcccataatttcactttactttctgtttaggcatggaaaaatttatcagtcagaattgctgttttagggacatgattttcctgaaattgggtgaggatcagtgaaataattactctattacttgttcttaattctctgttctctaatgttttttcattcacaagtttactggagtataactggcttagtaagtatatcctactctgaatgataaaaatatagtcaagctaaaataggtgactatactattaagatagagatcatacaaaagattccaaagaaagtcaaaaagtgtaaaatggaaaataagagatcaaaatgaatatagcataggaataaagatttcactagaaattgcaatttattatgttttggaggttgtaaggaagtcttgttttttggtttattttactgttttgtgatcttgtatgcaaatcctgataaccattaaccttctcaaacttaatgtctgagagcctcataaaatcaacatatttacttattaagcagtttatgaaactttaatggggcccctcctgtgccaagggtacgtatattgtgaagtaaagcctcacaaagctaaataaattctcttccataccttt

SEQ ID NO: 13053 - DNA, 286 bp, Homo sapiens
agagaacactggacaacattttactactgagggaaatagccaaaaaggcaaataatggaaaaatagtaaacattaagtaaatgctgtagaagtgagtttgtaaatattctacacatgtaaaatatgtaaaactatgggttatttttattaaatgtattttaaaataaaaatttaattctggtttttctgattagagtgcaaaagtgagaaaagttcaatactcttgaaatgtagaattgaaaatgcattagggaaaacttaataaaaattattaccagttatttgg

SEQ ID NO: 13054 - DNA, 507 bp, Homo sapiens
aagccagcctgctaatcagattgctacttcacagcttcatttttgtttcattcagtggtacttcagcagagttaatatgcttttctgatgaattacacaacagtttgttaattcttcattcttgtagtatttcatcacaagaaacctactcttctgtcatcttgaagtaaatagaagatcaagccttcaaatctcttaattttttcggtatttattaaatctgtgagtggtttaaggagcggtcagtgtgtataaagtgtgtttgaacattatgccaaatatcaagatgtgaaggactaattcaggatgcaaaaacgttattggggggttgtaaatatcaactattcaacagtttaggatgcaattacgagtgtaaactgtgtgccttatttacactttattgtctcccgcttctcagatagttttgatgtgttgtacagtggaatatcttagatactttttggaaagtatttacataagttatatcacaattaaaatgttgaattt

SEQ ID NO: 13055 - DNA, 941 bp, Homo sapiens
tccacccgcctcagcctcccaaagtgttgggattacaggcgtgagtcaccgcgcccagctggtattgcttttctattccctttggacatacatgctacagtcccacaatgtagcatttccttggaaactccctttttttttttttttgagatggagtttcgctcttgttgcccaggctggagtacagtggtatgatcttggctcactgcagcctctgcctcctgggttcaagcgattctcctgcctctgcctcccaagtagctgggattacaggcacccaccaccatgcccagctaattttttgtatttttagtagagacaggatttcactatgttggccaggttggtctcaagctcctgacctcagatgatctaccagcctcggccttctgaagtgctgggattcaggtgtgagccactgtgcccagcagggatgcttcatctttctaagaattatcttggctttggactttattcataaatgttttatttctgttagtatgaacaatagactgccttaacaaagtttttttttaaacaaaatcgttcttgttggattttattcagcagcatctatcatgtagataaattcccaggtgtagcattacagcttctgactaatatagctgccattcagacaattaatgttcaaagagttttctaaagtgataaaaccaaagaaaagcatgtggaaaagcagaagcttagaaagttgtggtcactgaatgcactccctggtttttatttgtcagtgaaatctttatgcattcattgttaatattttaattccatggctttgtaggctgtgctgtgtctgaaggggtaacacctagggaaacatgaggccccttatgggaccccccaaatggaacaacttcactttctcttttatgtattgagccctgtgttaacatttcacttaagaagagcaccagtgcttt

SEQ ID NO: 13056 - DNA, 632 bp, Homo sapiens
aaggctgatgccaagttgtttgagaaattaagtatctgacatctctgcaatcttctcagaaggcaaatgactttggaccataaccccggaagccaaacctctgtgagcatcacaaagttttggttgctttaacatcatcagtattgaagcattttataaatcgcttttgataatcaactgggctgaacactccaattaaggattttatgctttaaacattggttcttgtattaagaatgaaatactgtttgaggtttttaagccttaaaggaaggttctggtgtgaactaaactttcacaccccagacgatgtcttcatacctacatgtatttgtttgcataggtgatctcatttaatcctctcaaccacctttcagataactgttatttataatcacttttttccacataaggaaactgggttcctgcaatgaagtctctgaagtgaaactgcttgtttcctagcacacacttttggttaagtctgttttatgacttcattaataataaattccctggcctttcatattttagctactatatatgtgatgatctaccagcctccctattttttttctgttatataaatggttaaaagaggtttttcttaaataataaagatcatgtaaaag

SEQ ID NO: 13057 - DNA, 1372 bp, Homo sapiens
gttccattctaacctaggatgatctcatttggaaatccttaatttcatctacaaaaactgttttcccaaataggtcacattcacgcatatcagatggacagatgtatcattttggggtccaccattcaacccactacaaggagttttttaaacaaaaataggaaacttagatgtaacttagcactttttttttttttttttgagatggagtctcactctgtcaccagactggagtgcagtggcgccatctcagctccatgcaacctctgcctcctgggttcaagcagttctcttgcctcagcctcctgggtagctgggattacaggcacgcgctgccacacccaggtaatttatttattttttttttgagacagagtctcgcactgttgcccaggctggactgcagtggcgtgatctctgctcactgcaacctccgcctcccgggttcaagcgattctccagcctcagcttcctgagtagatgggattacaggcgcctgccaccacgcccagctaattttttgtattcttagtagagatggggtttcaccatgttggccaggctggtctccatctcctgacctcgtgattcacccgcctcggcctcccaaagtgctgggattacaggcgtgagtcacagcccccggccataatttagcactttaaaaaataatagccatgttgggccaggcgtggtggctcatgcctgtaatctgagcactttgggagaccaaggcgggtagatcccttgtgcccaggagttcaagaccagcctgggcaacatggcgaaaccccatttctactaaaaatacaaaaattagctggggcgaggggataggccgagttccgggtgtaagggggccattagggagagcagagcgaggcagctgatcttccggattgggggccttgcccggaagctggacctcacggagatgaaacggaagatgcacgaggatatgatctccatacagaactttctcatctacgtggccctgctgcgagtcactccatttatcttaaagaaattggacagcatatgaagattggacatcacatgtgaatgcatgatatgaagagcctggttacagtttctactgttctctgcaagtaaataggcccagaaaggtataagagactctttgaatggacataaaaattctgcttgttaagaacaagttgagctctggtaactgatcttaatagctaaaatataaaaatatttgggaagtctgaaatgaggtctcctggccctggtgtgcccttaatgcctgtgacagttggcctctgtgaatattggtataattgtaaataatgtcaaactccattttctagcaagtattaataattaagggaagtatgtctgaaatggc

SEQ ID NO: 13058 - DNA, 571 bp, Homo sapiens
gaaatgctggcatagagcagcactaaatgacaccactaaagaaacgatcagacagatctggaatgtgaagcgttatagaagataactggcctcatttcttcaaaatatcaagtgttgggaaagaaaaaaggaagtggaatgggtaactcttcttgattaaaagttatgtaataaccaaatgcaatgtgaaatattttactggactctattttgaaaaaccatctgtaaaagactgaggtgggggtgggaggccagcacggtggtgaggcagttgagaaaatttgaatgtggattagattttgaatgatattggataattattggtaattttatgagctgtgagaagggtgttgtagtttataaaagactgtcttaatttgcatacttaagcatttaggaatgaagtgttagagtgtcttaaaatgtttcaaatggtttaacaaaatgtatgtgaggcgtatgtggcaaaatgttacagaatctaactggtggacatggctgttcattgtactgtttttttctatcttctatatgtttaaaagtatataataaaaatatttaattttttttt

SEQ ID NO: 13059 - DNA, 1372 bp, Homo sapiens
gttccattctaacctaggatgatctcatttggaaatccttaatttcatctacaaaaactgttttcccaaataggtcacattcacgcatatcagatggacagatgtatcattttggggtccaccattcaacccactacaaggagttttttaaacaaaaataggaaacttagatgtaacttagcactttttttttttttttttgagatggagtctcactctgtcaccagactggagtgcagtggtgccatctcagctccatgcaacctctgcctcctgggttcaagcagttctcttgcctcagcctcctgggtagctgggattacaggcacgcgctgccacacccaggtaatttatttattttttttttgagacagagtctcgcactgttgcccaggctggactgcagtggcgtgatctctgctcactgcaacctccgcctcccgggttcaagcgattctccagcctcagcttcctgagtagatgggattacaggcgcctgccaccacgcccagctaattttttgtattcttagtagagatggggtttcaccatgttggccaggctggtctccatctcctgacctcgtgattcacccgcctcggcctcccaaagtgctgggattacaggcgtgagtcacagcccccggccataatttagcactttaaaaaataatagccatgttgggccaggcgtggtggctcatgcctgtaatctgagcactttgggagaccaaggcgggtagatcccttgtgcccaggagttcaagaccagcctgggcaacatggcgaaaccccatttctactaaaaatacaaaaattagctggggcgaggggataggccgagttccgggtgtaagggggccattagggagagcagagcgaggcagctgatcttccggattgggggccttgcccggaagctggacctcacggagatgaaacggaagatgcacgaggatatgatctccatacagaactttctcatctacgtggccctgctgcgagtcactccatttatcttaaagaaattggacagcatatgaagattggacatcacatgtgaatgcatgatatgaagagcctggttacagtttctactgttctctgcaagtaaataggcccagaaaggtataagagactctttgaatggacataaaaattctgcttgttaagaacaagttgagctctggtaactgatcttaatagctaaaatataaaaatatttgggaagtctgaaatgaggtctcctggccctggtgtgcccttaatgcctgtgacagttggcctctgtgaatattggtataattgtaaataatgtcaaactccattttctagcaagtattaataattaagggaagtatgtctgaaatggc

SEQ ID NO: 13060 - DNA, 571 bp, Homo sapiens
gaaatgctggcatagagcagcactaaatgacaccactaaagaaacgatcagacagatctggaatgtgaagcgttatagaagataactggcctcatttcttcaaaatatcaagtgttgggaaagaaaaaaggaagtggaatgggtaactcttcttgattaaaagttatgtaataaccaaatgcaatgtgaaatattttactggactctattttgaaaaaccatctgtaaaagactggggtgggggtgggaggccagcacggtggtgaggcagttgagaaaatttgaatgtggattagattttgaatgatattggataattattggtaattttatgagctgtgagaagggtgttgtagtttataaaagactgtcttaatttgcatacttaagcatttaggaatgaagtgttagagtgtcttaaaatgtttcaaatggtttaacaaaatgtatgtgaggcgtatgtggcaaaatgttacagaatctaactggtggacatggctgttcattgtactgtttttttctatcttctatatgtttaaaagtatataataaaaatatttaattttttttt

SEQ ID NO: 13061 - DNA, 2938 bp, Homo sapiens
aacaatcttttctctttttcttttttaaattaggtctaggatttccagagtcaattacatcaacaaaacagtatttagagcaaaatatcactgtcttatttttctttaggttgattttgaatacttaatgagcttgatttgaagcttttataatcagtggaaaacatttctgaggttcctttcattctgactgattcagcattttgcaaatagcaagcaattaagactgctttctcagacagaaataacaactcttgtttacattttgactcttcctgtgctaagcacacatggacatttgggaatgttgtggatatatgtctctgtatgaattgcagtgcagacagatttgggggttaattgtatcatatttaacatttagcaacttcttttgtgaagattttttatttttagggggagatgatgaaggatgaaggctttttcatttgcttctaagtacagtcatgtatcacataatgaagtttaagtcaatgatggaccacatatattacagtggtcccatgcaattaaaatggagataaattcctatcaactagtgacattatagccatcataacacagtgcattgcttttttatgtttagatatgtttagatacacaaatacttactattgtgttacaactgcctacagtattcagcatagtaacacattgtagaggtttgtagccgaggagcaataggctataccacatagcctcagtctgtacggtgtgtagcagcctgtaccatctcagtgtttgtaagtacactctgcgttgtttcacacaagatcacctaacaaggcaattcttagaacatgtagttaagggacacgtgactatatgtgaaaacaaattgtcaaacttcactttagtatggcaaatgttaaagaacttttctattatcagctgtttgtctgactgaaaaatacatatttttctaattcatggtgatgtaacattagtcctaattgaaaaactagtatttaaacataattatttataaagatgacacatcaaagggcttatttatttttaaattttttatttaaaaggatattcagttttagctatttttacccctcagattgtagataaagaaggcattaaatttatgtttgtctcctttttctgtttaattttaaagatatttaaaatgatataactaaaaatgtttagctggtgtatatgttttgaatacctttttcccctcagtttagtatattgactttgtactgtaaatttttctgcttttcttggataatctcaggattttcatgaggatagggggaactcaactttatttatgagacaaaatttccatacaaagctcaatctcctttatacacccacagacataatattagtttttaaaaagccaatttcttcatagttttttcccattaaattctcaaggaacacttggatctttaagcacggaacataatcatgatgttaaaaacagagaaaataaggctttataaagttaatgattatcatcagtatgaatttaaggtttgttttaatttcaagatttgattttttatacgtgtaattctattatctacccaagcagatctgtagtggttccaattagacttctcaaacagcaaatttatcctgattttatttgaaaagcctcttggattgatagtatagtagctcaggcattggaaactttctgcaaactgttttgggtttgcaggccagatggtctctgtggcagctactcagctctgcaatttcagtgtgaaagaagccatagacagtacttgaatgaaggactgtggctggattggccttttagtttgaccccctacattaggccccaaattttcttaccctgaggtgctgatatctgtatggatgagttatttgtcactaaagttatgagttgtgcctaaaagttaaaactgttgactgtattatgtaatgatcagtatttcagttgggaagatattttagagtctagataattatgtttgtatattgaaaaaatggtggccagtttttaagttccttaatagaagagaattatgtctcagcacatataacagtaatgctaatttattgaaactactgctgttagagcacttcttattcattgtcttttagtgaaatttatggcgtaacactttgtcagagaggaggctatataattcggagcggaaattgtctataagtaggcatttatttcatgattgatatgtcacagaaatcatggtagtaaatcacattgctatttgaataccctgtttttgtaagtttttaaaactcatattctgaaaagatttcattctcttagtgttagcttgggagttagattgccatgattaaactattatttatccttgtgtaatattagtttttaactttaacatctgtttctttttaatctataatgagctagttttatggaaaatggaatttcttactatataaagaatacagagactcattgtattagagaatcaagtcagccagctaaagtatcctactgttaaatccttaaacctaattttggaaaagagaaagttaatcaatgtatttaccttacatgttggaaagaactatgttaggtctgattcatgtgaagaagatgttgcaaaggatttatttcacaaattttaaaggagatatgagtaaaagtttttatcttttcttgactttttctcctgaacacttatgtcttagcaagtggtcaacatgaggatttgaacgcctaattgttggtaaatggttgaggcatgacaaaaatattaatatccactgtttaccatcatgttatttgaaacaaaagtgaccatgtatactatcttgcttgaagaagtctttgacagaaaaagcaatatcatgtcatttataaattttcttgttctaaagaaagcagttatatatatatataaattatgtaaataaaagttattttatatcattt

SEQ ID NO: 13062 - DNA, 538 bp, Homo sapiens
ctggaataaaggatgttttctgttggacatgtactgaaaattaacacatgtagtagccttaaaattttagacttctcgaacatgaggctgttacagtaatttttttaacactgtgcattgtacttttctaccttaaaaaaatcagtgaggatatttatttaatgaacatcaattccttttaaattttcttagagaaatttctctgtggctcagttttaccacccataaagcggagacagtaatttacggttatcctttctgacccacaaagtatgaaaagttctgtaatctgtaaactcagttctgtaatctgtattattgagatgattaatataaagttgtattttcactgaaatgattgttttgctggttatgcttggtgatattttagcgggcttatttttgaaaggcatctgttacttcagtggcataaagtgccctcacactgctgtgcagccatcaccaccattcatctccagaatttgttctcagtcccaaactgaaactataccattcaaacaacagcgctccccatttc

SEQ ID NO: 13063 - DNA, 430 bp, Homo sapiens
aggggcgtccattctcctccatacatccccatccctctactttccccagaggaccacaccttcctccctggagtttggcttaagcaacagataaagtttttattttcctctgaagggaaagggctcttttcctgctgtttcaaaaataaaagaacacattagatgttactgtgtgaagaataatgccttgtatggtgttgatacgtgtgtgaagtattcttattttatttgtctgacaaactcttgtgtacctttgtgtaaagaagggaagctttgtttgaaaattgtatttttgtatgtggcatggcagaatgaaaattagatctagctaatctcggtagatgtcattacaacctggaaaataaatcaccctaagtgacacaaattgaagcatgtacaaattatacataataaagtgtttttaataatt

SEQ ID NO: 13064 - DNA, 4331 bp, Homo sapiens
aaaccaaggccagccacaccacaggatctgaactttgtttccagaaattcttcaatttgaaatcaccttttctaaaaagtcaattcatctagttaagtcgctgaacaattacctgccaaatgctatactgtgtcatggtgatgcaagtcactaaatttctcagtttttgctgattgctaagggaaataacagtatttccacaatagggttcaaattcctgcaaaattacctaccccagttcatctctgctgaacatttggaaaccatgcactagccaacccaactgacttctgctaggtagaggcatttgtcttagagagagagagagcgcgggagagagtgagagagagtgagagcacaaagataacgcaggagagagagagagaaagaatgagaaagaaaaggaatgcaagagaaggagatgtaatgacagagagttctggtgagatacccagagagaaaaagagagagcagggtggggtaaggaggagaaaataaaccaacaattaggtctgcattttctcaggcagtaggcattctttagtctacataggcaaagttttccatttttgtcagtctgagtcatcaaaaagagtcttaattttctaaaacaagttggctagaagaaagtaaaaagaacaacacttgttatgagggcatgtgatattttcacatcttaattaagctccttcagtttgaaggctgcacactgacataatgtagtgagtgtagactggccatgcaagtggtttgggccccattcagaactctcagactctaaacacacaagtagattgatctaaggcatgctcccagcatttgtccacccacttagtccactctgagtcgattaacctgcatgcagcaacacccaagtccaccccaattaactgaagcaaataccaaagcagttgggagtacatatggtagacaatttgccttaggaagtgacttgaatgtacaaagatacttgatgcacttattttttaatgtgagacagcaagtttataaaacatccatataggattatagatacttaaaggaacacgtgggtgagcgtgtgtgggggtactagaagctgatctgattggtccaacagtttgatgctgagtcatgcgtgttgaatcccacttcagtgcacctgtggcctctcagtcaaacaagttgtgcctttcacagcttctttactactgcaagttcaagactgaaatggcttctatgatcagaactgggaaaacagtgaatcttatggtggaagaggttctcagcaagtgtacagtatttaccttcctttgtcttacattggctttttaaattttccattaatttcaacataattatgggaacaagtgtacagaagaattttttttttaagatatgtgagaacttttcatagatgaactttttaacaaatgttttcatttacaggaaattgcaaagaaaattctcaagtgatagtctttttttttaagtgtttcgtaagacaaaaattgaataatgttttttgaagttctggcaagattgaagtctgatattgcagtaatgatatttattaaaaacccataactaccaggaataatgatacctcccaccccttgattcccataacataaaagtgctacttgagagtgggggagaatggcatggtaggctacttttcagggccttgacaagtacatcacccagtggtatcctacatacttctttcaagatcttcaaccatgaggtaaaagagccaagttcaaagaaccctagcacaaatttgctttgggattttcttttctggaaaaaaaaaataaaagaaatagtacattgaaaacaaatgaattctcaactcctacggttcatgtagagtttagagaaaatttccatcattgtcatcattgaactgtgaacctgggaagccagatcatgattaacactgacatcaagtttcaagttgcagatcaatgcacccagtgttcagatgaggcaaacttctccgtgacaactgtgctgtgctctgtcacattacatttcctgcagactctaagatctacggagtagagaacaatgacctcattttattttctatgttagttatttatttcaaaattaacattttagttgatttttgtctgataagtctatgttttgcactgctaactatgatgagggtttaaaaaaatgcttcttcagggtcctttcactgaggacctatgcagtctacttaatgctgtgaattacatttttcaaatgtttaattttttaaagaaaattaatattctatttttgttaggcttctctagaaatgcagcttttatttattaccccatttctttcaagtccttggaaaataacatattaagggtacaagaaattaacacatgatggaaaagtcattgtgacgccaatgaatttcattgagtataaactcatctacttcaaatttattttataacacaacctaagatactcaagataattatttaatggttagctcttaagttgaattggtctacataatgcgtgggaagaaaaccagatttttagccttcttgccaaatccagacctctggttgatttttctttgacagaagatgcaagttattttccaatttcacaattaaatgtatttaacctgaacattattttgctttaaaaactataaacattgtaggagaattatagccagtcttcagttataaccactccaccctcctcactttctctctctctctctctttttttttttttttttttttgctatgggatttaatgggaaaaatatgtaaaaactgtcactagtcagctggctctttttcctatgaaatctatcagtacctttctccatccgttgttctcaatatgaccacagagcctgagtataccaagaaaaccaatattcgcattacaggttgctcctgtccttccagacacctttcctgcctgtgtgactaacctaattttgctagttccataaatacacgattagtttagtaacagccatcacaatgtaccatgtacattcatggtgagagctaaagatcgacacagacttctaggagctttgttcatactgattacttaatccaattgtatagattgaatatttgagtggaaggaatttacactctgtttaaatgatgggattctatcgagatagcactcatgatcatgacctttttggtagtattcttaaacaaaattctacagagactaaatgttagcgatgatcctccattttcaattttaaccaattctgtcccctttctcaaaaccctgagccctgtgcatgctttctcagtcttgtggtgggactggatacaatgactaacttcccctcctcccctctttaaacaccattttccatggagttcaaaaaaattttttttcttaacgttacatatcatagtgaatggtttccccagtgtatatgaatgttttaagtgtctccaatagcttatgcagtctaggagctttccaatactcatttaattaagatttaatcatttgctaatggaaatcttaccacctttcattttccctctgttaccaaatttcagctcttaggagctgctctacaattctgaatttgcttttcttgcctctctttagtcacctgtcacaggaggttcctgctcagtaatgatattgtgagttaggataataactttttttttttgtgcttcagatttagaagaaaagatcctgtttccatttgaaaggaactgtaagcttttatcttttaaccaactgaacaatacaccaaaagcagcctagggatgagcatttctttgaaagcaattaggttattcacctggtattaaaactatttactgttaaaaaatctgtgacttcatgaagttgatttttaaaggcagcatcaaaaactgaaaaggaagggaaaaaataggcagcttctctgcacttgtttggagctccccaaaacaggagccatggagaagtggcatcaagaccgggctgccctttcgagaacaccctgtggcagttcagagacacgcttttcctacactgcatgcagcccctctttccagcactggaaagaagtggtcttgagcccagctgagaagcacttcacactcctctctcttgttctgaatggtgtttgtgtcagtctgcagctgtgtatggtattatgtcttataatcctgcatcacttctatcctatccagtcatatctaatgtagaaaattagtttccagtgaaagtaatatgtagtgcttttatgatatttgtgtgcaatatcccctcttccattgaggatatttgatgtaaaggaaaaaaaaaaactcagttccacaataaaatacaaaagtggcaaaagttca

SEQ ID NO: 13065 - DNA, 925 bp, Homo sapiens
ccctggtttcagtccacctatggatctgaggggcctgcttctagtgagttattacctttcctaagaagccaggtatcgcacttcagcagacagtgtgctgacacttggtcttctcctgaaattcccaaattcactgaatggtaccatgccgatctctgagaagttatgttgcaccactgtgaaggtctagatgcaagcttggctccctcagaaaggcgcttcccttttgcatggctgaggatccttgaaggaacctggtcagtctccggttcagcttccgacaccagagtggaacccagtaagcaccatcaggaatgaatttcactacaagtgtggataactctgattttcaaaggagtagttacttgcaaattacatccttgctgaattcaggaggtatgaaaccctattttaccatgttagaaaacagcccaggattttctcattgctctgccatcatatatgtctatgacttgagcccttatttttccatctgcaaaacaataatgcctatgtgtctttgcatatagatttgaaatcttcattcaaggtttagtaggatcatattttctcaaaaataagagaaataaggttcataaggaaacttgctgggattgtggttgttttgttttctcagcagcacaaacaaaaccagaatttagcctttaggactgctgagtaagccaaatttaaatgactactgctttgttcatgggtaagccatgtgcttttcaaaataagtgccactaaaaaccacataatgctttggtttctatgtggataataaatatttagtcctatagtttatcttatttgttaatgatttttctctcttgaatgcctcatattaaaaaaaaatgtgccatgagagcagttcaaagctgcttcatacttatggtctcaaatatagtatgtgttgaatttt

SEQ ID NO: 13066 - DNA, 5680 bp, Homo sapiens
gtccttcagtcttggagactataagggagcctctgcacccagggaaaatgttaccctttacaggggggaagggtaaaccagtagggaatacagtacaatcccaaccctactgggaggggcgggagggaggtgttgccgtcactgtattaagtcgatgttgggaaacgttttaacatctggagcctttgtgggtggaaatatgtctccagttacaactccgcagtggatgtgaagaagcaaaaaaaaaaaaatctattcagtctactcacaaaacagtacattgtggaatattatggggaattgtaccaaaacaagaaccatataaatgatgcctagggacaagaaagaggaacaattctatagcgcacaataaaggaaacctaagaatgggagttacaaatagtaaagaagctttttttttttttttaatttaaagtttttttatgtaagttttcccacatgatggggccttgttttgcatgttgatgaagaactacacaaagaaaactaatatagttaaaagtcagcttgccttcccgtagtagaagcaggttcttggaagttacaatttaaggtaccccaaaaaagttggaaataaaacaaaacaaacataaacaatgaagcaccctgtgaaatgccaaatgagtcactccttttaccttttttggggtgggcagggagggaggaataaatggggttgggcatatcaaactaaagatgacatcttaattttgcattgaacattaatgtagcggatataatttgatgattatacttcattagatttaatttctaggccaagatgttactttttaaagtgcagtttaaggttcaggcatgcattctggctcatagtggttgaaagtaatttaaattagtgggaaagtagcatgcttgcatcacatagagtgagattggtattcatttacctatgttgcgccagtttgtgttgcagtttaccaattcaatatagccctgcatttaaagttcctttttaagatttgtggattttatttttattaagaacatagatatataaagtactgtagtttacaggtaggccttgaaatatcttttttaggatctgttaggaataagattgatattgtattgtgtgtaacctgcacaatgtggaaagctgatatacctgtgcaaaatctttgcctctgtgctgtcagtgtgatgtgctttctgcatggttatatactactagtgattttatcaaaacttctaaaatttaaattacgtggtaaaagatctgtaaaaggctgcataaatgttagttggcacataaagacaattgtagaagttgaaaaatgattgctatatttcaatgtttattcccactcaacatactgccttctaagcttccctttttttgttcaaagcatgatcttaaagatatgtttaagttaatggatgtaatgcagggttcctacactgtattttggcgcatgttggtggccctctgtgccctagatatatgcacacagggtgcaagttaaaagctacagagtgaaagttggtttggatcctcttcatttcatttgtttagcttttctgttatttttctctacttacatgtattcctgtgaataaatccttgttaagttaaccctttacttttccttccatgtgtattttcttatatactgtgaatgtgaaaacctaactggtacacttgatcttgtgttcatatgaaagtgcaagtctttattaatttggattgcctgaacagtgtatcccatgatgatgaaggaaaatggagagatttttctttttaactctgctggtcagagatgaagccacgcctttccatttttcaatgctgcatatttaatctgcaacaaaaatgttaagccataacagcctttttatattttagtttgtcacctttgcattgcagaataaatactgaataaccatttttataagcagttgctcctctttgcatggttctattctctaaaagtgttgaatgatacagccattgcactgaagtttgagctgtgtgcgtgtgaatttatactgtttcaaaaatttcaaatgcatggtagcatgtagaaaggtttttgttactatgtgtgtgtgtgtgttttgttttgttttgttctgttttttaacgttctttcacctttcctctactttggctttgcaaatttcagtctgtagagcctgaaattaaattattttatagtgcctgatatttttaatattataagttggattcaaagggtatacagcattttgttttctagtaccattgcttcactgggagctcaaaatttgcctccctgttagtctttaataactgagtagagtagcttttttattcttagattatagtgatattctgtagtgcttcaaatacttagaattctaatatgagagatagtttaatattctggaatagagagtattttaaattgaaatgaccaaattcgatttaaaacaaacacataacaatcttcagtaaagttatttgaacctgtggttgacaattctgtattgactaaaggcaatattgtcacctgtctcattaaaaattagtttccagttaggcagatgaataacactattaaaaatgcacccagttttgtagtcacttgactttttttttttatttaaatgaaatttaatttgaaaatagaaaataaaattaggtaaatatgactggcaacctgaatttgagttgggattctttgtgtatttttcccccttgaggttattgtttcttcctaatttatatttcagatacatagtgtagaacaggaatttgcagaagccatttaagttatcttttgaggtaagctctgatttagcatttattctgataaaatctaatacatcatgggatatatataaagcaacttaattcttgtggtgtagtcttaatagttttgaatgttgactgaatgtctataaaattgtgagtttgtctttgttacattccagtgtttctgcctcttggcatgcttaaagcacggcttacttcatctgctccttacacactaaaatgctgttagtgtgctcaactacagaaatagccgctgctaagtgatgtagattttctacttgaatatttttatgttgtaggaacctcaggaggtcagtgtttactgttttatatatgccttctttttcctgtttgagcttctctctttgaaggattctaacagaacaaagctgctgatcaacctaagttggaaacagaaagtgtaattaatataacttaaatgcatgtttggcagttccatgttacagtccattagcgagtgaacttagtgccacaggtattcatttattcaggaaagaattttgctttttgtattgtctaatctcttcaatgacttcatactgtgtaaaaaaaaatcactttttaatattttttggttggttatttcccaaataatcaacatgtaaataatcttttaagagccagttctgatgctttacattattgctacttgattttgttatgcaagttagatttcagaagaatagattttaaaacacttaaccaagccattacatcttaaaaacaaaacaagtagcatacattttgtaattaacattgataaacactgtgatttttttggttaagactttttcattgatctgaattgcttaaattgcatatattgtaaaataggatcagatgtatattttaaactaatttcaatggattttcctcttgaaatgctttgtctactcagttataaaatattcagatacaagttttatctcaggtgaatactcttgtattgtttttgctttggtgacatgcttataaagggtcatcctagttacattctttgttttttaagtgtatttcattgagaatctttccatttagtctgatttttttcctaatattctagcaggctggggtggtataaagccctcctgacaagccttttgcctacaggtttacctgaaaatgagctacatatggtcgtcattttcttcaaactctcaaaataggaaagtggaaatttttctcccctatataaaattattctgcctagcagaaatgccagaaataaattaattgcatcttagtctaaatttaagtcctttgccatgaggaaaaagtggttttttgcttcatatggtaaatctatattattcatattgaatgtattaacagataatggtgcaaaagcattcttcccaggggaagagtgtatcatgcataactgcaatttaagtccttcctttgataatacttcaaaacatacacagctttgcttactgaattatttttgcaaataatacaaggaggggaaactaacttgctactagtgttgttaatgaagtataggccttggaacatttaagaaaactggtcttcagatagttaagggcttgggataatttaagtgaaaagtgagatcagtaatgagctgtgttgttaacaatattatctggtaataataccatgcaatatagcgttgtataccaacttagtgcattttatactgtattaaatatggagatacttctaatgcctctctaaaattaaattttacataaaagttagttttattcacctttaggctttccaagtgaattgtgactaattttttcaatcttacatagatctttcacccattagcattacttacgtagataattctttatgcctagttattatacatattaatttttaaggtatacatttaaattacacaattgttcattgtggtttgtatcccagaatgtgttgtgttttttaaaagatgcataatagctgaatgtatgcatgactttgaaagaagttaaaatggtgattttttttcacctcttgtacattttaaaaccaggccaaatctatttgccaagcagtgtatcactaataagaaaagcagtttttccttttattgcagtttttgtttatctgccatagaatttccttatactgtggcttggtattattcaagattagctatttcgctggtattacatctttttaaaagcctattataacatggttagcctataaggcagtgttggtccccttctaatattggcctcataaaggggttccactgtactttccgcatattactgtgttgttgttttcctttgtggatatataagcaaattgagcttgggtgatttttatggagacaataattagacaatactgtataattagttttacttaatagattatcatcttgtgagaagagatgtttaaacgtggtaaatcacttcatattacaaaacagttttacacttaatatgttaacattgggtgcaataatttagtagcattagctttagttacaaatataactggatctttctgctgacaacttaggttgtatgagttatgcttaaaagctttaaatctgatgtttcctgtacctgccacactatgttagaatgtgtccttcaaacatatcctcctgcaacttctcaaactgtactaaattgatatttcttgaagtctaactctgtgctaacagatctccattttaaatagaatacggttttaatttttgataagctgctgaattttaaagagagttttttggggccaccaaatattttggatcatgcagagaatatatattgtactgtagtaattttgtatttacatttgtatgatgtgacataatagatgtgaatgttaatcactgcttgactatgttaataaagttgtttaactata

SEQ ID NO: 13067 - DNA, 2431 bp, Homo sapiens
tggacctgggaaagtgatgtggcttcagggattacaaacctgccattctgcattatctgttctttccaaacactattttaacttgtatgatgtctttcaaacttagacatatttgagagctgactacaaacattaaatcgcacttttaaagtgagtcattgaaataaatagtactgaaatgattctctatgttgtaaatgatcaactacaatattcaggaagcacatttattcagattctcagtaaaaatgaagtttttgtaggattaatttttaaattatttccagtgtctatgttgaaaaaaagggttatagtgtaatatcaggcctaaagtttcagaagagcaagcacaaagtaatttagctttccatacatttttagagtcagagataactttgaaatttcataagtttgatattcagtggatacaaatagaacatgaattctaagttttgggtaatgttaactcagaacacttaatcaaattgagctatgtgccataaggtaatcagaccagagtccaagttgtatgcaaaaaatctataatttgattctcataaacatattaataaagtataagtgatgttttatatgatttttaaaaaaaattctcaagtgcaatgtgttttaaaataagcttgcaaatgacagcagagacatttacttctgcagttagttaactttataggagttgtgatttttttgatgaattaatgctgtagatttaatttatttttatatggaattgcataatgtgtgccttttaaaacaataacaaaaaccagagatgtgcctatacaatttgtgttcattaatgtgcctcactttttttctcagtctgaatcttctgttcagaatcttacagtgatcaagcatttttataagatatttgcaatttttgtaaatatttttggcctgcaactgggaaggggattcagagtcataaagcctaacttaagaatcctggctcacttctttggtgatacactgtagccactagaaagagaaataaacccaatggcatgtgtttacaggaagaaagattaccttcagatacttgacattaacctcatcaaaagtgtgtgaattttaaaacaaattctaaaaaaactatagtgctaaattggtaactggtattttaactctcaatttagcattttccttgatactttatcattgaaaatttatgcatttatttactgattgtgttgtgaacatgagttttatggtattttgtgagggatgcattttttaaaagattaattttggaaacagaaggagaagcactgccatttgtttttatttcaacaattggaaaaattaccaatttgtacattttaattattcaatttctactttgtaaaaatagggaaattatttgaagtgatatatttggttaaacatttctaaaaataaactaccaatactaaatagtaagaaacctaactttagtagcaaatcttgattaattgaagaaataaaatatttcggataaggtttcataatttacaaatgggaatttcatttataataataaatatgagtgtcctttatttgcctagtagaagtgataaattgtgttatatatgataatttatataaaaccactaattgttccgttaagcttcacagaaaataaaacctctattactagacatttatgtaacatcttgctgtactaaatacagcagaaaatctactctttagcaatatataacacagtatatgcttttttatatattcaatgttagcccaagtctgaatttacatttgactaaagcagcacataagataatttgctaaaatgctaatctttactaaatagtgagctaaattagaatttctaactcttatattgtgctcttttaaatgccaattacagtcccttactggaattctaactgtaatttgctttgcaatcaaactgcttttagggcagccaatattttattattggaattcagacactgttcttaccgtgtttgtttttaatcaaatattacctaaaaatgtacaaattagtgaaatggttaaacttctgcactttcttagttaccacagtcttcataccaagtattgggtacaggttacaattttgaagccatatgagtttatattgattttttttttccatttaaaaatccactaatggtgtaaaagagaccagtagattttcaatgggaaatgtacctagcaagctggttcttgcttatatatagtgataaactttgtagctgcctctttaaccaagaatttgtaaacacaactctaataaatgtgagttttaaaggattgttatttactactttggattgtaattagaacaatgcacatctgtcttccaagattttgtaaatatttttgatttttttcattaaatgtaaattttacataaaagttgtgctcttaataaacatgtaatatataattt

SEQ ID NO: 13068 - DNA, 84 bp, Homo sapiens
actatggactctagttcagttttatatgcaatggatcactattttatttaattttttttaaataaaaaatacaatagcattggc

SEQ ID NO: 13069 - DNA, 546 bp, Homo sapiens
aggctattctgatataataacacaatgctcagctcagggagcaagtgtttccgtcattgttacctgacaaccgtggtgttctatgttgtaaccttcagaagttacagcagcgcccaggcagcctgacagagatcattcaaggggggaaaggggaagtgggaggtgcaatttctcagattggtaaaaattaggctgggctggggaaattctcctccggaacagtttcaaattccctcgggtaagaaatctcctgtataaggttcaggagcaggaatttcactttttcatccaccaccctcccccttctctgtaggaaggcattggtggctcaattttaaccccagcagccaatggaaaaatcacgacttctgagactttgggagtttccacagaggtgagagtcgggtgggaaggaagcagggaagagaaagcaggcccagctggagatttcctggtggctgtccttggccccaaagcagactcactaatcccaaacaactcagctgccatctggcctctctgaggactctgggtaccttaaagact

SEQ ID NO: 13070 - DNA, 385 bp, Homo sapiens
attgagtcaacttctgaagataaaacctgaagaagttactgggagctgctattttatattatgactgctttttaagaaatttttgtttatggatctgataaaatctagatctctaatatttttaagcccaagccccttggacactgcagctcttttcagtttttgcttatacacaattcattctttgcagctaattaagccgaagaagcctgggaatcaagtttgaaacaaagattaataaagttctttgcctagtatacagttttatttttttatttcattgacaccgatctgtacacagtaaaaaaaattgcttatagaaagctaatcatggcatgtaatatggctgataacctttggaatttgattaaagatttaaaatcac

SEQ ID NO: 13071 - DNA, 1875 bp, Homo sapiens
tgtctgctaaataagacatataagaactctgaagttggaatagatttgactgtattaaatgttggcgagagactctctttgatacattaaaaaaactgtttgcagaagcagttctgtggaagagactggaataattatggccggaaaacaagtacccgttttaagtaagacatggttttccatgtaatattttgaattatagcatcttcacctagaagatctcaattgtcttagtcacagagtaggtttatctgggatggatattaattttaatacaggagtgttctgtatcaacatttgggttggtattcagatgggaattcaaatatgaatcctctctggagagggtccaactgggaatcctgctaaaggagcaaagccttgtattacctctggaagacaacaaaaacaattggcaacaacaaaaagcctctttcttgactttaatcagtgcctttgggatttctaggcccttgcttagcttgcttcctgtctccttgatatctacacttgtcttagatcacatgccctgcttcagctggtaatgggactgcatcggttccaagtgtggcaagtaagttttcggctctgaagaactgacactagctagatttgtattcagagtgtgagagcaagctctacagatagaccttattggactacttttttttttttcttcatgcagcctttctaccaagttttcaccttgtttcaggtcagaggaatgatagaatttgtcatttttcttacaacagcctttcagactattcttcatatgtttcaagctaatcttgtagctaagctacctaatcctctgaaaactgttttctctgatttgtatttagattcctccccccattattcacaatcatattgtatttcggaaccccaatgcagagcagtttgctttgaaaaatagttgtttttaaaagtttaatgtaaataattattttttagaagttttttttttttttttaaagacagggtctcgctttatcgcccaggctggagtacagtgatgcaatctcagtccactgcaacctctgccctcccgggtttaagcagttctcctgcctcagcctcctgagtagctgggattacaggtgtgccccaccacgcctggctaatttttgtagttttagtagagacggggtttcaccttaccgggctggtctaaaactcctgacctcaagtgatctacctgcctctgcctcccgaagtgcttggattacaggtgtgagccactgtgtccagcctgtaactattatttttttataaagagagattcttattttcttggctttttgatgtatctgttcctgatagataatcattggctagtaactcctagtacactggtttcacagttgctacctctcctgcttttctctaattattacgccaactcaagtagttaaaaatcagtaagaaaaatgtcttgagctagaagaacccatagaggaagattttgtaatgcgaatctcctctcataattttagttctgtaaattcagggtttttttttgtttttttgttttttttaagccgaaaaaatgcttaatatgttccagtaagggtattaagtaaaaattaaataaacgtattaagtttaacatattaaattaatttaacatttagactaacattaacatttaaattaatatgttaagtgaatatacttaatatattctagtacaggtatgcttggaaatagggcgtttccttttcatgaattgatttcgtacagcacagtggcttataaggaaccagcagtgtttttccctgagtaattatgaacttagtcaagatcagaagctgggttttggggttgagaagagttcatttatttaaataaagtttctatttaaaaaccttt

SEQ ID NO: 13072 - DNA, 111 bp, Homo sapiens
aaaatggaggggaaaaaggccacagcaatctgtactacaatcaactttattttgaaatcatgtaaaataagatattagactgttttttgaataaaatatttttattgattg

SEQ ID NO: 13073 - DNA, 238 bp, Homo sapiens
cagcaatttcatatataattattgaggactacacaccaattgaagaaactgccattactgtgatgtttctgaatactaccaaacagccatacatgtctgcaatgaagagatttattaaattgtaaacattaaagtggtccagttttataaatggtctttattttgaaatacgctttgaccccatgttcataaaactgaatgattgaaaaaaagcaaatatacaaatatcctacttcat

SEQ ID NO: 13074 - DNA, 1757 bp, Homo sapiens
atagcccgacagttctgaactggaacatgggcattgggttctaaaggactaacataaaatctgtgaattaaaaaagctcaatgcattgtcttgtggaggatgaatagatgtgatcactgagacagccacttggtttttggctctttcagagaggtctcaggttctttccatgcagactcctcagatctgaacacagtttagtgctttacatgctgtgctctttgaagagatttcaacaagaatattgtatgttaaagcatcagagatggtaatctacagctcacctctgaaggcaaatataagctgggaaaaaagttttgatgaaattcttgaagttcatggtgatcagtgcaattgaccttctccctcactcctgccagttgaaaatggatttttaaattatactgtagctgatgaaactcctgattttgtagttaatttattaagtctgggatgtagaacttcaagaagtaagagctaagttctaagttcatgtttgtaaattaatacttcatttggtgctggtctattttgattttggggggtaatcagcattattcttcagaaggggacctgttttcttcaagggaagaaacactcttattcccaaactacagaataatgtgttaaacatgctaaatagttctatcaggaaaacaaatcactgtatttatctccgcaggctatttgttcagagaggccttttgtttaaatataaatgtttaaatataaatgtttgtctggattggctataacatgtctttcagcattaggcttttaagaaacacagggttttgtattctttactaaagatatcagagctcttaatgttgcttagatgagggtgactgtcaagtacaagcaagactgggaccttagaaatcattgtagaaacacagttttgaaagaaaaataccatgtctctaagccaactttaattgcttaaaagacatttttatttagttgaaaaatctagttttttttgtaaactgtatcaaatctgtatatgttgtaataaaacttatgctagtttattggaagtgttcaagaaataaaaatcaacttgtgtactgataaaatactctagcctgggccagagaagataatgttctttaatgttgtccaggaaaccctggcttgcttgccgagcctaatgaaagggaaagtcagctttcagagccagtgaaggagccacgtgaatggccctagaactgtgcctagttcctgtggccaggaggttggtgactgaaacattcacacagggctctttgatggacccacgaacgctcttagctttctcagggggtcagcagagttattgaatcttaattttttttaatgtacaagttttgtataaataataaagaactccttattttgtattacatctaatgcttcaagtgttgctcttggaaagctgatgatgtctcttgtagaagatggactctgaaaaacattccaggaaaccatggcagcatggagagcctcttagtgattgtgtctgcattgttattgtggaagatttaccttttctgttgtacgtaaagcttaaattgcttttgttgtgactttttagccagtgactttttctgagcttttcatggaagtggcagtgaaaaatatgttgagtgttcattttagtgactgtaattaatatcttgctggattaatgttttgtacaattactaaattgtatacattttgttatagaatacttttttctagtttcagtaaataatgaaaaggaagttaatacc

SEQ ID NO: 13075 - DNA, 1290 bp, Homo sapiens
acattgaacattttatcattaatttttaattgaaactagttattttataatcaatgaatttgttctttctgattttaagtttgcagatttatttagtgaaggcaagtgcaataatccttcctcagatgatgtttgcttttctaagatacatatactgattctgtgtatcttttttataaccatgagaattttacttccattatacatcaattggaaatcaatcctgttaagagataattcttaaaagggaaattaggaatgggataagaaggtgatttttttattatttttatactgaatataaaaacatttgtaagggctctcaaagattcacacatgcctatattatcataagaatttttcagcacttaactactttgttggcattgatcctagtgtctttaaatacttcatgagcattcataattaaaatttatcttaagttctatgaagagtattaatgtaactagcataagtggttttcttcaggaaaataaatatcacagtattatctgtgttaaaatggtttttgcctaaaatataatttttaatttggcttttcttatttaaaattccattatcttatgaataagcacttgaatcagtttttaaaatatttagtctaagatgattcaaagtagttttattttaatacaggacttttaaatggcagtatttcatttcttgtcaattatgttggtactttccacaaatctataaagaaggataaattgtaccatcattttattataatcctcaagagaaaatgtgtaattcaaaagattaatgtgtattaaaacacattatgtatcttagttacatttctatcagtacttttattaatatttgtgaaagaagacagcttaatagtagttagcttaagtagtttctccaagtacttttgtgctatcaatgagttcttctcaaaaaataattagttaggccaggcacaatggctcacacctgtaatgccagccctttgggaggccgaatgggcagatcacttgaggtcaggagtttgagaccagcctcgccaacatggtgagaccctgtctctactaaaacgataaaaaaaaaaaaaaaattagccaggcttggtggcacacgcctgtaatcccagctactcagatggctgaggcaggagaactacttgaacctgggaggtcaaagctgcagtcagccaagatcttgccactgtactccagcctgaagagcgagactctgtctcaataatataataatagttattatttaattgcaacatgaagttggaagccattttctgttact

SEQ ID NO: 13076 - DNA, 44 bp, Homo sapiens
tgggaaaaaaagccatccttcctgcgtttcttcctcctgccctg

SEQ ID NO: 13077 - DNA, 817 bp, Homo sapiens
agtgcctacagaaatttcttggattctgtatcatctggattaggaaatgaatttgtttaatatttttgtttttaaacatgattgaaatcactgcttataaatgtgtgatttttttaaaacgaccaaaactgttctgaagaatgtacccaggtgcctttttgctaatttgatactataatagaatgagacataaaatgaattaatggaaacatatccacactgtactgtgatataggtactctgatttaaaactttggacatcctgtgatctgttttaaagttggggggtgggaaatttagctgactagggacaaacatgtaaacctattttcctatgaaaaaaattttaaatgtcccacttgaataacgtaattcttcatagtttttttaatctatggataaatggaaacctaattatttgtaatgaattatttagacagttctaagccctgtcttctgggagttatcaattttaaagagaacttttgtgcaattcaaatgaagtttttataagtaattgaaaatgacaacacaataacactttctgtataaaagtatatattttatgtgatttattcctactaaatgaaagtgcactactgcctcatgtaaagactcttgcacgcagagcctttaagtgactaaggaacaacatagatagtgagcatagtccccacctccacccctcacaatttatttgaatacttcaattgtgcctctcaattttttgtaatgctaaaaaatcagtatctagatggtttttaaatgtattctctggaaattgttttatgtaaaataaatgttacttaattccatt

SEQ ID NO: 13078 - DNA, 1970 bp, Homo sapiens
gaaaagggactgctgggaggttaaaaagaaaagtttataaaagtgaataacctgaggattctattagtccccacccaaactttattgattcacctcctaaaacaacagatgtacgacttgcatacctgctttttatgggagctgtcaagcatgtatttttgtcaattaccagaaagataacaggacgagatgacggtgttattccaagggaatattgccaatgctacagtaataaatgaatgtcacttctggatatagctaggtgacatatacatacttacatgtgtgtatatgtagatgtatgcacacacatatattatttgcagtgcagtatagaataggcactttaaaacactctttccccgcaccccagcaattatgaaaataatctctgattccctgatttaatatgcaaagtctaggttggtagagtttagccctgaacatttcatggtgttcatcaacagtgagagactccatagtttgggcttgtaccacttttgcaaataagtgtattttgaaattgtttgacggcaaggtttaagttattaagaggtaagacttagtactatctgtgcgtagaagttctagtgttttcaattttaaacatatccaagtttgaattcctaaaattatggaaacagatgaaaagcctctgttttgatatgggtagtattttttacattttacacactgtacacataagccaaaactgagcataagtcctctagtgaatgtaggctggctttcagagtaggctattcctgagagctgcatgtgtccgcccccgatggaggactccaggcagcagacacatgccagggccatgtcagacacagattggccagaaaccttcctgctgagcctcacagcagtgagactggggccactacatttgctccatcctcctgggattggctgtgaactgatcatgtttatgagaaactggcaaagcagaatgtgatatcctaggaggtaatgaccatgaaagacttctctacccatcttaaaaacaacgaaagaaggcatggacttctggatgcccatccactgggtgtaaacacatctagtagttgttctgaaatgtcagttctgatatggaagcacccattatgcgctgtggccactccaataggtgctgagtgtacagagtggaataagacagagacctgccctcaagagcaaagtagatcatgcatagagtgtgatgtatgtgtaataaatatgtttcacacaaacaaggcctgtcagctaaagaagtttgaacatttgggttactatttcttgtggttataacttaatgaaaacaatgcagtacaggacatatattttttaaaataagtctgatttaattgggcactatttatttacaaatgttttgctcaatagattgctcaaatcaggttttcttttaagaatcaatcatgtcagtctgcttagaaataacagaagaaaatagaattgacattgaaatctaggaaaattattctataatttccatttacttaagacttaatgagactttaaaagcattttttaacctcctaagtatcaagtatagaaaatcttcatggaattcacaaagtaatttggaaattaggttgaaacatatctcttatcttacgaaaaaatggtagcattttaaacaaaatagaaagttgcaaggcaaatgtttatttaaaagagcaggccaggcgcggtggctcacgcctgtaatcccagcactttgggaggctgaggcgggtggatcacgaggtcaggagatcgagaccatcctggctaacacggtgaaacccgtctctactaaaaatgcaaaaaaaattagccgggcgtggtggcaggcacctgtagtcccagctactcgggaggctgaggcaggagactggcgtgaacccaggaggcggaccttgtagtgagccgagatcgcgccactgtgctccagcctgggcaacagagcaagactccatctc

SEQ ID NO: 13079 - DNA, 1513 bp, Homo sapiens
gttttccaggtcctcagatgggaattgcacagtaggatgtggaacctgtttaatgttatgaggacgtgtctgttatttcctaatcaaaaaggtctcaccacataccatgtggatgcagcacctctcaggattgctaggagctcccctgtttgcatgagaaaagtagtcccccaaattaacatcagtgtctgtttcagaatctctctactcagatgaccccagaaactgaaccaacagaagcagacttttcagaagatggtgaagacagaaacccagtaacttgcaaaaagtagacttggtgtgaagactcacttctcagctgaaattatatatatacacatatatatattttacatctgggatcatgatagacttgttagggcttcaaggccctcagagatgatcagtccaactgaacgaccttacaaatgaggaaaccaagataaatgagctgccagaatcaggtttccaatcaacagcagtgagttgggattggacagtagaatttcaatgtccagtgagtgaggttcttgtaccacttcatcaaaatcatggatcttggctgggtgcggtgcctcatgcctgtaatcctagcactttgggaggctgaggcaggcaatcacttgaggtcaggagttcgagaccagcctggccatcatggcgaaacctcatctctactaaaaatacaaaagttaaccaggtgtgtggtgcacgtttgtaatcccagttactcaggaggctgaggcacaagaattgagtatcactttaactcaggaggcagaggttgcagtgagccgagattgcaccactgcactccagcttgggtgataaaataaaataaaatagtcgtgaatcttgttcaaaatgcagattcctcagattcaataatgagagctcagactgggaacagggcccaggaatctgtgtggtacaaacctgcatggtgtttatgcacacagagatttgagaaccattgttctgaatgctgcttccatttgacaaagtgccgtgataatttttgaaaagagaagcaaacaatggtgtctcttttatgttcagcttataatgaaatctgtttgttgacttattaggactttgaattatttctttattaaccctctgagtttttgtatgtattattattaaagaaaaatgcaatcaggattttaaacatgtaaatacaaattttgtataacttttgatgacttcagtgaaattttcaggtagtctgagtaatagattgttttgccacttagaatagcatttgccacttagtattttaaaaaataattgttggagtatttattgtcagttttgttcacttgttatctaatacaaaattataaagccttcagagggtttggaccacatctctttggaaaatagtttgcaacatatttaagagatacttgatgccaaaatgactttatacaacgattgtatttgtgacttttaaaaataattattttattgtgtaattgatttataaataacaaaattttttttacaactt

SEQ ID NO: 13080 - DNA, 515 bp, Homo sapiens
gaagttcgtgaatgctaatcaagggctaaataaagtggaaagcagcatccttgaaaatcatcgctctcaggacggggtctgcctggaatagcactgaatgtgtttagtagtgcctttggcttgggggctttggagaaagctgcttgagcccttcccatgctcataaattaggtaaggagcagtgaggaagtgtctacagcaacctcagccaatgtgatgtgcctctacagctgtatgaagtagattctctgattttatcttgaaatccacaacttccacaaaaaagaaaaatcttttaccatttctcattaaaaaagtaatataagtttattgtagggggaaataatcaaatgtaatctcattacccagatataatcactgttaacttcttcattcgaattttccctaggtccatgtatctatatatctatggttcataaaaatgagattacaccaaaaaatatcttttgttatctatatagttccagcttaataaatatacaactgtattatta

SEQ ID NO: 13081 - DNA, 588 bp, Homo sapiens
ataaccaacccagtgatttacatgctgatagctaagtgagtttttaatggccattgtgtatgattttgatgcacaactagttaaaagcctttcataccagtcagtattcccagccttgagcgcacgcgcgcacacacacacacacatacacacacgcattaatttttgtactttgcttcttttatgtttgtaatctgtaaatgaacacatggcagaaaataacccctgattggtaggatcatagttctaaatggaaatgtttgtaattctttgatgtgctacaaacctgaaactggtaagacaagcacaaagcaacgtgcaatacaaaaatcgtatctcaagggaaaatactcaaagaaagaaaagtggcagcacttatattagttttataacaggataaagtcttgtgtatagcaaagtagttgcatctgtttattttctatttattattgttacaataggtaatagttatagcaattatttattgatttgtaacaacttgtttttaaccaaactttgtagcatggaaaaaattttccatccacaaatacaaacatgaataaatacattcagaatgttggcaccatg

SEQ ID NO: 13082 - DNA, 1958 bp, Homo sapiens
aggctaatcatagaaaaaaaacctctagtttttttaaaaatagaatttggaaacttattttttctccccaaaagaatcagcagcacaggggaactatgtcacagtttacctcttcctgattcagaaatgtgtatggtttgcagcttttaaaaaccatttttttaaaactaataaatagtgactgaaccaatttatgcagtaaatagactaaagttcacagggcacggatgagtttatcaaacttcgttattttatcttgtcatttacaacatccatataagcaactagccatataagcaaaattcatagaactactaatgacttaagtgtacatctgttcttgtctccatatattcatgtaagatgcacaacaaaagaaacatcagaagtttataaaaataaatctgactatatgcatcctcatttattccctttagaacctaggtaaaaaatgttgcgaaaacatgggtagtggcgcatacattttgttatccttgaaatagcctaagtaatgttattgaagaactaatgaacaggtaacatattgtagaaaattagtctttcattgttttcttctgtgaagaatctgttgctatgtactgtatattcagcatttatatttggtttgtttcatagctaatgaggtatttagatatgaacaactgaatacatattgaaatagtgtgctggcttttgtagttttgataaagaccattgcaggcaatggaattgtgccagagaaatctgatttctagtacaaaaggaatacttagccagggcctcaagctcaagatacttattgaaaacatcctcaattgcaataaaaacattataacatgaaaaagagtgattttttgaaccggtgatttaaatgtattgatctgctttgaattttcaagcagccagaattttctagtttaaattggcagagttataacaaaggagagcctcaaatattagacaattgcagtgcggctttctgggcacaggtgtcactgctctgccacctatcactattctttttctgttcagtttttctctcaggtgtttgctgggaaattaacactggaactgacccttttctggcagtgaatgtaagctctagctcccccatctactataaagaaatgtcttcgagatgtagaaataaggaatattctgaaaataaaaattatacagtagtaaagataattcagaaagaaaaagctacctgttagaatttccagtctaaatggcacagggtagttacggagaaaaggggatggagaaggagaaactatgactaaagatgagaggtatgaacgagttgtcaggttcctatgggcttaagctaggacaatcaggccctaaactccaaatttggataaaatatctctttgcattcttcttggccacctgcatagtctgacacatacgtatgtacagttagacttgcaggctgcaggagtgccctgcattgttttcttttaattagaaataaaaagtattagtctaaatgtggttctggtgctggtgccctgtatatatgtaacaatataggacccctccaaataggttttgcttctggtgaatcttggtcattgggttagtatatgactgtctataatattttccatttgtattattatattggggaaaacattttttatcattttctattaagaaaatggaaaacttaaatatggtgttaaaaatggaaatatatgtgatatttgcattattaaacccctttgcagatctaaagtctcagggttccactattagtggttaaagtactgaataatgtctgggtctatttccatctgtaaaataagaatatttgtctcacgtgtctgtcatgaatagcaaatgagaaaatgtatataaaagcactttgtaaattgtaaaagtagtacagatgtgagcttctatttgtttagaagcataaatgtgaattatatacagtttgaattttgcat

SEQ ID NO: 13083 - DNA, 847 bp, Homo sapiens
agccaagccacagagggggcctcttgaccgacaaaggacactgtgaatcacagtagcgtaaacgagaggccttcctttctaatgacaatgacaggtattggtgaaggagctaatgtttaatatttgaccttgaatcattcaagtccccaaatttcattcttagaaagttatgttccatgaagaaaaatatatgttcttttgaatacttaatgacagaacaaatacttggcaaactcctttgctctgctgtcatcctgtgtacccttgtcaatccatggagctggttcactgtaactagcaggccacaggaagcaaagccttggtgcctgtgagctcatctcccaggatggtgactaagtagcttagctagtgatcagctcatcctttaccataaaagtcatcattgctgtttagcttgactgttttcctcaagaacatcgatctgaaggattcataaggagcttatctgaacagatttatctaagaaaaaaaaaaaacgacataaaataagtgaaacaactaggaccaaattacagataaactagttagcttcacagcctctatggctacatggttcttctggccgatggtatgacacctaagttagaacacagccttggctggtgggtgccctctctagactggtatcagcagcctgtgtaacccctttcctgtaaaaggggttcatcttaacaaagtcatccatgatgagggaaaaagtggcatttcatttttggggaatccatgagcttcctttatttctggctcacagaggcagccacgaggcactacaccaagtattatataaaagccattaaatttgaatgcccttggacaagcttttctt

SEQ ID NO: 13084 - DNA, 5070 bp, Homo sapiens
gaatcttcaaacaatacactgttaccttttgactgtacctttttctccagttactgtattctacaaatatttttatgttcaaaacacacagtacagacagcatggatatttcctgttcacttgtgcatgggctaaaaccaggaaaacttccttgtcttattactttacctaatagtttcttaatatttcagtgccccttgcagaaaaaatattacatgctaaataaatattctccatatttttgggggatgacattcagtgaattatttcagtggtgacccactgaaaattaataatggtacttatgattaaaaacgcatttaatactaactgcagtagttctttcaagaatctttagagataaggattgcacattggaaaagtaaaccatgtttcattcctttttccctatttatattgaaagaaataggccagcagagacttagggattttaaattggcttgctttttagctgtttcagtcaccagtgaagagcctatgtgcattttgtagtagataatgtaaaatttgtcatctttttcttttcttttttttagaatagctgatattttgataacaatctctaatttgcatgggcaccacatttcttatattaaaagaattagtgttttggcttctgtactgcttatggttgtaggattcaggggttaatggaatcacagaaatgatattctgcaagaatttcttttaaataaaaagtttgggggtgcaatataagaagtttatataatatgcagtacattatccaaaagagaaggtagttaatgcagtagaaagtagtggtaataattcctttttaaaaaaatttcggtagtcatatagtaacattttgctatatgaaaactttggtatattctgtggttacaactaagattgtgtctggcagctcttttttggggatgtgtgtgtgtgatttttaacagaggtattaaaggctagcctaactgttgtctaaaaagattgtacagtatttaagggattttccttttagcttttcatctccagtggcattaaacataaaaagaccctggcattttttcacatacttgaatccctaaatgcacctgtctttcactttttgagacagactgaatatatctaaaatttccagcaataaaaaaaaaagcatttaacttgcaccaagcaagaaaatataaatacagttaactgcattaagataatcacgttaaaattgttactatgcagcacagaacttcattcttatagtattcttgggttcaacctttgaatcaattttaccactgattaaataaatgactcaaagacatctgtaagtcatgctgctgtgttttgaaagtctttaactaaattaagattgcagaatgatagtgattattcaattagattttaagtaaggattgtgatattagaggctggaaatccttattttttaaaaaatcagataggcataaatagttaaatcactttcattctccccaaacctgtagttacagaaaaagttttatgctagaggtgggatgccaagttttcactatccatgaagcagcgctgcatgtcactaggtaacacagatccatccagatggtgtttacatttgatttatttgggatcttattgacatcaggtatacttggaagacatttcttttattcttcagcgtatgaatttaaagctattttttgtaaatatttctaatcagcgataatttctacctatgttctcaaccaacttagccagtttgtttttcagagcctgtagtcttattggaaatctattttatcagtgtgctttattgagtgtggattttgcatacattcaaaacattaaccacaaaatacagcaagtgcacctatattcaccattaacttatatcccaagtccattttttcctgtacactacaaacaaaagatatattagagacttttgaaaaatgctgaaatactttgcttcagaattggaatgtttatattatgtagaaatcttcaaaggtagcattattaaatagcaaagaataattagaacccacatatctttttttgtgtggatggggaaaatgttttaaaatccagttatttaatatgagtttgagagagaaaattgttttttaaaaatatatgtgcattgaaatgatggcaatgcttatagtatgatcaagtatgaaaggaactttaaattcttatatttacttttctctcagtaaattgttaaattttcactcagcaaaagattggcatttgttaagtgttctatatttagtactaaaatcacagtcatgaaatcatagtcataaaatggtcttcacacagcagtcatccgtgtcatttatcattttgtaatattaaattatggcaattttatttcaaactaaagtttgaacaccggaaagtcattactcagtgatttgtaatttgggacttggattatttatctagagatgtttgtatattttgtcagtaactaatactgcgctgccatcatggtgactgtcatggttctacagaaatgccctccatgtgtccctctaatgttgcatgtttcagtgggttggaagttttgtatatttattgtattaacacagagtgtcataaaataaaatgctgtttactggatgtttgtttgtataattttgaacactataatagcaattcagagacagacattgttaaaggtttgatgtatatagaaattccatgtttgattttttaaaatatgtgtataagtctgtcatgtgctaaacaaaataatatgaaagacctagttaaaaattctaaccaatgtaaaatgaccatttttctgttgcattagacctttacaggtaatggaacatgagcttcacccatattaaatattttggcccctttaaggtcaaaatacagatcatctagaagttagattcaaaatggaaaacctattcatggctcagatttttcattgtgggttaaaaatgggtgtctctgtactagtattgtatttattcaattgaacttgtattctgatttctatccttgctacctattgctgttttatgtactgatgaaagtacctatttgtgtatattggatttttcacttggttagctaaagaagatgtaaaaatatctaaaataatgttcatggtgaatcttattttgagaaatacatgttaaaaaaggaacagtattctttattttctgggtgttatatttaaaaaagcaagtttggatttttacacctaatttactaggaaaatattttattctgtaattcatgttaagattatgtatggtttgcattttaaggggatttatgttaggttaattagttgtttctgtaaatcatttgtaatagcatagtgctttttactcattgctgtatctttttctgaaaacactgttgttaacatctaattcagtatccttattggtacaaatctgtgtttggcatgactgtttatatacagaatttgttacattttgagcattttttcccctgcttatgtataccttagagttaccatggctgtcatataccatttcactatatctcctttcagtttttccttaaggaaaatgtttagaggaatttgttcatttcatgtgattaagccctttagagatgaaataagattggttaattttaaaaaaattgaggatggttaaaaaatagaaaacaccttactttgatacattttaaagtacaatagtatacatttatttagagtagactaatgtgtttaaaacatgagttgttttaaatacttttttattgagctaaaaagttttatctcacatattaagtattacagaaagtgaagtattttggctagaattttagggcatattttataaagcagcatgcctgtaatattggtgggtatttttaaactttaggactttatcacagtatgtagagagctagaaataaatctagaaactttctaagccaggtattgccactaacctgtcttatataagcagatacctcttatttgaagattgtaggaaaatagagaaagactgttctccagttttctcacccccgctgtgggttttatatttacaatttaactttggggtttgggtaagacaaacatttaatgtataggattttggccaggtgtggtggctcacgcctgtaatcccagcactttgggaggccaaggtgggcggatcacgaggtcaggagatcgaaaccatcctggctaacatggtgaaaccccatctctactaaaaatacaaaaaaaaaattagctgagcatggtggcgggcgcctgtagtcccagctacttgggaggctgaggcaggagaatgacgtgaacctgggaggcggagcttgcagtgagccgagatctctccactgcactccagcctgggcgacagagcgagactccatctcaagaaaaaaaaaaaagaattttcattagtgctggccgtgtttcaaatggcaagggaacatgggaactatcatgtggcaatgtagtgagtgttaaactttgtgtttgtccaaatcctgatttatttttcagttcatatctttctgggcttgacatggctgatggtgtagctgaaaccctcctaacactaaaagccatttaatcttttctgtaataggagcagaaaatagttaatcatccacctagtaatataagattactgtgaatattatcttctatacattaaaacagttctagtttgtagaataataccatacaagttttatttttaaattctagttattttcagtgcttacttaaatgtaattctagaattcctccacaacttttaatattttgtatgccagtgattctcaagataaatcatgattgtagtagttgttactgttggcagtttgtagtagtattcaggtattttggggatgggggaaaacaccaaaaatcagtgtcttttatctggtgatcactgtggtatctacagtattctagtctcctgcacaaaaactgaacccactgggcctatgcatccctcacactttttttctagtataaaagcaatacataatgtgttgtagaacaattaaaaattcagaaagtgatacatgagaaaataaaaataaatccttaattctgtc

SEQ ID NO: 13085 - DNA, 876 bp, Homo sapiens
ggagtagtgaaagaaaaccctgaaataatcgaacaggaaaaagttgccctcaagcctgacctggaaccgttcctcaccttcatcctcaccatgccctgctatctccagctgctgagcagctgaggtgctgcagccccttcccttccagcccacaagtgtgtgcatattgagctcctgctgtggttaagcactgcaacagactctaccagagatgcaaagagaagcgagagaggcaccttgttctccaagaacttactgtccaatcatgctgtggtgcattcctttgaagatcatgaagaatagccaaacttgtctttgagggtgaatttgacactttaaaataatcagaagtcactgagacccaaagctagtgaataattcaagtgactaagctagatacttgaggatgatagagcaacactaaactaaagcaatgagtctgctttttttaatgatttatacaatgactccaaaggcaatcccaaagaaaagatgtaaagaatgttttgagcaatggtagcattattgaaataaatgtttaactatccaaagtgattactttcaaagatgatttttacttaaagatattaggtctggccaggcgaagtgactcacacctgcaatcccagcactttgggaggccgaggcgggcggatcacctgaggtcagcagttcaagaccagcctgaccaacatggtgaaaccctgtctctaccaaaatacaaaaattagccgggcatgatggcgggtgcctgtaatcccagctactcgggaggctgaggcaggagaatcgcttgaacccaggaggcggagcttgcagtgagccgagatcaggccattgcacttcagcctgggtgacagagtgagactccatctc

SEQ ID NO: 13086 - DNA, 1168 bp, Homo sapiens
cctcgatagaagctatttttgatgaatttctaggtgtttgggtcacagttcctacaaatacggaaaagggggttaaaaagcagtgctttcatgaatgccatcctacacatattattgctattacctgaacaaaatagaattacaaatagcacttgataattttaaagtatgttttagaaattttcttaggagcaaaataagtacaaagtaaatcttgaacaggttcactaagcacccaccctgtgaaaagtattatggaaatcactgctgcacaggaaaagtaattcagatgttaatgccacttgaagaagttggtaggctagcaaagaggatgagacatgaactgtcataaaggactcagcaaccagccagggacagataaagcgctatggaaaggggcttccaagttcttttgaacatgacccttagtaacaaacacaatttatataatgacccagcaaaacacatcacatcttactgtcgaaattaaatgtgtgatccatcctagtattttctgttccattccttttcattctatttcatttataaaacatgctagttgagacttttcaaatggatttttatgacccactactgggtttggatccacagtttgaaaaatattgctacaagacacttaaggagaccatcctgtttaagtttattcttataagtaggtcagtcatatgagacctgatcaataaatatccaatacccagagtcctgctctcagagttcttctgtttcgtgacccacttttctaccagtaaaagacatagaccaatggggaggaggggaggagagatggatatttcagccctctccatcctagtcaacactggatccacctagtgcctctgggccataaggctgagcagagtgagcttgtattagttggtagcttttaaaaaatataataagaaaaaagtagagattctccaaactctagcctggtttcctagattgagaactatgatatttttctctgataatttaatatctactctcctacaaaagctcaagcctgaagatacaagactattagaagaaacatgactaccctcagtgtattagaaaagaggtcatgcagctttctaaacattattgaattgtttgagctgttttgaaattgtaattcttttcagctattaaaaagaagagcaatgag

SEQ ID NO: 13087 - DNA, 520 bp, Homo sapiens
gtgacataacagaagaaaaatatcattcaagattggttctgattcttttggaaaatgacagtttaagcacttggttcctcagttggataacattagatccaaagttcattggttcagtggtgtgaagaaaggaagcacaattggcaggttatcactttccagtcgttccaatagatgatggttaacatgaattttacatgtgcaatgttcctgactgcaatgaagaaaaggccttctggagatttctgttttttaagcacattctccttccatccacatatttacatccttgtaatggccagttaagctagggcttgctgtaagttggaagaacactgggttgacagagatctactgtgagctgtattgggactgctttgagaaccatctttcaatgcactgaaaagtcatctgaaaaaatagcttcttccatatcagcttatattaaatactgtgacactctgagaaagtttatcatcatgatagctgtaagtcaggcattaaaatcaaatggaaatac

SEQ ID NO: 13088 - DNA, 1006 bp, Homo sapiens
ctggcctctatttcttaataaattcttccaagaaataaagaacaatagtttcatcataatacattatgtttacctccatcatagttgcttttttcatagttcttgttttcatgttttatttttaaaaagacatataaagattgcatattttattatgacatttcctaataaacccctttgatttaaaaatgtatttttaaaaatgtttacattgatgatgagtaatattgcatgtgttttcaggtgatcagataaaatatattttgggaaattaactgaacaaataaaaagtttttgatataacttcaattaattgtaccacatgctaatcctgaagagatgtgtagaattttggaaagggtctaattcatacatgcttaaagtataacctacgttagatagtttgttgtcaaagtctgttctagtaaagtgaagattcaagtcagttgttcagttacttgaagcaaaacgaaatctttcatttcagtcaaatcactgcagtcatgaaatactgaacaattgccttaagtctttgcttgactcactgggatagactgaggctttgggtgtgtctgtattagcatttcattagtacttcacatgcttttgatgtactcttgagattgctttaaattttgtattgaaacaacaatacattttgcactgtagtaatgggagcactaactcttacaacagttagtgaatcgttttaaagaatcagttcagtgtagacattttgaaaagattgtttcctgtgctttacgatagcttagtgcaatgtgcacttctgttttacttgccattttcctgctctgttttctctgtgacatgaagcaacagaaactgagatcaaagttaagattatatcctgtttgtagtatcagatatttttctgtgtacaattataggattgtaatctaaactggaatttttaggcagtaagtcaccacaaaatgttttagataagacacaataaaattattataaataaaagcttaatgtttgt

SEQ ID NO: 13089 - DNA, 609 bp, Homo sapiens
tccttggctttcagaatttgcaagaacagcgatttgaattttgggggggtctgctgttcattcctttaggtgctatacattattcaaaaagtctcccgcgcatttgcactaatgatggctgcatgcatagcaatcagcatgtgagcaaaatcgacaagaaaaccttgactttacagagcagtgtgtgagtaaacagaatgaaaacaacaacctccactctttagtttatataagtttgagttctttcctaaattaaaagatctacacttgagttgggaaccgaaagagaaaaatggacttccatctgttttactggtaaaggaaatcctctgatggacaggtcagagtgaaggaaggttgtgctggtaagacatctctgacgaagagccatggatgctttccacaaaatgtcacctcgctgcactaaaggatgatgaatcctaatcattaaaggaattgtttcagctgatttaaatttataatgaactcttttgtaataatgtatactgtagaacatgagtctctcctccctaaaattttaaatgtagaaatgtgctatatattagaaatttccattttgttaaataaatggttagagtctataaagcc

SEQ ID NO: 13090 - DNA, 141 bp, Homo sapiens
accaaggaagcaatctgtaactgcttttcggaacactaaaaccatatatattttaacttcaattttctttagcttttaccaacccaaatatatcaaaacgttttatgtgaatgtggcaataaaggagaagagatcattttt

SEQ ID NO: 13091 - DNA, 331 bp, Homo sapiens
aaaataccaaaagcagatgaaaaggtgaatccttaaaaaactacatctgttacctccaacttgtcagtcatgatcaatcatcaaaccttgggcagatctgctggttcaaccaagaaagagctatagaataaggagattgacacttatattactcattacttcagcagttatgtaagtctggtctttaatgaccattgtgtctacatcaagttcataacttttcacctttacaatctgcttgttttttttgtaattattagatagacagcctagagtgagaagttaaaggtccaattaagtaaagatctaaataaaaaccagaatacaaggg

SEQ ID NO: 13092 - DNA, 1524 bp, Homo sapiens
tgaaagaatgtgccatattacatattgcaacctaatttgttaaaactaactccagcactaaagctgaaatgccacaaacactaaaagtataaatatgtctgatttttgaaacacataagctttgctctttaggcaggaatgatcttttcaaatcattagcacaatatttaaatatctaaaaatttaagagatccatactttctgtagctttacaattaatttaagtactaaaaagacaaggatttcttttaagaaatttatagcatttactgtgttatttaaatgctaagccaaagtatctgcacttaggtatacctctttatgccaataatgattttaatgaaggctcttttcagatgtaaccttatgaaggaaatatctgctttgtgtatatgccagttagaatactggtttctaaagtctgtcaaattgtatttcagtggcacaaaaaccagttttgaggtcttagacttataattctttgaataaaactgataacttatttgtataattggagtggagacctacctccataattagataaactctttttggattataatcagaattttgccttttttcttctcaaattattacatatgtatgtattatatatccacatatatagttttccctgattaaatggatattaaaataattgcgggtgcttcaggactttttgcttctatatttaagtatattgtttttatagcaagaacatattctgaatgttttataaatctttaataatttatatgtaggtaatatttttgtatcacaatgcattatttttttcctcctttccttccaaactataccactgtatttaccacttctaagagtgactgacgacgggccagatgacccttgaagtagtcattatgtagcaataaatgaagcctgaaacaggtttttttacttccactttaatccttagaaatttcttggcaacttcgcatattttcattgacaccagtgtataagtataaatttaaatgaactaattacttttgcatattttaaattctttatatggtagttattttttataacaggatattaacataagttaaatcctatgtatttgaaattgttacagagctttcctctttacttcaaacagcaaaaaagtggggggcatattgtagtcctgtcatttaagttatgtaaaaaatttaatcattattttgatgctttaaacattctcatgtgtaatatatgtttttgtatcaaaaacactcatatatttcaagaaaaagaaattatgttaaatagccctgttttaagaaaaatatttatgaagcatctcaacttgaagatcaagtcaaagttataactcaggatctgaggtctcaagctaggagagactgagaattttaatcagtttgggcatatagtttggactgaatcacatctgtagtacttagccaaagacaatttggaggagaatatcagccttctggaagtagctacttcctgaacaatgtaaagtgtcgcagatattcaataaaatggcaacctgtt

SEQ ID NO: 13093 - DNA, 555 bp, Homo sapiens
gaagaagattctcaattatttcctgtgttttggtttcataatccttctctccattggtctgaattaattaccatataaattatggttattgattgacgttccaagtcatctaatcaagaaacgtttattgtatgcttactctgtgggcatatgtccttataatagtgcacttacataaaagatttggaaagaagagatttatttacacacgtggcctagtctaataataattcaggaaaatgatactctgcaccccttcataaaaatagttttgataaactaaagatgattggcagaatccatatgtcataaaacaggtataaatcacatgtgcttggcacttgcattacagagattatgaaaaatatggtactcttttcctttttcctagaaaactggttattttagagataacaaaaaaggaagagggcttttaaaatgtttttaattttcacaggggtcagcagctgtctcatatcaagatctattaatccatttcctgaaactgtagattaaattagatagatctagaatttccatgtgattgagaagcat

SEQ ID NO: 13094 - DNA, 952 bp, Homo sapiens
aatgaagactacatttgtgaacaaaaaatggagaattaaaaataccaactgtacaaaataactctccagtaacagcctatctttgtgtgacatgtgagcataaaattatgaccatggtatattcctattggaaacagagaggtttttctgaagacagtctttttcaagtttctgtcttcctaacttttctacgtataaacactcttgaatagacttccactttgtaattagaaaattttatggacagtaagtccagtaaagccttaagtggcagaatataattcccaagcttttggagggtgatataaaaatttacttgatatttttatttgtttcagttcagataattggcaactgggtgaatctggcaggaatctatccattgaactaaaataattttattatgcaaccagtttatccaccaagaacataagaattttttataagtagaaagaattggccaggcatggtggctcatgcctgtaatcccagcactttgggaggccaaggtaggcagatcacctgaggtcaggagttcaagaccagcctggccaacatggcaaaaccccatctttactaaaaatataaagtacatctctactaaaaatacgaaaaaattagctgggcatggtggcgcacacctgtagtcccagctactccggaggctgaggcaggagaatctcttgaacctgggaggcggaggttgcaatgagccgagatcacgtcactgcactccagcttgggcaacagagcaagactccatctcaaaaaaaaaaaaagaaaaaagaaaagaaatagaattatcaagcttttaaaaactagagcacagaaggaataaggtcatgaaatttaaaaggttaaatattgtcataggattaagcagtttaaagattgttggatgaaattatttgtcattcattcaagtaataaatatttaatgaatacttgctat

SEQ ID NO: 13095 - DNA, 364 bp, Homo sapiens
agatctggccttgcccctgagtccacgggatgttcatggaaagcaggacagacagaattgtgtatgccttgcctatcacggtacagcacgaagccaggctcctttctccaccaaagaagatggaaccagactggaattctgtctccagagagaaacccagctgtttgggtcaaagacagatgcttcagacttgggtgggaaggtgaaagatggctatttagaaagctggtggcacgttttacataagggaatgtcagatgggagatgctagttgccattttaacaaagcaggtaaatcggtaaattttaaactctgtccatgttctgttagaactcagggacaaggatccatgaaaaagacctg

SEQ ID NO: 13096 - DNA, 140 bp, Homo sapiens
actttccctttcccaatttataaataatctgtctgctggtacgacagacataaatctctactctgagagtttttatacacttggaaaaatataaaattgtagatcctgcctatctttacaataaaactctccttaatata

SEQ ID NO: 13097 - DNA, 634 bp, Homo sapiens
taacagctagcactatcatgagttactacctcattgttactttctaaaccaggcccgcttcacgagttagagttgagctcccctgtagccaggactatgctgtagatatcagtatgatctgggtgtggccaaaaacaattttctttattctgtctatcaaatagtacttctaccactgtttggagaaaattgaagaaaagaataagatgattaaatgaattctctaaaagaacatattttaagagacagaacttagacataaccaagtagttgtatacctgattgtaacaatcatcttttataaaagcaaaattatgcataaatgtaaaacacccctaaacaaagggaacaaatgaatttttggttatattgttttcttggctcaaagtatcaatttattattataatagaaatttataagttgctagaaagtctatatttttaaagtacggaataaaaatatgttttctattaagcaatagaaatatttttgtgtataatttttctgaatacttgattctcgattgaaatatccattgttcgttaatatccatgtaacaatcccattggaaacaagattttttttgaatcctagatgagaataaacagggatttggtttttgttttagttttg

SEQ ID NO: 13098 - DNA, 882 bp, Homo sapiens
attcttctattgagtttaggaattgcggcacgaagaatgccaagagtttacctggccagccctggctttaataggactgataccatggaatatttcatctcaccaagatgtgacatggattatttttcccttggacacaaatgtctacagcaactggtgtttgataggctgaatgtttagaagaaacacttcaaagggatacatcatggccaggcatggtggctcacacctgtaatccaagcactttgggaggccaaggtgggagcatcacttgatcctgggagttcgagaccagcctgggcaacatggtgaaaccctgtcggtacaaaaaaatacaaaaatttgcctgtttatggtggtgtgttcctgtagtcccagctccccaggaggctgaggtgggaggttggctttaacccaggaggcagaggttgcagtgagctgagactgtgccactgcagtccagcctgggtgacagagccagacactgtctcggggaaaaaaaaaaaaaaaaaaagacacatcactataaatagcaaaaaaacaaatctaacttattaatactaggaataccaacattattagggcacttgcaggttattcttttctaggccaagtacttcacttccatttgtctgacatggagattgagggagaaatgtatttgtgtgttcattttaatgtaagatatataaaaattaaattactggatttacctgtccctgaaactggtgttataaacatgacctatcttaagtgattttcccacaatcaaactcaggaacaatagattatttctgttttactccaaaagagagagagagagtgagtgtgagtgtgtgtgtgtgtgtgtgtgtatgtgtgggtgtttgtgtagatagttgt

SEQ ID NO: 13099 - DNA, 27 bp, Homo sapiens
cagcacaggctggcccccaccatgtcc

SEQ ID NO: 13100 - DNA, 516 bp, Homo sapiens
cagtctcaaaaaatactttgatgttcactagactatgttttctattcatttctttaaaatgaaaaaggagaatttcaagtcagcagccgctattaccgtatcttacaatttaattacatacacagtgaattgaaaccattgtgcaaaatggattacacatgtatacaaagatacgatttgatgatgacactggcacattattctaaactattcattcagcatgcctataattacataaattgtatgagactttttgttgcaaaggacacatttatcatattcattcacacatattatatgtgatagctgtccaacatcctgtctgggaagattttgaaaacaggacaaagaaaacatcattttaaaatgtcttcagctttttttgaatagacgtattcaaacatattctgaacattgatgtttgaacattttaatttgtgtgatgatgtagaaaatataattttagtttgtacataaacattgtgaaaatctgataataaaatttttgatacattg

SEQ ID NO: 13101 - DNA, 728 bp, Homo sapiens
tccctaaaatggcgaacatgtgttttcatcatttcagccaaagtcctaacttcctgtgcctttcctatcacctcgagaagtaattatcagttggtttggatttttggaccaccgttcagtcattttgggttgccgtgctcccaaaacattttaaatgaaagtattggcattcaaaaagacagcagacaaaatgaaagaaaatgagagcagaaagtaagcatttccagcctatctaatttctttagttttctatttgcctccagtgcagtccatttcctaatgtataccagcctactgtactatttaaaatgctcaatttcagcaccgatggccatgtaaataagatgatttaatgttgattttaatcctgtatataaaataaaaagtcacaatgagtttgggcatatttaatgatgattatggagccttagaggtctttaatcattggttcggctgcttttatgtagtttaggctggaaatggtttcacttgctctttgactgtcagcaagactgaagatggcttttcctggacagctagaaaacacaaaatcttgtaggtcattgcacctatctcagccataggtgcagtttgcttctacatgatgctaaaggctgcgaatgggatcctgatggaactaaggactccaatgtcgaactcttctttgctgcattcctttttcttcacttacaagaaaggcctgaatggaggacttttctgtaaccagg

SEQ ID NO: 13102 - DNA, 97 bp, Homo sapiens
atatgaagagcattttaagaggtgcagcctctggaagtggatcaaactagaactcatatgccatactagatatgtttgtcaataaacttatgacgtg

SEQ ID NO: 13103 - DNA, 1032 bp, Homo sapiens
cagccttcgccccagtgttctgcatggattcagcatgtccaacatggtaattcacttcagtttaatgtctcctttgctcttgccaaaaaatagcacacttttccacattccagtgatgtgtgagctatgcaaacaaaatccaagattctgctggtgaataactatgccagcaaccttgtaagctatctgtgcaggatatttgcactatttccacatggaatcaatctttaacaacctctgagccttggtgtacagaccacctttcacaaaacgaaatgctatgactgtatcttgatatctcgaactttcaaaatatattttcagtacacccagttgccaaagttttgctgtctcttagagaaagaactatgaaatcaactgacaagaaacacattcttattgacaattgtgtataactggattgcagactgttcttactgtaactacttcctgattaggaatatgaccatttgactgttcaatgattatttgtatttacagtttccagagtttgtcattataataggaacaatctttgctgtatacttttaaaaaatactctgctatttctcttgctggaactgttgaaagaaaatatatagaatgatctattgctcatcagctttattttttaaacatacgacttattttgttgaaattgtcaaagactgtatttagatctcataatgctttgttaaatgtttacaagtaaatagtttgaattcagtaaatattattggttgttgtattgatcaatgcatgttacccattcaaccattttatagactaccaatttcttttatgttaactagaatgcttttgttaaaagttatttgttcattatttgtgctacccctttgattatgcagacaacctcatcagctgcctaacttatccatctttgaacttctgactacttgttgtatctgctggatatttagttcaactgtatagttttatttacttctgtatgtgtatttttgtgaagtattcacaaaggttaagttaaaataaaaccaagggatatcttgc

SEQ ID NO: 13104 - DNA, 2411 bp, Homo sapiens
gcatgaaatttttcaaaaaatatttttatgatgcagcttctgaacatttggacagacttgatttgtattttatttctgataaggaataagtacttgtttctgttgttttggacaaatagttgttaccaaaatattcaaaaccactttgagtttacatactagttaccttaaaaattattccctgacactctgacattccttctaaacacctctgccatctctcttatgtactctcatgggtttttttgtatgatttgaatatgaatgtgcctaaagaatttttgctctcttaatctatgtatacatacttgaacaaatcattcttgcttaactgctgatcttttgtaaaactattgctagtcataatggatttctataacctgaaagttgatataatacagcacgtggagcactttaaaaacaaagaaacttgaaaataattttattttttacctttacatggtgtgttctagactactgcattatgactacataaacctacctgagctcttacaagtacagaattgtgagacagaggttttgtgatggaaaacatacacatagggaaaaataccaaactgagcaatataaatttcacagctcacatcttagccagtacaaagaaactttcacatggggtgaatattataatacttgaatttgagacttaatactgtatatgaattaatcatcccactgtaataactgacatcttcaaatagttgggcttatgaaaaatttgactaagacattttattttatactttatgtaaatgtgaaataagttctggtcatataaatatgtagaatgcatgtgtgtgaactctatgaagtgaagtgtggtggccttttatgtttcagagtactcaagtgtacaattgatttatataaaaatgcaaaatgaactcaggtcattttgaaattaatattaatatttttgttgtttaactttaaagctagctcccctaactttatatattttttgggaaaaaatacctaaaaacctcagcctacaaagactctcagaaatgccaaagattttcaaggaaattcatattatatatttcaaaaatgatttatcaatgttatctaccaaaagaaataattttatttttcccctttggggagatattatcctctaatatgagaatcagatccctagattctatttctacctatactattaaactcaaccttgaacctgagcttggttgtttctgtgccttagtttctccactcgtaaacaatttcctataaaaattgtttaaacaccaaccaaaatttaccatatgtattcattctcttgccttaaagatcacttcttaacttacatttggctctcaccctctaaaaatttgtagtttggagagtaactgaaagcacaattttaagaaacatgttttcctcacaaaatatattgtaatctgattttcctatcttgtattcatgcagaaaattggagaaaatgtgtattgtcttgtgccattctgcaatatgaatttctcaggaaaaagatgtttcaatggcaatactttcttaaataattcaagatgggtgtgaggacctatcttattagtttagtgctgtgttaaccatttgtgaattacttcttgtttaaaggaagttgtcaaaaaattttaagattctaaatggaatacacgaataaagtaagccttagaatagaaacctcacaaaaagttgtcatttgcggttgataattaacataggtgttttattctctcaactccttagtaccagagccaaatacaatttagttttcagaaatcttatcaatattgttctatttacctacttataaatctgcagataaccacttgaaccaggcaaatacactgaagataaaggttatttctttttttagctttgaatttgtcatgaccattttagtcttgcagatagcagggcagccccttggggcaaggatttactctgggaggtaccgttaagagccttctttccccctttgaaagatccttttacaatgttaaagtatactagttgcaagaacaagcaggatttgcaggttgctttaccagcatgagtctcatttttctggcttaaaatctgggactgtgaaattattccataggaaagtgaatgttattttgcagaattagcctcttacataaaagtatttgttgaagtgtctttaaaattgctatcatgagcaaaactggttgctgtaatgcttgtttttctgtatttatttacacattaaattcttacaaaacaaaatgtgttcgtttgttttatagtaagatgttttattttgaacttatttaaatgtttatttgttagagaaaactaatttgttaatatagatcttaactagtaactattaagcagggatgtttgttccaaatattcttgaataaacaatcaccacaaac

SEQ ID NO: 13105 - DNA, 315 bp, Homo sapiens
cacctcactaaccattcgactgagcacactttcatatttgtatcagcttttgtgctaaaactctctaagtacatccacctgtgtaataggaacctgtgaattgtactggatgattaatacaaacgtgattgttgtatttggagtataaattactgattgtatgtgacctgaaaattcactgctataagaaaggtggagtcagtttgtatcagttaataggatgttcatattccaaggatattagttgtttttttaatcatcctatatggctaacattgtttaatgaaagtaataatcaataaagcaatagaatct

SEQ ID NO: 13106 - DNA, 230 bp, Homo sapiens
accttgggcgcttcccacctgccccgtccccctagagactcagaggacccacctgggccaaggactccaaagccgcggggacaccgggaagtgcagcgggccaggcaggctgggtgggagggaggagggccgagacaggagcagcccacccagcagaaatacaatccgagctacaaagcatgggaaaaagagactcttttaggatcagatctgtgagcacgttggcgagg

SEQ ID NO: 13107 - DNA, 554 bp, Homo sapiens
tgatgctagaaagtatggattgactttctaaatctgttcagtttgcattggtacttactgtggacttcatagcttactgacagatagtaatttgatttatttattgacagactttgcagccttgctaaattttaaaagcatttttaaaaaaacttctacaaaactctagtatgggcttctgactttttccagggtgtagaatttgactcaaaagtaaaaataattttgttttagtatattctactttcattaatgtttttttgttctgaaagtgatattatattgtacatgtaaaattaatttaaatattttttcaaataaaaatgtaatgtcctgtattctagatgttctaggtcttagaatcatggcaagcatattcatacaaatgcgtacctataaacttgtagctcctgactcttagggatggattttgaggaaaaaacaagactaaacaaaaacatgtagctccctatttcttctctctaggttgttggactgaaatatgcattttagctttgtgtgtttctaaaataaacatttctaaaatttacagt

SEQ ID NO: 13108 - DNA, 158 bp, Homo sapiens
accttttcagtcatcttctttttcatcagccaatggagtgatttgttggaaaaagttctgaagaagaaagttactatctctgggatgtttactgcttctaatgtctccttttaaggagacgaatgtaccagaaaaataataaagcaaagaagcttcgg

SEQ ID NO: 13109 - DNA, 1575 bp, Homo sapiens
acaaaaagtttaaaaatagtgttctagagatacatataaatatattacaagatcataattatgtattttaaatgaaacagttttaataattaccaagttttggccgggcacagtggctcacacctgtaatcccaggactttgggaggctgaggaaagcagatcacaaggtcaagagattgagaccatcctggccaacatggtgaaaccctgtctctactaaaaatacaaaaattagctgggcgcggtggtgcacacctatagtctcagctactcagaggctgaggcaggaggatcgcttgaacccgggaggcagcagttgcagtgagctgagattgcgccactgtactccagcctggcaacagagtgagactgtgtcgcaaaaaaataaaaataaaataataataattaccaatttttcattattttgtaagaatgtagtgtattttaagataaaatgccaatgattataaaatcacatattttcaaaaatggttattatttaggcctttgtacaatttctaacaatttagtggaagtatcaaaagaattgaagcaaatactgtaacagttatgttcctttaaataatagagaatataaaatattgtaataatatgtatcataaaatagttgtatgtgagcatttgatggtgctcgatgagttacttgtatttgatgggattgtttggatgtatttaatgggagtatttggagtatttaacgggatgtaaaccctggatgtacctgattttgttactgttttattttaataggtaatatatatacagggtaaaagcttcaaatggtacaaaagggttaacagtgatcgtgaagtctctgtcctttccctcttccctgccatccagttccccctccaagaagcaagtaccgaaaccacctgcttacgcatttttagagattggccacaaatttataaacaaatgtatatattcctttccccctacacaaacggtaacatactgcacacattgttctgcatgttgcttctttttccttttttttttcacttaacagtagatatctagaggtgaaattactgagtcaagactatatttagcaaaattacactagatactacaaattacctctaaagaaggtatactaactgataatctcaccatcaatgcatgtcttcttatcctttgccaacctaacagataaaaatgttctatttttatttttctttttatgagtaacgtagagcatattttcatgtatttaacagccactggaatctgctttaccatggcctttcctatttctattctttgcctatttttctgttggttgttggtctttgttttgtattacaggtgtgctttagatattagctttttgtaagagatcctgcaaatatcttctttccagtttgtcattgtcatttgtcttttgactttgttctggtattttttgatatgtagaaatttttattttcatgtaagcaaatttatgaatctttgtacaccataagtatatacaattatgatttgtcaattaaaaatattagtacaaaatttacagatctttgcttttgtggcttttgggattttgtatc

SEQ ID NO: 13110 - DNA, 824 bp, Homo sapiens
taaaaaatatatagaaatgaaaaatgttgtgtatgcttgaaaacatttttagaataactctgcttcagttttaaaggtgatgaaatttttcaacataggcacaactgtttaaaattcacatacatttgagaggtttaagagcacacatacttagtatgatgtaaggattatcatcaggatcaatagaatacattttatcgaatcttctggattaattagaaacctgaaggttataggtttgggatgttctgtttaagaaggataaaaataaatttggagtaaacaaataataggtaaaaattaaggattagtaagaaaaaattttttaatttaaaaaatttaatttttaaaataggaaaaaatccctgtttgatgtagcagacttaattctggaaaagttttagtatatacaaagtaaacagactatataatgaacttccatcactcagctttaacagttatcagcattcttccattcttgttttatttatacctctgtggatttgctacctctcctatttgattgttatttttacatttttaggaaagtttaaatacattgaaatgttcacctctgaactgtgcaaccttcctaaataacagactttttatacttaaaaaatgcctccaaaaatgagataggtttacctgctgaacttgaaaataagaaacttaaccactgttaagtgatctgtgatcaaggcagatcttgaagtaaggaagccagacacagctgctgcccagccatgagagatgtaaagtctcctattcagtgagccaatgttctttgaatgcctatatgaaattttcaaataaagattttt

SEQ ID NO: 13111 - DNA, 3191 bp, Homo sapiens
cctggagcttttatacactacatttcttttttattattatgaagaatgggatacctccaggttccagtaaaattcttctgaccgaaaccaatgtgggtgttagaaaaattaccatatagcttaatatgtttattagttctctttggaaaaaaactaccactgtggtcttaaaagggaacaaaatataccataggctaaaactaaggctttcactctagaatgcaaagctgttttgcagctgttttcccttaaagatgtcctgttgctttagtgatatttagacccctctcagttaagaaatgcttagattaaaaaaaaaaaattacgtaggattaatacagaaatttaatcatgtctgattaattgctctattaaaataaggggcatttaaagacccagcataaccatttgtataatgagaaatctaggggaaaaccaatcagtccaacatgagattttaggaatagaaatttgccggccatttggaaagtgaaatgccacttagttctcaattgatgacagtgtttgaatcatcataaaaaaaatacctgcttttcatctggacaacccaattgagccactttatctccttttggcaatctgagtaggcggggaacctaggcagggctggctttcttagcgtgtaacttgtgtagcagcacagggcccacacttagaaggaccccacacttggttcaaggctctgctatagcggaaattcttaataatgtttgaagaagggccccatgatttcattttgtgctgagccctcaaaattatgtctgtttcgtggtgggaaatatcctatgttttcttgctcaaacacctttctctctgaaagcagaaaaaggcactgatataaagggaagagaaggaggctcaccggagggaagagaacatagtgaagattcccgcctttggggaggtctggaccacccagggcctccactgccaccttggctggcaagggagaaatgtgttgtgttgtcttagctttaaaacagtcacagttcttgctctatcatagatgaacaaatactttcttgatcattctgtaagaccaggaggttggtaagagtgactaaccagcctaactttaatacacatgtataaagatgttcacagagaaagatgctctgtagagaatttgctaccgaagttggctcaagaatttgtttttagtgttatttaccaagattaggacgtcagtggcttaaattctttgaattcttttcaaggactgcaagattatttgataaagagtagcatgaatcttgtgctctaatattacacagtaagttcaaagaaaggatgtaagtcaaagacttgttacatagagggaaaatggactgggatagaggacagactgatagtttctttctttcatatcacatgtatagagaaataattatatcagaaactcacaaacctagacatggaaaaacagattactgtctattgtcagcatcattttcatctgtaagtcactactggaatatatttttcttttaatttccagtgactttagaatacacacagtttttccgacttttcaaaaatttgattaaatggttttatagtataatattgggaccccataccgttagcccttgtatgtataccaacactgccaaagtaaaacattaggtcaggcatggtggctcaggcctgtaatcccagcattttgggaggctgaggcaagtggataacttgaggtcatgagttcgaaaccagcctggccaaaacagtgaaaccccgtctctactaaaaatacaaaattagccagatgtggtggcgcacacctgtaatcccagctactcaggaagctgaggcaggaaaatcgcttgaacctgggaggtggaagttgcagtgagccgagatcgcaccactgcactccagcctgggtgacaagagcgaaactccatctcaaaaaaaaaaaaaaaaccaaagtgaaacactaaaaattccctatagatatattccaggaaatattttaattgggctgattttaattaggctgtatcattgatgattactggaatcgattttatgtcttttgtattttaatcacttgagttaatcaaccactggcaaatcccatttgacaaagattagcattgtaaaaaacagatactgtggtagatttctagaaattcattcacatttaagacttctaaaatggaataatagccttttgtttttcatgagcatattcgcacccctatatgaattacagcatttaaagttcaaaatcagtaacttttaatctaggaaattgaaaaatattaagttgcaaagcaaaaaaaggtattttcttgaaaatactatttaatgtttaactagactataggtagttccttaaggttgtttgacctgaagtggagttgggtttggaagctggtgcccagttggtgtggagtgtgtagttttgttatgaaagttctctaccacctacctgtgtgagtgacaccaacatccagatgtcacagctctccagagctagtcagaagagaaatcaaattagtgtttaaacccatttgcatattgacttgtcagtacctttaactcaatttaatataacaagaaatcgtaaaatacttataacctatcttagagaaatgagtgctggttttgagagttgttttttaactgaaagattatttctagatgggtagtgctttgtgctggtttctgcttccatatatttcccagtcattttaattagagaagatactctatggtagaactaaggcctttcctttcttggccaaagtctttaccctatttaaccctttgtatatttctgactgctcactgttcatattataggggaccagatttgtaatatagaattctccataacatgaatgaaattaattctgtccaagccagcatggtggcttcatattaagtagtaacagaagtctgaacaattggataaatttgacttccaagacagctaaacttttcaactgcaattttaaaaactacactacactgttatagttaatctgacaaaaatgtcctcaaagagtactttattttatttaaagcatctgtttaattcaacctttaataattttgcaaagaagggtatgtgtgtattttaatatagcctgacctgaatttatatgtttttagctttagtatttaactttttgtaacaaataaaccttttttaaaacaagttt

SEQ ID NO: 13112 - DNA, 2040 bp, Homo sapiens
gtatctgcatgtaaaatcttcagctggtggatggtgacttttgaagaacaaaaggctttggcaacagaaaacaattgttctgggtgatttctagaatggtttttgttgagtctctgaacatcctaaatattggtttgttattcttttccagaaagaaaatgaatttgactggttcacctgtgtactgagtattgataaactttgaatttttttaattgccttcaattgggagagaaagctttatatttgtaagaaatatatttgataaagtttcttaaagcaacaccaaaaaaacaaaagaaaagctaagtgaatttttgcacattctacacacagtgcctgtaaatctcatttgtattttcagtttgcccttaattttttttgttagtgtttagaaaacaatgttttaaacattcttcagtgttctgatttcttattaccccctttcctcttgggcttttgaactgtatttgatgttgctttgggataatgtttataagtcaaacataagatattgtacattgggcacatatctcctcttgggctgctaataataaattaataacaggtaacctggacaaaccaggaagcaccaaaccccttttcagtttgaactcttctttgccaggtgtgaggacttctgcatcttacagtcagcacagaacacactgagacttgaatcaagtcagcaacagagcaaaataaaggttagataagtccttgtgtagcaaatttcgagcataagaaataaaatctaattaattcttagggtactcatctgacttgaactctgttggtttactgtgttagtaaactgtgctttctattatctatacataaaacctgagcagcaactgtgtctttagagctattgccacattagcctttgcactgtatagcgtctggctttatggaacttaagtttaccaaatataaaaagaaacttctgcttttaaaaaaattatatatatatattaaatttgaaacctgcatttctcccacagcaatgtaagaagtaggctctgatgtcctaccactttgaatggttttctaatatcttaatgaatagttcctgaacattgcactgatatcatcgattagaattttgatatttaatttcatctttatttcctggtagagaatgcaggaaaagatgtcaggtacataacataaaacagattgggaatttattgtttccaaagggcatggccttccttagcatcagtttgaagcttttgttatgacttagctgacttgtggcagcggggcaagcaaaaacaataacactgcttataaatggcaccacatcttgttaacctcccccccaaatactctctgaaagtcatgcacatacctatgggattttacacaccaccagcttaaaatgctatgtctctatccatcagaaatagtcattattctatttttaaggcagcaacaagaaaagaaaaaacacttttcctgagggatttctaaccatgtatctaatcctcccatttgggcagtataggtgtttgcttttttgttttctttttttaagaaaaaccttgaaacctttgacactgacagatgtgtttgcaaggatacggcttcagtattactaatttccatgtgtatctggaagtatttttaaatggcataccaaaatccagaagtttaaagatgcctataaaagtaaacaacatttatttaaaaagaactctgaatatgccttcttttttaattagaaatatcttcgagacttgggtgtttgttaataactaataactggagtaagctacaggatctaaagcagccctttttacagtctagttaggagagagaaaataattgcaaatatccacttagaggcaaagaacaattttttattatcaaaaaggtttctgcacattgttgtggcaatattgtatctgtttagaaaatgggcttttccaaaagcaaacaaagataggttcctcaggtgaccaaaactgaaaatcaatatttccatgtttcattaatcaaggcataaaatacaattaaagcaaaatattttacatt

SEQ ID NO: 13113 - DNA, 302 bp, Homo sapiens
atggtcaatagaaaaagtaggctgggcgcggtggctcacgcctgtaatcccagcactttgggaggctgagaagggcggatcacgaggtcaggagatggagaccatcctggctaacacggtgagaccccgtctccgctaaaaatacaaaaaattagccgggcatggtggcaggtgcctgtagtcccagctactcggcaggctgcagcaggaaaatggcataaacccgggaggtggagcttgcagtgagccgagattgcaccactgcattccagcctgggtgactgagcgagactctgtctcaa

SEQ ID NO: 13114 - DNA, 878 bp, Homo sapiens
catgcacaaccgcacctcattttgttgcccattcagagagcttgtaagcttgggctctgccgcttttgcaaaagccaaggtaaagccaggatcgctgccaagttgtttgcactctttggagttctagttagctcagggcctgactgtatttttcatccatcttttctgaagtgtctttgggcagtatgtagttatttattacaaaattatattcacctaaatgccaaccatctacaaaaacaatgagtaatttttctactttgaagatacacagatggggacaaaaaccctgttttggaattctgttctattcctcagtatccagaaagttactgacacagtaaaacaaggaaagttctaccctaagagccgccatcacttcaggccgctggtttgtcagccatctgttgcttcttattgatagatggcattggaatgtggtacaaagttagctctgaagaatatggtaacgaagacaataaagcatgcactgtaagaactgacctcaggtgtgcagatctactttgatttggggttttgattaattctttatttttctgaaaaaaagtttaaataatgtctgtaactattgtgtttttttcctgccgaatagccaggtgctacagatttttaaaatttttgttgtattgaaaagctaaacaaggccaaaaggttaaattttttgaatatttaagactttctttttcatcttttatagcgttaccataggaaactgttccaaactgagttagctttaattataattattttattcataaatggtgatagtccccagatctgtacacctttatcactccctgccgtagatatactttaggttagtatttctacattcgtggcaagcattttggtaacac

SEQ ID NO: 13115 - DNA, 2739 bp, Homo sapiens
gggttgtcttttgttttggttttttattttttgtctataacaaaattttaaaatatatattgtcataatatattgagtaaaagagtatatatgtatataccatgtatatgacaggatgtttgtcctgggacacccaccagattgtacatactgtgtttggctgttttcacatatgttggatgtagtgttctttgattgtatcaattttgttttgcagttctgtgaaatgttttataatgtccctgcccagggacctgttagaaagcactttattttttatatattaaatatttatgtgtgtgcttggttgatatgtatagtacatatacacagacatccatatgcagcgtttcctttgaaggtgaccagttgtttgtagctattcttggctgtaccttcctgccctttcccattgctactgatttgccacggtgtgcagcttttactcgccaccttccggtggagctgcctcgttcctttgaactatgccctcacccttctgccctcacttgatttgaaagggtcgttaactctcccttacaggtgctttgactcttaaacgctgatcttaagaagctctcttcatctaagagctgttactttttcagaagggggggtattattggtattctgattactctcaattctaattgttatatatttgagcccatacagtgtattaggttgaaccatagaaactgctattctcgtaggtcaaaagggtctagtgatggaagttttgtagataagtaccaggcatctcagtaactcctagactttttctcatcccatgccccgttttaaattgtcagttttccctctgactcttctgtgttaaaacatgaaactataaatttagtaattatcatgccttgctctttttaatctatatgactgatgcaagcccctcttcttaaccgtttcttggctttgagcccagaaacacagctctccctgtctccaactccagtaagccctcctcagcctcaccttacgaatccaaagaactggggtttgttaggttctttctctaatgtagaggcccagatcccatcacaaagtttttcattcttccttgtccaccatgatcttcatcacagtctttgatatgtctgcatgcaaagtggaacagagttgggcggcaatgacagaagagcttccttggcctgactcggtgtgcggccacttcggcactgcttaatccagatattcttgttaactaagcattgtgcttcccaggtggtctgaagtcaggtactctctctctcaacacctgtagttgaatatgatttggtcagttgctcgttgtaacttggagaaattcctataaagtaagatctccttgcctcttccatccattgttggcacccccttgcaaaaggaaaagaacagcaaaagtcaggagcagtaatctgagaaagttaactccaggataggtaggtttctattgttatagctagatgtaaatctttagttccaagaagtgatagagtttctgctttaataatttgttgataagtttacataaacagaaataaaagatactatctttaccgtagtagttcaggccaagattatgcttagttttagttctccaggtagttacttttgccatgtcctattgatcagtgacactgccagaggcccataccggcaagaggaagaggacgtcattttgtaaagtttaacttcttagcgaactgatgtgccacccagtcacagagtggagttgtgaattcatgtagaggtggcaaacctctaccttgtgttgatgagagaataatcttgggcagtctgggaaaataaggaaggcatctccttcttactcatggagattcaactatagagagttgaaacctaaacccgccttccttttatagaagctggactagagacggactgaccatcagctctgaactgtggctttttttgttcacctatgatgccatgtaccaaattcagaagctatcgttaataatttgttttataattgagtagtacaagcgaggaaaaaatacggaggataaccactatttttgtgcaaataatatgaaagtgaagtaaaagcaatagaagaaatttctataggatctgggtttagagtgtgtatcattaataaatatacctttgctcttttcagggaaaataacaaccacccttactgatagttgggaaaagaagattgggttattttgccatatcatttagctggaagtgacatttaaaagcaccctgcatcactagtaatagtgtattttgctattctgcccttgtaatcggtgtccctgtaaaacaatccccacagattactttcagaaatagatgtatttctctacgtaagggccaggtttattttctccttttttgagatttctagaaaaaatgctgcttgcacatgttggttcttgaaaccttagctagaagaatttcaggtcataccaacatgtggataggctatagctgttcagaggtctcctgggggagcttaaaacgggggaaacactggttttcacagatgctccacatggctgtctttaaaagactcaaaacttttttttgtcctctttgttatgcttggaagctcccccccccccaacagtgtgtcgagtctttgcaaagaaacctttagatgtggttcatagatatatgaatacgtatctgtgtaaaacagtgagtgtgcagtgtgtaaatactttaaattattatgctagaaaaataaagttacataccttgctgtgg

SEQ ID NO: 13116 - DNA, 1043 bp, Homo sapiens
ttcttcagataacttttgaaatgtgctataaagggcctagtttaaaaggaacttcttttgaaaagcaattaacagttgataaagggttaaataaaaattatctagtaaggaatttcttattggaatgtaaacgtggttctaattttaaatagacagtgatataaagaataaaaagtaaacagtgaaattgagttctccagggaaaaggcagacctgtttagtaaaaaaaggatgcttttttcagtgatgtctttttttgagtgcatatgtgtgtgactcttgaagaaatccatgttcagatttatcagatgattgaagtgggtgttctgaataaagaaagctgtgaggcctgaggcagtgacgtatcaggaaacatattttattggagatttggaagctatagtaaaacataatggcaataagccaacttcccagtggtaaacccacagtggtggtttagttactaacctcttgatgaccgaggaggttaataattggatattgcagagcagcaatatgtaacctgtgtgtaatctcagggcctcaggttaacagtttcagtcagaagctaagagaaacactgacaaaatttagcttaccatgactagctgccagtttatgtggtctgtgttcgtttgttttaaagaaactaatactgtacagagatctttgacaccaacttcaaggcaccagtgtttagtgcaagcaggtagagaggacctatgaactaggtttctaattggcagtcagtgctaattcagccattagtaagtaaagtcacttttccactaaaatagtgtcccgactaaccacctccttccgtgtcttttccaaccacaaaaccacacacatagaccatctcatcttactttatttcttgcatttattgtatccaaaaaaattggtttagttttttaatgtaattgacaagactcaagcttttgaaatacttacgactgttctcttgattccaggacaccctcccctgtgtctaaacatgtgtggtatactttttaaataaattaaagcttattttacttggc

SEQ ID NO: 13117 - DNA, 553 bp, Homo sapiens
gaatgtgccttttgatgaaagaactttatctttctacaatgaagagtggaatttctatgtttaaggaataagaagccactatatcaatgttgggggggtatttaagttacatatattttaacaacctttaatttgctgttgcaataaataccgtatccttttattatatctttatatgtatagaagtactctgttaatgggctcagagatgttggggataaagtatactgtaataatttatctgtttgaaaattactataaaacggtgttttctgatcggtttttgtttcctgcttaccatatgattgtaaattgttttatgtattaatcagttaatgctaattatttttgctgatgtcatatgttaaagagctataaattccaacaaccaactggtgtgtaaaaataatttaaaatttcctttactgaaaggtatttcccatttttgtggggaaaagaagccaaatttattactttgtgttggggtttttaaaatattaagaaatgtctaagttattgtttgcaaaacaataaatatgattttaaattctct

SEQ ID NO: 13118 - DNA, 647 bp, Homo sapiens
aaaccaagctttgatttagattgagtaagatttacccagaatgtcagattcctttccctttagcacgtttaaagttctgtgtatttaattgtaaactgtactagtctgtgtgggactgtacacactttatttacttcgttttggttaagttggcttctgtttctagttgaggagtttcctaaaagttcataacagtgccattgtctttatatgaacatagactagagaaaccgtcctctttttccatcataattctaatctaacaatggaagatttgcccatttacacttttgagactttttggtggatgtaaataaccccattctttgcttgaacacagtattttcccaatagcactttcattgccagtgtctttctttggtgcctttcctgttcagcattcttagcctgtggcagtaaagagaaactttgtgctacatgacgacaaagctgctaaatctcctatttttttaaaatcactaacattatattgcaatgaaggaaataaaaaagtctctatttaaattcttttttaaattttcttcagttggtgtgtttttgggatgtcttatttttagatggttacactgttagaacactattttcagaatctgaatgtaatttgtgtaataaagtgttttcagagc

SEQ ID NO: 13119 - DNA, 1572 bp, Homo sapiens
aatcttagcagaagctggaactttttatacttataaaaatagtatgttcttatgtttctccttatgcatttatgtgttcacttaaaaatgtttttaaatctaaggttttctttgtttatgttcaggtaaggaactgttgtcatgatctggaaatgtttaaaacaatgtttgttagcattctgtgagcagcaaaacttatagtgataaaaatcgattgttgttaatatgatgtttaccatgtgcacatagtaatgaaaaggaacataaaagcccagcaggctcgtaccaaagtcacagcagtaatgctatgtactgcagagtctgatgagctggcctttgtgcacacttttattttcatgggattgcatcttagctgttaaaacttctagattgaaatttgacagccagggttacatattggggacttttaaagtgtctttccaaagagatttcattaaccgtttagattagaatatctttcccaattgttacagtgacatatatgctgcaatatttaacaactggagtattagccacatgggttattttttcaatctgtgttttgaatttttttattgtgtgttatttaaaatattacatatgcagctgggagaactacacctttgtgcacatagatttatatattaatttgtagaaaatattttctttatatatttccttaccatacaaggtgccttgttcatcaggaaaacttttgttttgtattttgacaagaaaggcaccttcagagtttctttttaagtatagttgacaagtgtataaatgttacacttactttcagagttctttttagatctaaagaagtcagttcaaaaatggaaatcaacaatgttaggagaaatctgaattctgttaagttagtaagtattatgtatagcatctgtttttaaccatttccattcttatccctagtgtatcagttgatcacactaagaaagcttaaagattgagcatttgaaataaatgctctttataaatgattagatttttgaagggatattgaaatcattgcgctgtgatttcatctgtgatgtgaaaaatcaatttattatccttggtgctttcccccccaccaatgcacaaataattgtgaacagcttgaaatgacttaaactgtaatccaaatgggacaatctgataagaatttcatgcattggtagttaaataacttaaattgctaaagctttagcttgaaatttatgtttagaaaaactattgatttcccatggtatgaatataactattgtaattcttcaaatgagactcttctcaccttaaatagtcatatattaattaacttataggaaataagcatactatatgttagctgttttaaaaggtaccagatgtaagagtcataaatatatgcaattaaagaagttcatagatttcacatgaatgtaaatgtgttatatggagacatgtcttgtaaacagttgaatgtatgtaagttttctgtttgtgaaaatgtagttaatgtactcactgtggaggtcataaggaagctactttttttttaaagtggaacctaattaaaatatttccagaatc

SEQ ID NO: 13120 - DNA, 2120 bp, Homo sapiens
atgacttggagagagcttaaaccaatttaggtcagcctacgcttggctagaaaaaacccactgctgtactctgtacatgactcttcacactatagatggttatatcagctaagtgttcctggaacataaaaattgtttgggtcaaatttgaatacaggaatgaaatcacaggtacttgggggggggatatcattctagagcacgcaactgcaaagaaaacagaatgttgactgttagtttgtatagctttttagctaggaaaaaaaggctttggtacagtaatttcatctttatgattctgacactcaaattgggaatgttacctgcttggttgttgctgacttgatatgattcattagaaatttatatcttcagtactcaagtacttcttgaatctctgtattttactataaaatgtatgtaatgatttgttttatgaaatttagaacttgaacattgctgaattggaccactttttatttttaaatattgagtttaaatattttataactggttttgcactgaaaaaattaacatttcagattgacaagagagtaatctttcttcacttgcctcaataatgttattgagcaatgaattttttatttccgcatggaaagttattgatctctatggctgtaaaatatttctttatagcgttattaaagtgtgtcttaataaaattaaatttgggatacaaagtatttattttacaatgggtgggcgggggaaacttttccagaaagtttccaatatgacgttttcataagttgaaaaaactctccttagtgcttattttctaacttaaaattcacctggaactttaaatgggaaaggattcttttaattgtggattataggcataatactgtttgcatctgaattttctgtaagtgaataatagtttaatagaggaactcatgatttgtactattgaatgattaaactaagtatgaagtgataccattcagcatggcatcaggtcattgcagttttagttctgtgtaacacaagcactcactgaaattccagtttctaggattagtgtaggagcctaacgtgcttctactgttttaatgggttaatcctggattacttaacaatttatgtcaattgcactggtttaatttgttgctaaagaaataatgccctgggtttagtaacaaatacagctcaactattcttgaatatattttgaaaaaaaaatgtatgtaacttaccttttgtaaacgttccatttcttttttccctcatttttgactcttaaaggtgcaatttattactgaattgggatttctggcagcacagaactgctttttattttggggtctgtgagtttcttaggtattagcaatcttgcttataaaataagaacaccttttaattaatgagtgggtcattcctggtgcaattgtgatttttctttagccagaatgaatggcaaactctatttagagcaaagtaagtattagaaaaccctaggaactcttaatcaacgtttattacactttcattaaggcaaactacgtgaaagagccttggggaagttggcccatatcttactaagttgatcagatttctcgttgggctggaaatgtttcgctgttgtatattttaaagtaaattgcacctttgtaacatattgtattgacgaatgatcactaagattagctatatctatacagtcattagtttgacaagaaatagaatcctgtcagatgccaaagagtgggatttttatgtttaatgattaaacaccattatttattgacaatttaccctgtggaactgtattatttctaactatgaaataaaggggtgatgtaaacacacattgttgtgtggtgctttaaactaggtccactatcaacaggctacttactgttcaagaattccactgaagcacttattttaaggccctatttttcttaaacaaaacagtgacaacaacaatcaaaccatttacttttgatgctcattggcattttatgataaaagatgtattcatggcaatgatatgtattcaccctattaggaaacacaactggttacctatgagacctgttctgtccgtgtgcctacgttccttaataatagctaaataaaaatttgtagctttt

SEQ ID NO: 13121 - DNA, 97 bp, Homo sapiens
tgacaggatggcgccaaactcagccttcaggactctgtcctccagcagagtaacattattgttctcattaacaatgaatttataccacattaccttc

SEQ ID NO: 13122 - DNA, 730 bp, Homo sapiens
acctgactttcacatttggattgagaatcattggcttttatacctttcttggtttgacgtgcaataaagaagcacattattttagcttctggctactgtgagaacatgaattctgtgattctgtgggttttttcttttttcttttaccagtacagtaagaaaaaaaaaaaaaaaaaaaaagccatgctatcaatcaagattctttttttttaaactttctcccatgaactaccaccatcagtatgaattgatgcaacaaatgaagaaatatttaaagacagcctctcaacagattgtatctcaggttaaatgctaactaattatgtctgtgttgggggttgcgaagagattcttaaaagtatctgtgtgttgatcatcagttttacaaaaacacctatttggctgaaatggaataaaatgtttgtgggtaaaagctaatggccaaaatggttgcaatcattcatactagttagaaaaattatgtgttgaaataagtggaaaagtgcaatccatccacccttatgattaacgtagatgatttttatacctttttctgatgtacctcttgaccttctccttcccttcctaccctttctaagtatttccagaaatacctgattttgaatcattcaacagtagaaaaagaggcatattttcattacttgacaatgtgggatgggtgcaatttattccatcttcactaaaatagaagcaattccataggtaccat

SEQ ID NO: 13123 - DNA, 1000 bp, Homo sapiens
gatttaggttccttcactgagtagtctggaagatataatctggataatttgctatgaagttatgagggatacaagtgaaatactggggaagaaaatggattggaaagtaaaattggtactaaagcccatactgattatcttgactttgttttttaaggcataggtatatattttggatcaaaatccttccaaatttgaaaactcaataaaaataacacttattaaattctagttagtgtagcactcatgctgaagtaaacatgatcgtaggcagaagcaaaattttattataaaatctaaaacaaaactttatagagttgaatctattccatctgacttcaatatttgccaaacgtttattttacctcctagattgatgttggtatagtatccttaatacagtgtagtatattaatgtccttaatacaatcaggaggtttttacctttaagcaaataaattatgtcattattgaaaaagacttaagggatgattagacttggcaatctgtaagcaggagtataaatgttttaaattgcattgtccctatgtaactatcttaatggctatatatatgtattttataaagccatttatgtatacacatgtaacttggaatttccttcatccctacacattttctacacttacatcaccttattgcataaaacaaagtcacgcgctttctgcttgaacatcaaaatatcaaaaaccaaggtacccaaaagatacaagtcagagacaacatccttgtccatatccaaacccagtgtttcagtgctagcaacttaatttctcatacatttatagagtttggtttgctttgctagttgtgtgaatcattgggctgtttttagagccactgttaagagagaatataaaataatcatgacaattactactgtttccacatttacaaattgtgtacttaaatgaacctcatttcccttttatttctgaatggcttgtctgagaggaaacaaaattaaaattcatctggg

SEQ ID NO: 13124 - DNA, 1951 bp, Homo sapiens
accatctttattatggtcatatttcacagcaccaaaataaatcatctttattaagtagatgaaacattaactctaactgtgacaaagaagaccacaaatagttatcttttaattacagaagagtttcttaacttacttttgtaagtttttattgtgtaagtttataatgcaggggaagtactactcctcaaatgttgagggaagcttccataacattgatgactggcttcatggcagtaattctcggctgtagttgcataagcattgctcaagaggaaaatccaaaagtgcagcaggagaactcttttccctgaaaaaggaaaaatattgaactcaatgatagcacctaaacttacatttaaaagacagacattccttctacatgtaatgacacttcttgtgttaaactaaaaatttacaagagaagaaagtgaaagcaaatggggtttcacaaatagttgtaaatatagtgaagcaatttgaaataattttcaagcaaagtattgtgaaagtattctaagccaagttttaaatattatctaacagacaagagtggtatatacaagtagatcctgagaagtacctttgttacagctactataaatatacatataaattatagaatctactttaatttattttgtgaacacttttgaaaatgtacatgttcctttgtaattgacactatatatttcttaataaaataattctcaaatttgtttcttatgaatcatctctcaaatctagttagacaatttgcacacatacttttctaagggacattatcttccttcaggtttttacctccactcatccttagagcccactgactgctcccctttatacctgttggccctgcctataggagagaatatttggagataggcagcttcaggatgcattgcaatcatccttttcttaaattatgtcactagtcttttattttttcccctcttgaactttcctcacacctggaagaaacaaagtaggaaaaagtgaacaggggatgtcaaatcgattcttgaattcccgctgcaagctagagccgcaggcaccctctcactcaatttccactcagaaccctataaacaccagtgggaagggcaacccactgcacgtgggaatgcactgatttttcctaggagtagacatgttcctctaattactccctgagggttagttggggctaaaccatgacagaagtggggaagttcaatgtccttaaatccatcttacttgccaacaggtaagaggaagcttacattacatgtccagtccacatttaaagagcacttactgtggaacaagccttcagccaaacaatggggatagaaaagtaggtaagactcagcctttgtccagagaagctcagggtatagctgaataggcagtttcttttgtcctgaggaaaatcaggacatgcctgctttctaaaaatcttcctctgaagacctgacccaagctcttaaatgctattgtaagagaaatttctttgtctattaactccattttagtagggattcactgactagattttactgaactatgaaaataaatacacataatttttcacaaaattttgggcccaattcccctaaaagaattgaggattagggagaaaggagacaactcaaagtcatcccattaagtgcagtttctttgaatcttctgctttatctttaaaaatttgtataatttatatattttattctatgtgttccatagatatcttaatgtaaaattagtcatttaaattacactgtcaattaaaagtaatgggcaagagattgcatcatactaatttagtaagaacgttcccaaatgttgtaacaatgtggatcatacatctctggttttttaaatgtattgaggctttcttggtggactagtatagtatacggtcagttatgtcaatgtttcatggtcaataaaaaggaagttgcaaattgtg

SEQ ID NO: 13125 - DNA, 3619 bp, Homo sapiens
aaataaatttgtgactaaacaaagactttcatattaaatgggttcaattgaactcatttcttattttccaagtgtcaatgtgaaaagaaaataaatgctagcactactgactagtcagtatatctccactttaaatgctaaatactttcttgaaataaaatcgcacctcccggccaggcatgatggataatgcctgtaattccagcactttcagaggccaaagcgggaggattgcttgaagccaggaatttgagcccagcctgggcaacatagcaagcaagatcccatctctacaaaaagttaaaaaaataaattacacctgccttttgttttgaagacttaaagaatctgctcaaatgatttattttctgagtctcttcacattaacttttatatgatttttaaaaaattattacctgcttatattttttgagtatctgtttcatataaagagatgctgcatgttcactgtgaagtattgctgaattaaattgaaaatgtcagataaaactgatacatgatgtagttataaaaatgctgttatgaagaaaaaaggaatgcttttttcctcggtggcctttgataaaaatatgaatgattgactctcagagttggaggataaactaatcatcttctagcacagccctgttgtgttgcaggagaggaatcaggctaaagtctgctggtatttcagtgacagattaaaactttctaacagtggcctagtgctttctccattgtaatgtactgaaaggaagttgttcatggatcagaaatgtgggaggcccttccttgcccaaggcaagtcgctgtagatggttaaactgataccaaggataggtaagggaaattccaaattccattggaagatggccttttactgacactgcagacatgtagataacaatagtttaatgtcctctgaaaaggtaaaaattccataaatccttgcaaacaatttttagcaatattgtttattgctaccacagccaagaatgggtatttcaaagccagggttttttttattttgttttgttttgtttttttttttttttttttggctacacttttttgggggggaccttttaatttgggaagaaaatgctgagtatacttttctttcacaaccattgcaaacccaggtagccctggagttttctttttttctcatcatcattgttttgttttttttatggttcaagacttttgcaatacatgaattaaaaataagcagttctttaaagcatagcgctctaaaaactattcttagtttataccctcaaaagttgggtctttcatgaaacacagtggtttgaatatgaacaccagtagcattctcgttcgttgttagggtaagagagttttgtagaatgatctccaaaagaagcagtcctcaaaaggcatttaccagtgatatcttttaatattcatgtttttatttaatgatgtaagatagaattaataaactactaaggaaataagccaatgtggttattgtactcaatttcgtttttcttttagaaatgtgtattgacttattaaagccactgacagaaatgttaatcatgacttaagttctaatttaaaaaactattttcctctttcctaaatactatattctaaattggaatatggcaaaatcccaatatataattctatacctagtaaagattgtaaataactaaaacaaaatgataagagctgtgaactgaaattgtattgcttacagaaatcatgaaccgaattttcttctctttttaaagtgagcataaagacttaagtgtattgttaccagagatatatttagatagaatacatcattttggcaggtaatcttctagaacctttcatgtactgtttccatcaagggagggaaagaaatagaaaatataattttatctatattttccttaaaatatatcaatctgtgcacactctttcagttttttaattactcatgtaatatatgactacattttgcttgtgtgctttttgaaaaccatcttcagtcccaatatcctctgtagaagtaatagttttaactctcctagatcttcttttagagtgtttttatgagtgtttaatgtaggaatgtgtatatattatctacagccacaggaaatgtatagttacgatttttacatacgtgtatgtatattattgtacaacttgctatttctacttgggagttttttattttggtacattcacatttacctaatctcttgtgcactgtccaacagtactttgcctataatagacacttaaggaagttttccttctttttattcctttataattacaaacaatgctgaaaggaacatcatcctacatgagccctttttgtacatataaggctctctctgtggtatatgcttaggatttgaatttcaggccagagtataaccatttttaatttgaagagatacttccatttgggttccagaatggctgtatcaagttacagttcccctgagcaagatatgagcatctgcttccccatgtaattaatgacacttgctattggatttttgtaatttaattactctgaaaaaattattttggttttaaatcagaaatttctcactagtgaagatggacatatttttgtatgtttattttagaacatataaacatttgttaattttctttttcctctcatttttctattgaatgatttgtccttttatctcatggatttgttaggagttctcttgtattttctgtattttatgtctgttgccaatgttttctcctacttagccatttggctttaattttacatggtgtctgtttaaataaatgttttatatttgtatacaatcaaattgattaattttcatgacttatttcaggatataaagcaaattattttctaagacatttacagtgtatgttttcctatgtttacatgtgctcatttcacgtcatgtattttcctctacgacatgtttctgtgtgagtagttaacatgtagatctttagaattgatttttctgaagagtgaaacagcgctgcttccaatatctgttcaaaattcatttattgaaaagtccactcatatgtctgatttgaaatgctgtttcattatgtgttaaattctttcactgagctcttccatattcctagtaaatgatgcattactttggtatgttctcagatttgggtaaagccttcctcatgttctataaaaattggttaactgctggtgagcacatctcttgaagttttgatatgggttgcacaacatttataggactgatttggagagaccgacaataccgagtgcagtcctcccttggtatctagttccaggacccctgtggataccaaaatccaagcaatgccctgcagatcatgggacctatgcatatgaaaagtcggtccttgtatttgagggttttgcatccctcaaataccatatgttttatttgtgtttggttgaaaaaagtttgcatataagtgaaacttagcatttcaaacctgtgttgttcaaagatcatttgtatttctcttcaagaacaatgaatgtcttcattaaatcatcttttgtgggagagcttttggtttcatagattttcatatatatatatgatataataaacactttttgacattc

SEQ ID NO: 13126 - DNA, 582 bp, Homo sapiens
acagcttccttcagatctggaagccaaacaccggcattttatgtactttgtccttcagcaagaaaggtgtggaagcatgatatgtactatagtgattctgtttttgaggtgcaaaaaacatacatatataccagttggtaattctaacttcaatgcatgtgactgctttatgaaaataatagtgtcttctatggcatgtaatggatacctaataccgatgagttaaatcttgcaagttaacacaacgtaacacttaaaagcatacattttcagcaaccagtggcacatatttgaagtgaatagtagcaaattgtttttgctttgaaaatctagccatcctacatcctttggatttcttcacaaggcagtaattcctttgaactactgcttagctaatactaggtagtgctaaaagacatgttcccataacttttacaacattttactttttatcattgatgtgttcaaactgtttacaaggagatgcttatagatgatagttgtacatatgtgcaaaaaaaaatccacttgcaatggtaagaaattgaagtatccttaaaggccatgaagccatatgtccct

SEQ ID NO: 13127 - DNA, 2112 bp, Homo sapiens
aagagaggaagaatgaaactaagaaaattctatgttaattacaactgctatatagacattttgtttcaaatgaaactttaaaagactgaaaaattttgtaaataggtttgattcttgttagagggtttttgttctggaagccatatttgatagtatactttgtcttcactggtcttattttgggaggcactcttgatggttaggaaaaaaatagtaaagccaagtatgtttgtacagtatgttttacatgtatttaaagtagcatcccatcccaacttcctttaattattgcttgtcttaaaataatgaacactacagatagaaaatatgatatattgctgttatcaatcatttctagattataaactgactaaacttacatcagggaaaaattggtatttatgcaaaaaaaaatgtttttgtccttgtgagtccatctaacatcataattaatcatgtggctgtgaaattcacagtaatatggttcccgatgaacaagtttacccagcctgctttgctttactgcatgaatgaaactgatggttcaatttcagaagtaatgattaacagttatgtggtcacatgatgtgcatagagatagctacagtgtaataatttacactattttgtgctccaaacaaaacaaaaatctgtgtaactgtaaaacattgaatgaaactattttacctgaactagattttatctgaaagtaggtagaatttttgctatgctgtaatttgttgtatattctggtatttgaggtgagatggctgctcttttattaatgagacatgaattgtgtctcaacagaaactaaatgaacatttcagaataaattattgctgtatgtaaactgttactgaaattggtatttgtttgaagggtcttgtttcacatttgtattaataattgtttaaaatgcctcttttaaaagcttatataaatttttttcttcagcttctatgcattaagagtaaaattcctcttactgtaataaaaacaattgaagaagactgttgccacttaaccattccatgcgttggcacttatctattcctgaaatttcttttatgtgattagctcatcttgatttttaatatttttccacttaaacttttttttcttactccactggagctcagtaaaagtaaattcatgtaatagcaatgcaagcagcctagcacagactaagcattgagcataataggcccacataatttcctctttcttaatattatagaattctgtacttgaaattgattcttagacattgcagtctcttcgaggctttacagtgtaaactgtcttgccccttcatcttcttgttgcaactgggtctgacatgaacactttttatcaccctgtatgttagggcaagatctcagcagtgaagtataatcagcactttgccatgctcagaaaattcaaatcacatggaactttagaggtagatttaatacgattaagatattcagaagtatattttagaatccctgcctgttaaggaaactttatttgtggtaggtacagttctggggtacatgttaagtgtccccttatacagtggagggaagtcttccttcctgaaggaaaataaactgacacttattaactaagataatttacttaatatatcttccctgatttgttttaaaagatcagagggtgactgatgatacatgcatacatatttgttgaataaatgaaaatttatttttagtgataagattcatacactctgtatttggggagggaaaacctttttaagcatggtggggcactcagataggagtgaatacacctacctggtgccttgaaaatcacatcaagtagttaattatctaccccttacctgtgtttataacttccaggtaatgagaatgattttttttaaagctaaaatgccagtaaataaaagtgctatgacttgagctaagatatttgactccaatgcctgtactgtgtctactgcaccactttgtaaacacttcaatttactatctttgaaatgattgacctttaaatttttgccaaatgttatctgaaattgtctatgaataccatctacttctgttgttttcccaggcttccataaacaatggagatacatgc

SEQ ID NO: 13128 - DNA, 369 bp, Homo sapiens
cctagtatcagcatcaagtatgtggtactactgtaagagacatgaatggagacttctaatttgtatcggagggaaacagaagctttttgtttgcatcatttaactgaactgtgaacccttgtgcctctcatctttatcatcggagttgacagtgaaacaaatttacatcagaagtttgcatctcgcgtatatgccgtataaaagaatttttttgtctttcaatgcagttttttggaagaaaatatttttaaatggacaatggactgtacaataagttacttgaaataagttgtttcagataaatttcaattagatttaaaataaacattttgtccaccttttaagttaatgaaataaaatttgaaactg

SEQ ID NO: 13129 - DNA, 7485 bp, Homo sapiens
tagcagcacatgtattgtaaatgtcccaggatcagagacctgttgaatttgagtgggtgtctcctcaagccttacctttctcaggtgttttaaagaaatgcagggaggcaatgtttctgaagacattttctgtttataagagagtagaaagaaacacgagtttgcactgtaaatgcagttataaccttttatacagatttaccttttcagtgttcagtacaagtttaagttgctttctttgagggcatttattctgtgtgactgtgggttttattttgtattctggttaagaaaataatgtattgagttactgtcaagtagccaagttaatgggaatgctccatctacctgttacagtgattgcaataatagtatattggagtttttcaaagaaacttaaagtaatgcccaattattaaatgaacacaagagctgagatgtcacattcgtcagcattacaggtgatctattttggtggcattttgtacttctctctgcttctaaccactgaggctctctaatcttcctctggagttttagtgaaaggatttattgagcagcttctggaatataatgtgcatgtccaaaatgaactcagcgcttcaaaaggacaaagtctgtagcctggaggggcttgagtggatgggagctgatgctgtgattttgagctgtggttacatgcagtcagtaaacctgtgagactgctggaggaaatgtagcagacagcatggaggctgggacccagcagctactttgggtcatgtctttactgtcctgcctccaaccctttagtctcgtagacttttgttcttgtggaaatttcttctgtattccagttgtgtaaatatgtatggaaaactgatattactaggttttacgttgcatctccagtattgatctttggaaactgatgttacattaggttccaattcgcaatagtagcagagactgacatgcttttattgacctgctaagcccctggatgatggagcgagaagggaaggggtatgcagtttacccaagtccaaataaagcatttcactaggttacacgttatgtatatgtgttacataacagtaacatacataactcactcctaggaatgtattttgcttcaggatttttaaattcaaataaggatggcagtgcccattttaaggaggatttcagctataactgaggacaatcaccagggcgttaagggggctttagtgttttggctgcatctgacctcattgaaggaatttcttgggagtcgggggtgtttgagtatatgtgtgtgtgtgtaactatcatgtgggttttaaaaatccttttttacagtggtatccacaaaatacttctctgcttataaatgttattgtagaaatctttattctgtgtaggtagcctatttaattgggttccactgaacctcatgggacttttaaaagaagggctatttaaggaattcacttggtagtactttgctttagcttttaaatggcttgattttaaaggagaaattctatttattaatgaaagtgtcacccttttggtgctaagcaggagaattcacaattaaagcagtgtgtatagaattatgatattcagaatcctgcatcttttaatgtgacaaatttttgaatcctgtgacttttgctttttaatgcattatatgattgtgtttggaagcttttactgttcttttcagaaatacggctgctttgcttgggtctcttcgagccatatttatagttggtcccagcattccagacttctggtaaattgttaaaggagtgaaaatgtagtttgcctggcagatgaataattttcactcatttattgtcttctggaaaccatttaacttttactgttttttatttttttggtatgtgtttttttttttctttttaagtgcatactttggccagtcttcctggtgcctgtagagttggatttttcagctctcaatactgaagcaaaagagattatagttaccagaagtatggcctctaatggtgttgagccttttcaagaaccaacaaattatctttgtgattacagtagtttaactatggttaaatgttactgctgttgcgctgctttatttaatgcactgtggaacaaaatataagggtactgttggggtgtgattatgataacttcaggcttttagctctcctcaaagtttgaggttaaaaaaatgttaaaagatgtgagttaaagtttatgtgtgtgatgtgacttaactatgcagaaaatatttaagttggatgtacttgttttaggtacatctactatacttattctctcaaacctgggtaatagtttctcagtgttcaggttaccttgagaaaggccatgcttagcgaactggatttctcctttgagaaattttagtatggtttgaggaaatcaagtgataaaggagtatgctgaatatgcaatcatttacttctactgagtgctgcattttaagatgctagatgagaagagtagttggttttgcttcattatgttttatgtctttgagagagatacaggtcttggaattcactttttaaatgttacgttccaaccttatatgttccaaggtgcagtgcactgtgaatcttttatttttaaaaaaatttgtaggtgcttttatgtataactttaatgatttataagatgctaaatgaattgtttttgtacctaaccattgtaatccaaaagataagggtgtggtttacatgcttttcaaaaatttttgttaagaagtagcaaatgaatggtttaggatttcaaatagtgataccctcctgagacatgagcatttggagaggcctgagaacctaatagaactcatatagtgtgagtgaaatttgattaaagatgttggaaaatgaagttggatttttgtattcatgtataaaggaaagtctcccagtgctgtcaaaggaattgtggttactacttgctgttctgagctttgaatatcgttatttttctattaaatatcaattagtaagtatagctaatgaagacatataatgaaagtaattttatgctgtaagattgaattggtacttttccttattaaggctttagtaatttgtatgtaatgtcaaataaaaggaattcaaatctgagtaaataacagcctcctactataggaattagattcttctataaaagtcaccatattgtatcctatagaaaagttaaggtctgagtgcatgtgtgcattaaaaacatttcactacctattctctcatggacttctcatcctttcttttttcatctccaacagttaaatggtaaggagagcaaagttaattataaaaattagacattttgccaagttagttttcttaccacaataccctcttggcttttttttttttttttttgagatggagtttcactcctgttgcccaggctggagtgcaatggtgcaatttcggctcaccgcaacctacgcctcccgggttcaagtgattctcctgcctcagcctcccaagtagctgggattacaggcatgcgccaccacgccctgctaattctgtctttttagtagagacggggtttctccatgttggtcagggtggtctctcttggctttttatctttatttttgtaccagtggaccttcctgctccctgagactgttttgattgacatcttttgtgtttctatattttccgaggcagtattttctttgtatgttaatcatagttatagtaaagtcagactcattaacttttcttcctagtaattttgacttggattattttctagcctgggggatggggttcatatgtgttgttgtaactttagattactaaacaaaacaaactgtttttttgtttgaaggtatcctttacatacctgtctgtaggtaagcaagtgttagtaaaaacaattttgtcaaacagtactcctgacagcttggtaaagtctaggtagagtttctgattttgtattatgtcctaagacttgaaagtgcatttgtctagttgccaaaagttctaaaaatgagatggtgggctttctcagcatctttttgcttcctagaattgagttgctcttgaagtctgtactcctgtgtcagaaagatggcagactgcaaatgggcagtacaggctttgccccatgctttcaaagtaggattctggattgcagtttcaaaaaaatatgatagattattgttatagaatcaaagtgtcctgaagggagaagaatagctatagttgctgggcaaagagtgtaagaaagaaactttagagcatttatcaatacttgagtgctttattatgttccaggctagaaatgtgatcattgcatggcctaagtgtagtcattcatatatatatgaatatctatatctatatctatacatatatatgtatcgccattatcgagtgttttctagccctggataaagttaatttttttgaagtttgattgccaagcaatccagtgaatctaaagtaatttttctcactttaaagaccagtgatgaggagtctggtccttcctgtactgatactgtagaactccagtcaaacttcagtgcactgctttcttacaggaagacaactcagaacacacagccataatctgctttggtgtcagtcacatcacagtggttatacatttgtcctgaatggtgattcattcctttccatctaacttccttgtgacaaatagcatttactattgaaatagtcttaaaatagggaaaagagtgaaagttactcttatgcatgggagtgggcttaaagggttgacttccaccagctgagtacaaacaagtgtaaagaaaaactatgataaagtatggaggtcttgagaattgttcataatgaaatctttaatctgggttatcagagtaatgaaatcaccaataaaaacattccatttatcttggatcttctgtggttagcagaggagtatggtctagctatgttagcagcttgaaggcacaacgtaaaaggaatgagctttcacaaggtgcttacgttagctgggtagtattggtcaaaggtactctgaagagtgaatgcagaaatcagttggctgtgtttgtaatcttgtcccacatggaccctaacctttagtagacttcagtcttttagtccagtagaagacaatggccctgaatatgtgttttctgctttttggtggaaggtttcctgcaggtggttgggtggtttttgggttattggctactgttcgttcagtgccatttgaagacctgttgtttcttaatcctttttcttggtgtgactggccaggaaaaagtccattgagtcctttttttctccctggtgtcttaccccttctgtagaataatccatattttaaaatttgtttcacatctttatagcaaacctgccacagacttgcaagcagtgattttatctttccttcctgagaaggtgatctcacttttgatgtttgggtcacctgtggacacctgtgctcttttgagtctcaaggcttatagctttcacattggcttgggaacaacagacttgtgtgtggttctagagtgaaatgggcagtgttctgctggtcctcagtctttgagaggtcttaggcaacatccttagtatagtggaatttctgaggtcaaatttaacatttaatatattctccttttagttcattgaatctgaggttctaaatctgtagcttcattttgagcacaagtctgcattgtcattttttaagagattggcaggcatatccttttgtgatacttaggaaaagactatggatggcagcaaatgaaagtaaaggttctcaactgtgaatgaaatttagaaagataattcttcagcagttggttgattagatgggttagtgcttttggaatatataacagtagacttgtattctttatgcactatacatatgatacgcactgacagaaaagcacagaagacatactgctaagagtttctttgtgcatttcactactgttctaggggactgctgtctctttggttccttttaggtttgtgttaggatgttgcacaagtaatcatttaatgttaaatgcaagtgtccaaagaaatgagtcttaaagttctttggtcatatttcactttagagttaggacaggagacagctaacctgacttccattttacaaatattagaaactttttcttcagtaacaaaaacagggaaggacaataaaaccatgaactattttgctttatgtctgtttttaaaaaataattgttttgaagtttgcttattagcttaataccttatagtacttttaaaaaatcatccttggtaattattgacttatcctagatccatgtacaattcagacttttatctgttagctttaataaaaatttaaaaccatctcatttcagaataaaataaacggaattacagttcatgcattagcatttttaagtgaagttctcttaataagattgccttttgtctaaccgaaatagggcatacagattagtttggatgggaaagtggtaagacttgactttttaatactgtgcctatttccaaaagaagacttgatgtggctttttacattatgctttaaagatgttaatggaggatacatagtcttaaaacaatttgtttgggagtaagttttagtcggaaaaaggtgaagatatttatgctgagttatgttaagcaaattattttgagaccttttgctggtagacaaaaactgaggaaatgtttcactaaatatattatggtcaatgaaaaaaccagactttagagtaaatgtgataaccaagtagatttgtgaactttatttctttagtaattatttttatcttatgtgaaatgattcaacctttaatttttgcctagattatagcaatgttttgttttaccttatagggcattttaatgcttggagaaagactataagtgaatctacttcaagggattctgttcatggtggtatacagttcttggtgctcttttggaaattgtcaaacatttactgatagcagaaaaggaaccccaaaacacctgtagtgttcaccttgttataagaacagaaacatttggaacaggtttcattctgtttctagatttatgttgttgtagttgaacagcaactgtttttttccctcagtgttaacgaaaggataaagactacctgtattgttgggtatgactatcaaaggatttccggtgattcatgtttgtgaattggagtttaaatgtttgcaggattactgtacttccaaagacccactagaatgtcagctgtactctgtactctccactgagaaaatgaacaaaatcctatgtcttaacagttatgctctaactttttgaaagctttttgatgtaaataataggttagaaactaaaagccttttaatcttacaaaatacaatttgaacgatggaaggttgttcagatactggctttctgtaaaaacatcattgtgttagattgtttgtaatgtactatcaataaaattggctgcttgggcggttttagttaccacctt

SEQ ID NO: 13130 - DNA, 1899 bp, Homo sapiens
cactcaggttataccatcttgactttgagtattggcagtatttgtgatcattaggaacctttcagattatttatctttttttttcccctttcttctagaactcttagctgtggaagaacatcatgcctatttataaccactgaatgcactgactttcaaaaactgaggtggggtgtgtgttacgaatgggctttttaacacttttagagtgttgctttagaactaccatcttcatatacaggagaaaggaagcatttaaatttttatagtgattatagagaatgattatatgatgtttgtaatgaataaaatagtagtttcattatttggcacaatagcagtttattttaaacaaacaatttgaagttaaacatttcatttttaaaaacactgaattacagttcttattgatgactttttaatgcagagtaagttgtttaagaaaggcctgaatatatcagaacatctgagcaccattttagaagagtcaactcttaagattatcattagaaaacaaatacgtcaacacctatgaaaagaagcggggaaaacaacaacaaggacaacaacaaaaaaccagtgaaattctacaagtgtcccttttaaaaatagtgtgtgctaactaagggctattcattctgccatttttaacttgagacacatttaagaataaagttggatgttctttttctgtgattatgaaatgcaataaaatctgaataaagggcaaagtttcttcctgatcagattagattaagtgcttagttttattcctaattctgccccttttaacctgatgtgtaccttactctttcctccctctcttcctcccttcctcctctccccgctcctttcctgcatttctccctccctccttccctcgtcacatctcttatatgagcacagtaattatgacctttttgttttggctacaacttgattgaaacaagttcaaaatttaaacaagttcatacaagtttttaaaaattctcaactggtagcttgcttgctgtgcgtcttccaaactaaagcctgcaagcgccacaattctaagtgccgccttccattttttttcagtatgttttcactggcttatgttttcagatatgattttcctttttcgcatatatggtttaataaatgggggataattttttttttgtaaatccgtgcttgtgccaagtctcatatttctttgccatctcagaattatctttttaccaccactgtttataaaatttccttagagactttttgaagggaaaatagagcaacagggaaaaatgaaagaaatgtcttggttactgagctctaaatagacaggtttgatggcacttctcatgatacattttagttattcttataaaagcaaacaggcaaacatgagtgtaaattaaagacaaaaagaaaactctggttttatatttgagaacacgtgaaaaatcatgggtcaacataaaatcttgagaaccttctactttctctgggaaagcattatatagtggtgcattagtttagaaagtcagctatgattttgcctatagttctagttattagctttggggttttcttgtactttaagacatacctgtaaattgaacctatttgaattatattccactgtatgtgtattatggctcttttcctattagagcaacttgtgtttccctgataatgtgtacattttttaggcatgtacttaatagttcacaatgttctaaatttggaaggacttaaaaaaaaaacttgtttaaatttccatctgttttgtaatatctagctctatatgtaaatgatgggtttgttggtatttaaaatgaatacaacttgaatgtaattaaagtgctgttttttggaagcgataaactttaaatatacttattaaaatgaaattctatt

SEQ ID NO: 13131 - DNA, 317 bp, Homo sapiens
aagagaataagttaaccacaaaataagactttttgccatcatatggtcaatattttagcttttattgtaaagcccctatggttctaatcagcgttatccgggttctgatgtcagaatcctgggaacctgaacactaagttttaggccaaaatgagtgaaaactctttttttttctttcagatgcacagggaatgcacctattattgctatatagattgttcctcctgtaatttcactaactttttattcatgcacttcaaacaaactttactactacattatatgatatataataaaaaaagttaatttctgcacat

SEQ ID NO: 13132 - DNA, 589 bp, Homo sapiens
aaatgtaaaaaggccactcccaggtaaaatccagggggaagagtcatctaagtttaccatgcagttgtttaccaaaaatagaggaggagagtcttaacttttgctcttggatttaagtcaaggtactgtatagaagttgtgtaaaatcagtatgaaagttcaatgttgctgttcttgctcagtgattttaaagaaattgagtagttcctatgtgatttttttttttcttttctaaactgcattcctgtgcccacctacggcatgcctctatgtattggctactacagtgttttaaaaagtgtttcagatatttctctaattatgtacaacctaaaatgttggtgttttgtatggatcacaagtgcagcattccttaattccttctgctatatgtcacacagttgttatttggagaaccaagtatgtattgcatgaaaacattatgacttttttctcttagtttaaataaactccaaggtaactggacttctaaagcacctttctgtttgcctgatatctactttagcaataattttttttacaaccctctgactcaacaaagtaaataaaagtatattttatcactatt

SEQ ID NO: 13133 - DNA, 1485 bp, Homo sapiens
cttgtggctatctttcagcactcctcttgcatattataatgtagtttgttcacagttttgtcttccaatactttgtgagtctggaaaaccacacattttatttgtatttcagtcacatttattactcagagtgccattcttctcatattgtcatgtttggccctgagggtgggtgattgctgacaattttgccaatgctgctgtatttctgggaaagatgtcacttcatgttgggttataatcccacagaatttactttaaatgtcacgtaaaaacaaattcacctaagatagtcttgcttattttgttgcgaaggccagtggaatataaaaatcaatggcattaatgaggagcacattctttgctgagggaaataacagtttttccaggccctagggtttatttagttcaacattgaagattgaaaagactaatgagaagataacatgacaatataaaaagacagaaactcaaaaagtatattcactagaagacagtggagccaaagaaaagcaagttgaaaaagaaagaggagacaatttaacgagccctaaaggcaagaagtgtgtcttctcctgcccatttctctctcccacagtacatcctgcattgaaccacgtgttgctggttactaaactttatggtgtcacaaaaagacaaatgattgtaggatccatggaagtgcacttaggcttgctgtggtggaggccatagtggagatgaaggctctgctctgaagctcttaattgtgtattcaccagtgggatggacaccctttcagcctaagcgtacgagtgaaaacaatgatgtcaaaagacaatagcaagtataggctactatttagggcaaaaggaatcttgaaatgaaagaaacagaactaaaaggctaactggagcataatccttacagttttgcactcaggggattaagtttgaaacatagtgtcttttggccaaattgaacctacttgtaatgtggaccaacttactttacacattttcatcagtcccaatgtatggaattagcttagttttctcatgcttgattaaaacaagacaactaaagctaatcattcctcttctagactttgtgtatatgatttaatcttttatttttatttttgtagaatgggggtaaaactacaaatctcctcctcagggtgatatttttaaagattaaggagtatgacatcaattaacagtctttaaagatgttacatacgctcaaagcaatgtgattaagactttttgcctatttcttgtataagttaaggcagccataaatgaaaatacaaaacaaacgtttgcttttgtatttgattcacaagaggattctccctgagtgtcaggggaggctgtgggacttcaccacgtggacaaacgaaagcacaggctactcagacttggccacaggtcataggtcagagaattttttcttcaaatgtagaaatgtaaattttcagcaataaaatatctgcatgcctac

SEQ ID NO: 13134 - DNA, 792 bp, Homo sapiens
tgttttcgaagactgtttttttcatcacgctcctgccacctcattattttgcattgaagatacattgccaggttgtgttttctgaaggattcagtgacttgctttctgtaaattatatggcttatcacttcttagacaaataacaaccaatagagatcattgttaagaatactgaggttctaatatactttctttagttctgtgagccaacagtaattattaagaacactttccctttaaaggaaacaaaagtgaataccatattgtttttactgtcatagtgttgctttcttgcctgtcctgcttagtttttacttgctggatgataccataatgtatcaaggagcgtccatggatacaagataagatgtgtaccttagtagaatacagagctttggtaattacatgaataaaattaagaaaatagccatatacaatcaaatacactatggcatttttatttgaatatgatgagtatattttgcttcggaaataatataggaaggaaatgtaaaatagtgagtagtatggtatcagttaattccagtctgagcttctctgtcaacttcagtttctctctcagtttaatgatttaataatagtccaggtttttgtgtgtttttctttatactgcaaattaataatgattcactttatagtttgggagacagaatcaggtcttgaataaaataattgtaatgagtgctaaatgggcaccattattcgaatcagataccttttatattctctttccataaatacgttgatttctgtcaataaaatttttgtgtc

SEQ ID NO: 13135 - DNA, 1908 bp, Homo sapiens
catttttacaataagatgtacaatttattacctatatggaagtggccaacagatataatatacagtgatcattctctatgccacaaattagctaatgctttcttgtttttatatttattttatggagctttgcccttgatgcactgatgccttaaaaattaacaaggtcattcagaagtagattacattgcctaaagtagaatgtgtaagtaatgctgtaataatacatatcatagtatattataatcagtatgtcatagtgttaaaggtgttttgttttcttattgatacttttccacaggcatctctgcatgaatttcttccacagtaaaaatacgttttttgtaaaggcaattgtacataatactcatcacttaattcaccacactctcacttcctttattagccttatacatctcaaactcttctcttaattaatgataggtatttgagtaagaatgaaaaaaataatgaacatcttcattaaaattgtcattgagacgtcagtgataaatgagctagatggctcaatatgtaaggttttcagtagtttaccctccggaacccaagttgtatgtatgtatacgtgtgtgtgtgtgtgtgtgtgtgtatcttacacatcttatttgaacttagttgtatatattagcgaaaactggtttttcatgtgtttttgtgccataacaactattgccaccagaataactttttttttgcaactgtgcttttcatttttaaaaaatttttgaattcccatcctaattttcaaataagtttcaaggagactatcaggattattattttaaagattagatttagtcaaataagtcttagcaggcaataaagtttctgtggtggcatatatcatgtaagacacttaaagtaagtttgtgaatttgtcaactttcgagcatcaaacaaatattttacttaaattttattttatcttatttttaggtgcttttaatctcaaaattctgaaaagcgaatagcagtgttttcagaaacaaatgtgaaagcagtcaaattaagtagatactatttagaaatgtaaaatactctccagatctaccattaatagaaaataaactaaaccttatattttatttttgccaaaatattttattataaaatatgaccaaaatatttaaaatgcacaatgcttttaacttaaatgtgctaaccctgtttctgtctgttttgtgctgtaccttttctgattcagaattatagaaaacttgataaatacttgattttaaccaatgagactacaggcagatgggactaagtgtttatgggacaattatgtactatttaacttaaatatattttgtttaataggaaatatataataatagcattttatgtaataaaatatgggcaacgattatcttggaaattaaagagtcaaagcaaagaaatgaagggctggtaaaatgaattttgtaatatcctcaggatacttttatcttaaaagtatgttgttaaagattttgtaaattgtatttcaacaattttaaatgtgttgagcaagttgcagtgcaaacactgtcattatgtagagagtttatatgcacataataacctgtacctataaatcgtgcaataaccatatgcgactattttgccatggagaaatctgacagcattgcaaacaatagtattgtttgatgtagttaaccttaagttatttttcagtaatttcttcacaaatcaagattcaaacagctttaaacacttccaatgagataaaatatttactattatgcttattagaacaaaaggtgtttaaggatgaactaaatattttaattgagcatttatatggataatcatacattatgtaagcccatatgtatttacatccagagtcataatattttaaataaacaatcatgcagaaacttt

SEQ ID NO: 13136 - DNA, 1217 bp, Homo sapiens
gcacatgagttaagattgtgactgatcatgatttatttgaagatggagcactgctgatttatgaaggaaaaaagaagaattttctaaagattacacatatttcagaaagactttacccaattcagttgtcagacataatgatttatttgaaggcttgttttatttgaagaaaagcatattgccaaaaattctggttaaaagcttcctaacgggtaacagaccatgggagagatatgtggttgggtaatgcaaatgtagttatacaaagaaaaatacagatgtctccagacctgaggactttttaatagggcagttgttgtgttggtggcacattggatatttctaacatgtacaaagctatgtattttgatttactttcatttcttgctatgtatatgtacttttcttaaaatgccaagaactttctcttgctatcattgctccttttgaaacaattcaattttcatgtctacagctgactgttttgttaagattgagtcatcgacattcaggatttaagtctgaggtagtcaaccctcaggaaaaaaaaaatggcttatctgaaatcagtactgtggaaatgaactatattagctattatgaataatgtccagtataagaatatgcttctggaattgagttctccttttaagtaccaatgatacttaaatttctcagaaatgtaatggtgtgtcattgccttgaaatgcttgcttagggcttcttttatgttatcttaaaaagtgctggtgaattttccattttttacatccatttcacatgtaagagacaaaaaagtctagattggtcttgatattgagataataaaaagtaagtagcattaagaaaggtaacaatcttcattctacagatgaactcattgaaacaatttaggggaatgaggggcaaaaggggagaaatactgctaaagaacatgagcataaaaatgcgtgcgtttcagtgtttaagaaggcttgataaagaatgtcacttttttatttaactgataagatttttgttattttttactttgataagtaaaccaaagaatatttgtatttcaagcagtttgtgtggtgtttctatataattttctgtgtataaataataaagtaggcatttgtttattttgtaaaaaagaaatgaaaatctgctggccagctatgtcctctaggaaatgacagacccaaccaccagcaataaacatttccattgtc

SEQ ID NO: 13137 - DNA, 335 bp, Homo sapiens
agggcacactacactattaataaaaatggaatcattaaatactctcttcacccaaatatgcttgattattctgcaaaagtgattagaactaagatgcaggggaaattgcttaacattttcagatatcagataactgcagattttcattttctactaatttttcatgtatcattatttttacaaggaactatatataagctagcacataattatccttctgttcttagatctgtatcttcataataaaaaattttgcccaagtcctgtttccttagaatttgtgatagcattgataagttgaaaggaaaattaaatcaataaaggcctttgatacc

SEQ ID NO: 13138 - DNA, 122 bp, Homo sapiens
ggagaagaaagagccatggagatagtagcagacaggctgcccaaggtatgaagcagatgagggaccagcactcagtctaacatgtaaacatcatacgtaataaaggttgtgtttcaaacctt

SEQ ID NO: 13139 - DNA, 558 bp, Homo sapiens
tgtatgccattaaaaaaattgtttttttaattttctatattataaacataaaataagtaatgagcactttctactcaagcaataaaaagcccaaatatattaatcctgcattcagcaaagtggcataaaaatcacctggtaagtatgcagcacattgcttatatcctgggtatgcattattttaaatgttgtatcattaaaaacctcagaatgatgaaaaatatgaatgatgcattgtttttgcaattgacctatgacaaactgtgaacctgcagatttcacctattttgatttactataagagctgggatttgattcattttatttatgcctaagtcatctatgcattaacatgtcatattcttaactttgatctaatgctttttactaggaaattttaatactgaaggactattttattatttttttctaaagatgtttgtcactagtttttcattattaaatgctgaggccaataccaagaagtttattttctatattatacaattatgaattacatgctcagctatatatgtaataaaatactttggtctgtgg

SEQ ID NO: 13140 - DNA, 134 bp, Homo sapiens
gccacgagctgccttcctcccaggctagtggatccaaagaccaaagtcagctgtctcctgctttcttgcccttaaaatcacctccatctttatattcttctgttatactattcctccaataaagtgatttgtag

SEQ ID NO: 13141 - DNA, 1474 bp, Homo sapiens
ttagtgcctctttctgcaaacttttccatctaaaaaaaaaaatgttttttttaagacaggatctcattctgttgcccagactagagtacaatattgcaatcacagctcactgcagcctcaaactcctgggctcaagtgatcctcccacctctgcctcccaaagggctgggactgcaggtgcatgcactaccatgcccagctttctcaccccaggctctgcagctattacttaaactcgtatttgaataagtctcttggggagaattatagaatgtttgtttttgtatttttttttaaagtaaattcaacttacgcttatataagcctttcacaaatccaatatgtacttaaattgatttttaataatatccctcagactgtttcccttatgaagtaatttggggattttagtgatctcatattttctctttagtgcttatcatgaaatgtgcttcactggttcagctctgttgtttccttaaacataaatgtcaatatatatttaaaataataatggaaacataggaaatcagctatttaaaccagatcacccttgttaaaaatcattcttgttagcaaactaaaatagtaacttttattatggatgtacagataaatattaattttattatagttttaagtacttgtgatcatgtactttttgattctaaaatagttgtctaggacaattttgggattcttaattatattttagttaagaaaattgtttaaatatagcaatacaaccaataatttgttttatgtttcactgcatataaatatttccattaaatcaagaatgtatattatctagtttttactatacttattttaaaatttttgaggaatcatagattctaatttttaagaacaaattctgaaggtggtaggattaaaagaatatttccactgatggctaagcaaagaagttgtaagatgactcactgaggaagggactgctttatacatcacagtactgctatttaaaaggaaaacagaaatttttaaatcccttcaaatgtttcacttttgctatgctgggaaaaattttgaagttcttggtaaactgaataatgctaatccatgtttcctgcacattagttcctttaatggcagggaaggccatctggttaacctgtattcacaaactctcaagagtttctacttatttcaggagcttaagaatttagataactcagccgggcgtggtgactcatgcctataatcccagcactttgggaggctgaggcgggtagatcgctagaggcaaggagttcaaaaccagcctgggcaacatggtgaaaccctgtctctactaaaaatacagaaaattatccaggcgtggtggccggcatctgtaattccagctactcagaaggctgaggcataagaattgcttgaacctgggaggtggaggttgcagtgagccaagattgcaccactgcactccagcctgggtgacagagtatgactg

SEQ ID NO: 13142 - DNA, 477 bp, Homo sapiens
gggaacaagagaaaactatccccagaatcagccacctcagcccctagtattttttctatcaatgccttgtatcagcctcaaagcagcctgttcaagttaactccctgttgaactccagggcctatacctctcttggctgaatagatataagaacatccttgcctgatgggttcatattcctcttcaattctgctgtctaaaagaagaagagatggacttctttcttccctgatccctgatacaaataatccctgggagagacagtaatttgaaaatgagtcattaatgctgtgtctacattacagagatataattcccattccaacagccaatatttattgtcggtttattttagtcatctaccttaggaattcatttttggcaatgctgggttatgctgagtttatcttactaaaatagaatctgtgtcaaaaacccccaatgactttagcaacaattaaacactgaagcacttgc

SEQ ID NO: 13143 - DNA, 603 bp, Homo sapiens
tgacatcaatagaaaaatgaagaaatcctacagcataaagcacattgctgagccagagtcaaaagaactcttcttgtaaatcactttttaaattttctctcactgatgccctttggaaattattggaaatttctggactatcctctttggaaagagaaccatgaaaacaatgcctcaccagcagaagaacagaatatcaggatgccttaaatttatagtagtagactgtaaaagattcattttggggtgatatctgtatatataacttgtttttttaaaagatgccgtttaaaagcatgattgggaaaatgtatgttttttaagagtagattgattcaccctacccacaggacattcaccaagccactgataccattttatatttcatcaattgcatgagtatttgctaatgttgattgaacctccctttccccataatgtgggcagatttggctcagctccttcatgagatcaggtcagtggtattgtttctgtcaagagtgttttttctgtcatttctactttttgtataaaggaaataaaacaatgttaacagccacctataagcttggggcacctactttctaacaaatctgtgatgtt

SEQ ID NO: 13144 - DNA, 457 bp, Homo sapiens
caataagattgttgccgttaagaagaccttggatgttgttccagttatgctggattccacagtgaaatcatttaaaaccatctaaataaaccactatatattttatgaattacatgtggttttatatacacacacacacacacacacacacacacacacacactctgacattttattacaagctgcatgtcctgaccctctttgaattaagtggactgtggcatgacattctgcaatactttgctgaattgaacactattgtgtcttaaatacttgcactaaatagtgcactgcaagaccagaaaattttacaatattttttctttacaatatgttctgtagtatgtttaccctctttatgaagtgaattaccaatgctttgaataatgttcacttatacattcctgtacagaaattacgattttgtgattacagtaataaaatgatattccttgtg

SEQ ID NO: 13145 - DNA, 1453 bp, Homo sapiens
aaatcctacatggctaaaagaagcagaagcaagtttcgaagtcacagtcaaggaaatcaatacctaccaatttaacctaaacgctatgatatataacagctctagctagtggtaaagtgcacagtcccagcttaattcagggcagggacatttccattagaatggtgctcttaaaaatagaaactgaaccggggcggtggtcaggctaaggccaagtgtttaagaagtagagtgtagctgccagcgtagaaacccatgaaaaggaggccacaggagattcctgggagcactgggtgtagcaaaacaaagccactctctgcttcagtcgcaccatttgctaattgaaaatcatatcctgaatcatactgagactgatcaactttggtagcttttttgttcagatcttatgacacactactcttctcaccgtgagattttctcagccagtgatagtacattctgaaatgctggcaccaggagacggccacagacacacactgctaaatgtgaagatggaactaaactggaaattaaattatactgacaatattatggcatttttaagatcatggcattttaatttacattagagtggagttgcatcatactcaggggttagcttccaaggtcagtacataggtaaaatgggctattaggatgatccttgaaagccctttagaagggtgccatgttggaaacctgtacatccacaacaagtagcttttcctcctatgttggaaaaaaagactgtttctttgtttgaagaccaagtgaagttgttggtgtttgtttaggggccattttgttaaaaaaaaaaaaaaaaaagcacataacttttaacactagaatcagcccgcaagatgcttgccccgctagtggcagatgtgaactgacaaggagtgaagcgcccacccagcggatggacagcacccacctgggtttactcaagggtgtgcattcattttaggtgggatcgccacaggatttcatgttattttccttacggcttccttttcactgacctcatttgttgagttaatgtaagttaaatgtgtttatgatataactccactgtacatcatcctttgagtagtaaaggataaaagcatatatactacctatatgtatgtgctgtatgtgggcatttcattgagatctaattaatagctagcctatttatggttattcgttttagtaagttctgtgggagcaaggtatttaaaatcaaaactaataactacatcatggtttttgattaggatctaaatattcaggttttaagcctgctgcaaacttttaaaatattatgatagattctgtactacatgtgggaaacaagcaagaactaaataatcaaatgttgtcaaccaaaagtaatagttgggtattggagatttttttaaaatgtttttatgttattagctatttggagttaaataaaaacagaacaagg

SEQ ID NO: 13146 - DNA, 2372 bp, Homo sapiens
ctctggacacagacagatcctggggagttacttacatgttcatctgctgtcttgtgattaaaatcatctctgtagtgaccacgtatattttcaaggactcactcttagaaacaaaaatgtcatactttcatacttcattttgtggttgtcttacattctttttctttttttttttttctctaatttaacctttatggaagctttaaagttttgtcaaaacatgagtgctttgcccatcagtgaatggaatggaccaatgaggtggtatcaatgaatatagttccatagaacattttccagaagttcttctgttgtagaaagcagtacagtatcttaagtgtcaaccagttatatacctaatctggttttttataacttctgtaagagcataatcaaacaggaattttcttttctcagtggataatacaacagagaaaacagagttgcccaaatatttaaaagaagttattccttgagaagttcatattttgtgacatctgcattgatttcagtattactgatggtactgttattcataagtcatattaacattctctccgtgaaatcatggtacagtcactgcccagaggtactgaggaaaaagcaatatgggttcggcagatggtggtggtaaaatgaatcttaaggagtgtggtaaatatgtgctccgcttttgttgcatcactatgtgaagtactgtgttgcagaagtggcaaaagcgcttatttttaaaaatgcaaaatatttgtacaatgtaactttatgcttccaaataataatgtatgttagacagcaagaaatgaatactttaaaaagtgatgtatgttggagttataaagaaatacactaaggagaggtagtaaatgtgaaccttgttgcagtgtataaggtggaagcctaaagaaatctcaccgaaacttactgctgaatgattacattctcccttaagcagaaaactttggatgtgccatgcaatggtgtctgtgtaattattttgctctttgattaaaaaaaagacccccagcaataaaaagtgggtcactctatgccctctgtgcacattagtctcttgtattcaactttgctgattctctggaattttcctactctttagcataattttgatgattgaaaaatattttggaaaggatgggtcaggtgctttgcctccatagtcttttgaagtgcctgcatatgaacaacaacaacaacaacaaaaaattctgtaaaaaaggaagcccattccacttttcaagtatgctttgttttaagccataaagacacacatgtagttttgtcacattctactagccaaaattttcaagaagggttaaaacaaagactggctagaaagataattattttgaataaatctcatattcatctttcatttatataattgttacttattcctcccatgcagtctcttcgttgtctttaagtgtgtgcctccaggcatgcttatttatttttattgtctcaaggtaacatttaagatgtatattaaagtaaagctacatttttttacttcattattgcatttacagggatttaattgtactttgtaatttatttttcttattagccaaaagtttaatgcatttttttttgatgaattaggcacccacatgaacaccacaaatcaggacattgtttatcattgttgctatgaatcctatgaatgatcttttttttattttaaagacctacacttaacctacaaaacatttgctgtataatttggtcaacagtttctatctatctgtatactgtcatgatgtcttaaactgcaggagttacatactgagtttatatttttatttgctttgagcaaggtagataaacattttggccattataatgtgaaaccacttcttctttctttacagtatttgaccaaacttgtgtgtctatgatatttgtaaatacatgcgaatatctgtatttcttatcataagcctatttagttttattctcagtagggttttttggattgtacagtgtttatatgatctgaactccttatacataagaaggtgtgtatattaatccaattatggacttaaaatattttaaaagtataaatacccttatttgctgcaaagaccagtgtgtaggcatttgctttttagcaatatttttaagtgctccattttaatgccgaggaataagtcttttggcaacacaaactggtcaataataggtaatgcaggtatgttcaggttaagccaacaatgttttgcatttttatgcttattttctgtcaacactaatgaagtcaacattgcctgaatgtctgaataatgaaacacatccctgtttaaaagtatgtaactgaaaaagaaataaaaaaaaataaaagtagttttttt

SEQ ID NO: 13147 - DNA, 1398 bp, Homo sapiens
tcgaccagattgcttgggccatcggaatacctcatgtttccctttgaagaaggtgcttcctgaggcgttttgtttgagtgcaccctgctggtcagaggtgcaagcagatgagaatccagacattgcatgtggaggtctccagctcaggaaagtgaggagggaaataattttggttcttgtgcaataaaagttgaccttgactctctgaggaagattttgctgcttttgcctgaagaaaacagacccatctctggaggtctcaggaagggcccagcgaacacactctcttggataattaccacgatggcgtcagcaaacactccaccctgtgcctttttagtccttcccgccctcctgcctctcccttacacccctcttaacgactttcaaactaaaggatacatcatatactgacaaactcaatgtggtcctttcaagaattagccatgagtctcaaaaaggcaataaatggctctaagtggacaggtttgcttcaaacaagtaacatctacattttgtcttttttttttcagttctcctgttatgttctggttgaaatcacctgtgtgtcttaatttctcaattcctttttggcaagaatatcaagcaaggtgaatttaacattatgtttatgttttgttttgttgctgtaactaatagttaattggactgattcttacccagccctggtcaagaatctgtgaggcatgtgactgaagtactaaattaaacttattttgaaaccaaacctaatttttaagccaaaaggtgtaatagtgatttaatacaggatgaaaaacactgaatttttaagactgtaggtggactatgttagtagttttcaagcaggatgtctgtattcagcattcaataatgctaaaatccctttcagcatgaaatttgtatgtttttatcctttgctgactaaaataaaataactggtggtttgctaactatttaccatatgggttggctggtttttattaataattgtttagggtatcataagatctgtaagtacaaaggatattctgtttctatctgcaatgcatttgataatcatttctatgaaatgtattttatttaatcagataagctaataagcgaattggttacatcgtttgtatctgttggcctagtggacagctgtgcctggtgcacctctggcttttaataaatactcattggttgaaacaccctgctaacactgtgttttgtcagttcgtaaattcctttaaccaagacttaactatgctttttaactctttttccacctgccatctactactaccaactcacttatacttccttcctcccaagtaatcatttcaaaactaaaaaaggatttaagttcttgggttacaacggtttaaaggaaagaaaatgaactttgaagtc

SEQ ID NO: 13148 - DNA, 544 bp, Homo sapiens
gtacattttcaacagtttgaggactaagcctttctaaaataacattgtaataaaccatttttactgagattgcaacgttttgcactgataaacatgagaatctggaggaaagacaattgttttcttgtttaaaatatgtgtggaaaggaatgcaattgatagaacatttaaagatatatctgacaaaatacttaagagtatatagcacaggatttaatttctcaatctgttgcatgtgctaattatgagtattactagttgataatcagttttgtctaggtcataacataccatttgtaagtttgtttgctttttcaggtttatctttgcagtgaattatgctttgctttaaaacattccgctaaaatcataatgggacatataaattattaagctgttagaaatgcattcaaatttgttttttctgtgttctaagaactcaggcaattttaaggataaaaactaacattggccaggcacggtggctcacgcctgtaatcccaacactttaggagaccaaggcgggcagatcacttgaggtcag

SEQ ID NO: 13149 - DNA, 41 bp, Homo sapiens
tgaaagaagaataaaataataaagtgtttcaatctctgctc

SEQ ID NO: 13150 - DNA, 753 bp, Homo sapiens
aattttcaactgtcttcctcaaaataaagaagtatggtaatctttacctgtatacagtgcagagccttctcagaagcacagaatatttttatatttcctttatgtgaatttttaagctgcaaatctgatggccttaatttcctttttgacactgaaagttttgtaaaagaaatcatgtccatacactttgttgcaagatgtgaattattgacactgaacttaataactgtgtactgttcggaaggggttcctcaaattttttgactttttttgtatgtgtgttttttctttttttttaagttcttatgaggaggggagggtaaataaaccactgtgcgtcttggtgtaatttgaagattgccccatctagactagcaatctcttcattattctctgctatatataaaacggtgctgtgagggaggggaaaagcatttttcaatatattgaacttttgtactgaatttttttgtaataagcaatcaaggttataattttttttaaaatagaaattttgtaagaaggcaatattaacctaatcaccatgtaagcactctggatgatggattccacaaaacttggttttatggttacttcttctcttagattcttaattcatgaggagggtgggggagggaggtggagggagggaagggtttctctattaaaatgcattcgttgtgttttttaagatagtgtaacttgcttaaatttcttatgtgacattaacaaataaaaaagctcttttaatat

SEQ ID NO: 13151 - DNA, 3898 bp, Homo sapiens
caccaaaggaccgcttggtagccactggaaccctttccagaactgctgtttggttcttctccatcctcaattttgccactttcatgtgaatgttagtcaattcggtgggcaatttttggacatgaaccagaaagctgaaagctgaggctgacacggactgtaggtgctttttgttcaggtggattcgaaggagttagagatgtgatttcccattgctgttagttttagaactatacccgtgaagcatgacttattgtaagatgttggctgaaagcatgaacttgcagaactccctcggagacgcaggttgcagtggacattgggattgttgcttgaaaaattaaaatttgaatattttctctctcatttgcatcatacagctctacctaggattgtacagtttaccataaaatttacttcatgaaagtgggaatcactgaacatgtagaagacaaggaacatattgttaactcctgattcttaactttattcaactggactcagaattgtagggataatatgaatgcaggaggaaacattctgtcaggcggtatgactggacagactttgaatatactctaaaagtggacagaaaatttacgaaaatcttagattttgtttagaatgagaaaatatacaattagaattattttagaaatagtaggaagtattgcagaagtcaatacacaaatgtgccaggcagaggtggttttctctgtttgactctcaaccaacttcagatctatgacattattctgatcactggctccatcatacatattcaccacttgagattcataacatatcaatagttatttcataaatatagaaatgaaataattttatttttgacagactggatggaatgagtgtgtaatgattgataaaggttgtaaattttaaatgcaagatgacgcttacgttctgtaaaccattagtaatacatgctgtaatatagaattagtggaacattttgattaatctttccctagaagtgactgaaatatttttgtgcatatttgagaaagggaactttccttttattaattgtcaatttagagaaactatgcttaagctggtcttttgcattgctaatgtgacatgtacccaacttttcattaatttgtatttccatttttaaattgcatattctatgttttgtagtgtttggattgttaatgaaaaaatattatatgttcgttattccttgtattattgccacttatcttttgcttgataaaaatgcgttgttcttttttcttttggagggacaagatgaaaatatataatttgaattgattaaaattggtcgttactaaaatagtatagtaaccacaagtgattggcttataaatgaagtagaaatgctttttaatattccaaaatagagttccttttgatctgttggtgctgagccttggttaaaccagggagaaggggagcagaaaggaaacgttgttactgatgagtaccacagactcatcttaaaaaaaactctcattatggtgatcatagaattgaccatccaaactgggacactcttgagagtaaatggagggcattattaataattatcttgtaatgaacttaaatctggactgttccaggcaaaccagacttatcttgcaatatgagaatgctgacacaatgcaggaaagccagtttcccttttgttgatctacttgaccaagcaaaggggctgaaaaactgaataaggaaacaactttataagagaaacagtggtcttcaatcttttaaagacatgaaatcctatatggcattctgtctcagtgagtcagttaacaaatacgtatgtgcaacccttctgctagtagtgcacataagtgattatccctgccaggtatcgagttggaatatccagttatttcatgtcacacatcggcacgtatgatggtggtttggtcagatggataatacagcagacacacttagaacactcactgcactggtggctgttcattttgaggaactccaaagtcaattcaaggaaataaggaatgacctggaacaggccttagaaacaattgatttattccaatagttaaccactggctggctcccaactctaggtgataggcatctaattgagacatgtgtgagtcaatagccatcggggtcctttttggtgagaagaaataagacattttctcccttttaaagatcatctcttcagagctgcatggtaaatttgaatttccccattgttctctagagctaggtcaaaaaaacaactgtttcttttcttattccactattaataaattgaaagcttgctgtacaaaggcaacagcaacttaaaaaagaaaatctggacaatagatgtggactccaaggggccactgccatcccttcctgtgtgctctttttgacaagtaaatcactccagttagctgatgtcctgaaatgacatttgtacctgaggcaattcttattagagcttactcaggacttttcaaacatcaggacacacatagcaatttggatgttgtaaaactacgtgttacatttggagaggtcttgttgagaaggcaaaattttctaaatattttgatatcaatttgggtaaagaaaggaatacttttgttagaatgagaattaaagagaaaacaaaagaatcttggcaaaattttccctctgaaattacaaactttaggaacttttccagatgtatcgaatttaatttgacattgatgtcactcttcataccaagtgaatctattctcatgaactttgaacccatgttaattttggaccctataactaatttcctttctgtatcccatggtggtcaaagcagtaaaggagtttagagatacttagcaaatgccattcatatagtattgttagccaaactattattccttccttagaagttgatgtatcagaaaatttataagttatttgtatttatatataagtacatcagaacttgcccacatgataactcatgtttgctttaataaggaaaatatgttatttgaggttaattatatgatagtgaggaacattttacaattatttacagtgtttgacattaattgctgtcctatgatacagtagtaatgttaacagagagtttaatatgtttagcattatctttatggaatttatattcaccaatttcaggaaaaccaaccatagaactttataataggacagttataacctgactgaaccaaatccatcagcataatgactgtgtgttctgagaaatgcaaacaactttatgaaagtgtggtcatcttgacccccaaagagccacagtagctgtcaattattgagatttttaaatggtaaatattgcaaaagttaaacaagggtaccacaatatcatttataattgatgtcaatattagtagtccactttatgcttaaaataaaatcataaaaaatcaagttttaaggttatattttttaaaataatgaattttctatctctaggcaacatgtctttattattcaagctgaatgtttaagagagattttggtcttaaaggcttcacatcatgaaagtgtacatgcatatgcaagtgtgaattacgtggtatggatgtttgcttgtttattaactaaagatgtacagcaaactgcccgtttagagtcctgttaatattgatgtcctaacactgggtctgcttatgctagttcagtatttggtctaggcttcattttgatatgactgaattgcaatctatatttttaaaaagaaaaatcaaaatacattagggtttacttggttgtggcaaacaaacaaaaaatgctttcagtgttgaaatatctctattttccaaagatgataaactttcatcgttcttagcctacattgtcatttatatcaccaaatgagtttatagattaatgcaataaactttctaat

SEQ ID NO: 13152 - DNA, 3164 bp, Homo sapiens
gaggagacctacctgggagactgagactttcccccacttttagcttgatgttaaagaagtggttgtaccttcctaaatcgaatagtctaaatgaatccagtagtttttatcattttcctgtagcctgcaatttttctttctctagaaaggcatcatgtcattccaggagacaaaaagaaacaaatcctttttatagtcataccatttcacctatcatagtactcaaaaaagaaaatatacaaatctatttacagcacaatttaatataccagatttataaggtggaaattcatgtgcagagacatttaacttaatgccatgtacttgattattttgttctttaaagaagacattattaaagaacatgttggttgaatgtttataaaagcatgatttgctttggcttcatctcttttctgtcagtctttgactacttttgtatgtgcacacgatctcagggctggtgctgagcagcctgctcaacagtcactataagacacctacttgtcgggagatgttccacatttctgtgcatgttttcagtaatatgggccaaaataatggaattgattattttcctttttggccatcacgtacacatgtaatctggaaaatcatacctttgtcaattttaaacataacttttggcatttcccagatttatactatgaacattggggtaatacattttattttttcattgctatatgacagctaaggggcaaatgattcaagtatattttaaatcagaagtattcaaattatttttgtataatactgttcagtacttccaagaataagctctgacaacagccattgtttctgcttccactcatattctctacacattttaatacagaaatttttgagagggggttactttattgcttgtgggttagtatgtctcttacttcaattaaggttacttatttggtttgccttaagcattacttttttaactttgtgccatttggtctttactttttatggatgttttcaaagaaactattttatattcaatctagtttatttagtctactgtatttctatttcgtggaagccttttcccctcaaataatatattatatcatttttggacttatataaatgataattaaataaatttttttcttaatactgttggactttgtatatacaagttcaaataactttttcgaagatagtttcttatataaatgtaatttaatttttttactcttctatacagttctttagatgtaaaagaattagcacaatctctggcagttttataaaagctgttgaagctcttgtcctgcactgtctttaggtatcataggtatcaggtttgctttgtgttaatgccacttcaagtcattatttggtttctgctatttttttacctgaggataagaagaatgaatattaaatttgaatattaaatatatgttactttccaagcactgtataatgactgttcagtgaatatcagacttccgtgtcattaaaagtcatgagagacagcacagagaggttataggttgccttggtgtacttttgtccaggagtaacagggacagaatactttctttctttccttcaagtacaagaaggctttctctaccatttgcgtctacactttattttaaaagctatccttttctagtagtattttatcatggcaatggcatgatgacaacaacagtctttcattacagactgaagggaagcatgtccttacttaaaatagttctgctactttccctcctattataaggaaatcttacagattctaaaaataccttaatttttctttgatttttattttaccaagtcacaaatgtctttttgatgttttgagaattgttctcatagaatcacaaatactgacatttcattagatgattattttcctagaatccccaaagagcagtggcagtccatggcttggttgaagctagaaattttcctgcccctggtgacctggtaagcctcctgctcggaaccgtgtgagtgggtgaggaagatgagagatggtcagatggaagagagaaatacatgaactgctctggcctctctggttctgttcttggcccagagtttttgaaaagcagcggagcatgactgacttcacatgctcagctttctcagccttttgtttattttgttgtccttagatttccctgttgtaaaaggggcaagaaaagtaactcatcatctctaacacaccatggcagcttagccaggtagtcttagtggtggtgtttaggcataagatatgctgatcatcagtctcaggccacagtttccttcactaatcgtccagcttgagtgttctgttctcttcctgcccatttccttgaacctcctgctctagccttggcggagggagagtgctatttgcttttgttctccctctgtcttaggaaaagccatctttaatatagttcttcaccactgttggggttgttttgtgattttttttttcttccgaagaactcctggttgttattggattttgtattttaatacaaattattgaattttataagcttgtacacaatatttaattagtgtgaaaggaaacaaagaatgcaggaaaaataatttaatatcaacctcagttgacaaggtgctcagattattcaattcgggatcctccttttgttaggtttttgagacaaccctagacctaaactgtgtcacagacttctgaatgtttaggcagtgctagtaatttcctcgtaatgattctgttattactttcctattctttattcctctttcttctgaagattaatgaagttgaaaattgaggtggataaatacaaaaaggtagtgtgatagtataagtatctaagtgcagatgaaagtgtgttatatacatccattcaaaattatgcaagttagtaattactcagggttaactaaattactttaatatgctgttgaatctactctgttccttggctagaaaaaattataaacaggactttgtagtttgggaagccaaattgataatattctatgttctaaaagttgggctatacataaattattaagaaatatggatttttattcccaggatatggtgttcattttatgatattacgcaggatgatgtattgagtaaaatcagttttgtaaatatgtaaatatgtcataaataaacaatgctttgactt

SEQ ID NO: 13153 - DNA, 3056 bp, Homo sapiens
atgttctatacagtggacagccctccagaatggtacttcagtgcctagtgtagtaactgaaatcttcaatgacacattaacatcacaatggcgaatggtgacttttctttcacgatttcattaatttgaaagcacacaggaaagttgctccattgataacgtgtatggagacttcggttttagtcaattccatatctcaatcttaatggtgattcttctctgttgaactgaagtttgtgagagtagttttcctttgctacttgaatagcaataaaagcgtgttaactttttgattgatgaaagaagtacaaaaagcctttagccttgaggtgccttctgaaattaaccaaatttcatccatatatcctcttttataaacttatagaatgtcaaactttgccttcaactgtttttatttctagtctcttccactttaaaacaaaatgaacactgcttgtcttcttccattgaccatttagtgttgagtactgtatgtgttttgttaattctataaaggtatctgttagatattaaaggtgagaattagggcaggttaatcaaaaatggggaaggggaaatggtaaccaaaaagtaaccccatggtaaggtttatatgagtatatgtgaatatagagctaggaaaaaaagcccccccaaatacctttttaacccctctgattggctattattactatatttattattatttattgaaaccttagggaagattgaagattcatcccatacttctatataccatgcttaaaaatcacgtcattctttaaacaaaaatactcaagatcatttatatttatttggagagaaaactgtcctaatttagaatttccctcaaatctgagggacttttaagaaatgctaacagatttttctggaggaaatttagacaaaacaatgtcatttagtagaatatttcagtatttaagtggaatttcagtatactgtactatcctttataagtcattaaaataatgtttcatcaaatggttaaatggaccactggtttcttagagaaatgtttttaggcttaattcattcaattgtcaagtacacttagtcttaatacactcaggtttgaacagattattctgaatattaaaatttaatccattcttaatattttaaaacttttgttaagaaaaactgccagtttgtgcttttgaaatgtctgttttgacatcatagtctagtaaaattttgacagtgcatatgtactgttactaaaagctttatatgaaattattaatgtgaagtttttcatttataattcaaggaaggatttcctgaaaacatttcaagggatttatgtctacatatttgtgtgtgtgtgtgtatatatatgtaatatgcatacacagatgcatatgtgtatatataatgaaatttatgttgctggtattttgcattttaaagtgatcaagattcattaggcaaactttggtttaagtaaacatatgttcaaaatcagattaacagatacaggtttcatagagaacaaaggtgatcatttgaagggcatgctgtaatttcacacaattttccagttcaaaaatggagaatacttcgcctaaaatactgttaagtgggttaattgatacaagtttctgtggtggaaaatttatgcaggttttcacgaatccttttttttttttttttttttttttgagacggagtcttgctctgttgccacgctggaatgcagtaacgtgatcttggctcactgcgacctccacctccccagttcaagcgattctcctgcctcagcctccctagtagctgggactacgggtgcacgccaccatgcccagctaatttttgtattttgagtagagacagggtttcaccgtgttggctaggatggtgtctatctcttgaccttgtgatccacccgcctcagcctcccagagtgctgggattacaggtgcgagccactgcgcctggctggttttcatgaatcttgatagacatctataacgttattattttcagtggtgtgcagcatttttgcttcatgagtatgacctaggtatagagatctgataacttgaattcagaatattaagaaaatgaagtaactgattttctaaaaaaaaaaaaaaaaaaaatttctacattataactcacagcattgttccattgcaggttttgcaatgtttgggggtaaagacagtagaaatattattcagtaaacaataatgtgtgaacttttaagatggataatagggcatggactgagtgctgctatcttgaaatgtgcacaggtacacttaccttttttttttttttttttaagtttttcccattcaggaaaacaacattgtgatctgtactacaggaaccaaatgtcatgcgtcatacatgtgggtataaagtacataaaatatatctaactattcataatgtggggtgggtaatactgtctgtgaaataatgtaagaagcttttcacttaaaaaaaatgcattactttcacttaacactagacaccaggtcgaaaattttcaaggttatagtacttatttcaacaattcttagagatgctagctagtgttgaagctaaaaatagctttatttatgctgaattgtgatttttttatgccaaattttttttagttctaatcattgatgatagcttggaaataaataattatgccatggcatttgacagttcattattcctataagaattaaattgagtttagagagaatggtggtgttgagctgattattaacagttactgaaatcaaatatttatttgttacattattccatttgtattttaggtttccttttacattctttttatatgcattctgacattacatattttttaagactatggaaataatttaaagatttaagctctggtggatgattatctgctaagtaagtctgaaaatgtaatattttgataatactgtaatatacctgtcacacaaatgcttttctaatgttttaaccttgagtattgcagttgctgctttgtacagaggttactgcaataaaggaagtggattcattaaacctatttaatgtcc

SEQ ID NO: 13154 - DNA, 359 bp, Homo sapiens
gatttttatatctagaactttcatatgctttcttaggaagagtgagaggggggtatatgattctttatgaaatggggaaagggagctaacattaattatgcatgtactatatttccttaatatgagagataattttttaattgcataagaattttaatttcttttaattgatataaacagtagttgattattctttttatctatttggagattcagtgcataactaagtattttccttaatactaaagattttaaataataaatagtggctagcggtttggacaatcactaaaaatgtactttctaataagtaaaatttctaattttgaataaaagattaaattttactgaaatatttt

SEQ ID NO: 13155 - DNA, 1023 bp, Homo sapiens
gacatttgaagaactggtatgctactcactggtgaaggacagtcaggtgaaggactgtaagcccacacaagctcttcttatctctactagaattaaaatgttaagtcaaaaacggctccttttttgcgcctcctagtgaaacttaaccagctagaccatttgagtaccagcatttagttacaaacgtcaaaggcttccggtgctgcttaccttccttttttgttaatgtgcttttatttattaaaaaaaattacaatgaagatgcctgttttgtctctactgtgtactctgatcgtatctttccaaagtgcagactcttgtgaagttttcttaaattgttcactttaaagaaaatgacgtaccaacaatgatttggcttttatattactgtaagatgttataatgttaatgtggatgtagtgcttttactttacagattgattggaataagattattgcatatgaatttacccacaggactctgaatcatgttacccactcccctcacaatgttgtccacttagtgagttgcattgatctatccgtaccaaatgatgttgaataattacatatctttcttgactatactgatttcttattttggtcactattactaaatctctgttaatattctctcttttaactgaaaagggatgggatagaagggtttgcaatgccatattattggtggagggctgttttaacatctttgaagtatggcttgctgaatatctttaccaacatcttgaatatatattctagtgtccacaagatttagcaaaaagataaagcttgggtggaatatcattttaaaatgttcatgttctgttctatattttcttcacctactctccaaatattgtaatgcaaaaagtctcagtaatgatttggtagtattaattttgtggtcattgtttctcttcgataaatttattttcattaaatacttgttagagggttttgaaatgtttttcaaatatgtgaaatgtgaaactgctgtcttttatattaaagtaattaaag

SEQ ID NO: 13156 - DNA, 1465 bp, Homo sapiens
cctctagcaggctggctggatcacagctcttggcaattacattatttataaacacacacactagcatgtttttcagaccaaatattatcagattacatataatttaatcaaattaatttatttttttgcctgccaaacatccaatgtggtgcttgttttggttacacaaacattttgatttatactatatggcttcataaataattttatatgaatgaattagttggatccagtaatataataaaaagaaaaaggaaaaaaatagatcattatacttaaaacaagttttcgttgtttgttagggctatctctaaggtgctactctctccccaccaataacattgaattatccagaatgtatactgacttagcataatagtttaggtgtatatgaagagaaactatttttgttttttggtgtcctgctgcagaattagcccattttctgtcacctgcaggagatgtgtaaacataatgaacctcatgctgttgaacaggtttttagagaatgtattatgaatttggttcagatttatagacatccataggaaaaattctgctgtaattataaccttattttgatatggaaaagaaaagtcaaaatagagactttgatcatgttcatgaacatgtacttgaacacaagtattgtaacaatgaaacactgtaatgatttacactgaatcacaattgcactgttgatatagtgtagagaaatcgttagaaatggtgacatcttacaaaaaatgtgtattattttaacatgttatcactagattttagctttttttaaatatttttaacaaagaaaacattgatccacccatttccctgtatctttttagcagatttattaaagagtatagtacttagcctcacgaatcataattagaaaatttactagtatttctcagccttttccctaggaacaaggaaaaacagaaagcatataatacggtggtcgtttcattgtgtttttcttccttttaaaaattaaaaagttttacaattatgtgaaacgttcaaaagccagcttaaaatttttcttgtgagaaaatattatacatgattcacatgatttcttagatttttcaataaaatatgtaaaacttcccactgagagacaattcttcatagacttgtcacatatccacatgtctgatgaacaaaggtactgtctacttttgttctggagtatcttctagaggatgtttatagagtgaactgccttggaagatagtatgtctcttgggagcaaagggcaaacatacttctcattataaaagtttcaggttccctaaaattggggtttctttactataagacaatccaatgtatgttctgaggtcacctggctctcttcatgtcaccctttgggaaatggggctcaacgagccagtacaggaaaagctgattccctggctactactatcgctgtgagtaataaagtcctttgtgtctaatg

SEQ ID NO: 13157 - DNA, 842 bp, Homo sapiens
cagtccaggcaacacattttgccttttttaaggggagtttacctcattgttggttgttgttatttttattgtattattgttattttattattattattgttataattttattttgttgtcctggtcttaaactactcttggttgtcttcctaagggtgtttgttgacctcaagcaagaagagtctgcagttcactgatgtttcagatttctactgaagtcaatatgttattacttttatataactttatttgagattgagttaaatcatagcaatcaaatgacttttgaaacgcattcatcacaagagacagcttagaagaatgttctcttggggcttaaagatgcaatatcgacttttatttggtttctcaaattcaatgtgatacaaatatttactggtgaaaggtaccacaaaagtgctttatgcttcctatggggaagggactctgtaacataaacttgagttttgtaatttatacaaggacttaaatatataaacaataattttcttcatctttagaatttttaaagtaaatgaatacctatgattgtatgtttattttttaaaaaaagttttaaaaattgaggagttttgttccacaagcaaccggtactggctaccctggtcttatgacaattatgagctcctcacaactgtctgctataaatgcgaatgaactttattttctcaaggaaatatgatttaattaaatattcatgtacattttagaagctttatgaaacaatgtccttcatttgctggcaagaagataaaatatgacagaacctgtttatttaaaataaaacacaggtatagcagtattctttttcaaaaacactg

SEQ ID NO: 13158 - DNA, 5825 bp, Homo sapiens
gttttctagaatacaacaagtctttgtactttttaactttaaaatctacaactctggcaaaagtcctggaaatgcagacattttccctgaactggcatattgaaaatgaatgaattacagaatagcttcatatttaaatttcatgttaaaaggtcattactgagaactaaagaacataattaagtatttctaaaggaaattagataagaaaacatttcattttcattgaaaatcaaatttcataaagcaaagtaaatgcttagggagatatattcaatctttgaccttgatgagtatttgatcttaccatagctatttgagaatgtggtgcttttacaaattggtgagttttcctgccatgtgaaatgcaattattacatttaaattgttagattaaaatgatatttagtcctgaaaaatattaaattggtcaaaaaaatcacagtgtatgccagctctctacagaaagtggcctttgttttctaaagcactgggattatttctgtagctaatatataattgtacagtttctttttagagatagagagtatctctgtgttcttatgaagacattttttatcagttttctgaaaatagatgaataaaatattatagtcacctagggtcactatggaataaagaaatcctagtttaaagaggaaatagtggcccttgatcaaactatttaatatggccttagtagaattagctgtatttagacaaagttagactttagtgtgaaatgtaatcggtggctacattctcatcgttttaattaatgaaacttaaatggcttctcttcttccacatgtcctgtccttgacaagatgggcagtatcacaaaaggtcctggcattctaccatctaacactaggaactgtaaaatactgtttaatattcttcttgtttctcttttatctgtgtatctttgccattctattttctcagtgaatagtatgttttctcccattcactgataaattctctcatttgatgatgatacagggtttttaatttttgcaagattctcaatgcaagcattgttatgtatctagaaattatacctagagaaaaatgaaagtcgtttcaaatttgaaatttgcccttttaagagaatgctgaatgtcatcgcagtatataatcactatataaatgtgctgacttacagttattttagtgtctatatgacatattttgaggaaagttggctgacgttatttaaatttaatatatattctatattttagtgttattgaatattttatcactgagcttttttctttaacctgaattccctgttccatttttcattcatattaatttaaataactccagatttctttcttatagtcattattagtagcagatgagattaataattcacatgtttattaaagatagtggcttagaaattttaagatatattgatataggcccgggcgctgtggctcacacctgtaatcccgcactttgggaggctgaggcgggcagatcacaaggtcaggagttcgagaccagcctggccaatgtggtgaaaccccatctctactaaaaacacaaaaattagccaggtatggtggcgggcgcctgtagtcccagctactcgggaggctgaggcaggaaaatcacttgaacccgggaggtggaggttgcagtgaactgagattgtgccactgcactccagcctgggggacagagtgagactctgtctcaaaaaaaaaaaagaaaaaaaaaggaaaaaggaaaaaaaaaagatatattgatacagataggtagatatgatattgtactttcatgccataagactacacaataaagttcctgaaagttcctggctgggcgcagtggctcacgcctgtaatcccagcactttgggaggccgaggcaggcagatcacctgaggtcaggagttctagaccagcctgaccaacatggggaaaccctgtctctactaaaaaaaatacagaattagccaggtgtggtggcacatgtctgtaatcccagctactcgggagactgaggcaggagaattgcttgaacccaggagacggaggttgcagtgagccgagatcgcaccattgcactccagcctaggcaacaagagtgaaactccgtctcaaaaataaataaataaataaagttcctgtgaagtatataaacatgtcaacaacaggcttgactgtcacaaaattctgaaagatgtcgcactctattcttatatagcatatgctaatttatttatttattttttgagattgagttctgctgtgtcacccaggttggagtgcagtggcatggtcatggtccactaaagccttgacccctggggctcagcagttatgccaactaagcctcccaaatagctgagactagaggtatgcgccaccacacctagctattttttttatttttagtaaggacaaggtctcattatgttggccaggctggtctcaaattcctgagctcagttgatcctcccacctcagcctcccaaagtgctgggattacaggtgtaagccactgcaccctgcctattcttataatcatatatttatatttcaaatggattttaactggttatttaatagtttaattagataaagtaattcatggctgggtgtggtggctcacgcctgtaatcccagcactttggcaggctgaggcaggtggattacctgaggtcggaagttcgagaccagcccaaccaacgtggagaaaccccatctctattaaaaatgcaaaattagcaggacatggtgatacacacctgtaatcccagctagtcaggaggctgaggcaggagaattacttgagccagggaagcagaggttgtggtgagctaagattgtgccactgcactccagcctgagagaacaagactccgtctcaaaaaaagaaaaaaagaaaacttttttacacatgggtatctcaccatgttgcccaggctggagtgcagtagctattcataggcacagtcatagcacactgcagcctagaatttctgacctcaagcaatcatcctgcctcagcctcctaagtagctaggactacaggtgcataccaccataaccagctttaattaaatgttttttatttggttattttttttaagttttctgtattcacacaaggggttgcccaaatataattttgctttgactattgagatctagtgaaagtggggtatatgaattctaattgcaaatatccaggctcagaggcccagcaggactttctaacacaatcttttagcggaagttagaaatggtatatagcaggagagtcagatttgagaagcatatgtagattcgaagctgggggaatatggcaggtagtttgtacaacatctaattcagaacattaaaattaagattttagtcaaactgtgtttaagttagttcttattttcctgtagatgcatctcacagcatcagtacaataccaaaaaagcacacaagaataagaatatgtggaatttctatacctattgacaaagcacataatttaaccataaacacaaagccataggtcaacaaagaaatgaagattccagttctgaaggtgagttttctgaagccaaagtggatacatgcaaaattaatatagttttactgtatatcagttgtcaccaatcagaaatggaaaacagatcctatttataattgcaaacaaaactgtaaaatagactttttaaagtctgggaatagacttctaaaataagctataacacttaaaaaggagagatatactatgttcctagataggacaattgaaaattctggagatgacagtttttcaaaaatctattgaggccaggtgcagtggcccatgcctgtagttccagtactttgggaggcctaggtgggtggatcacctgaggttgggagtttgagaccagcctgaccaacatggagaaaccccgtctctactaaaaatacaaaattagccaggcgtggtggtgcatgcctgtaatcccagctactcgggaggctgaggcgtgagaatcgcttgaacccggtaggcagatgttgcagtgagccgagatcgcaccattgcactccagcctaggcaacaagagcgaaactccatctcaaaaatagaaaaaacatttatcgaaatcccaacaagttgacaaatatatccacataaaaatataaaacttctgtattctgtgaaagctactataaataaagtttagagaaagttatttgccacctatgtcatgattgaaatagttaattgatcctgtgaatcagttagcaaaacataactcaatggaaagataggcaaatgatacaaataagaaattcacaaaagaagaaatactaagtctctagtgatgagagaaatgtaaattaaaatgaaacatgtttgttcatcaagttgtcacaagttagacaatcatatccaatatttttaaaggttgtaagactataaggaaatagccactgtcatatcatttttaaaggaatataaattatagggccttttgtttctttgggttttttttttttagagacaagatctctccgtgttgtctaggctggactcaaacttctggactcaagcaatcctcgcaacatcattaatagctgagagtagagacttgagccaccacacctgactatagggcctttttgaaaggaaaattgacatcatcaaaattttaaatatattcagtctatttctcaaaaactcaaagaatactaataaatgtgtactcaggtatatgtacagaaattgctgtaacattataattttaaacaatttaaaacagactgagtttccaaagttagggtacaatgaaagaaaaggtggcttatttatactctggaatattttccaagagttgaaaaggatgaggatacacacacacacacacacacacacacacacacacacacacacacacagtttgggtatccctaatccagaaattcaaatgctccaaagtccaaaactttctgacccaccaacatgactgatgctcaaaggaaatggccactggaagatttcagattttcagatttggagtgctcaaccagtaagtatataatgcaaataatccaaaatacaaaaaaaaaaaaaaagaaatctgaaacacttctgatcccaagcatttcagaaaacggatgttcatttgtgtgtgtgtgtgtgtgtaagcaggtgttgctagaaattcacttatatacaagaaaactttttgtgtacatatttgcatatatatgtacaaatgggtagaaacgatacatgattaatcttaatcgggaaggaaaagagatttagggaaggaagcagtaagtgagaacttttattctatttactcctgcacgtttaaatattgtttacagtgagtatatcaacatgtaagtgttaaaagacaataagctactagtgatttttaatataaaattaactataaaatattttaaatattagcaaataatatagcacactcatgaacctaattcccacatttgatagttgttacattttgccatgtttgtttaaaggtctaagtcataaaatcttataaagctaaaccccacccttctctttctcctctctctccaggataattactgttttatagtttgtggatatcattcccttacttgtgtttatacttttaccaagtgtgtatgtattcaaaaaacagttgttttgtgattttaaaatgtaaatgaatggcgttatgctccatgtattctgcaacttttcatcatacattaggttttggcgatttagccataatttggcatgaattcaggtcttttaagttttattccattgtaagaataaacaagtttgttcattcatgtctc

SEQ ID NO: 13159 - DNA, 2770 bp, Homo sapiens
aagtgtgatggcaccttgtccaccctgtcgtgattattccagtgagatgttactgttctgctctgaagaagatactgtcagacgaatcctgcatttccttcagctggcatgcatgcctttggactcatggacagagttctttggattgtcactgaattttcaatgtttaatcagtatggatctgatcttcgcatgatcttttttgtgaatgctaacaccattttgcagttttttttttctattttaaacatttttcttttcactgccgaccccctgccttacgattttattggaaagcaaggacctgctattatttgttaatttgccatcatttatgtatattttggaaggtatgagacccacaagcacaatgatcatttttatttgtttgtttgtttgaaacttcagcagaatagatatctgcatgctttatgaagttgttgcttcggtaagagcccatgggatgccagaaattaacatttctttgctgccatgggctgatgatgctgctattagataaagtttagctgtggcaccaagtcacatcattttcatagaaaaagattacttgtagcttattttagaagtatgaccttttggtctgtttgattgattgattagaattgcaataaaagaaaagcttgcattcataaggcattcattctgttgtaaatgttcaatatatttattttgagagcaaggacctgtggttgtaaacaggtgtggttacaggtgtggttatgtatctgagtgttgcggtcatactctcctccagtccaatcctgagcatcttcatcttattaattagctgttcgtttctttgtgcactcattcttttatttttacttctttttaatgttatggtatccagttgtttccagtagcagtttcttgaacttctggcctgtactactaactgcagacctccagagtcactggcctttctgtgctctacatattattttaggggccacatcagttgccaagagcaacatacataccgacctggctgaattattgccagtgaaaacaacctgtacgaagcctttgctcaggttctaaaatatgtttgtccttgcacgaattttgtatatttcaaatatttctgtaaaggtttcttcttttctgttagagtgtggtgttaagccagagtcagtggtttgtgttctcattaaaatgtttgtttaaatcctatgtccaattcaagcctatctaactacatttggtaggattaacatttcatataacaaatggggcttaattaaaaactttaacttggaataaaggaacagggatcactttatcttctgccttcatttaccttagtccaagattcttgcaaaacaggcaactgaacaaacattaggtttatgtaggtaaaatgtgaaagcatttctcctccactttttaaaatttaatttacccagtacagcggggcaccagattacttgatctttgtattttgcagttttgagcctttgtgtcaatcccaagcacagagaggatctgccaaggaaaaacatttgcatcttcggagtagacattttgcagtttgtttaataacaacttctaaagtaagttgaattcatccattgtcactgattcaccaagtggatgttgcattgtggaatttgcctgagtactgttgtcattctgctcagccaggcacggtcagtttcttggccagggacattgctatgtgctgtgtgcaagctctttagaagagagattggattttcttggcattatcagcactcatgctatttagtctacttctattttgactgactctttaaattagtacaatttttctacttgtcatataactcctggaacaatagtacgggaagccgtgatccttttccctgactcatgattttagtctttttccaaatcgctgttttttttttttttttttttttttttgctgctccaacgaccagcatgtgttggagcagatctccatggtaagccaaaagtggacttgtcagcctataactactctgcagctgccactaactctacaggcacagtaactacactttatacaggagcacatgccaaagtgcctgggaggtgccaataaaatcaagaaataagaaaactacaaaaaaagatacggtattaaccttggacataattttttttagggaggcagctttcccacttttataaagggggttgtaaatctcaagaggtcatttgttccccatagcagcatatctcatttttaaattgaagcgaattaaataggattttactactcaacattcattatactgttaatctttgctgaaatatatgctaacaaatgttaagcaagggaaactgaagacttagtcatgtggattgttagcagtgatctgcattctgtaaaagaggtactttcccatgatgtaggcatgaagtggtgccagtaagcgtagagcggaaatgttgactttagttaacattgggtttagcatttccagtgcagcattatcagtgggcctttaaaaatacttcgtaagtacattagctttcactttgttgttaaattatagcagactcattatagagaacaagtttgccttgattttgtttaaaatgacttctgctaagcacccagaagataaaattgacatatttttataatataagcatactttttttgtacattgtgttcattcttgaataaaatgagttctgtgttggcttgtagatactaaaaagaaagtattgattttgattcaataaatgttttctttcaatcctggttggcctttccttt

SEQ ID NO: 13160 - DNA, 412 bp, Homo sapiens
gtccaacgtccagctcgttctctgggccttctcaccacagagcctcgggacatcaaaaacagcagaacttctgaaacctctgggtcatctctcacacattccaggaccagaagcatttcaccttttcctgcggcatcagatgaattgttaattatctaatttctgaaatgtgcagctcccatttggccttgtgcggttgtgttctcatttttatcccattgagactatttatttatgtatgtatgtatttatttatttattgcctggagtgtgaactgtatttattttagcagaggagccatgtcctgctgcttctgcaaaaaactcagagtggggtggggagcatgttcatttgtacctcgagttttaaactggttcctagggatgtgtgagaataaactagactctgaac

SEQ ID NO: 13161 - DNA, 313 bp, Homo sapiens
gaccggccagatgaggctggccaagccggggagctgctctctcatgaaacaagagctagaaactcaggatggtcatcttggagggaccaaggggtgggccacagccatggtgggagtggcctggacctgccctgggccacactgaccctgatacaggcatggcagaagaatgggaatattttatactgacagaaatcagtaatatttatatatttatatttttaaaatatttatttatttatttatttaagttcatattccatatttattcaagatgttttaccgtaataattattattaaaaatatgcttct

SEQ ID NO: 13162 - DNA, 1223 bp, Homo sapiens
gctgggaccctgctcccacgcctgcttcttaaggtccctgctcggccggtgtaaatatgtttcaccctgtccctctaataaagctcctctgctccaccttgaacctgtcacctggcctgccaccctcctgcgcaggccatgcatggctcccgagtacagtagtatctgcttaggtgccaggcatgtcctaggctctgggtgcagtagtgagcaggacgggtaccatgctgccctgaagggggccacagcctgggtggaaggcagacctgaatcacaacgggccagctctagtaatacgaaggtgaggtctgggatgctgcgtgcggcgcgacgacaggaggtatgacctgggtggggtcagggaaagtcttagctgagaactaagagatgagggaggcacaaactctgcacgggggaactgtgtgtgcaaaggtgagctgggggcgagaaaggcctctgtggccgtcatcggcactagcgggttgggggtggtggtggggtgctggcagcctcaggagcgatcgctcccctggagagggtgattgagtgtggagatcaccggggccgccgcgggccgtctgcacttctgttccaggtttttctggcattttctgttccaggtttcttccacccacgagcactttattctcctccgagacccccttttcttccccttcctctctcccccaccagggggcgcgcttaaatttccagacagagaccagaaggaaggtttagaaagaaaagaacacttgcccagggcagctttgccctccaagaggctccctcctgtctctaagtcaattccacccctcctcgaagtcccggcttccacccctctcctcagagtcccggcgtttacctcgtggtgtgtttgccttgggcctttcatgccccggctgcacacatcgtctgtgaattgtggctgttcactcccgaggatgtgtcctagactccgggtcgcgtggatctaccctctagtttacttgctcgggagaagaaactgactcgttttatttagtgcctatttagcgagcccagagtaacgtacatttgtgctgttttcaattttgtgctatcgcaaatcacaaaaaaactgttatcaattcacattcatcatcagcacgagacccatttccttgtgctcctgccagctcaggatattatgtttcttttttcatttttgccagtctgttaagtaaaatgtcatatgcgtttgtttt

SEQ ID NO: 13163 - DNA, 369 bp, Homo sapiens
aaaaatatctaccccatttggtgaagtgaaaaacagaaaaataagaccctgtggagaaattcgttgttcccactgaaatggactgactgtaacgattgacaccaaaatgaaccttgctatcaagaaatgctcgtcatacagtaaactctggatgattcttccagataatgtccttgctttacaaaccaaccatttctagagagtctccttactcattaattcaatgaaatggattggtaagatgtcttgaaaacatgttagtcaaggactggtaaaatacatataaagattaacactcatttccaatcatacaaatactatccaaataaaaataacatcattgtattaacgcaaatattaggtgacaac

SEQ ID NO: 13164 - DNA, 1339 bp, Homo sapiens
catcgcttccagtaagggagaaactgaagaggaaagactgtcttgccagaaatggccagcttgtgcagactccgagtccttcagtgacaaaaggcctttgctgtttgtcctcttgacctgtgtctgacttgctcctggatgggcacccacactcagaggctacatatggccctagagcaccaccttcctctagggacactggggctacctacagacaacttcatctaagtcctaactattacaatgatggactcagcacctccaaagcagttaatttttcactagaaccagtgagatctggaggaatgtgagaagcatatgctaaatgtacattttaattttagactacttgaaaaggcccctaataaggctagaggtctaagtcccccacccctttccccactcccctctagtggtgaactttagaggaaaaggaagtaattgcacaaggagtttgattcttaccttttctcagttacagaggacattaactggatcattgcttccccagggcaggagagcgcagagctagggaaagtgaaaggtaatgaagatggagcagaatgagcagatgcagatcaccagcaaagtgcactgatgtgtgagctcttaagaccactcagcatgacgactgagtagacttgtttacatctgatcaaagcactgggcttgtccaggctcataataaatgctccattgaatctactattcttgttttccactgctgtggaaacctccttgctactatagcgtcttatgtatggtttaaaggaaatttatcaggtgagagagatgagcaacgttgtcttttctctcaaagctgtaatgtgggttttgttttattgtttatttgtttgttgttgtatccttttctccttgttatttgcccttcagaatgcacttgggaaaggctggttccttagcctcctggtttgtgtctttttttttttttttttaaaacagaatcactctggcaattgtctgcagctgccactggtgcaaggccttaccagccctagcctctagcacttctctaagtgccaaaaacagtgtcattgtgtgtgttcctttcttgatacttagtcatgggaggatattacaaaaaagaaatttaaattgtgttcatagtctttcagagtagctcactttagtcctgtaactttattgggtgatattttgtgttcagtgtaattgtcttctctttgctgattatgttaccatggtactcctaaagcatatgcctcacctggttaaaaaagaacaaacatgtttttgtgaaagctactgaagtgccttgggaaatgagaaagttttaataagtaaaatgattttttaaata

SEQ ID NO: 13165 - DNA, 1513 bp, Homo sapiens
atgattaatagatgctcctgtaatggtggttgtgaggtgtgctgccacagcccagccacacacgccagttcccttctctgcacatgtacatgtctgctcatccttcccacctgaactcatgtgccacctcacttatgccccttcccaatgccgcacccacacaacagggtgtccctctgtgcccacagcagcccttgggtataactgttccccacagaggctgaaccccaagggcagagtccaggccacactcaccacggagacccctgcctggcacagagcccagcccagcagagatgctcagaagatgaatgaaagtccctgctgagattgatccaatctgtttgtgaacatctctggggtccaagaattcacggctttctttttctttagagagccttttgtttctttttgccattatatactatatttgggttagggcacaacaatgtgaatatacttaatactgaactctacacttgaaaatggttaagatggtaaagttttaagttatatgtattttgccacaattttttaaaatgcagagcataggtacaaagaaggaaaaaaagggggcaaggtccattttattgagaaataaagaacaaagggttcaattcagagaggattggattttaaaacgtaatttagattagggaaatgcaaatgaaaaccataataagtaagataccacttcacatctgttaggatggctattttaaaacaacaaaaacaacctgaaaataagtgttggcaaggatgtgaagaaatagatacccttgtgcattgctattgggaacgtaaaatcatgcagcctttgttgaaaacaatgtggtggttcctcaaaaacttagttatcatatgatcccgcagttccacttctaggaatatacccaaaagaattgaaagcagggactcaaagtgatatttgtacaccagtgtttgtagcagtattattcacaatagccaaaaggtggaaacaacccagatgtccatgacaagaggagtggataaacaaaatatggtgaatatgtacaatggaacataattcagctttaaaaaggaatgaaattctggtacatgttataacatagatgaaccttaaaaacattatgctaagtgaaataagccagacacagaaggaaaaataccagatgatcccacttatatgaggtacctagaatagtgaaattcatagagacagaaagtagaaggatggttgccaggggctggaaggaggaagaacagggagatactgcttagtggatgcagagtttatgttgagggtgatgaaaaagttctggagatggatggtggtgatggctgcacaacagtgagaatgtacttcatactatggaactctgcacttaaaaatggttaaaatggatgtagacattttatgtctattttgccataacaagaaagtaatttgggtgtattttagagattttagaaaatactgtaagcacaagaggaaaaaaattaaaatcattcgcaatcaccaggtagagac

SEQ ID NO: 13166 - DNA, 1537 bp, Homo sapiens
aaatatccaagatttaaatgccatagaaatgtaggtcctcagaaagtgtataataagaaacttatttctcatatcaacttagtcaataagaaaatatattctttcaaaggaacattgtgtctaggattttggatgttgagaggttctaaaatcatgaaacttgtttcactgaaaattggacagattgcctgtttctgatttgctgctcttcatcccattccaggcagcctctgtcaggccttcagggttcagcagtacagccgagactcgactctgtgcctccctccccagtgcaaatgcatgcttcttctcaaagcactgttgagaaggagataattactgccttgaaaatttatggttttggtatttttttaaatcatagttaaatgttacctctgaatttacttccttgcatgtggtttgaaaaactgagtattaatatctgaggatgaccagaaatggtgagatgtatgtttggctctgcttttaactttataaatccagtgacctctctctctgggacttggtttccccaactaaaatttgaagtagttgaatggggtctcaaagtttgacaggaaccttaagtaatcatctaagtcagtacccaccaccttcttctcctacatatcccttccagatggtcatccagactcagagctctctctacagagaggaaattctccactgtgcacacccacctttggaaagctctgaccacttgaggcctgatctgcccatcgtgaagaagcctgtaacactcctctgcgtctatcctgtgtagcatactggcttcaccatcaatcctgattcctctctaagtgggcattgccatgtggaaggcaagccaggctcactcacagagtcaaggcctgctccctgtagggtccaaccagacctggaagaacaggcctctccatttgctcttcagatgccacttctaagaaaagcctaatcacagtttttcctggaattgccagctgacatcttgaatccttccattccacacagaatgcaaccaagtcacacgcttttgaattatgctttgtagagttttgtcattcagagtcagccaggaccataccgggtcttgattcagtcacatggcatggttttgtgccatctgtagctataatgagcatgtttgcctagacagcttttctcaactgggtccagaagagaattaagccctaaggtcctaaggcatctatctgtgctaggttaaatggttggcccccaaagatagacaggtcctgatttctagaacccgtgactgttactttatacagcaaaggaaactttgcagatgtgattaaagctaaggaccttaagacagagtatcctgggggtggtggtggggtgggggggggtcctaaatgtaatcacgagtaagattaagagcaaatcaattctagtcatatattaaacatccacaataaccaagatatttttatcccaagaatgcaagatttcagaaaatgaaaaatctgttgataaatccatcactataataaaaccgaaggtgaaaaaaattctg

SEQ ID NO: 13167 - DNA, 827 bp, Homo sapiens
aacttcgaaagcatcattatttgcagagacaggacctgactattgaagttgcagattcatttttctttctgatgtcaaaaatgtcttgggtaggcgggaaggagggttagggaggggtaaaattccttagcttagacctcagcctgtgctgcccgtcttcagcctagccgacctcagccttccccttgcccagggctcagcctggtgggcctcctctgtccagggccctgagctcggtggacccagggatgacatgtccctacacccctcccctgccctagagcacactgtagcattacagtgggtgccccccttgccagacatgtggtgggacagggacccacttcacacacaggcaactgaggcagacagcagctcaggcacacttcttcttggtcttatttattattgtgtgttatttaaatgagtgtgtttgtcaccgttggggattggggaagactgtggctgctagcacttggagccaagggttcagagactcagggccccagcactaaagcagtggacaccaggagtccctggtaataagtactgtgtacagaattctgctacctcactggggtcctggggcctcggagcctcatccgaggcagggtcaggagaggggcagaacagccgctcctgtctgccagccagcagccagctctcagccaacgagtaatttattgtttttccttgtatttaaatattaaatatgttagcaaagagttaatatatagaagggtaccttgaacactgggggaggggacattgaacaagttgtttcattgactatcaaactgaagccagaaataaagttggtgacagat

SEQ ID NO: 13168 - DNA, 89 bp, Homo sapiens
atattttaatttatgagtttttgatagctttattttttaagtatttatatatttataactcatcataaaataaagtatatatagaatct

SEQ ID NO: 13169 - DNA, 1525 bp, Homo sapiens
aggtccctggggctaccacctggttgatctatcgtggcctgctcgtcgcagtccaaacccgcccaagactgcagcccaatcaacgcctggagcctcattctgtttccagctttgtccagggcagcctgttttacccagatgggcctgcacctccagcttctttctgaagcatgacccatctccagagatgggatttgagaaatcagtgagagcttcctataaagaactccaggagacaggcctgaactctagagggaacttgaaatccagggtcaaaggttaaggggcagcagctggtctggcccctgaaagccttcacctgatgcctctgcagctacacaatcccaagacagagctagagcaagggtctctttaaatgttgaaagatgttaggttgtcagctttaagatatgtggtggttttgtaatttgatgcttttattctgtttttaaattgaaatgaggtaatgcaactttcgtaataaccttttggaattatatttttccacttttaggcaaagtgcttagacattttcaattttttttttgctaaatactttggaattctatttaaaaaatagatgatcaagatctaaaggaaattaatcccaaccaacaaacttaaaagtttatctacctcgttttaggcaatcaagattctggagagtcttgaacacagaataacgattgtgaccattatgaatgtaactaatttcagttgtactgtgaatgctaaatatttgcaaacaagtacatcttgaaagtaaaggtgacttagagaaaagagacattttgacagatacttttaatttgtggttgtctccatcatgaaatagaaacgtgtttggcacttgtgggtggctattttgatttggcatgactacttaattttttaaaaaaattgtggtttgtgaattgcacctttgtgccatgtttctgaatctggttttcaaatccagtggagcctttcagtgaaataggtgactattaaaaaagtaatagtattacagaaaaatgagcgattaaatagtaatggatacaattaaggagcaactattttatatgactgttctgtacaaacaaaaagtatgtaatacccattttaaaaaaccatttgaaagtagacaacttattccaaaatagcaaatgcagaatctctgctcagtgagcttggatgagtggcttaacttctctgggcctttgttcctatctgtaaatgagaaagtttgtagatattgccaagatttcccaggctcaatacagtgtaattattttatgttttaaagatatgaaatctgtttactcaaccaattttttaaatgtcatattgtgataatgctctgcttttgcaaattgtgtttgcatgtcattagttatatcaaatagttttgtggcatggggtagtggagcttccctccccacccccatatgtatcagtgaagcctttgaaattacttaaggcagtctttcatggaatgttttgattgagcaatgaaataaacagtcctccattttgtttctgcttg

SEQ ID NO: 13170 - DNA, 1262 bp, Homo sapiens
gcaacgcatccggatgacggttccctgtctctgaaagacctttctctggaagaggagtctgcattgtagtgtctcaaagacacaataaacttcctatggtctgcactgttgtgatattacatttttgtgagtagaatcctgtgtgaccactaatattcaagttcatgaagcgcccctcctcagcatgagtcttgaagttttgcctggtctcgggttttggtgaaagagcagggctccccctttgttccattatctacaagaaagtagctgcaggtactcctgcatctaaccatttgtgggtgacatgggctatggcgagtgctggttcttggccctctgctcccatagcaacaataaagtctactaactatattgtaattagtatgtgtcagggacgcttttattttttattttttgagatggagtcttgctctctcacccaggctggagtgcagtggtgtgatctcggctcactgccatctgtgcctcctgggttcaaacgattctcctgtctcagcctccgagtagctgggattacaggtgcaggacaccacacctggctaattttttgtatttttagtagagacaggtttcaccatgttggccaggctggtctggaactcctgacctcagatgatctgtgcgcctcagcctcccaaagtgctgggattacaggcgtaagccatggtgctctgggcctcaaatactcttcttagctacacaaatgaactgttaaacctcacaagcacctttaacgtatcctcatttggcagatgaggaaatgggcacagagagattaagtaatttgccagaaattatacagcagtgaatggtggagtcttgcactaaagtgatgctcttaaaactatgctctattgcaggggtgtccaatcttttagcttccctgggccacacataaaatacgctaacattacaatagctgataagctttaaaaaatggcaaaaaaaaccctcagcgttttagaaagtttacaaatttttgttgggtcggattcaaagccatcctgggctgcttgctgcccaggactgcggttggacaagcttgctctactgcctttcctcctaaggcaggccttagcctgaggggatatcagctataaaacggatgaggtgatctcttagcctccacagcagttttctgtttctgtgccaggaggccaacaatgttttcaaccatatgtggttcataaagcctcaaagatttactctggccctttatgaataaagtttacccctgatct

SEQ ID NO: 13171 - DNA, 443 bp, Homo sapiens
tgtacataccagggaaagaaaggacagcagtcacctccgacaatgctccgttctatggaatattgattaactgcattttggctggagacacccaagtgaagcaatcttgtatttttaatatttaaaggcagatgtacgctttaaattggtctccatttcttcttagaatgttgatatatggataagcataactaaacttgtcaatttagagtttatttttctatggatactattaaatgtctcaaattgaaattttagcagtctggaattcaagcttttgagggaaagaaggattcattttgtatactaaagaaaaaaacagcattgcccaataatgtgttaacttctcaatctggaaagtgtagtgagagctacataatcaatagctacgtaatcaacttcagcaagttcctaagctgtggccctggatcccttcactccat

SEQ ID NO: 13172 - DNA, 580 bp, Homo sapiens
ttccaacacttgtttctattaaaacagactattataaagctttaagttgtcaactttgttctaaatatcaactagcgcaagtgaatactgaagatttcttagtcagtttttaggggattttcggggaggggaaataggtaatgtatggagcattttcacttctaaatagttagatacagaaattaagtgcattgtatctttttcataatggtactatttagaagcccagttagtcttactgagcttatgcttcactcctttatgtttaaccatgtgtctacaagaataagtttgttttggaaagttgagctatagctacagctctagctatccagcagacttttcattatgacttacatggcaggagctctaattatgctttaaaaatctgttgtggagattgctttaaatgctccctgcctggtgtggggatggggtccccctctttgtgagggctggagcatggcacggcatggattaacacggcagaggaacaaaggtgtgctctgagcttcttcatatttcaccttcaccctcacctgtgttctcttccctctctcccaataaaagggctcccatt

SEQ ID NO: 13173 - DNA, 2408 bp, Homo sapiens
ggactgggatggctgggcaaggaagccataggcattgcggccccttgccttggtgcagatgtgagtcccacaaacacatctggagaagctcaaaggccgggactgggagatgactcccttggaagacaggagagatgactcccttggaagacagatgacagcccataggcctagtgacaaaaggcccctttgccaccttgtggctgttctgggaactgcacctgtcctaggtctgggccagaccaagcagaatggcagtctgaggacactgacttaccacccaagtcccaggaagagaggacaaggaatcagccaggcctgtgcaaaggcagcattttttggttgtggtgtatgactatgaattcaccctctgtttacagataactctcttcactattcctaggaggaaaaagaaatgcattcggtacttacccggagaaggccgctgccccagccccgttccttccgatgacagtgctctaggctgccccgggtccccagctccccaggactcaccctcataccatctgctgccccgcttccccacagaactgcttactagccctgcggagccggcacctacatccccaggtctctccactgctctcagcctcccaaccccagggcccccacaggccccccgcagcaccctgcagagcacacaggtacagcaacaggaatctcagagacaggtggcctagcaggcacaggacacctggccgcctccaggagcctaccccctgaaagtgacagagacccagatctcatggaaactggccaggggtcctgttaacgtcatctcagggtccagaccctgaagatttcagaggctgcaggacttctgcctgaacctggggtcatcgattcaaactgctccaagtggtgggaatcagatctgtcttgatgtgtcatctaattaagggaatcccttgtacctatggctgcctgcatctattctttgtaccatctgtcttgccagccagaagcctctgcctccctagcttttctgctataggtcagagatgggctgaactgagcctagctaccttctctacccatctcccccatcccccactgccacaccctccccattcagacacttcatggaccaagaatgagctggtttgtcaaacaacatgtgagcatggtcacaagcacaaagctcaagatgacagctcttctaaggaaatggagaagctctgtttataaaaacaaaaacaaaaccagctgctactcataagttggaccagaggaagccccttactatgatctcaggagcttgcaagaagcaggaaggggaatggaataggttaagtttaggcctatcaacctaagcaacagaaataatctgacactaccttatcaggcaaattggggaggggagggtgtatctagctctagttcaaattatttggaagtgttccctgagaaacccaccagcctaagaagctctggccccaggcttgtcactagcagctgcagtcaacagttcaaagaagtcatggcccaaatccagtgtgcacccctccccattcacagagcctttttcacaattccatttccagttcatctatggcagtccagccagctcctgggcagcttgagagggcaaacccaaaacctcatgacagccagagcctgtctttcagcattcagtccgcctggccggctccagtttccccatggggctgcgggacagaggaccattacaactagatcaaggagcccagaaaacctccagtagtggacaacaggttttcaccatagcctacgttaacccatttttgagccaagcttcaaccctcagccttgaaaaacaagtctttaatttaatttttgttttttgcctaaatccaaagaaaaagggctgccgggccaggcgcggtggctcacgcctgtaatcccagcactttggcaggccgaggcaggtggatcacctgacgtcagtagtttgagaccagcctggccaacatggtgaaaccctgtatctactaaaaatacaaaaattagccggacgtggtggtgcgcgcatgtaatcccagctactcgggaggctgaggcggaagaatcacttgaacccgggaggcggaggttccagtgagccgagatggcgctattgcactccagtctgggtaacagggagactgcatctcaaaaaaaaaaaaaaaaaaaaaaaagggctgtccatgtattcacacacccctcaaaaaaagcctttagttcctactttagccactggtttctcagaatccaaagatcacatattctagtgtaacactgcaagaagtcttgagaaaaagattattgtagtgttcaaaatatttttgtattgttaatgcatcatcatagaaaaacttttaaacatgagaataaagatactttttactgggtttgtttttcaaagcctg

SEQ ID NO: 13174 - DNA, 1754 bp, Homo sapiens
tagacaactggtctgttaatctttttcatcattgttgtgtataatttacctctcattagaaaggctaacaaattttaagtgccacaggttttaaggattctgcagaaaaaaaagaaaaaagtccttcagtttagaacctacaaaagcttgtgtatcttgattaatgtactttttattgcatggtgtgaactaagttattgctgcataaatttgtaatatatcctgtttgtatttttttccaagtgtataatgttggtgtggagttttcatgacagaatatacacattttgtaaatctgtacttttttcaaatattgaatgccttatttttgaattctttagatttttaaattggagaaaagcacttaaagttttttatatatgaatattacatgtaaagctgttaaaatacataacttcagtgcaagagactttgtcacttatttccttatgtgtgtaggaggggttaataagtctctagctctccatctattgatagtttcatttacaatttcaaaagaacattcttatattttatcaaggaagtcttcaaatttgattctaaatagcgattataatctccaactttattttgaatgtacctctattagtttcaattgagtaattctagacataactggtttgactctgtccaactctgtatttaggccatttgttacagtttcttcatgcattacttactgttaaaactgtaccttttgcgatttcacagttggcacttctgccatgagcagagaactgatgcgacttgttttgctgcttggtagcactttaaaaaattttttgattaatgaagaaagtaaaaccataaacatttgccaaaaattcatgccccagtattagcaatgaattagttgcattggtttgagaaaggcacatattggagggaaatcttggtgtaacttaaatatttgaaaattacctttaatgcaatgcatatctgtttattctgggaaatgttttaatgccagggcctgctgagttgcttcttcttgtggagattttttttttaatctcctgagttgtataaaagttgtactgcatcttagtttactggataaatttaaaacacagtattgtagaaagctaatacaaaactatcctatgccttcaaatagtatagaaaatggaaaatatacaagtaaattctgttgaaccacctgtgtagtctctctagtagttaaaacagctattttagtaaccccaagagtttcttctcatatccataaaattggattacagtatggcaatatctacagcttctattcattatgcaacgtttaacattgattggataaatgcttataggctgggccaggtggctcccacctgtagtcccagcactttgggaggcaaaggcgggaggatcacttgaggccaggactttgagaccagccagggcaacataataagacttttctctactttaaattttttaaaaaattagttgggcatagtggcacttgcctgtagtctcagctacttaggaggctgaggtggcagaatagcttatgcctaggaggttgaggctgcagtgagctgtgattatgccattgcactccagcctgggtgacagagcaataccctgtctttaaaaataaaagctattacttggcaaattctgaggtaagtgtatgatcttagggaactttgatacaaatgggaattcactcactggaatcgtggctcccaaaaagatgctttaattgtgtggtgcttttatagtttagctcc

SEQ ID NO: 13175 - DNA, 3911 bp, Homo sapiens
ctcacccccttccctgtcccaggccctgccctggtccccccacaaggcctcagcccagtcacaactgccatttccagtctctgctgagtgtcccagaccctcgaggctgccactccgtcgtggttttatttttaatatagagagagttttgaattctacactgttgtctttcctctgtgctggcctaggacattaggattccttccacggctccggccgctaggaccctgccaggtcccgcgcaccatccctgccctgcccacgtggtattgctgggctcctggctagatgcaagcaaggtggacaagagctcaggactccagcccactgccactgggtgacacagactgtcgtttgggcattatttcatggcagatgggccagtccagggcctaccccgccttgcccccagatcccactggggtccatttggggggtcctgctacactccaccgatccccaaggaagtataataaacgatacccagccagagtctactcactgtcacaagcacaacgagtttatatgagaaagcactgagggggtgcagagggcccgctagttccaggggaactgaaagctgttcctgatcagcccgtatcatctgaggcctgcctgcccaccctgccaccctcccctcccttgctgctctgcccctgccagtgcccagcccagcggctctgggaaggggttcccagaatccctcctgagctgtgccatttactcaggggactcccaaacagccagctgccagtgcaggtggagggctgtaggggagggccagtgcccagacagggtcatggggctcagaccagcccactgtagagaatcactctgaggctccaacttccttccttccttcggggccagtctcggccgaagtctggtcacgctcagacagagctgaccagaccagaccgtttgccttttcaagtttcctagtcctgctacaagatgagcttcttccgtggtttccttttggaaactcctccttccaacaagcagtgggatcccggggcccagggcgggccggtgttggccgctggggctgttgtaagtcttgctggatgttcccctgttcctgagccttaacccctcgcacagccatccccccccccgtcctgccatccccccccgccgtcctgccttccccaccccacccttaggtcccaggtagttgctctgaagagtttcagtagagtggccccagggtgatagctcagggaacaacaaaaaaggaattccgtgaaaacatttttttttctttgatgaattactcctgggtcacttccaccactggtaaagccagaacttctccaaaaagaaccttgcaaaaagtccagtgaatcagtcgaatcattctgtggatgccaaagaatattttgaccataatacagcacagcctggacctgacaacttgtcatttggacttttttttaaatggagttctttagcaacaaagtatagaaacatgttcattgcacacacccaaggagaagagctcaagcgcttggaagaggatgctttgctgctgctgaagtgtacctgggtgttagatttcagatcctgggctgagcccactgtgagctttcctaaactgtgagactcacagaggggaaagatactgacggtgaaaccagcatggaaaacgtctttaccatgtggttccctcctccccaaatacataaagcaaataagcaggatggggaacagcttgaccttcatccacccctaactccaaaactatcaaggtacgacagtggcattgtcatcgacactcaatttcatgtgaattttagcaaaacaggaaacaaagataatgactcagttcagaggatcggacaaatgtgtctagtccgggtggactcggagggagtggggtgggcttcaaggattctgggcgttgggatggcatgagctaccctgtagagtttagtctgcctgcccgccttggtagtagtgaccagtcagtgtcagcatcagtgtcccaaccccagtctctgtttactgcctttgaacagaacttcttccttccccatgctttgggtcacctcgggctgcaaccctgtctgtgccagattgcccggtctgaccctgcaggaagcaaagaggtgagcttaaagaacaaccaaactctgccaggggtcccagaaagcccagggtccagcagtctcagcacttggccccttgccccttcacaccatcctggggcaggggctgggcctccctggtggcaggggtgggtggagaattagggagagggtgcaacgagtctggccccttgcctcgggctggctggtgttcttccaagagcctctgctcacattgttggcctctggattctggcccttcttcattggctgttgctttggactggactgttgctgagcctgtgtcctgcagaacccagatgtctgttaggctggctggctgctgcgaggggaggggggtggcctttcatttggggtgccctttcactcccaggccaagccctggagcaatcttcttcaggcagctgtctccacctccaggatgtccagcaggctgcaaggagaaggatgccagccacccatcctcccccagttcccagcctttcccctgttggtcacagccgcttctgtctttttccggtctactgtccccagtgtagagggctttgctgtccctgagactgaggcaggttccttttccaggtcagaggtggaggtagatctttctctcaaccacatctgcctccacacacagctcctccgcagggaaggagaagctgctctgtaactcattctggctatcgtcccccttctcactgacctgaccgcccaccacctccttccccctcatcacatgacaaaggataatgtgcaagaaaagtatttttatgtatcataaatgtattttgaaacaaatgagaagaagaaaggtagaagggtttattttattaaatgagcctgacttagtgacagtgtgtgagcatttgcaatgtaagggcctcagcttccttggagaagccaccccaggtttccagacatagatgttgaattgtttgtggggggtgtgccaggccacgtctcgtgtgtccgtatgcaggcatgcctgtgtatactgtgtatgggcacactgggactagctgggacaattcctagagattcaactgcccaattctaaccaacattggcagcggctgaacttggcatttccttgctaactgccagatgtggccaacctttgtccatatgcaaaccactgaaaaatgatctggatttctatagcaaggcccttggggagggcactctcccatgcccttggcctcgctggccacattggccaatgagccagggctggagtctgagacctttggttgttctttaaggcacctcctgccactttctccctcagaggcacaaacactttgtgttccacgtcagtttgaggggacggtggggggatgatatgaatgtcacaggaggagacaccttctgtctttgtttcaaagaaagtgatgtgccatttgttaatatacaagagaaatattgaaaatatattgaaaagagcaattttaaattatttttggcttatgttgcaatatttattttcttgtattagaaaagattcctttgtagagaaaaaatgtatttttcattaacgcaaagacctatttctcctttttgtacattgtccatgtgcgcaacccttaacgagcaatagaatgtatggtcacctgggtgtggccagtgcccgctgtgccctgcatgattctgtgttgccgctgctgcatagttcccagccccatcctgtcctgctcactcatgggggcttccagaccccggccccaccagggcttgtgtcatagggagccctttgcactcctcgtgtgttggcaaacgcagttaataaagcagtgttttctgtgc

SEQ ID NO: 13176 - DNA, 1201 bp, Homo sapiens
agcctgtagaactgagaaggagaagcttacaaaaaaaaaaaaatcctcttctatattgcagtgtctctaaaggaggcaaattggtttacaccttcatgtaattcttttactttaggggttgtaaagctactttattagatatagaatggcagattctctgatttaaaagggctgagtttgtattattactgatatgaagaatagagtaccaatgtcattaattgatttttcttgttaatcagaattcctattctgtacctttcctctaacttctcagatttgtaattcttcttttgggagctgagctagtgcttttaggagaacagataaatgtggtctcagccagccctagagactgcttcttgtgtttgtgtcattctgtcctgagaaatgaagtcatctgaaaaataaaatgaaagaaactgaattgtctaatgttaactctgcacattgtaacttttcttgttgagttagtatcttaatttttactccagcacaagtatttaatcaaagaaaagattcatacatgtgaaattggaaggtatttataaaatttttattgctgtataccaaactcagaattggaactttttacatttgagtttcactttttagaagtatgttttaagcaagcaaaaacaaaatgggatgtgaagaattgaggcatgcaacccaatagcataaatgtcctttttccccccaaatatggtctagatgagttattataaacattgtttttatttttttgagacagagtttcgctcttgttgcccaggctagagtgcaatggcgccatctcggctcaccgcaacctccaccttcctggttcaagggattctcctgcctcagcctcccaagtagctgggattacaggcatgcaccaccacgcccagctaatttttatattctttagtaaagacagggtttctccatgttggtcaggctggtctcgaacttctgacctcaggtgatctgcccacctcggcctcccaaagtgctgggattacaggcgtgagccactgcacctggccttataaatatccttttaactaactcagtaactgccatattttgttgggttgtcttcttaaaagaatataagactaaagtgttaatgtcacttggtgttacatttccttacagatttttgtatagtctaatttggttaatccttgtgacattaaaaacacatacacttttt

SEQ ID NO: 13177 - DNA, 2413 bp, Homo sapiens
acatccggaaaaaagatttttacctgtgctggtctatgatgtatgtggcagttgctgtctgcagtttacaatgtattgtaaatgaagattttttaaattctatcttgctgattttttttaaatataagaaactggtacttggtaaagaaatctgtccgtaagtacccccacaatcagtcaaactatatttaaagccagcctgttttcagagtatgatgtcctttaatgtaaactcaaatatcaatattttaaatgtccggataatattctagaggtttaaaaaatggaaatatttgaactttctattgaagacaataaagtacacaagtcgttaaggggctattcactttatcctgtactttcaatgaaattgtgatcatttcctaagaaaaggtaaaattcactatcatattttgtgtccccaccttgatgttacatgactctggaacaatatgaactggatttaagaatgttataatagaagtcttacaaaatgggttgagagtttttgtttcaatttttatcatcataaatgggcaaaaagtagttggactaatttcggtttttatacaagtaaagatttaatagtataaggatttttttgcatttctttacactgagtgtaaaactctacaaagagttatagtatttactactttgaggtttccctcacaacttctggctccatacctagcccctcttttataatcttccttaaaagaaagagtgtagcctataaatactaaatatgataccttttccttctagaaagtgtttatttatatatctatacatgttgtatgtacaaatatcctactacttttaatctgatttttcttcaggattattgagtaggttgtgaattttctttcttaaaaattgtaaaacataatggtacccaagttttaaacttagatgtgcttcatcttagtgaaatttaattcacaaggaatcataaattgtgtttttgaggctgggcgcagtgactcacacctgtatcccagcaatttgggaggccgaggtgggcagatcacttgaggtcaggagttcaagactagcctggtcaacatggtgaaaccctgtctctactaaaaatacaaaaattagtcggcatggtggtgggtggctgtaatcccagctactcaggaggctgaggcagaagaatctgagccaagataacaccattgcactccagcctgggcgacagagtgagactatctcaaaaataaataaataaataaataaatagtatttttgagccttcaagatacagttcctgaatattctaatttaaattgttataattggattacctaatattcttttcaagactcctgatgtattaacttcatgttattgtcacttttcaaaaaaggaatttttttcaggagttaaataaagtcagtcttttatatccaagggtttcaaacccacagattaaaccaaccacagatcaaaaatagaaaaaaaaaaaaaaagaaaaaaagaatgtaaaattttaaaaatacagtttaacagctgtaaaagttttactataacatttacattgtgttaggtattttaagtaatttaaaggttacagtatacaggcggttaaagtatacaggaggatgtgcatcggttatatgcatatagcaagccatttcatataagaggcttgaacatccatggattttggtatagaggaggggtttaaggggtgtcctgcaatcagtccccctctcataccaaaggatgactgtatatttcttaaatgaagagactttcattctttaaatattattgacttacagtttaaaaataaataaataaaagcatactatagttgtaaaaacaaataattttaatagtatattcagtggctgaagtgatagggagtattaatcattatttcttcagtataaagttattcttcctgaaaaagtaagatatacctgggaaatattcttggatccttcacacatccacttaatttcttgaaggaagaaaacagacaaaagacatgtaacaacagaaacaaataaaccacttactgtaaaatttcagaaattgtgggctcattccctccctctagtttatttatttgctcatctttatcacctaatggtagtttgttttctttggtagagtatatggcagtcccacatcgatgataattggtgctcccttcatccaactggatcactttgagattcagttttacatcattttagcattttgtttgtatatcagttgtgatgagccactgataaaattttgttctaaaatgaaacatattactttgttagtacattttttagtgtcacactgacttttaaaatttgaatgatatatagactttgtttttttaatgcaatatgaatatttgctcatgttttctaaattccttataaaataaaattaattcgaattc

SEQ ID NO: 13178 - DNA, 3628 bp, Homo sapiens
atgaggcaggaaaagagggccaggtttagaaggaagattgtgaataatcccaaagcttcttggttttattttgatatacataattttatggcctgggctttccaaatttgttttcctgtttggtttttttcctgcttttgctcaaaaactgccatatgctgacagatgcactcagggcatgagcagcggcattgtatttgtacataggttcaagtgtaacacctaactaaatcatttttccttttcctttagagttatggtcatgtctcatgtttcattactactttggggctgttctaaatagatgctttatgtgataaacaactgaaaccattatacctattagtttgtgaagtaagcctacagtataataaagacactaacgtatttttaactgatggagcaaaaaagcaaactaatgaatcaggattacttgaggtaatggctgtgtgagtttttgtaacatttattttcacaagatgggacacatatttgtatgctttggcatttacatccacttcaaatgttaaaaaacttatttttaatgttttaggtttaagcagcttgtaatttattgatctacatggcattaattgatttaaccattatacctgaaataattcttcagtgtttgcctttgagcagtgataggttgtgtattttttaattgcctaagagcatatataccaaacactacaaacaattcatatttacagaaaatttaaactattttataaaaactgcacattacatttttggtgaaatatagtgcattctgaggatagcatatttcatataatagaaaaagaagcattctctaggtttgcatgtagctatagtcactatattttgcctttcatatagaaagttttaaagtattatgtttaaaaacatttattggctgggtgtggtggctcacacccagcactttgggaggccgaggcaggcggatcacttgaggtcagcagttcaagactagcctggccaacatggtgaaaccccatctctactaaaaatataaaaattagccaggcgtggtggcgggcgcctgtaatccaagctactggggaggctgaggcaggagaattgcttaaatccaggaggcggaggttgcagtgagccaagattgtgccactgcactccagcctgggtgacagagtaagactccgtctcaaataaataaataaataaataaataaataaataaataaataaaaccatttattgatgttgctcatttatttggaacgtttttagtttttctcagaaattgtcccattgcattagcacttactgtgttttcaggttgatatctaccaaaggacacaaattgaatggtagactgtaaaactggtataaacagaatgcagtttcccgaccatcagaacccaaatattaagaagcatataggaatccatctatgcatgaaacatgtaaaaaatatgttggttagtttaattaaaaatcttattgtgggtccagtgagaccatctcatccaaaagattttttttcccccaatgatgtttgctttagaagcaagatagaaaggaaaaaaagtattaggtagatatgtatagtagggacagagggaaatctttcttctttcctttctgaaagtaatacttcttgttacacattttatttattgagtttgttctaaataaaatattataaacttcagacttgaaaaaattccacttaactttaaagttacaatgtttgtatttgggattttaaatgcctttgagattaaaatgtagaattgcaggacccaaaaacttttaaaataattaaaattttaaaagagcacatgttgtgttttttgggcttgctattaatgcaaactctgattgcaaatggatgtcatgtttcataccttttttatcaggaaaaaagcagcaagccttcaggtgttccagtgatgcctgacacaattgagctggactttatgctgctctttacagtaagaggtgttgcattgtatgtggggactatgtgcactggcgtctaagacagtgacctcaacaatattagctttgcacaaaccatagagaacgatgttggatggttacataatcagttataacattctggcagctaaattgctacaagagctttttcttgcaaaagcttaaaatacaagatttttaataatttactcagaacagtataacttctgacacacacaaatgcttgcctctttattcatatgttcgttacctactctgtacatgtatctgtcatttagctgtttctcaagatgatgttcagcagttggctgcttagaaatctttttcaagccagtttctaaagacatttgtttaatgttctaccatagaataatgcacaccattgtcaaagatttgattattgtgttttatagtaagtccatttgacatttatttccctttcagtttattttccttccttattttgttatacatacccttccctttctcccctgcctttcgtacattcattcctcttcctctaccctccagcacatctacttactggtgctgtgctgtgtgtcagaagataaaacaggtgtattattgtataatgaattttgtatacatgtttatgaaatggtgagatcaactaaaggaggcatgttcataacagtgtttattatcagcagctatgtcccaggaaaaaaaaatgggaggggcaaatggctacagttgtaaatggataacatcatttagaaagccgaatttactgttcatctgagcggttacctggagtattatatctatgcactggtgagcatctcctgattccacttacttttctccctgtgaacagtttaccggtgccatgctgaagagaaagacatctaagtgataacatgaatgaagtcttaaaatttaaagtatttttactgctatataaactaaagactacattgtgcatattttgttaacactgtctcttgttatgataaacactgaaatagcatgttaaacagttgcctatactttaatataatcagttggggaaaactggccttttctcccccactgtatgattgtttcttgaaaggtaaattgctaattttatacagtgtaattctgttcttcacaaaataggtttcattattctatatttaaactgttggtcagaaaatgatctgcaattcaagtaagtctgcattacttttttctttaaaaagtactttaacatgccttatttattatattagcaaatgagctaataacagatgaaattttcattttttgacagatataaccttgcataagtagtatttagggtgattttgatactatctttagagttttgcattggatattaaaaaatatattggcacaatgtattggaagaaaatgagtagtatctggtttaatttttaatatttagggacattttaaaaaatcaatgttttaattagactaaaaattctttatattttttatttactttttaaagaaacatctgtcaaagtaatattgattccaaactgatgtttgtgtgaatttacatgtctattttcatgaactaagaatagagtttctttgagttgaggagaaaaaaatatatatgtgggtccatttattaggttaaagttgacccattcagtgtaaaaataaccatagtgtgtgagct

SEQ ID NO: 13179 - DNA, 1948 bp, Homo sapiens
tgatggtctgaaagaagttggaaagaggaacttcaatccttcgtttcagaaattagtgctacagtttcatacattttctccagtgacgtgttgacttgaaacttcaggcagattaaaagaatcatttgttgaacaactgaatgtataaaaaaattataaactggtgttttaactagtattgcaataagcaaatgcaaaaatattcaatagatgcactattcttgtttttactgcatgaacgtaatccagtatttggaaagtaatccagtttgaaatgtgaagatgtattccggcagaatagtgagtagaatgacatgcttactatacagaaggcaaaaataggactctcaggtaatagtttaaggaaacccttgattccttatatatgtttaagaaggttagttttctgtttctttgcagtttttcttctagagtccatagcaggaaagtatgtaaccagaattggttagtgtgaccccctcaagtagcaagtgatggaaaataagagtcaaataccttgatgtttgtgatctctaactcaaaaaatttgaagtgttttaagttgtttctgggtaagggagatgttaggagaaaggaaatgctgtaactaaagctcaattattatcagttctatgctaacgtatacattttaatcatagttacctaagcagcatgcattaattgaaccttaaaatgttcccagcaggctgggcgcagtggctcatgcctgtaatcccagcactttgggaggccaaggcgggaggatcacttgaggttaggacttttgagaccagcctggccaacttggtgaaaccctctctctactaaaaatacaaaaaattagctgggcgtggtggcgggcacctgtaatcccagctacttgggaaagctgaggcatgagaatcacttgaacccgggaggcagaggttgcagtgagctgagatcatgccactgcactccagcctgtgcaaccagagcgaaactccatctcaaaaacaaacaaaaagaagtattgaagtgtaaaacactgttcttgcccacaagttgattctagtctagttcaagacacatgtttagtaaagagacaacatgtaatttaaacaaactttttttttttttttagacaaagtctcactctgtcacctaggctggagtgcaatggtgcaatcttggctcactgcaacctctgcttcccgggttcaagcgattctccagcctcagcctcctgagtagctgggactatgggcctgtgccatcacacccagctaatttttctatttttagtagagatggggttttgccatgttggccaggctggtctcaaactgctgacttcaggtgatccacccgcctcagcctcccaaagtgttgggattacaggtgtgagccactgcgcctggcctaaacaaactttttgaaaagctgtttctaaaagattccttaaattcagatatgacagctaattacctcatcataaattacttttatactaattgtttccagggttttagagtagttgaatgtttatttcacaaggcaccctaaattctatagaaataaaacctcagatgagtctccttcttagagtgttacaatgaatgggagtttacaacttttatgtgtcatgtttccaacagctgtgtttggggtggtcactggcaggaggggaccgtatctcagaatggcacattatttctattttacacatgagcaaattgaggcatagagagttagataacttgcccaggttacacagattgtaagttgatgaagctgggatttgaatcttcacatgtgtgtacttataaatacaaatgtaaggaaaactctagtgagtccacctcttatattgagttattactgtgtgagtgccaagtactgttttagatgctttacatatactattttgtttaatatcctttttaaagaataaactaggttggtgcag

SEQ ID NO: 13180 - DNA, 1965 bp, Homo sapiens
tttcttccaaaatacatgtaaaatcttgtacacatcttagctgcaatgtatgttgaaggaaatttatgtgaacaaatagagttgttctttttctcttttttttaagacagagtgttgctctgtcgcccaggccagagtgcagtggtatgatctcggctcactgtaacctccgcctcccaggttcaggtgattctcctgcctcagcctcctgagtagctgggattacaagcacgtgtcaccacgcctggctaatttttgtatttttagtatagacagggttttaccacgttggtcaggctggtctcgaactcctgacctcgtgatccgcctgcctcagcctcccaaagtgctgggattacaggcatgagccaccatgcctggctgttgaattgttcttaaggcatcatatctagaagcaaagaaaaaagaaaaataacaatttaagttgtgtaaattgtttgcctttatatattacatttggtaaaatcagtgcttaaatacgcaatgatttaaactggaacctgaggtatttttcatgctatctaatcatatacctaagataaaccaacccagttacttatattaataatattcagaaagagaagtggcttttttttttttttgagacggagtcttgctctgtcaccaggctggagtgcagtggcgggatctcggctcactgcaacctctgcctcccaggttcaaatgattctcctgccacagcctcccgagtagctgggactataggcacgtgccactgcgcctagctaatttttgtatttttagtagagatggggtttcattatgttggccaggatggtctcgatctactgacctcgtgatccacctgcctccacctccgaaagtgttgggatcacaggcatgagccaccgcgcttggccagaagtggcattcttaaattcaagaaattgggatggggagtattcacacattttataacccagaaattcaagcaattctggtgactacaaatgcattgttttggagaatagttgtaaggtggaaaaagaattaggaactcgacagatagtgagttttaactttaaataacaattcttcttttgttttgttttgtttgagacggggtctcgctctgctgcccaggctggagtgcagtggcaggatcacggtttattgcagccttaacctcctgggctcaagcagttctccctcctcagcctccagagtagctgggactataggcaagtgccaccacgcctgactaatttttaaattttttgtagagatggggtctcccatcttgcccaggctggccttgaactcttgggctcaagcaagcctcccacctctgcctcccaaagtccaaggattacaggtgtgagccattgcccccagccagtataacagtttgtgtgtgtgtgtgtgtgtgtgtgtgtgtgtgtgtttgacacggggtctcattctgttgcccaggcagtagtgtagtggtgcgaccatggctcactgtagtcttgacttctcaggctcaagtgatcctctcacctcagcctcctgagtagcagcggttacaggcatgcatcaccacacctggcttatttttaaaacttttttgtggagacagggtcttactatgttgccatggctggtctagaacttctgggctcgagtaatcctcctgccttggcctctcaaaatgttgggattacaggtgtgagccactgtgtcataacaattattttaaaatttttatttatttatttttaataattatacaagatggagtctcactatgttgcccaggctggtcttgaatgcctgggctcaaatgatcttcctgccttgaccccccaaagtgctgggattacaggcgtgagccactgcgcctggcctataacaattcttatgaagctaaagttgatttggattttagctgccgttactacttatataattaattagattaaacaagtcacaaaaattgga

SEQ ID NO: 13181 - DNA, 72 bp, Homo sapiens
ctgggcatggggcacccatgtgccgagagccttgcagaccatgacaggtccctattaaacacaggctttctg

SEQ ID NO: 13182 - DNA, 832 bp, Homo sapiens
gaatggcagttcccatttgactttcaggcaacagatatattttgaacacatactctgtgtcaggcattactaagctttggaaaggaaatccattatcatggttcagtttattaaatgcaatctttgtaatgtaaggatgccattagttctacaaggtaggaatcggtttccccatttcacagatgagaaaactcaggtccagaaatgttaagtagccaatcccaggtcatacagctggagctgacagtatagcaggactctgcagtcagaaagatttaagttcaaatccacacttcatcattttgtgaccatggacttgttgcttaacctccctgctcagaatcctgcaccacatccttctttcatttaaggtaaaagttgatatctttgcaatggttttccaggccctcagtgatctagctccctgttccccacccacctcacttctactcctctccccttcctcactttctccagtcacactggtctctgctgcaacttgaccatgcctggcccttccctgaccacagggcctttgtacctgctactcaccacctcctgaatttaacaacgtggagaccactggggattttggcaagggccatttgatggagagaagggtgtaaaaacctgatgaagtgggataaagaaagaatgggatgaaggatattggtgcacccaagtatacacaactcttctgagggttctgctatgctgtaatgaggaacagagaaacagagccatagccagaagggcctttggaagccaagagaggatactttttaagaaggctgacatcatgacatgtttgatgtgatgggaaagatctaac

SEQ ID NO: 13183 - DNA, 591 bp, Homo sapiens
cttgaagcactacaggaggaatgcaccacggcagctctccgccaatttctctcagatttccacagagactgtttgaatgttttcaaaaccaagtatcacactttaatgtacatgggccgcaccataatgagatgtgagccttgtgcatgtgggggaggagggagagagatgtactttttaaatcatgttccccctaaacatggctgttaacccactgcatgcagaaacttggatgtcactgcctgacattcacttccagagaggacctatcccaaatgtggaattgactgcctatgccaagtccctggaaaaggagcttcagtattgtggggctcataaaacatgaatcaagcaatccagcctcatgggaagtcctggcacagtttttgtaaagcccttgcacagctggagaaatggcatcattataagctatgagttgaaatgttctgtcaaatgtgtctcacatctacacgtggcttggaggcttttatggggccctgtccaggtagaaaagaaatggtatgtagagcttagatttccctattgtgacagagccatggtgtgtttgtaataataaaaccaaagaaacat

SEQ ID NO: 13184 - DNA, 5254 bp, Homo sapiens
tgcagaagtattcttttcaattatattgttagtggacttgttttaattttagagaaactttgagtacagatactgtgagcttacattgaaaacagatattacagcttatttttttctacataattgtgaccaatacatttgtattttgtgatgaatctacatttgtttgtattcatgttcatgtgattaactcttagaagtgttgtaaaagatgcagagtaagtattatgccccagttcagaaatttggcattgatcttaaactggaacatgcttttactttattgccctaacaattttttattaaatttatttgaaaatgcatcacatgatgaaaaattatagtagcttataagagggcatatacagtgaagagtaagttttccctcctactctcgatcttccagaagctgtacttttaccagtttctttgtcccaccaacttaaaaaaaaaaagtacaattcattgttttgcaaaagtgtatggtaggggcttaaaagaaactataaagttttatttgaatgaacactatgcactgctgtaactggtagtgttcagtaaaagcaaaatgatagttttctagatgacataaaatttacatttaatacagataagtgttcttcagtgtaatgtgacttcatgctatatatcttttgtaagacatttccttttttaaaaaaatttttgcaaataactgatctcaagtatatgtcatttactcaaaatctgtcataagcattactttatagctagtgacagtgcatgcacagccttgttcaactatgtttgctgcttttggacaatgttgcaagaactctatttttgacatgcattaatcttttattttgcacttttatgggtgacagtttttagcataacctttgataaaatacactcaagtgacttggacttagatgcttatccttacgtccttggtaccttttttgtattaacaaacactgcaatttatagattacatttgtaggaagttatgcttttttctggtttttgttttactttcaacctaggttataagactgttattctatagctccaacttaaggtgcctttttaattccctacagttttatgggtgttatcagtgctggagaatcatgtagttaatcccattgctcttacaagtgtcagcttacttgtatcagcctccctacgcaaggacctatgcactggagccgtaggaggctcttcagttgggccccaaggataaggctactgatttgatactaaatgaatcagcagtggatgtagggatagctgattttaaaacactcggctgggcacagtggctcacacctgtaatcccagcactttgggaggctgaggcaggcagatcatgatgtcaggagtttgagaccagcctggccaatatggtgaaaccctgtctctacaaaaaatacaaaaattagctgggcatggtggtgcgtgcctgaagtcccagctactcgggaagctgaggcagaagaatcacttgaacctgggaggcggaggttgtggtgagccgagatcgcaccactgcactccagcctgggcgacagagcgagactctgcctcaaaaaacaaaacaaaacaaaacactcacccatcaacgaatatagactcttctctcatttatcgatgatcctctttttccattttttaagtacttatgtggaagctagtctcccaaaacacaatctttagagagaaaagacatgaacgaactccaaaatatccatttaatcaatcatgtttttggctttggataaagaactttgaaccagtttttttctcaggagctgtcaaatggacacttaattatgacatgagaatgaagaaattattttggaaaaaaaaaatgacctaatttacctatcagtgaaagctttattttctggtgccttttgaaagtatatggagtcatatcattcttctgtttaaaatgttagtttggtttgactttccactttgtcctttctgctcttgtgaagaaaaaaaaaagcattttcgaggaaagaattatgcaatttcttttgttttctgtgtcattatttattgctttttcaatgtgcagccagtggatggttttagttctttcagatgaactgccatttgtgtttcagctcacagttctttgctgggtaaaagaaatactttctgacagtcacctgagccttaaatgtaagtattacatgacatgcattctgtttcttccagagttctgtctgccacacgaaagagaatatttgcttacttgatagaactttggcattttcatcattcttttacttaaccaggcttatggcatgatctctggaacaaatttgtaggaaaaaattactccaattgaatgactgatgtatgtaatcaacttcattgggctgcagtaaactagtggaaattagagagttgttttattggtgttttctactgtgagttaattaaaaattgtttttatttggggtcattatgtcacagtcttgagttaacaagatcttacgtgattggccttttctttgttttctcttaggagttgtgtctcatgaatgacagtactaaagctattaacaactaagagtttgacagagaactataagcctgttgtatctcctaaaagttgtcaactccccacccttggactttaaatgaaaattttattcagtccagctattcttacagtccctaaggattttcatatatctatgtataggagataaaatttgctagtaagatttttaaaaactggctagtgaaaggaaagtacctctgaaagaaaccattttagcaaattatggttatatgttttaatttaatctacagaatgttttatagtaaaattctagcaccactagaataatcacatagcatgtacaatatatttatgctggctgaaaagacagaatctgggaataataaaattgcaaccagtttggtaatgcaaacagcagaatagaatgaaatctcagtaatgaattaaagcaacaaaaagatattgattggcaaaaagcaagatataagagattcatttgcttaacatttctacataatatttatggtctggtcagtattggtctggtcagtattgcctggctgacgtgaaatgtaaactagtaggcgtgttattgatctgctaaaactaaccctctttttaagaggagatttaaggaagacgtcaatcaaaatgtcaaatatgtgtgtcagaatataaataatttttcacattgtattgttgctatataaaaaaaataatagaattggttgggtttctgaggtgaaatccagagtaagagtactagacagttcaacaagccacatctaatggcacagatagaggatgtagctattttatacctttcataacatttgagagtaagatatccttcaggatgtgaagtgattattaagtactcatacctgaaatctgttgtcaagattagaactggggttcatgttaaaaaccttccatattacctgagggtacctgtggggaacagttccttcccctgtgtggtagtattttgttggaagagaatgtttatacaaaaaatgaaattcttccaacagcagagaaactctaaaaagtttgatagtacctatcaaagtgctgtacttctgtgatagagaacatctgatgtaccaatttagatctatttctttatactttttctaatcaattgcttaatagtactttggatgattatcacctttgccacttaaaatatataaatatcctttttacttcatgaggaaggaagaattttttgataattactgagttcagccttttgtgatgacttatattttggacttacattttaactttaaagaatgtcagatcccttctttgtcttactagttaaatcctcacctaatctcttgggtatgaatataaatgtgtgtcatcgttatattgttcagctagatgagcaagtatcttagggtagtaggtagcctggtggttttagaagtgtttggtgatttttatggagagagttttcctaagtggtggtttataggtggtatcagatattattagggcagctttttggggagtaatctcaggtctcccagagcagcagcatttttctcattgatataagtaagattcttaggagcttttcttatcacacaagatgcctgaatcgaatgtgagaattgaaggcatttcttctgcataaacaaagaattctacctgctggacagaaacctggaaagttctttggaattcgctgaattacagtttagtatgtcctgattacagagtgacaatatttatcaagcctttgttatattggattatcttctctcttaaaatacaactgtattataattgaaatgacagcccaaaattggatggtttaccaaaaccaatgaaagggatttcacacatcaatttttatttctgttttgaagagcacatgctatataataattgctagtagcaactgcagtaaaacaggtgataagttattttctctgaaaagatccagtcctagagcaggattcttcgatcattcatggcagagtgaaaaaggtttgtatggttcttgtccaaataactcagttcttaaaattcttaaaatgatcgtaaaccattatcctttaaaggtttatttgaagatgctgttaaagtacagaattttgtgtacaggtagatttttccgtccctcattaatagtgccttcttaattaatacagactggtgttagctataacaaaactccagtaaggccaaagaatcccaagttctttgtggaaaaaaaaaaaaaatcttttagggtcagattttcccttctaatatcattgaagatgatgttgcattgatttattcataaagtattttaactataggaactctagaagataatggttaggcaagtgattttttttttaaatatggttggcgtaagttgtattttgaaattcacttattttaaaatcgaagaggattgtaatcatggaaatagaatgtttgtatctacctgcccacattttcttaaaaagatatttcatatacagataatgaagaccaagctagtggctgcactgtaggtctgctgcttatttgtatttgttgtgcttctgtttatgttgtagaagctgaaattctagcaacatgcttcaattctgttattttgatacttatgaaaatgtattaggttttactatattgtgcttttgaaagccataactcttaagaactttgtttttgcatattgtttgctaattctttactttaataaacctcaaaacctgc

SEQ ID NO: 13185 - DNA, 467 bp, Homo sapiens
taactttaccaacattggaaaacagccaactacaccattagtaatatatttgattacatttttttgaaattaatccatagctgtattaacagattatggttttaattaggtaatatagttaatatatatttataatattatttatcctttgactcttgcacattctatgtacccctccgatttgtgaagcctacaggaaatctgggtatatggatttgtaactgcagaagactatcttaaaatacaggattttaacatttaagtcatgcacatttaacaattacaggttataaattagtatcaactttttaaacacatctaatgcttgtaataacgtttactggtactgctttctaaatactgttttacccgttttctcttgtaggaatactaacatggtatagattatctgagtgttccacagttgtatgtcaaaagaaaataaaattcaaatatttaaaacggac

SEQ ID NO: 13186 - DNA, 320 bp, Homo sapiens
gtaccagccaagtacacacgatgatagcttcaaggaatacaactgactttatgatatgaattttcaaggaacgtatcttatatggattttgaagaatcttgtttgcttataagaacttcaagaagcctaagcttggctttaattttcttgtactctctgtactcctcaagcactggaacacgatcctctttctgggcattcctaggggagaaaataaaatttgtaatgttctagagatcatttggaaaaaaagatccaaaagttgtcttaatatgagacatactgttactaaacataagttcaaataaaaagttgttctg

SEQ ID NO: 13187 - DNA, 437 bp, Homo sapiens
taataccccacacaagttcacttgattaattgcatcagtggaaggggacatagcttctctcttagagagaacagattggaaagcaatcggaaaattgcagttttggtctgtagtcctcatgatatctgctatcagtggggaaaatggaggcccaagattctacagcatattcctggcggggctgaaattggaacctgggcctcctgactttggcagacccccatttcatctttcctgcaaactactttcccatctttgtgcctgtacttatgcagctttctacagggagagtttggtttggggtctatatctagagggaccttcaaagtatttgttcctttaaatttcagaccatgtccaacccagctgtgctgctgggaatcaggagaatagaagcaaaaaacgaaagagttctgttcagacttctgaagagcagc

SEQ ID NO: 13188 - DNA, 258 bp, Homo sapiens
ggctgtggggaaagagaagagcagtcatggccctgaggtgggtcagctactctcctgaagaaataggtctcttttatgctttaccatatatcaggaattatatccaggatgcaatactcagacactagcttttttctcacttttgtattataaccacctatgtaatctcatgttgttgtttttttttatttacttatatgatttctatgcacacaaaaacagttatattaaagatattattgttcacattttttattg

SEQ ID NO: 13189 - DNA, 2768 bp, Homo sapiens
aactgagaggctacttcctggggccacacagactgactctctcatggctactaacaagtgtcgagtccccaaggctgggggccgagcctgggaatgggggtgagtggagggctccgactcagggcagctggaaatcttctcgctccagcaagctcgaccatgccaagagactggccgggacaagataaacggagctggtggcgggagggacagccccagagcagacccttcctatggcggccctgagtgtgagtatccctgccaccaagagagcaatgggcagggaaggaaggggtctgccgaccccagctcggggaatttcactagcccctttgcttcaaagggcacttgtgtcttagaatttggccagggtggggggttgagtcagcctcctcagagaaactgcgtgagagtgtgtgcgtgcatgggagtgtacttgtggaaaggtgtgtttgcgtagccttagggaaggaaggcaattgctccttaacagcagagtatcatgatacccccaggatcttgagttttttacaggatgttgggtttgctcaaggagtcaagaggagggcaccaagttttccttttttctaaatagctctggaaccaggcttgtaatccatagcatcaccgactctgcaaaggatttcattttggggtacagcagggtgttttaagtgctgtgacttcagctaatgatcttttcttcagccccaccccctccccactagctcgatctagtatattggggaatgcaggtggggggtgtcaccatattttttctgagctggcctttttttctcatcagattgtccaggctatattccacctgcctcttttgccctcttgagtagagttgcacacagcacatgggcaactgaagcagggttgaggggctctctctctctctcctctgctgatgggacccttttcccctcaccctctgcccttctaagtcatagactaggtaggaaggccctatattggtccccagcatctactgaggcagacctgcaacagaagtggcattcagtccccagcagacatgggtgagctcaccccagcactgctgttgggaaggtgactgcaggaaaccaattcttacaagatccaggcccagcctttttgacctgcttgagagggaagaaggggtgtttagcatttaatagtttgcttgtcttccactcctgccaggaagtgtttatttgcctctaattgggcctgagagaccatagggaggttggggctcactgagggattggctgaggatgtataaagcaaaggctgtgagaagcagttgggagtttggttgtcattggattgaatttacttttttgtttctcacccgcaacttgagccaggacagctggtccaagtggccacagtgatgggtttaagtaccttggtagggctggcaccagtggaaacacatactgaagctgccaccacaatagcttgtgaggttttatccagctgtggttagaccctgcatgaccaaatttgacctgcccttgtttatggcaagaagggcatttttctcttcaatttccagggtttcctaggacccagttcctcatgtaagggaggaagaccaaggtctttgtgttttcttcctcatggaattgaacctgacattttctggatctcctgcatgtcaggagcatcagtgaggcttcagcctcctcgtctccactccagagaggaggtggctatgtcttcttaagcctctggccctcagaggctcctccctatctcctggctagttaccactaggctaccaggtctctaggggcctgagagaggccctctagagaatccagggaaactgtgagcccaggagttgcccatctatggtttcattcctcccctggctcttctccctcttcaggccataatttccctggtgccaatttcttttcctcctggggcatcctcatcccagggctctctgctgtagattggctgtgccagcttccaacaggttactggcaatgccagtgagtttctgtaggccctaagctgaagaagtgaggcagtgattctgcctccatcctggtttccccaaagccccagggcaccatccttaggggagaaggtctacagttatcattattttaattccattactttcagtctggaaaactaagctagtcagaactgtcatcttgcttcccaatctaagaacctgtggccctggaacacttttcaagaattggttcattttgctttacacagtagatctgttccaacagttctgtgtaaaccaaatgctatttttcaatgcatttggactgctgaccatttaaaagcagcctatgattgcttctttttgtaaagcaagcaacctccctccactttagctgttttgactatttgaattttcacatattgggcttacccagagtggagcacacctccagggcatgtggctgacactgggtcaatgtctgcatctgtgctgtgtgtgtagtgtggttggccagtaggtgagtatccctgtgtgtgtgagtgaagccactccccaggctggtgctctcctcctgtgcccagtgactgcccagtggcagctcagctgcccttcactcccacctgctgccaaagtccctgtgctaatgggattacaaatacaaaaagtggaaaaaaattttcgtaaactttgttttatattaaaagaaaaatccataagtctgtgtgtgttaaacatgaggttctgcctctgtggctgtgtttgaaaaaataaagttttattagaataatccattttcccaagc

SEQ ID NO: 13190 - DNA, 1327 bp, Homo sapiens
gcatggagaaactccaagctcctctgtgaagcaggtctttcactcacaacacttaacagggaacggcagggctctttgctggagcagaggcccttcacccagagccagtgtggtcagtattccaaactctccagccactctcttctacgctgcctcaacactgaaggttgacacaggaaagtcgtactgttcacacacacagtttgagactccaagccaagagtgccacatccctatcctgtggccttttggaaatccaaattgcctgaacatggcggggctttcctgcacattctcctgatttgagattcacgggcacacctttcttttcttttcctcttgtgcctagttaagtggaaatgtgtttggagataggggaaatcacataactggtacaagtatggggtaattgcttaaacatgcctggtggaagtctgatagcgtctctgcacgtgacctctgacaaagcccatcccaggagacggggtgaagctattccccacactctcctgtgaacactggagtcttgcaagacccagggagaacccactgcttttcccaggaggctccaggattaggaaatgtgtgtatttagtgaaaaataggtttgtagtgaaatagttactatttcatgaaagtagatatttttagaatttttgaaataccacagttgttttcctggattataaggaaaggcacattacatttagtcttcctttcgatataaaactctttgaagaaatatgatttttagaaatcagctacccattatagcacaaaatcagccaaagcagaatttttaaaaattggcttttttaggattctttttctccccctcccatcttagtcttaccttgagggaacagtcatatgagaaggaactttgtcacatctaagctgtggtgtgttccccatgtgtgtgtacaacactggtgactccaggaaccattttcacctattaccagtgttccctggggactcctcttaatgtttccaaatgggaaggacagttgatttccaacatgaggttttttgttttttatccagaaatattttcagcaaaactttccaactgagtggagtctgattaaggatttatttgaaaatggtgggattcattggcccataggtacattggaaaatgtatatctctccagctgtactgtagtgccctgcaggctgtttatatgttcacagttacttttttttttttttttaaataaaagtcatttaatgtagaatacttttaatttcactttctgtattttaattttgttgaagggctgattgggatttccatgttcttattaaaaatctaacaaatctg

SEQ ID NO: 13191 - DNA, 1217 bp, Homo sapiens
gcccctccacccccgcaggctgcagagcaaggatgaagcctcaggaggggcctcagacccagcccctgctccacactgtgccagtagcctaggtgtctcaggcccctgggccccgcagatggccatttccggtgcctgcccagtggccactcttctggaaggggcttggaaaagaggaaggaggcccagctgtgggggttgagggtagagggtggaccagaggctgaggactgagccacccaaggaggtggggactgctcggcctccaccgctgttccgctgcagccccgccctgccccacccacccagtgccttgctgaagcccatagcaatccgcttctcagaggtcctgtcgtgtttccactgctcgccttggtttgggagcagggagggggaagtcctagcccagatggaccaaggacgggcctgaaggcacatgggggaaagggagcacacggggaggacgttggggaccctgggtggggcctccaggtgcagctgtggatggaagacagggattggcctgtgcttcagcgaccaggatggccaggccagagctgcagctgggggctcttttcctggtcattgggtggggctgagtgccacatgttcccacattaaaaaggggggtccagggctgtgtgagtgtgtctttctgggtctagggctcggggtagtttgggtcaaggactgtccctccagcagtcgcctcctcccaccctgagccccacagtcatctggccctttccctgctcaaccctccatcctaggctctgagcctcagaggacccagcccatgagagaacggggatctggggggcctctcacctgctcctatgaccttgctcccttttaggtcaccccattgccaccgtgcccctgggctggactcccgtgctcctcagggcccacccctgctctgtctggtacaggcccctgctgagtgggcccctctcctctgcccctggggtccatcccctcttgcccagggtccccatcctgtaccaagcagactgggccctaagacccctggcagaacccagcctctgctcacacccgccccagcttctgccacggcttcagtcagggccaggaggaacacgtgaaggagaaagagaaatgcaggagccgcggggctcccggttccttgggaagagggtgcccattggacctttggcactggatgagccaataaaccaaactctggcacctcattt

SEQ ID NO: 13192 - DNA, 1234 bp, Homo sapiens
agggaaaggggaaagaaagggaaaagggagaaaaagaaacacaagagacttaaaggacaggaggaggagatggccataggagaggagggttcctcttaggtcagatggaggttctcagagccaagtcctccctctctactggagtggaaggtctattggccaacaatcctttctgcccacttccccttccccaattactattccctttgacttcagctgcctgaaacagccatgtccaagttcttcacctctatccaaagaacttgatttgcatggattttggataaatcatttcagtatcatctccatcatatgcctgaccccttgctcccttcaatgctagaaaatcgagttggcaaaatggggtttgggcccctcagagccctgccctgcacccttgtacagtgtctgtgccatggatttcgtttttcttggggtactcttgatgtgaagataatttgcatattctattgtattatttggagttaggtcctcacttgggggaaaaaaaaaaaagaaaagccaagcaaaccaatggtgatcctctattttgtgatgatgctgtgacaataagtttgaacctttttttttgaaacagcagtcccagtattctcagagcatgtgtcagagtgttgttccgttaacctttttgtaaatactgcttgaccgtactctcacatgtggcaaaatatggtttggtttttctttttttttttttttgaaagtgttttttcttcgtccttttggtttaaaaagtttcacgtcttggtgccttttgtgtgatgcgccttgctgatggcttgacatgtgcaattgtgagggacatgctcacctctagccttaaggggggcagggagtgatgatttgggggaggctttgggagcaaaataaggaagagggctgagctgagcttcggttctccagaatgtaagaaaacaaaatctaaaacaaaatctgaactctcaaaagtctatttttttaactgaaaatgtaaatttataaatatattcaggagttggaatgttgtagttacctactgagtaggcggcgatttttgtatgttatgaacatgcagttcattattttgtggttctattttactttgtacttgtgtttgcttaaacaaagtgactgtttggcttataaacacattgaatgcgctttattgcccatgggatatgtggtgtatatccttccaaaaaattaaaacgaaaataaagtagctgcgattggg

SEQ ID NO: 13193 - DNA, 944 bp, Homo sapiens
gtctgcccaggccggccgcccccacccctcggggctcctgaatatcagtcactgttcgtcactcaaatgaatttgctaaatacaacactgatactagattccacagggaaatgggcagactgaaccagtccaggtggtgaattttccaagaacatagtttaagttgattaaaaatgcttttagaatgcaggagcctacttctagctgtattttttgtatgcttaaataaaaataaaaattcataaccaaagagaatcccacattagcttgttagtaatgctctgaccaagccgagatgcccattctcttagtgatggcggcgttagggtttgagagaagggaatttggctcaacttcagttgagagggtgcagtccagacagcttgactgcttttaaatgaccaaagatgacctgtggtaagcaacctgggcatcttaggaagcagtccctggagaaggcatgttcccagaaaggtctctggagggacaaactcactcagtaaaacataatgtatcatgaagaaaactgattctctatgacatgaaatgaaaattttaatgcattgttataattactaatgtacgctgctgcaggacattaataaagttgcttttttaggctacagtgtctcgatgccataatcagaacacactttttttcctctttctcccagcttcaaatgcaaattcatcattgggctcacttctaataactgcagtgtttcccgccttgggcttgcagcagaaaaacctgacaacatagtgtttgctaaggcagtaatttagactttaccttatttgtgattactgtagtgattgattgattgattactattaactacaaggtataatttactatcaccttatttaaattttatgaattaatttgaatgttttttacactaactaacttttcccaataaagtccactatgaaaccacgac

SEQ ID NO: 13194 - DNA, 1044 bp, Homo sapiens
gatgtgcaaggagatttaatgatttcaaagaaaataatggttctttgtttttaatgttaaccttttttaaatacaatactgatagttagaagaaaactattgtactcttttgttttagtggagaaataatagatgtctgttcatgtgttaagtgttatagcaaaaaaaatacacatatggttaagttaatgaatagtttttgttttatcagaatggcaacagacagaagtactttgtagagattgacttcctaagctacttaagacaacttgcaccactaagaaaaaaatgtagaaccatttggaaaaatgaaatttagtagttccaagtttcaaagaaatgtcaacattttattccattcaataaagaacaaaaccaatagtgtttttattactttcatctgaaacattccatgttttaatctgagccttgcagactttcatttggagtttgaacccgttttggttgcatttcatttttggagaacttaattaacgtgagattggcaattgaaatgcaggtgcagttttctgttaatgtcatgctgttgtttaggtaataagaaatattaagtaattggctttagattttgtaatttttttccctgagttcctgctagatttcgtattctagtagtcaatgtattttcagtgaaatgcaaaaatattcccgttatctttgaccagtattaatttttgagatcttactgcttgtcacttgaatcccgtgattgtcatacatctctggtataagcaacatttgatttttgaagtgtgtagaccatctcttcatattttcaagatgtaattttacatttctgcatttttaaaacagtttggccataatcctagatgcacgcttctaattcatgtacctgcacatgtgacctttgtgaacagaaatttgcatgtataatttgtgtttacttgtaactttctggttatatactgcttatatctgtggattcaagttactgaagtgaataccaataaaaagaaaaccctaggccatgttaattggttatacatgtttggaatgttaacc

SEQ ID NO: 13195 - DNA, 921 bp, Homo sapiens
gtagacggggccctcttttggtggatgtagcacaatttccacactgtgaaggcagtattagaagacttaattgtaaaagctctcttgtcactgtgttacacttatgcattgccaaagtttttgttagtcttgcatgcttaataaaagtgctgagactgttactaagtaaaaagctgtcaaacatttactgaaaatagaattggccccatggcttgatgtgaagacagcaaggaaagaagcaccagtcaagttgtgaacaagcaccaaattaaaagacctaaaccttaccaaattgtctttttttgaggctaatctatcacttgttaatgtctaaactttaaaatcagtacatttaatttgagttccaactgttaagcatatttctcagacttaaatttgattatgtccccatcaaaaagaatctccattttctgaaggtctgttagttaatttgagataatttgttaaaggcaagtatgtcatattactgaggctacaagttagtcagcagatgagtgccagtccagccttttctggtatgttattgttagaaatattgagttctaatgttacatctgaggaagtatgtaatttgagaattgtaacttctaagggattcactgcatcatagctatgcctgtatggagtctaacatatgaccaataccaacccataatccagctgaacaaagatactgtaacatgatttgagtggtgcttttccttgctttgttaaccatcacgagagtctgcagcacaacttttaacaaagctagaacagttttggcttcttaaacttcatatttgggtaggttaagctgccatacgtgttcagtgtgaatagtgtttaagttgaaaatattgtaaaaaaattatattttttcaaaaatatttaaaaaaataaataatagtagaactgagc

SEQ ID NO: 13196 - DNA, 1630 bp, Homo sapiens
ttaaagaaattattggataacctctacaaataaagataggggaactctgaaagagaaagtccttttgatttccatttgactgctttctatgagcccacgcctcatcttcccctgtgcacatgtttacctgatacagcagtgctgcgtgttgtacatacttggaacaacaaactagaaatactgtacttctgtaccaacattgcctcctagcagagaagtgtgtgtgtgacaagccagttctacaggcattacctaggtgtgagactaaaagcttttcttattgacttaaatttggataacagcaaggtgtgaggggggtggtgggtatggtgtgtgcttggatgggaaagaaaaggctccactcacctataggagattatttttaagtggaatccatttaaactcaaaacagttatgaaaagcaaggtgaagaacatgaagctgtgtctgtattcattttattccgaaggagctacgtcttaggtgaaagttatgaccaaccagattaaactctacccacatcctgcattttaaggtctaagtttaactggtcaacatttaaatggattggagctattagtacatcaagtgtgatgggctttgttcccaactcttttacatctccctaccccttcaacctttggcctttcagcccttctttctctcttccatattctttggtttgtatgtggtttctcagttaatacatagctaatagctcttatttttcttatgtttttaaccgcttaggtctatttggatgtaagggtgaaaattcatttgatggaaatacttgtgtatatttaaagacccaattgctcctctggagcttgtactttcaagaatgattaatctgtgtaataaactggttactacagtcattacatataattttgtgtgaataggctttttcatttttaagaagtttgtctagctgagattagtggtggattttctcccacttctgaaatgttcatttatactggttgcattttaagatcatgaaacaattccagttacattgtaaaaaggatatcttacgagtaattttattgaacaagttagaggcataagcttaagagcatttccatgaaacaacacatgcagcattccaggaacttgattgttaaattcaataagaaatttgctttattaatgaaactaagctgcatttcatcaaaaccttgtgacattcccttggtacataggacataaaacacagaggcattgctatttggtaagttaagcttctgtgattgtaattataaaagagcaacattgaccaaacctgggaaacaagagcacagtcttgtttggagagtctacataattactttgcactaacatttgcaggatgttcacacaattttaaattgtactgtatgtggctttttgaagtcttcccttgaccctagtaaaatatagcttgaaacttgtaaacaactgtgtttgccagaaacatcattcatgtgaactaggcaagttaccttttttccccccttcttttcctaattgtaaactaggccaacctgaaagccatggctgatgctctagccatcaggttctttcaaatgcatctttacactcttgcacaaaagttaaggaataaatgtccactgcttttggtttt

SEQ ID NO: 13197 - DNA, 434 bp, Homo sapiens
cggcggcggaacccaaagctgccctctccgtgcaatgtcactgctcgtgtggtctccagcaagggattcgggcgaagacaaacggatgcacccgtctttagaaccaaaaatattctctcacagatttcattcctgtttttatatatatattttttgttgtcgttttaacatctccacgtccctagcataaaaagaaaaagaaaaaaatttaaactgctttttcggaagaacaacaacaaaaaagaggtaaagacgaatctataaagtaccgagacttcctgggcaaagaatggacaatcagtttccttcctgtgtcgatgtcgatgttgtctgtgcaggagatgcagtttttgtgtagagaatgtaaattttctgtaaccttttgaaatctagttactaataagcactactgtaatttagcacagtttaactcc

SEQ ID NO: 13198 - DNA, 1989 bp, Homo sapiens
ctgacatggatttgcagaccccagggtgggcagatgtctccagtggggtcagtgagcacaattccagccaggggccacttggaccaagctccagtcagttgatgggcagctagaggggtgcagaaagcctgtgggcccaggagatggagatgccgtttgtggcgttgatctccttgcgtccttgggcatctccgggcatcagaccctctccctggcccttgttttcctctccaccatggagcctcattttgtaggccagttgtgtgcatgctctagacaccacctcgctggagaagctggaagggctgttgtcttcccaggtctttctcttctcatcaagctcctctcctcatcttttttgtgtgtgagggcaggtcttgactctaggtctcagctggaaccccaccctttctcctcctccttcctctgagttgaccagcagcaggtctgccgaccaccagcaccatcctctcctcccagcagcctccagaaccatgcccaggtctcctgcctcacatcacaataatctgggacccaggcttgtgccctttcagtgtaaagctgactccatcacatgtgcatccacttcttttcatccattgagatcacactgcctcctttttatacagacacaaatatacatctataagaataatatatacataaggaacccctgaaagatggttttggaactggaatcagttagaggatgaaatcagataaaggaaaagcctattttggagcttcccctgttaggaaggatggctgcacctggccccctggcattcctgacgctctaggagggaagggggaggcagtgctggcctcccttgccctgtttttccctcttccagctgacctgtgacttatactgctcttaccgatgatacttttggaaaaaatagagcgtgtatgcaccgccccgtttgtcccatggatatcctggggtgtgagtcggatgggaccacggccctgtttatatttgggtctttatgttggtgctgccaggtctctgagctccagaggtggcctcttggacagatctactgctataggaataaaagacactctgtctcgcaaatggctgcttgtcaacaagcccaaagatgcttgtcggaggacggttatggaagcccttaattcttggttgtgggaaaaggtggaatgacaagttattgattgtttttctgtcgctatttctttcatttgtctagtgaatcagaaaggcttagccaaggccacatctgggaagagtggagaaatttgccacttgacgatcacggattagctagcacctttaagccctgcatttctccaactgacaagtgggtgggggtgatggcacattcagtgtggctatgaagagcgaatcctctctattgtttaaatagattactgtagtttggccaggaatttggcgtcagtggtaacacacttagttaataaaataagccaggcttgcaactaagtatctaactttacaggcccactcacatttgaggcaaggggctattgagtatgtggagagatgtagtgatttaaattcagattatttaagttggatcagctgaagtgtgttttagacccaaaccatctggccccttcgttttgctcagaggaagtaaatgttcacttaaatgaaattgaaaacgccatgtggcaccacaaaagagctctctgtactttccccatgctgcctcaaaagttctgtgagtttcggggtcagtgtcccacccttcacttcccgagggcgggtgagtggagagcagagccaggagctctggcagctgtggacagatgtgcttcctgagcatgggttgtgcctcccatcagtaaaaaaatgtttagttcacttccttaattgtataattatttatttgtaaattatatacatgtactactgtactaaaatattatgtacattataaaacatacacaaaaatagaaatttaaaaaagatgagatgaaaataaatctaagtcaaagttc

SEQ ID NO: 13199 - DNA, 1585 bp, Homo sapiens
tcaaactgaatgaaacccccacacacacacacatgcatacacacacacacacagccacacacacagaaaatatactgtaaagaaagagagaaaataaaaagttaaaaagttaaaaaaaaaaaaaaacctgttaactccaagggagcaccacccacagaacctccaccaactgacagtttctcttcttgacttgccacccatcgctggatgttgtccactttatccaccatataaaacagtaagcagctgctaaaaacaaaaaaaatacaaaaagtaataacattatatgaactgtgtttcctacttgattaaaaaatataaagaactgagtgtttatttccctaattaaccaagaacttttgtacacgtttaagctattattattaaaaagtgtttgcaaaatggtcaagattataatattgctgaattatataaaagtccttttcatgttgagctaacatttgactttagcacaaaaaagagatattttagaacacgtaaaataatatttttagtttttctcattttgttaccaaatttcaaaccttacatggaggttattatagtatatttgacaccctatatacctgtgattagagatgtgtatatatatgagggctaggcatgctgtgtgtctgagctttgtctaaatgttatgcagaagtttgtagagttaaaggtacgtaggtttaattcatgcaaggtaaacaataagtgctctcttttatacaatatgcattgcatctggaccttaaacttataaaaatggtcagtgaaacttctgtgaacatgaagaaattattaaaaaaggcatttaaatgaaatttgctaagttgtgatttttatggttggaaccaaagttattcaaatagtaaaaggaaaaagaaagaaaaaggagatctcccataatatttttctgcatctgtttgctttgactgagtaggcgttttgtcattattgtgtatatgagatgtacttgtatcgttcataatatattttttttattatgtgtagaaagattttaaaaaactaacgtgcagcaatttccagtgaacctgtacttggacatcaggtagtgagtctatttgtggtcactagcactgtctcctaaacttgtaagaggtctgaagctattctttgatttttgctagtgctattaacttatgtagacctgttaaaaagcagagcaacacaattatagttatcctactgagccatggattctgagttttgttttaaaagtgaaagccaagttggtgtatgtaaaggatttccatgtagctgtggtgctagttattactggctacattatatgctaagtgtatttgtgttccccaagtgtacaagccttctatcaaaagtatgttctataactcatatattcaaggtgtagggtatgaaaatgcaaagtttaggagagcactttaccaagctggtgtcctccaaactgaaattgtttgtaacgatagtcttttacaggttttcctttaaagatgtttgtgtgcttttaattgacaactaacttcttgctgctgtatagtaaaatattaatatatttttatcattaaactgctgcatgactatc

SEQ ID NO: 13200 - DNA, 168 bp, Homo sapiens
aaactagcgaggtctgctgtactgcttattgaagtattgtgattattttaggcattgattcttacaaaatatatactgtaacagtatactttgtacagatttaaattttatttgaaaaaatgaaataaagtaggcaaaaaaataaagatgtttatttttcatgtgact

SEQ ID NO: 13201 - DNA, 376 bp, Homo sapiens
ccagaccagcccagccgtcctgtcctgccagctctgctgccacctctgacaggtgtgcctgcccccatctcttctgattgctgttaacaaatgactagctttgcacagacacctctaccttcagcactatgggattctagattaatgggggttgctactgtttaattcagtgacttgatctttttaatgtccaaaatccatttcttattgatctttaaagatgtgctaaatgacttttttggccaaaggcttagttgtgaaaaatataatttttaaattatacattcaaggtagtggccaaatgtaacacatcaatcatggaatgatttctctgctaacagccgcctgtatgtttcaataaatttgtccaaagctc

SEQ ID NO: 13202 - DNA, 311 bp, Homo sapiens
atgctcagtcggcttggggaaggactgaagggcagctgccaagacctcagttacctcctgacctgagggtggagagtggcaggaagcaagcatgtttgctgtgcacttaggaaaggctggtgagccagagggactgatcaggccccattcactctctactcattaaaaggtcctgagccacgaagcgcttcccattttgaactttctgtcctcacagattctgtttgacagaatctaagggccatcagggaactcttttcatcttgcaaagagaaaaagccagtctttccagaataaatattcatctgttt

SEQ ID NO: 13203 - DNA, 436 bp, Homo sapiens
gttagaaggtctttactctttagccttgtttaagaaacctatgaccttggaagaaccatggggatttttttttaatgtgcctaagaaattttctctgaggctttagcaatggaaatttgattgcccattgtataagaacaaattgatttcctatccacctgattatgttctctggttagtttagccattttgaacttaagatcatatgaccttagtgcttttggctaaacatacagaatactacttgtatgcagaagagaattagttgattacatgtttcaaccttttagggtgataaatacatgtataattgtttacatacttaaaaggaaaaagttgagtaaatttcttgtcatatagtggctctacgtaatgtagcctgtattaatgtgaaatatttaccagaatattcaataaaaagatgaacagtctttag

SEQ ID NO: 13204 - DNA, 341 bp, Homo sapiens
cgcacaatttgaaatggacatctaatccagtgcagatgacctggcatgtggagttacagagggatccctcatgccactgctgccaccacctcttcctggggcatccaaaggccagctggcctcatctaatctggaagggagtgacttgttagttccaggcctcctttagttctgaggcagctagaccagggataggagtgggcaacttgccaagcccttaactctacttcctcttcagtctgtggtactcctcctaaccctaaaccctctatgctcaggggctggaactggggaatggagtaagtcaccttctgactgcttagtaaacattcaaagaaatg

SEQ ID NO: 13205 - DNA, 136 bp, Homo sapiens
atgttgtaggtaaccagaactctggatatctgaattccagccaagaagttccaggaccctgctgggtgacaaaggaaatcctcttcaattgaaaaagattatgaagtcccaataaaaagagatttgtattgctggt

SEQ ID NO: 13206 - DNA, 954 bp, Homo sapiens
tccctgacaacttccaccctgattccggaccctgtagattgggcgccaccaccagatccccctcccaggccttcctccctctcccatcagcagccctgtaacaagtgccttgtgagaaaagctggagaagtgagggcagccaggttattctctggaggttggtggatgaaggggtacccctaggagatgtgaagtgtgggtttggttaaggaaatgcttaccatcccccacccccaaccaagttcttccagactaaagaattaaggtaacatcaatacctaggcctgagaaataaccccatccttgttgggcagctccctgctttgtcctgcatgaacagagttgatgaaagtggggtgtgggcaacaagtggctttccttgcctactttagtcacccagcagagccactggagctggctagtccagcccagccatggtgcatgactcttccataagggatcctcacccttccactttcatgcaagaaggcccagttgccacagattatacaaccattacccaaaccactctgacagtctcctccagttccagcaatgcctagagacatgctccctgccctctccacagtgctgctccccacacctagcctttgttctggaaaccccagagagggctgggcttgactcatctcagggaatgtagcccctgggccctggcttaagccgacactcctgacctctctgttcaccctgagggctgtcttgaagcccgctacccactctgaggctcctaggaggtaccatgcttcccactctggggcctgcccctgcctagcagtctcccagctcccaacagcctggggaagctctgcacagagtgacctgagaccaggtacaggaaacctgtagctcaatcagtgtctctttaactgcataagcaataagatcttaataaagtcttctaggctgtagggtggttcctacaaccacagc

SEQ ID NO: 13207 - DNA, 304 bp, Homo sapiens
tcttgtttctcaatgtcactcattcccctctctcttaacatcaagcttgtttgtccagtagagcctttggagatttaggaccataatgaggtctcatgttctctgctcccacacctaagccaagacctttgggtcccagctcctccccttccactcagcactatccaggcaggaggaccaaaagggactcagtgtggtctacttactctggggccctagaatccctgcccccccgccacccttcatgtttgcttcagcagctggtagcttttgatgagacagaataaagttttatttttatatt

SEQ ID NO: 13208 - DNA, 151 bp, Homo sapiens
tcactagttacaaccagagatgctccacaaggatatgctccccactgttttctttctacaatttccaaaggttgcaagatgtttttttgtggatgaatataaaattttattgtgtaattacttggttccattaaaattggttaacttgcta

SEQ ID NO: 13209 - DNA, 1314 bp, Homo sapiens
aggaatgaattgaatcttgagacgggtcctcaccaggcaagagtcttgcttattgggctgcatccccagagaggatatgaattattttttgaaaagacagggttttgccatcgtccaggctggagtgcgctggcttgatcttggctcactgcagcctcaatgtccccaggctcagattgtccttccaccttagcctctggagcagctgggactacaggtgtgcactaccacaccaggccaatttttgttttttttttttggtagaaacgggtctgttttgcccaggctggtcttcaactcctggactcaaatgatccacctgcctctgcttcccaaagtgctgggattacaggcacgagccaccacacctggccaaaaaaatttatattttttgagacaaggtctcactctgtcacccaggctggagtacagtgggttgatcatggctcactgcatccttgacttcctgggctcaagtgatccacctcagcctgcctggtagctgagacttaacaggcatctgccaccatgcttgactaatttttgtgatttttttttggtagagaccaggggtttcactatgttgaccaagctggtcttggaactcctgggctcaagtgatcctcctgccttggcctcccaaaatgctgggattacaggcatgagccactgtgcctggctggatatgaaattttttttttttttttttttgagacagggtttcgctcttgttgccagggctggagtgcaatggcgtgatcttggctcactgcaacctccgcctcccgggttcaagcaattctcctgcctcagcctcccaagtagctgggattacaggtgtctgccaccatgccaggctaatttttgtattttcagtagagacggggtttctccatgctggccaggctggtctcgaactcctgacctcaggtgatccacccgcctcagcctcccaaagtgctgggattacaggcaaaagccaacacacccggcctggatatgaatttataataccctacagtgcaacacaagaagatgcactcaaagcactgatgtgaggaagtacttgccccgtagcagctattcactctaccagtgtaaacaaactctaagctagggcaagacagcacagacacaagtatatactaaccaggggtttaatataaatacaaccagcatagaaagacccaaaactatacagaaaccaaaaccagaatgccatgtggtggaggcaaagggcagaatttctgacccctttggctcagctgcccttccccacaaataaaaaccaacaaagaggacaaatcaggacaa

SEQ ID NO: 13210 - DNA, 752 bp, Homo sapiens
tccttgcctgattcccatctgctgctctttgtagaaaaggtttcctctagaactgaattcctctggaattgagtgatggacttcacaacaactagccaggaagggtgacaagtaccttctgcctcctccattcttcctgggtgcagaactgtagaagaccctgaggactcctgggctagtgtgagcagctattctgcatgggtgcagatggctggatgtgaaagagacatgctctagctgcagaggcaaatttgaagtgccacggaacgttgtcaagaggtagtgagattgttgctgtgagcaaggctctgggagagtcacctcaggctcaggattctgaaccattgagatcagaaaccagatacttagccttctactgtagctacggaaccagattctggtgaatttgtccacaatcagccattggcctgtctggggagtttttggaagacagcaaagaggggcaatggctgctttcagctttgaggacagatgctatcctaagggcatggcagtacccatgttgatttgacatctctctagcccatccattgcttacagtagaagagtggggctgtatgcttgataatcttgaacattgaacttaatagatgacttgacaaggtagagatctgatattttgagattttggagaccatttcctgtgccagaatcactgctctattccataccgtgccatggaggctgttttagaagtggttggataacatgttaaataaaatattaagtgt

SEQ ID NO: 13211 - DNA, 898 bp, Homo sapiens
ggctttctgtgcttggcctgactttggcctatgctggacctaactttgcgtgtgtgtgtgtgtagtagggggtcatttctttttgggtaatgggaaagttcttaagagtgtcaatggggagggatagagggtgggggctcatggtttccctctactttgggagagggcacagattgcagaggtaatgctgtggcatattgcttctgcctcagtgtatcactggagtcacaggaccctgcccacctgagttcccaataaagaaaaacctccccttctgaggctgctttcccaaaactccccctgcatctttatctcttcatctatcccacctcttgtctgaacatcccacctttatcctgtgttctgcctttgttttaattttaactcatgttcatcctgcaacagaagcattctctaggtcccagtttccagttgattgcatatccttgatcagccctttttcccatcctgccctatggttctctagccacctgtgcatgcatgtgtatttctgcctggttctatggtgtgtggatgtgtgtgcatgaatctgtcatatagagggggtccgagctggaatcctagagcattgctgccctggggcctgatgttcttggcttcctcagagcatgtaacaggaaattaaatgggatgagtgtttggtgtggtttgtgtctgatgagttttttaacattcaggtgtagattgtttcagcttctcatgtttcattttcctgaagatttatgtttttgtctaccttgtgagcaggcttttggaagaacctgtttgatgcaaaaaagaaaatgaaaaacaaaacaaaaaatccccaaaaccttattatgggagcccgtcggtcttagaagctgtttgacatgtataataaatggcattgactggg

SEQ ID NO: 13212 - DNA, 2407 bp, Homo sapiens
ggtcctcaaatggaaacaagccacttagccagtttttgtaataatggcaaatctctcccatgtagcaattccctgctcctttttcctatctacatgagccctcttagagacctcagaaatctgcagaaagttccctgtgtctgtctagaacgcatttaacaggttttgtcgtaaaagctttactaagtctggtgttaactctttctctccactctggcttgttttcagaacctaaaaagcagacccaagtttcctttctcctccgccgcaaaggagaggcttcccagccccgccagtgagaggttggactctctgccctgtgctccggggatcctgtcttgatgacacttgcagggcaggctgaaaagttttgagattgagcagcttgggagtttgtggccactgggtatgtgtggctaccgcgggtatgcgagtgccagatattggctgagacgagccagcttagactaattggtacaaggaaggcaagaaaacaaagacaaataaacagcggaagttatcagtatggaggggaagtgtaaacttaaagggaccagactttctaaatcttacaactcaagaggtggcagccaccctctaggagacaaaactacccccactgacaaggctttaggagaccctaaagtctgttggctgtgacgtcattatacctaaaatctgcatcatacctgcaagccaacagttcagtgttttaacagagaaccaccctgggaaacagaagcagatctgatgtgtttcctatacatgtcctgtgctcactttattaaaaattcttttgcacacaatgtttatgaaaaggccagatccttttccaatacttatgcaaaagcaaaagaaaaccccgacacctcacctttcgctgtttgttgtttcatagatttatttaaaaaaagagaaagtctatagctataaatctttaaagagaaatatgaatacaattcccctaaactctcctcaaaagagaattcagtctacagccatttaaatgatcattgctgctacagaagtgctttaagagaattgcctgaaacatctgtattatatcggccacctgccaatcacagctttactctttcaggtcactctggggctgcctcttgcatgtattactaaataaaatgatctctctttctctctctctctctcttttctaagaaacaattatgtgcactttgatacacaaccttctctaaccaactatatatcaagacccaaaaattgaagaaaaatattgttttctcatacagtgagcagatttttcaatctactaattctgtgacttgtcttggtgtgctagcctacaccttctctttggtttagttttccttttctataacactctgaattgctaatcttactaacacctatgatgttacctgaaatcaatctcccatatgtatgctgtatgctatgctaagactcctgaaatatacttactctgtgcttgtgtatgtgaatgttaatgcaactattacctagagtgaactttaagctttattgttgaatgtaattccattatatttccttttgtacacctgtgaaaaagtggagtagtgtttttttaaccattgttaatcagcttttgtgtatgaaagacacagtaaaatttctttcttaaatcaagatactggtgattcaaggaattttatttatggtccagccaagagccatctcgtgccaagacttctgctggcaagggaatggataaagctgttttgttctagtaacaattttggaatgaatactgacaatattccatgagggtgtgcaagcacaaattttaccaatctgacctctttgaagttgcagaatgctttgaaattctaatggtatctgaaatatcagctcatagaaagtaacaaaatttgctgtcaccttaaataagacattttaattttgttataatgtacaatttagaagtttgattaattatattatctatttaggcattaatataaaagaggtaggagtctgttatttaaaaaaagcattaaatttaaaaaaaaactgtcttgtctacttttagcttcattctcccatattttgaagggtgtgtaacttcagctctgcaggattgcatggggtaaaacttgttaccaacacatgtgaaccattgctacattgtaggttgtgatcattttgccccactgaagcccatgtatctgaccttacgtgccttttgaactaggagaatcgggctaatttattaatgatgataattataatgtatctgtacagcactttttacatttgcgaagtgctttccaatccatgttagttactagttattacagctgtaaggataaaacacgtcatgtggattcattttgaattggtgctattggtatttcctctgttattgctaataaatgaaaatggtggtatg

SEQ ID NO: 13213 - DNA, 144 bp, Homo sapiens
atatttttcatatttaacttgtctaatcatcttttcaaatatcactttaaaaaatgtcttcaaggtgttcactaacgttgaaataaatcataccattgaatgtagatatcctattaatggcagttttgtcttgaatggaactag

SEQ ID NO: 13214 - DNA, 451 bp, Homo sapiens
ttcctttggcccggagatggctgctagctgtgttttgaaatatttcttagacaagcctttcacaacatttcatcaattgaactaaacactccttcttagcacttcctgtgccaagaaatctggaagtatagaagtattagaagattgccctaggcctcaagggacttatagtttatttttgagaaacaagggcaaaaattaaaacctatttaagaacaataaaagtaatatgacataaaggtctaaaattaaaaataaaataccaaaatattttataagcaacagatgtgtaaggcactctaatatttaaagtgaagaatgaaaaatatgtaagagtctgctttatatgaatataatatggaaggtgaaacatttacttaaactattgcaatgcattattaaaagatgacgataaccacaaaagatgtaaaaataaattacaatgggggtt

SEQ ID NO: 13215 - DNA, 38 bp, Homo sapiens
ttcttcatttattttatatcatcctaccgtgcgatttt

SEQ ID NO: 13216 - DNA, 3135 bp, Homo sapiens
accccttaacattggagccgactttgtcttgacttctagtgagaattataaactgtatattaaatagatattttttgggtgctgaatcaattttatttaaatttgtgattaaagtgacattgaatttctgatgctatgctgccataacacttgaaaaccaatttagttgttagtcattcattaaacattaacatcactatcatttatttattgctaaatgatgcatagtattttagtctacttgtattgtttataagaaacccaagcaaaaatatatagcaattgttaccttgttaagtttgtagttctctacatttctctggatggagactgtgaacatctgattgttcagcaaccttcagtatctattattttaataagaaagaaacttcccctaaactttagaaaacagttgctccactttaggaatcaaattatgtcaataaatgttataaacacagccttcatttcaacttatataaaatatgttttaaaatgcctgacaatgtagataattcaagaaatgttgactgaaattttgtctacacttagaacattttttgaaattcagtttacagaaattggagaaaatgctttttaaacaagtgtttcctttcttcaagaagatattctccttttaattgaaattttctccattcagtgataaaatgatcagccatgtgaagattcgaaacttcgagttcttttgaaattcagagtctgtaacttaaaacattacccttatgaatttagatgagaattcacttgttctgtcagtaatccataagacagaaatctgtttttttaaaaatatctttttctcctctcagctcatacataacacaaggcagaaatctggatatgagatttgcctctttaatgtcactacatgttatgtttcctgaattgtagtatgtgactttcaaaatggtggttttccacactctacctttagtgcaagctatttgtttgttttctaatttatagttttaaaaacttcgcttattgagtttttgttatgtggtttatatttttctttctctttcagctattttatttaatattgtgtcagatattttacaaggtatgacctaattaaaaactcagtagagaaagatcagaatggccttgagaatagagccacaaaaataactatgaaaatgccagtaacgtttatttaaaacaaaatattttaatttttaaattttcccttaaaacacacttttggaatatgctacaatattacatgttttttgtctttttatttttctgagacggagtcgttttctgccacccaggctggagtacagtggcatgatcttggctcactgcaacgtctgcctcctgggttcaagcaattctcctgcctcagcctcctgagtagctgggattataggcacatgccaccgcgcccagctaatttttgtatttttagtagagatggggtttcatcatgttggccaggttggtctcgaactcctgaccttgtgatgctcccacctcggcctcccaaagtgctgggattaaagctgtgagccactgtgccaaggcttttttattttttttttttgtcattttctttcaaaacttgagtggtctctgagctcctgtcattaaacctatctatatctgtctatcagcacaactcaccttgaatatagtcttatactttcaagtatctttgtctttgcacgtttttcaagtttcatgtgccatttaaacttggacccaggtatctgattatttgatgtgaatagagggatgctacagatgtcatttgtctcccgccctaagtcctccagtctccttagagctagtacttactaagcatttactatgtcatcaataatcataaaacgtatttttttttttgagtcagagtctcgctctgttgcccaggctggagtgcagtggtgccatcttggctcactccaagctccccctcccgtgttcacgccattctcctgcctcagcctcccgagtagctgggactacaggcgcctgccaccatgcccgcctaatttttttgtatttttagtagagatggggtttcaccgtgttagtcaggatggtctcgatctcctgacctcatgatcctcccgcctcagcctcccaaaatgctgggattacaggcgtgagccaccgcgcctggcctaaaatgtgttctttattattgacggctgtattgatgggattggtaatttagtccttcatattaatctctattctctctcagagtacaagctctcatcatatgcaaattctcagaagggctgtgaacaccttagtaataaatttatcttttgaggtcattagcaaacatgaactcacagggatccagagatggtaaaattcaaaacagcctgtcaagttcaaaacagagaggtgaaagcagaagagacactttcctattttgcctaataggtctccttatatgcatctgtagttaacattcctcaattcaagttagaatcatgaaacaataatgaagctcctcctatgtctcttttcaagttgtaattactatataggaaaaactaagttgtcacccaatatcttagacactttgagagcaaagggggtgctgtaaataagtatacaagatcacagacctaaattgagcctgttccagacaaattggggcctatggtcaacctatccttagacctgctaacgcattagcattagcagcacctaagtcctcattgaatgttctggttcaaggctccacctcagaaattctgaaatgggtagtaagagcaaattttcattttaaagcacacctgagatgattctcatacaaccgaaattttagatccatagccctatttgatacttgacagtgcaagtttctgtaatttaaaaagatgtggtggcctgacacctgcaatcccaacattttgggaggccaaggtgggagggtcccttccttgagcccagcagtttgagaccaatgtagtgagactcatctctgccaaaaaaaaaaaattagccgggcatggtggcacacatctctagtcccaattactcaggaggctgaggcgagagaatcgcttgagcctgggacattgaggctgcagtgaactgtgatggcacaactgcatttcagcccgggagacagcaagattctgtctc

SEQ ID NO: 13217 - DNA, 191 bp, Homo sapiens
gtgttaataaggatctactgaggctagtctcgtttaatttgtggaaagtccttttttactgctttgcccattggaggtgtctccttttattagaaagtaaccatcttattccaattctatgcatgttactggtatttataaatgtatgagtttttttgcggtataataaatgtaaattttctttgtattct

SEQ ID NO: 13218 - DNA, 781 bp, Homo sapiens
gtgttaataaggatctactgagcctcgtcttagttaatctgtggaaagtccttttttactgctttgtccattggagaggtcttttttggtctggttcaaggcaagtagcaagaatagagcaaaatatcaaatccagggatggcttaggtttcattaacagtactggaaagtagttgtgtggctctgaatgttttgtatttcaatcgagaatccttagtcgatagaacattttgtttatatattgattctactttttctgtagttaatccttgcatattctcctttcatcctggcttgccaacgcagtcttaattccgccttttttttttctaatggggagcaaaaagaaattcactgtcttttaatagtgatttcaaatagcttattaaaataactccattcaaattttacattataaagcaatgtagagagagttccaaaccaccaattttataatttcccttgttgaatatattcatataatgtgttctataatatgcccaaagcagctttgtctatagttaacaaagttttaaggatagacaagaatgtgttttctttaataaatagtaatatatcatctttttagggatatagtactcaaatgaaagtaatttagttcattttctgtgttgacatttgcaattaatatttcaatattttatgtgcttatattggccaaaatatggacacaaatatagactaatatgggtaattaccctttggtttatctaaagtgtgttcatgatgactgaggaaaaaaattaaacctatgccattt

SEQ ID NO: 13219 - DNA, 1233 bp, Homo sapiens
gtattgtatttagttcagtgaaccgcccgttagttttgtcaaacttcccactgcaatgcctttatttaaaaaaattgtctacttatctaaatattcataccacaatttcaaacctactcatgtccctgataaagctaaatttgtcccttttttattgttattaattgcacttaacatttttagttatactggatattgagtatggattttctctatatttgatctattggtgattaatctttttgtaatcataaattactcaattaggataaaaataaattatgttttaatgaaattcttaaattaacatctttttaatggaacatttaagtgaatatatgaatattgaatttctaaatatttgttgtgcctgtctttaccatgtaacttaatgtttgcaaggccagagtgtttgaaagttttgtatttaactttataattaccttgtcctttctggttgactatactaggctaagccctcttaatagccatgagtgtaaaatttagtttactcatttttcacaaattgtatataaacatgcacttcactacattggtaatacactaaaattgtggtccttttcctcttgtgaccaccacatgtctagtgattattttgtttatttggttgctacttacctagcacattgtaatgttccatgaatgctaatattaaattttgtaaaaataacttatttataaataatttttaaagagaaaaatctcatataatttgtcataacctttcaataaataaaactgttaaatcatggcctgatatcatcttaaaaaaaaatctcagaatctgaaataagccctaaatttctccccaaaatcaagactcttgagagcatcataggtctccttgtgctaccttttactccctataaatagaaatccaagtatactttaatatgtgtatattttttggttttcctacagcttctccccatctttcaaaagaatcacgaaatttcttctgcaccttggctattctgtttaaatctgataatcagttgatctcaggtttttcactgtacattactttgcagatatggacagcctttacaaaaataatttttaaatgcttaattattttaatttgttctttaaggtaaccttcagttattttgaattaatttaacttctcaattatgccaaagttgcacttgcatgaaataaatattattttgtccttgtatagactggaacagtaataaatttatctgaatt

SEQ ID NO: 13220 - DNA, 299 bp, Homo sapiens
agatctcgtgatgacgcgttgttttctgccatttatcccaaactttttcagatctagaattcgagagtgtcatggacaaaaatttcaccttgagattgagcttttatttccctttttaatggatttgtctgttgaacttcatgctgtccaagtgttgaaaagtcaattttatttcattgcatttatttacatagtgtcattccaaatccatgcatgctgttgattttcctgagatttttttctcttcttgttggtatttgttgtgataaaccaccttaataaaatcaagtattaatttt

SEQ ID NO: 13221 - DNA, 643 bp, Homo sapiens
gtgtgggattattttactaaatcttacttatgtttggagatctcttttaacttaaagttacatggtctgtttcttgtttattttacctctattctttaggttgaaattttatataaagtaagatactggtatcttagtatttcctgttcatgcttagtagtttattacttcacttgagggtacttgacaatatgaacaaaaagtaaatttttatttgcataattttaagcttttgaaattaaattatctattcttcccccccccaaaaaaaagtattgtaaatccttaagtaaaattgtatttctagctattggtaagagttgtttcactattgctatgtaggactgtttaaaatgtgagtatctgatattatttaatcctccaatgtctcattttgcagtaactcctacagtgtgtaacactaaaaataagaactaatgatggctaaacactaaagtagccattcatacttatgcatattttagtatcccataatagtcaatccaaaatttttgtgactatagactttactgaagtgtcaacacattagtttgtgagcctcatgtaagaacatgatggtctttttttaaaaaaaaagtcgtgccaattataagtgcttaataaatatttgctgaatgttact

SEQ ID NO: 13222 - DNA, 1158 bp, Homo sapiens
taaagaatgtaaactaaatccgcgtctgtgaatacgtttctgattaggaacttattgcgaggttcccttaagggagtgtctttacatcatttcaaatatgtactcttgaagtcaagcaataaatttctatacataaaataggatcctgatttagtatcaagaacccttcacaaagcatgaaatgtatatgtgtaatgttttatgtcaaacaattatgcttaatatacagtctattaaatgtaagtcttgtttgagatattttaaattgctttccattgttttcaatctctactgagacttcctgagttgattagaaagctgtatgagtgtacctaccctagtctcagaagcatagactgtagagtatctttttaagcatttttaaaaaatgcttttaatgcatcatacactattttaacacttttaatctgagaagaagcatatgaggcatggtattttaggaatgaacaaatagatggtcttagagattcagtaagttcactaagttccactaactaataagtgacaaaactgagcatccatcccagatctgtctgactctgggtcagtgaccctgctccgattccatactgttttctgtcattagatatcacctggcaagtttctgcctaattaaggagaagtcttttatcatatttatactgctgtccaatcttttctatatttagaaataataatgtacatatttatctatggttttattttcttatacaccaaaagtcctgcttttctgggtcaattttcaactattattactaatgctctgatctgtccaaactcaagcggaaaacaaaattgaaagggcaacctgtgccttctcctttcttcagaacatatgactttcatttcccagaaaaaagattaatggtcctgagtaggaatattacataattttgattgcatcattagttaattattttcttcatattgtagattttctgcagtcacccatacttaacatttgtaatacattttcctgatttgaaagtttgtttttaaaagttttctattaattatagtgcactattgaatcaggaaaatttaagaaaaagaatagttagttttaaatgcataatatcaaagagaatcatagatgatcattaaatttttagaaattctcggaagttaaggagaagc

SEQ ID NO: 13223 - DNA, 1330 bp, Homo sapiens
ggcactaggaaagaaatagattaaaattccacccttcacaatagctttggatttaattattgataggaacccatttgataaattccttaacttcttatgattgtcttgttgattaaattgttcatgctcaccaccaccaataaggtatttttctctgattgttagttcaaattatattgttaattccagtttcccttttcctcatatttaccccgaagaggtgttgcatatagaatcccaattaacaaaatatactttatcttcaaagttgatgtcatttaaaatttttccgtctttatattttatttacttcctattcattttttgctccatttttcatgttacttctcagtttcctagaacttcaagtattaaaataacctgttgcatgtattaggcatatttcctatgttacatttcttttgtctattttcctttcaaaattggtatttttgttgggctcaattttcattataatacttttcttaaagtttctttctttcttttcttttctttctttttttttttttcctttttgagacagggtcttactcttgtcacccaggctggagtgcagtggcacaatcttggctcactgcaacctctgcctcctgggctcaacggatccttccacctcagcctcccaagtagcttggactataggtgcatgccaccatgcctggctaatcttttgcagcgatgagattttgccaagttgcccaggctgatcttgaactcctgggctcaagccatcctccctcctcagcctcccaaaattctgggattacaggcataagccaatgtgcccatccaaagttttatttatttatttttttgagatggagtctcgtaaagttacctttaaaaaaaaagttctattttccctgtattggtatctccttaaataaaataaaatattcctattgtaagtgatatgagaaatctttaaccagccttatctaaaaataaaaagagaagccattgtaagacattcagtatgtgtaaatgtgtttgtgtttgtagacaaaaggcaaaggtattatgtaaaaatatttaataatttattctttctattactgaattaaaaaatcagaggtccctgttatatttttaatggctaacaactcaatctcattaagttggaaaaaaaacttatcaaagagacatttacatggtttggcttttatattcatcatagtatacattggcggtatctagccctttctctgtaaaatatccctatgtttaatctgtatttcttgcttattatatgtaaagttgagcttctttctagatattaggcctttgaataaaattctatgtgagtcag

SEQ ID NO: 13224 - DNA, 1826 bp, Homo sapiens
aaggaacccacttaataaagacatttacttctttaatatattcttgttggctaactaaattgtgtatgcccaccacaaagaaggtactattttttgtttgattcatcttcaactttgcgtattatgcttaacttcacaagttaactttttcttattttgtatcctgatgaggcatttcttactagaatcccataagtgaaatataatatttttcaaagttgatatcatttaaaaatttttggtcgttttaaatgtctttattgactttaaattcattgcctctacattattcattagttcttcttttcctaaaactttttacttgttaaaatagtctgctgcatgtaatatgtgcttttactatttgatatttcttctatttttcttttgaaaccggtgttcttattggtttgccatccttgttcattacaactgttttttgtttgtttgtttgttttttggtttgtttgttttttttttttttgagacggagtctcgctctgtcgcccaggctggagtgcagtggcgcgatctcagctcactgcaacctccgcctcccaggttcaagcgattctcctgcctcagcctccagagtatctgggactacagttgcatgtcaccacgttcggctaatttttgtattttcagtagagacgggtttcatcatggtggccaggatggtctatctcttgacctcgtgatccaccccactcagcctcccaaattgctgggatttacaggcatgagccaccgcacccagcctacaataattttcttaaactttaccttttattttaaagttctagtttcccggcattgatagttccctatttgaaatataatgtttctcttgtaagtgatatgataaataaacccctaattagccttagaagaaaaaccactgcaagatattaagcgtgtgtaaatgggctttagtctggaaaccaaaaaaaaaaaaaaaatttagtcattctataggatcatgtgaaaatatttaatttgctccttttaattctgtataaacaaatcagaggttcctgaggttcctgttaaatttttaatggctaatagcccagtgccatccagttgaaaaaacaacagcaatcacaaagtagaggtttatattgtgcggcttttatattcagctattagagtgttattggtagtgtctagccttttcctccacgacattccttgacttaatccatttgggcctattatagacaaaatagagcttctttctagatataaggtctttgaggcagggctcagtggctcattcctgtaatcccagcactttgggaggccaaggcgggcagatcaccttaggtcacgagtttgagaccagcctgaccaacgttaagtaaccccgtctttactaaaaatacaaaattagccaggcatggtggcacatgcttgtaatcccagctactcgggaggctgaggcaggagaatcgcttgaacccaggaggtggaagttgctttgagccgagattgcaccattgtactccagcctgggcaataagagcaaaactccatcaaaataaaataaaataaaatataaaataacttaaaaagaactttgaataaaattctatgaaaaaagacactagaatgctgttcttaattttaatagtgttaagataggtgttagtgtggtctgttctttacctccctttatttggtgcagagaagttagatcctgctaaatttcaattaagaggggaccttaaaataaggatcaatctcttatttaaccctgtaagttactttaaagctaatacaagaaaaacaaagacaagtgaaagtaaggaaacagaaattgc

SEQ ID NO: 13225 - DNA, 685 bp, Homo sapiens
agtctgtttttagtttcatatacttttggtgtgttacatagccatgtttctattagtttacttttaaatctcaaatttaagttattatgcaacttcaagcattattttcaagtagtatacccctgtggttttacaatgtttcatcatttttttgcattaataacaactgggtttaatttaatgagtatttttttctaaatgatagtgttaaggttttaattctttccaactgcccaaggaattaattactattatatctcattacagaaatctgaggttttgattcatttcagagcttgcatctcatgattctaatcacttctgtctatagtgtacttgctctatttaagaaggcatatctacatttccaaactcattctaacattctatatattcgtgtttgaaaaccatgtcatttatttctacatcatgtatttaaaaagaaatatttctctactactatgctcatgacaaaatgaaacaaagcatattgtgagcaatactgaacatcaataatacccttagtttatatacttattattttatctttaagcatgctacttttacttggccaatattttcttatgttaacttttgctgatgtataaaacagactatgccttataattgaaataaaattataatctgcctgaaaatgaataaaaataaaacattttgaaatgtg

SEQ ID NO: 13226 - DNA, 876 bp, Homo sapiens
taagaatgctatttacatttgcatgtacttttttagttttatgtaaccatatcaatattatttagtcttaaactagttacgttattatgcaatacgactaattgtatttttaattttttcttttctcccccaattttttttttttttttgagaccgagtctcattctgtcgccctggctggagtgcaatggtgtgatctcagctcactgcaccctccgcctctcgggttcaagcaattctcctgcatcagcctcccgagtagctggcattacaggcgcccaccaccacgctcggctaaattttttttttttttatctttagtagagacggggtttcaccacgttggccgggcaggttttaaactcttgacctcatgttccacccgccacggcctcccaaagtgctgtgattaccggtgtgagccactgcgcccggccttttttttttcttttcttttcttttttttgatacagagtcttagtcacccagactagaggtcagtggcaggatctcagctcactgcaacctctgcctcctgggctcaagagaccagcccacctccgcctccaagtagctgggactacaggcgtgcgccaccatgcccggctacttcttgtattttttgtagagacggatcgtcaccatatttcttaggctggcctttaacttctgagctcaagagatgcactcccctcagcctcccaaagtgctgggattacaggcggccaggcctattttcaattttcaagtattgcatatcattgtgaataacattgtaaatcctttttatattaagtaacaggtagttaatccatttctaatgaataattttaaggttttaatcctttccaagtgtacaataatttactgattatt

SEQ ID NO: 13227 - DNA, 829 bp, Homo sapiens
taaagaatgaaaaataaaacctgtgtttatgaatacatttataattaggaacttatcgtgaggtgcctgtaaagtagtatttttgatcacttcaaatacatactcttcaagtcaagaaataaatttctttacatagaaaaggatacagatttagtaccaagaacacttcacaaagcaggaaatgtgcatgtgtaatggtttatgtcaaacaattatgcttaatataaagtctattaagtggtaagtcttgtttgagatattttaaattgctttccattgttttcaatatttactgtgacttttgttttctgagttgattagaatgctgttcgagtatacctaccctagtttcagaagcatagattgtagtgtacctttttaaactttatttttttaaaaaaagttgttttatgaatcatacactattttcacacttttaatctcagaagaaacatatgtgacatggtattttagtaatgaccaaatagacggtcttagagattcagtaagttcactaaggtccactaactaataagtgacaaaactgagcatccatcctagatctgcctgactctaagtcagtgactttgctcccattccatactgtttttgtcattggatatcacctggcaagtttctgcctaactaaagagaagaaaagtttttatcgtattcatactactgttcaatctttatttagaaataaactttatctatgatttcattttcttataaaccagtaatcttgcttttctgggtaaattttcagctattattactaatgctctgatctgcccaaatcttaagtaaaaaacaaaattgaaagagc

SEQ ID NO: 13228 - DNA, 901 bp, Homo sapiens
ccatagttgacttttacattccataggtattttattttgtggcatttccatgccaatgtttatttcccccaatttgtgtgtatgtaatattgtacggatttactcttgatttttctcatgttctttctccctttgttttaaagtgaacatttacctttattcctggttcttaaaaggtgacaattcattctttaacccagatggtcttaatttgtaattaatttgcctccctaaagagcaataccaaatcacatttttttcatgcccctatctttagctgaacttcacccactattatgcttatggtaaaattaaatagagcaatttggaagtgattccaattttccagcatttcttcatttgattctctttttttagtcttaaaataatgactcctattcagacatatcatttttcttttttgtaaatccagtgcgtttttagttaacctttaaatatgctttttgctttcaaaaataaaccagaaaacctatatcctatgatacaactctaagtgttatcacttgattcgaaagggtcagaagaccagttttttagtatcctttcctcattcatcctggagaggattgtgcaggcacattaatattgtgaccaatcacagaatctgggaatatgaagctataattttttaattaatgtcacaaagctctagtgcaatctagttgaatgcagatgcctgtgcccaaataataattcatatagcataaattggagttgtgtgttaatgtgtaaaaatttttgcctgtactatcatataatttaatgtatatacaccagaaactatttttcaaactttttttactgcaaccaatagttaagattatattttacatattttgaaacacacaagcttaatagaaataaatgcttgtgaacaatg

SEQ ID NO: 13229 - DNA, 384 bp, Homo sapiens
aacaatttattttaaatgtctaatttttggttattcttggcaagctgatggtactttttgcataatcttttgtggattcttggttgtactgtagttgcatgcatgattatagctcttgtttttctcacagtttctttaaaaatctttattagtggctataatgacgtggaaatgtaatctgtgttttctggtttttcatttatttggccaaaatgttatattaatggagttattgctatttttgctgtgataatggtattatgcaagaccatattctcaattatttggatatgcaaactaaagtattaagagctaatgtcattatatatgtaacttaaatctagacaccatcaaagcataaaataaaaataaaaagcgttgctg

SEQ ID NO: 13230 - DNA, 289 bp, Homo sapiens
tgtaggtatctgtagctttccgaccgtctgttaattttgtcttcctcacttttcaccttagttttttttaaccctttagtaatcttgaattctacttttttttaaatttctactgttgtctttagtaatgttactcatttcctttgtctgattgttagttttcaaattattgtattattataaatattttatatcaggaaagttcatatttctgaataaattaatagtattcattcctgaagggtgatatgaaagttaaccccacctaataaacataactctaattctg

SEQ ID NO: 13231 - DNA, 1806 bp, Homo sapiens
catggaggccaggccaagagccacagggcggcctctccccaaccagcccagcttctccttacctgcacccaggcctcagagtttcagggctaacccccagaatactggtaggggccaaggccatgctccccttgggaaacagaaacaagtgcccagtcagcacctaccccttcccccccagggggttgaatatgcaaaagcagttccgctgggaacccccatccaatcaactgctgtacccatgggggtagtggggttactgtagacaccaagaaccatttgccacaccccgtttagttacagctgaactcctccatcttccaaatcaatcaggcccatccatcccatgcctccctcctccccaccccactccaacagttcctctttcccgagtaaggtggttggggtgttgaagtaccaagtaacctacaagcctcctagttctgaaaagttggaagggcatcatgacctcttggcctctcctttgattctcaatcttcccccaaagcatggtttggtgccagccccttcacctccttccagagcccaagatcaatgctcaagttttggaggacatgatcaccatccccatggtactgatgcttgctggatttagggagggcattttgctaccaagcctcttcccaacgccctggggaccagtcttctgttttgtttttcattgtttgacgtttccactgcatgccttgacttcccccacctcctcctcaaacaagagactccactgcatgttccaagacagtatggggtggtaagataaggaagggaagtgtgtggatgtggatggtgggggcatggacaaagcttgacacatcaagttatcaaggccttggaggaggctctgtatgtcctcaggggactgacaacatcctccagattccagccataaaccaataactaggctggacccttcccactacataatagggctcagcccaggcagccagctttgggctgagctaacaggaccaatggattaaactggcatttcagtccaaggaagctcgaagcaggtttaggaccaggtccccttgagaggtcagaggggcctctgtgggtgctgggtactccagaggtgccactggtggaagggtcagcggagccccagcaggaagggtgggccagccaggccattcttagtccctgggttggggaggcagggagctagggcagggaccaaatgaacagaaagtctcagcccaggatggggcttcttcaacagggcccctgccctcctgaagcctcagtccttcaccttgccaggtgccgtttctcttccgtgaaggccactgcccaggtccccagtgcgccccctagtggccatagcctggttaaagttccccagtgcctccttgtgcatagaccttcttctcccacccccttctgcccctgggtccccggccatccagcggggctgccagagaaccccagacctgcccttacagtagtgtagcgccccctccctctttcggctggtgtagaatagccagtagtgtagtgcggtgtgcttttacgtgatggcgggtgggcagcgggcggcgggctccgcgcagccgtctgtccttgatctgcccgcggcggcccgtgttgtgttttgtgctgtgtccacgcgctaaggcgaccccctcccccgtactgacttctcctataagcgcttctcttcgcatagtcacgtagctcccaccccaccctcttcctgtgtctcacgcaagttttatactctaatatttatatggctttttttcttcgacaaaaaaataataaaacgtttcttctgaaaagctg

SEQ ID NO: 13232 - DNA, 267 bp, Homo sapiens
ggaatttatttgcatgatatttctctattattttgcaaaacaaatgttttgaaaatagggatttaaaaaactttatagaggtaaaaatgagtttaccagtttccttcagtggtgacactttaatatagaacacataggatatagtatttctttagtgaaagcctatggacaagattatgaatatgtggactatcacattttataatttccacctactttccaatctatgttccaacctactttcttaactcatatattttatacatt

SEQ ID NO: 13233 - DNA, 126 bp, Homo sapiens
attttatttggcataaattatgttttgaaaaacattgtgaagatagttgaaaataatttttaaggtgtatcacagagttttgggtttattttggtggtgttactataaaattgaactctaatagtc

SEQ ID NO: 13234 - DNA, 142 bp, Homo sapiens
aaatgtatttaatcctttttatattacaatatgccaatatattccaatatagtggtattattttaagattctagataacttcttcatagagttcgcaaaatataggtcaaatttatggttatcattattaaaacaaaagttt

SEQ ID NO: 13235 - DNA, 345 bp, Homo sapiens
aaactgtttggggggggggtggggcggcatatatttagttcatatatatttagagcaatacatgtgagttttactttgcctttcatgagattacgataatctttcagaacgtttttgtgaaagtcatttttcaatcttggcatattttcttttgatttcaaaggggccattcaactatgctggtttggtttgaagtaagttgaattttagtattatttttctattatcagtgtatgaggctctcaatttattatatatagatacaaattaatgattcacaaacactttttatttccatttcaattttgctgtgccttcactgatttgtagttatattccaccatt

SEQ ID NO: 13236 - DNA, 87 bp, Homo sapiens
gatggtggcctgccagagtgtggtttgtggtcccatttcagggggaagatacttgactcatctgtggacctaattcacatcctcagc

SEQ ID NO: 13237 - DNA, 66 bp, Homo sapiens
acaaagagttgtgtaaatgtctctcattttatatgtaatatatcaaataaagttgcctcttttaat

SEQ ID NO: 13238 - DNA, 393 bp, Homo sapiens
tctccttcattgtgctgatggactaccagctggcagggccagggggtgggtgggcgtgaaagccctcccctccactggacagcactgccccccagctgagggaccagctctacttccacctggagttgcacagtctcaggctgggggcctcaggagaggtcacagcccctcagtctcttctccttcccctgcctgcaacaggctgcctgccccgccttccccaacacctcgctccatatgatagagcgtggcagctgggagcaggcccctgcccgtggtgggcccctaaagcaatagcaccgtaggccccctgccctcttagcacaagaggcccaggccctggcctggccttcgtgccctttattcattgtcaataaatccgctcagaccatt

SEQ ID NO: 13239 - DNA, 1392 bp, Homo sapiens
ggtgagataaaacatagtccctggtgcctcttaggggccagagcgggcaggaggttggataacaaaaatagagcatcagcaaccctttccaggtagaaattccagcgggagttcaggttcccaagcaatttcacgtacatggctggtaagtgactgatctttccccccgcttggtagcctcacagatgagtcttggatgcattcacagtcatttctggtctgtgcaccaaaggatgcattcagtgacctatgaaaaaccctactgaagggtccagagaccctggtgctcaccttagcctttgtctttgagcaaataacttaccttcttccttcttatgcctgggttttctcacacttaaatctgtactactgtttgccaatgtctgatgtgtgtatccctggttcacaagaagattttagatggtattcaaattaatattttctatttagttatatatttaatgtataatataaaaatatgattagcatattgacctgtagtttgatagatgttctgtctaggataaagctaactgtaaaaaaaaatagtgaatcagtttaaagaaaaacataacgtaaaagtgggcacagatccagagaggtagcaaaaatcacaggggtggttccatgaatggctgacacttaggaaactctgaattaggccatcctcgagactagcccaccattcacctctgttcatcccccgtgggctcataatcgttttcatttcacctttgatttggaaggaagaagtttcttgcccaaatgcctggatgtgtctgcttgactttcagaacttctcacctcagccctaaagagggagcctgtgggttctcagagagatatcacaatttgagtcccaaagaagaggccagatacccacccaccttcccccaaatcttaagcacctgcgccagtacagtcaagaagaggaaagtgtgtgaagacccaggtctggctctgccacttgcctggccatgtcaccttgaagctgtgacctgactccctatattgtttcctcagttgtagaccaaaggcaatggtgtctgccctcctaccttagaagacaaatgcaagggcatttcaccacagagaggacctttgtgctcactttggcccaggaggcagtgatgctcatggttgcatgactttatgagtcgctgggccagggtgaggacctgggcctcctgactcctggcccagagttcttgtccatcagttcatactgcaattttatgtgaaagcattatgactgtcctacccatgggagagtaaatgtagattgaatgctaggagtcttaaagctggagagtatagattttgaggtccccatttgggaaacatgtgccagaaatgtctaggtgtttaataaaacagatattggattatctc

SEQ ID NO: 13240 - DNA, 1397 bp, Homo sapiens
ttaactactgctcaagatatggaagtggattgtttttccctaatcttccgtcaagtacacaaagtaactttgcgggatatttagggtactattcattcactcttcctgcgtagaagatatggaagaacgaggtttatattttcatgtggtactactgaagaaggtgcattgatacatttttaaatgtaagttgagaaaaatttataagccaaaggttcagaaaattaaactacagaatattaaatattataatgtgcccaaagctctgaatagttaaaaattaaatatttattttcttccccaagctttaggtaaggagaagaggggtcaagagttaaacttagagaccctttgtctctgagaagcatccttctaagacattctgttggagttccctcagtactattccttacaactggagtgggtagaagccttatgaaaattatactgagaacctgatctcgtttactccatgttaatcacattcctaccaacctaaatttctgccaagtcagttctctttggaggaagcccattactccgtaactgactggatggtccagtgtcattttgatctgcttttcagaatggaaatttataatataaatatatgttttaataccacaaacactgtggggcacttgatatttattagtggtgtatatggtccactggtttcaggccaaatctagaatttagtgatactggctcagaagaatttaagttctattcagccttcctgggtgttagaacctagattcaaaatggcttgtctttgctacttttgttccacattctctctctttacctttgccctaccttctgtttgtaaggatgattttaatattaattccaggaacacatgtttttatttcctctgctggaataggagaaagcttaatatattcccaagctgaatgttcttgaattatatctgcatttaccactgtatatgcatatagtgacagtataacctgtctatactacagtagttccagtcctaactttctgaattatttttaaagatcttctctaacaagctatgggaatttggcttcatactctttctttgcaacagcagtgttctgggtgataattttgaattgatacctgttcctttttctgggttttgttggctttttgaaaaattgtctttccttatcattggtgggaggcttggtagcaaagtaacattttttggaaaagaggacagaaaaattgaactacagcttgagaacgtattctttttttcctactttgttattgcaaattgaggaatcacttttaactgttttaggtgtgtgtgtccagagtgagcaaggattatgtttttggattgtcaaagaggatgcttagtcttaaaataaaaataaatttaaaaatcatcttataattag

SEQ ID NO: 13241 - DNA, 1649 bp, Homo sapiens
atgttttctggcaaaggccttcctgcatttatgaattctctctcaagaagcaagagaacacctgcaggaagtgaatcaagatgcagaacacagaggaataatcacctgctttaaaaaaataaagtactgttgaaaagatcatttctctctatttgttcctaggtgtaaaattttaatagttaatgcagaattctgtaatcattgaatcattagtggttaatgtttgaaaaagctcttgcaatcaagtctgtgatgtattaataatgccttatatattgtttgtagtcattttaagtagcatgagccatgtccctgtagtcggtagggggcagtcttgctttattcatcctccatctcaaaatgaacttggaattaaatattgtaagatatgtataatgctggccattttaaaggggttttctcaaaagttaaacttttgctatgactgtgtttttgcacataatccatatttgctgttcaagttaatctagaaatttattcaattctgtatgaacacctggaagcaaaatcatagtgcaaaaatacatttaaggtgtggtcaaaaataagtctttaattggtaaataataagcattaattttttatagcctgtattcacaattctgcggtaccttattgtacctaagggattctaaaggtgttgtcactgtataaaacagaaagcactaggatacaaatgaagcttaattactaaaatgtaattcttgacactctttctataattagcgttcttcacccccacccccacccccaccccccttattttccttttgtctcctggtgattaggccaaagtctgggagtaaggagaggattaggtacttaggagcaaagaaagaagtagcttggaacttttgagatgatccctaacatactgtactacttgcttttacaatgtgttagcagaaaccagtgggttataatgtagaatgatgtgctttctgcccaagtggtaattcatcttggtttgctatgttaaaactgtaaatacaacagaacattaataaatatctcttgtgtagcaccttttactgtagattagtgcttaatttcttggcttgcatttgttgattgctaaggcaattttttctaatcttagggaatcattcagtagatgcgattaaaaaactaatgttgggtcaatttttttcttcattttcagcacaagaagtcctcttatatcctactaaatacattcctaaaaatgtatttgaacattggttctgtaaaagataatggactaaaaaagtagagaggagttgtagagatcttaaatcattctggaattcctaattatgcttcaatttttagacataattttagataatttatttccagtgttttctgcatgttctcatttgttctttttctcagttgaatgcaccaactggtttgagtcctgtgagcattcagtcagttgaaattaaagattcctcatttctcctgatttctattcttgtctcaatcttaaatttagagaccagttgtttttatgatatcagccatttgatttttttcattttctatttaagaaatatgaagaaaaaatacaccaagatggtcaaattactacacaaatcagcaccagcacagtctgatagctgcaaatgtccattcatctgctgtgt

SEQ ID NO: 13242 - DNA, 6560 bp, Homo sapiens
ccgtgggccccagcagaactgctgagctttacatggtatccatgacaactgctgattccagtgtcgaggccatttctctttgccactgagaaatgcagcgtgactgactctgttgctacctgtcaacatgaatgtttctgtgagctctggtgtcactcatctccatgatcatctcagccaacatgcatcagtactgcaagaaaagaagtcaatcagcagaggagagcatttgataactaagaggaagacttgcaaagccgttttctcatgagtaccctgaatagggggcactcattttgtttcaacggtccaaacgcccaaccttcagaaagaggaagtcagatagaaatagtccctgagagcacactgtgtagctaagcctgctggggctgggtgaagaaattggcgctgagatccaggctggatccattgcttttgtttacaataggcactctctctaccccacctctcagtacttgagacttaaagtgctacaggcagctggatctgtttgcatgcaggatgaagagggttaaaacactgtttatataagatccaatctctcaccatctctaaagcagccgttggcctgtcatcagtgagatacaatccagtcttctcatgcacgggaacacacacaccctgcgtttctccctcccaggctaggaacctctctgccaccaagggctgccatccatcgcctagtaaccacggcaacccaacctactctaaaaccaaaccaaaaaaataaaataacacatcctctttgcatgacacattttttttctcccctttttggtacactttttttgaatggttttctaacaacttgaagcacaggatcaaggaattagggtggtctacttgaggcagatgggatagtagctgggaactgttccctttctgattaatttcagcagcatcggaatatatttggagcacaccctagtaacctcttgagattaaattacatagtcttaatatttctgttcctccatgcaactgatgtttgttttttaaagggtaagatgctgcctcccaatgggtgatgccatctgactggtttccccatgtcctcccattcacccatctctgctcccacccttgcctgcctctaacccaccactggccagcccccttgccctactctgggctgctgaacactggtgctgtggtggttttcaaggttaattcctaggctaaccgtatggcctatagtttaaaagcacatctatgttcactgccactctgaaaaagggaattatttctcagtctttcaaggcttgagactaatataggccattgtgattcaggaagaaacccaaggttggagggtgggatgagtaccctctgaaaaagggaatttgctggtgaaaagaggctggatcttgtggaagactgtcttggatggggaagtactacctggagatttcaaattcacttggcctgcaaacaacagagttatccgtatcttccacatgtgaatgtcattgcaagggtgactctagacaaactacaaaccgatggaccgtcaagctccccaggagccccttggatggcagcgttgcttcagagtgtttcctgtttctggaattccttgttagggaactttaaagaagaaaagaaaaacttgaattgtgttgaattactgtatcttttacttttttttttttgaaaagataaacttgtaaatagagtgatttgaaatactatatggcaaagttttatatttgatattctttaagttagttgctcacacacttaggctttgattgctgaagaagtatgtttaagagggagagaggggaggcaaagctgaagagagtcaaggtcactgtccccgcttcggcctgaaggaaagagaagacatttctatggccttgctctctgctgtcctgttggtgggcacgacacatcagtggtgttcagtctttatgtgtttttaagcatcccttgggctttggatttggagatgggaagagcatctccaggcaatgagtttttcaaagaatgcctacttagtagtaagatgaagctcaggatttaaataagtggggtcaggcattcgagtttttgtctttcttctcaggtgtatttcttggtacccccaagatatcaggccagaaagagatgagtcagttgctgtgctctttacttctttttctccacatcttctgaggctttagaaatgtggacaagctagttttcaaattttgtgtgcgtctgtaagttcttaaagaaccagcttcttagaatgttcagttctcaatgtgctgctgctttcccttctcctaaacattttaaaactcttccctttcacctccaattcccgtgatcccaaaagaagaggaagactccaggaggggtatagattgtgccgtcatagctttacaggtggttttaaagttaacaggggtttgtcatggtgattcactactcagtttatcagctcaaggattatacagctcttttccgggaactcacccaggagcaagcgagacactaccattgaatcagggaatgagaattaagaatggacaggaccaagacagaactcaagaaagccactggggaaaactcgagaagaaagggagtatactagtaggttagatctgtgaacctgaggacaagaagaccttgggaaatggaggcctcaggggatgtgcattcacatactattacgcttctcaaagagagaccaacatcatgcttttaacacatttgatgaggttttttatttgtgtttttgtttgttttttgagatggagtctcactctgtggcccaggctggagtgcagtggcgcaatcttggctcactgcaacctccacctcccaggttcaagtgattctcctgtctcagcctcccaagtagctgggactacaggcatgagccatcacacccagctagttttttgtatttttagtaaagatggggttttgccatgtttgccaggctgatctcgaactcctgacctcaagtgatctgcccacttcagacccccaaagtgctgggattccaggtgtgagccgctgcggccgaccacatttgatgtttgaagttgtaatctgtcccatcataaacttacctggagctcatgtggaggaacagaaggccaagatccttgctttgggggtgcctcacgaagcatccctgtagacatttggccccagcttcactgcttggaagcatgtccctccctcttgagttggctctgatttgaaatcgggagaaacagagctgctgccaatgggatcttttaggtaactccctccctagcttccgtgtgtctgtgcagtgcccatgagctgctgccaatgggatctttcaggtaccccctccccagcttccctgtggctgtgcggtgcccttgacagatggcttctctgtttccctttgcccagccaggctcccctccttcctattagctacaaaactggataaacttcagaatatgagccaatgagtaggaaggaacttgaagactaaagattttactctctcccctatccatgccccctacctctgactctctctgtgtgaacaggaaactttagggcagatgaggagaatgaattggttatcagagtggaagaccatggcccaggatccctgagctttcccagtagcctccagtttcctttgtaagacccagggatcacttagccatagcctgaatcttttaggggtattaaggtcagcctctcactcttccttcaggttactaacaaaatttcgtagctaaagaatgccatggccgggtgcagtggctcacgcctataatcccagcactttgggaggccgaggcgggcggatcacgaggtcaggagattgagaccatcctggctacgacggtgaaaccccgtctctactaaaaatacaaaaaattagccgggtgtggtggcgggcgcctgtagtcccagctactctggaggctgaggcaggagaatggcatgaacccaggaggcagagattgcagtgagccaagatcacgcccctgcactccagcctgggtgacagagccagactccgtctcaaaggaaaaaaaaaaaaaaaaaaaaagaatgccatgccaggagaagacagctggtttcaaatccctgcccccaggcaagtaaaaccctgacttgctcaagacagaagatcttttctcctgtttttcaaaataaacatatatagggatggaccctgtgcattgtggcctgccttggtgtcctagaattggagccagtctttagcttaatgtctgaagtatttatacggccaatatgtgttttcttatgtcagaccacactgtctttttgaatatcagttcatttcctctcaccgagtgcttttcggtgagaggcaaagagaaagaatgaacaatcaagtattgacagactggcattagcaggacagagccatactagtgacaagggcatcccaaggcacttgcccagagctgcagagttgtgtgtgccatacctgcggctcaaagggaaggccttctatcccctgagtttctatcagctgaaaatggcaactgctgtctcagtaaaagctctgtcttgactgcagaggctccaaaagcattcacagttgagggggagaaagacagaaagaagaagccaaagataacctgatccctgcctgtctgttggcacctgtcatcctctggcttctgctcccaaaagcaagtctggatgactgagttttgtggacatggcactcccggagacagcagtggccaccatggcacccagagtttgcccaagtactgaatgttttgtgagcaaccatgttccccaagtaggtagccagcgctgcagaaaccaaacagcctcttagctacctgactttaaaaggaatgacctaggtgttctgccaaaggagttatctatcatctctggcaaacttgacaatcatcacttacctcgacaaccctgccccacatcactttataaagtcagcaggatgtcttctcacccaccctgtgctggtgtctaacaaatttatcttgtcatgctcaaatgtgtttggcagccacaccgatcggctgggtgctgaaccgcctctctgtaattgtagcatcaaaatgacaacagcagcagagcagcgaatcttgcacagccccacagcatgcctgagacaagactccaacaagtaataattagctttttttctcctgccgcctacagtacctgtctaactaaagagcttcccaaagtggagggaaaggccatagaatccaggtgtcattcagagccagtccttgctgaaatgtggtcttccagtggaagcacctgtattattgagaggaaaaagtgttggatgcaaagtaacaccaggactagagagaaagagaaaggtgaaccatcctaaggagctttggatacttttttagaaggataaatattatgcttactgaggagaaaaaaaaaagcgatcacagaaaaatttcacagctaatatttttacaaaagttgtgccagacattacagagtgaaaacgtctctcaaggtggaatgctttagagagcaaaggcttagcatagacctagacccttgtgtgggtatgacatgacatgacatgtccatgtcaaaattcactttagtcagaaccagagtattgataaacaaaatgtcagttacctggagcagtcctggagaggttaagacattctatactgttctacgtcaaccatttctacaaagttgtccagacacctaaaagcagctttcttggttatccagatgccagaatcaaccttgtatctgacaatgcacatctgttgattctaaagtatatttatgtgtgtgtgtatgtgtgtgtatacagcacatatttacatctatgaagacatagacacttacagagacccacatgagctggcactttctgagcctttacagcctttaagactcggaggttgagaattagagacacaagagaggctgtggatggcctattaaaatgattaaagatgtaaattcagtgccattttaaaactgttcatatttatcaaacaattactgtctacagctacattttttgttaacttacttaaagtcatgtcgcaagaaagatcaaacccatgaatgcttagtagctaaggctagtgttcaaaagcactctaaaagacattttgtccacattttggaaaagaaaatatttgcatgtttaattcataatttaggctatctttgagtatactgtaaagtgctgtgtgatataatatcaataaagtacttattaaatggcactttaatgttttcttttaaaataacgcactgttctaaacttcagtattgactattgactcgtgcatagaatccaatgctgtaattagaaagtaatctgtgactagaatagacctttgtccctgttagtagccctgttgccatgttcaggcttttaaaaaatgcttttgtgtcaccaaatatatctataaagaaaacaaaatttctgttcagaggcctctgaaacttggctttcttacatgtggttggtttatgtgacaatccctatgaaatgagtggacgtatgatttttgaattaaatgacttttccatttggtggt

SEQ ID NO: 13243 - DNA, 149 bp, Homo sapiens
cactgctgttgaggtttgactcgaagcccagagttttggtgtggatgagcagggacaaattgctgagcatgaagaagagtaaaattaagcaagtggaacatatgccctttgcctctgctctgcacagtgaaatgaaaagtcaacctttg

SEQ ID NO: 13244 - DNA, 3267 bp, Homo sapiens
gggagggctgggggcgggaaaagaaaaaaaaaagtcattttgaaattaacctcctaaaaggaattcatattttaaaggaaaaaaatacaactaatgatgcacatttcttagaacacaatagtccattgatatactactgcctactttacctagttcaccttaacatgtaaatccacagggtagatttctttctagatgtggaagtacaagaaaatcttttttagttatttgtttgtttacttcgtcccatgtgctaactatcttatatataatgagagccagctacgtaaaagtagctgagaggccttgggagtcatttatcccaaactgggttttttctctcatccttctacctccctcctttgaatgagggtatggtagaaaaagatctggcccaatggcataagtttggaatttttaattttggtttttccttttgtttatggggttggggggaatggcagatttatatgacttttcactcaaatctatatgtgccagtttatattgactccgtatgcatgagtatttgtgcaacacaagcacaactaagtatgtatatacacatgacgcacacgatgccagggcctagacctcccaagggctgtgctcctgctcccagcagccctctcttagaatatttcagatggatgagcttctgactctttcttaaaattcttttgggaagatttcccagcctttcttcacaacactttctaacatcaaatgactctcatcatcaacaaattgtattccttattgtgaaattaataccctcaggctccattttactgctttgctctttgtctgcattaagagaggatgaggagagctggtcaaacattccttgtgttaaaaaaatcaaacattcatatccacaaaattttctgctaaatgactccacactcagccttctctaccctgaactgaattatcacccttttctccatgttttcagagttcttactgcccacagtttaatggtgtggcctttccacataatccacattaagttctgtgttcctgtgttgttgtggaactaaggacaacacacagtacttgaataagggtccggccttttgtttgttttagagaaagttgtattccacacacaacctaataatttcttataaaaattttaaactacaaagctacatttttacttgcttgtagccgtttttgtttgcctttgggattcgggctttggctgtgcccatgctaggatttagctgtgtcatttttatgatgtctgtaacaacccaacaaggtaactgaagctccagagttaaggtttcagatttctaaatgaaactatctttttcaattacatcctgacttgtatagacacagccaaaaagaaactgttaatagccatccgtccatgtaactctgtattttactaaggtaccaatagctctttcatagacttgtgctacaagaaggttaaaagaccagttttattttcagcattcctcatgcatttcagtggtaaccaaaaaataatttgtcaattaatagttgtgtgccaagcactcctaatttgttttattgcgtgtgtgtgcatgtgtgtatgtgtatcacaggtaataaaggcaattggatgatatctgtaggaggaaaacaatgactaatttcttccttttgaaatctttcattgatgcacatttattatgtaagatgttctgtcttgatttctgttcttagtgatgattagtatatgaatatctttctgaatttttgtaattctcgccttcacactaggatgacagactcagctaatgtttccttgtcctgaaggtttgaatggagttgaaagttttacataagtgaaaaagaaagtttatcttgggagttgagttgtcaagagaattataatttatgaatttaagtggtattcttttctgtattaatatattagcagatatttggtcttaactacaacatagctttgtttgtaaacttaccagtatgtcttgattcttttcaatgtttcttgatagcacatggcaataccatcatcctaataacagaagatcttgcaaagaatcacagagcttaatgggtcaagaagttgaatttggggaaaatatcctgaaactcactttggtcaaatgattattgtgttgtcactggaagtactgtcaaagactttgggggtctaactaaaatggccaaagttccaacttccttaaatttcagacctgactgtaatggcctcaagatagagagatacccttataagagtaaagaattaagatgatagtcaacccaatatttctactacattctttaaacaggaaattaaacactgcaaaaggagtgttcgtggcagtgttcctctgacccctgacctgtcatgagttttctctgctctgacattccttatacatccagtgaacaaagctggaatagaaaacctgtttaaaaccatcacaacagcaatatttttattctgggccacctctcgactggcactcatcccatggtaaaatattcaagtaactaagacaacagcatggcatttatttgtgtgagtgtttatatagaaatgaacatagacctggccagtaaaaggctctgaggaggcttaaagtacctagtttgagtggagttatcaagtgaggtccaggtagcctgcaacactggaaatgagttctgggtaagtgagttataagagtacatgctctagtaactctggtagtcactgtgactcgggcatgtttccctgaagttaaaatagtttttagaactttttgtttaattctgaagaaaacaatatatatggtttacttctcgaacattggttatgacaagggccataaattgctaatataaagaagttagtagtattgagtggatacaatgaatggggaatcacatgtgtagagccccaacttagattgccttctgggaaatcccgcgatactaaaatccagtgagctttgggagatcattccctaaaggtatgtgggttgtctgaagtcagaaacatatttacaaagtccttctacccactatcaaaaatgaactgatctgcattcagcaggaaaaggggaagacaggaatgtaaaactactagatcatatggtattgtgattttctttcccctgctaggaaaaaattgcactgaaatgctgacaaaaaataatgaaatgaagtggcttccaaaatatgcactgatgttatcctttgtatttataggcacagttatcttactgaaaatgcatgcatggtgaattaaaataaaagggggaacaatgcacaaat

SEQ ID NO: 13245 - DNA, 590 bp, Homo sapiens
acctacgggtggcttttcctagaccccaaagaggtgaattgcatttaaatacagtctgcctccactgagggcatcctgccattctttggggacttgagcatgggtccttgttcttcctatttcacctccaggaaagcaaaagtgggagcagaaattcctgccctgggtgggaggatagatggcgtggccttccaaacatacaaacataatgatttgatgccacaaagctcgcttactcagaccaaggagtgaaaaattgtcgtgcccactttatgccccagcatggagtatgtggcctcttgtcatccccgtgttactgtgtagaatttctatggtgtcctaaagggggctgcagcaggggtgtgacaacggtgggattgttggcgttgcttctttgaccttacaatatcctcaacaagcattagaacaacttctgccatcttctggggcctgtacactggccactagtagctgccatatctttttccctctgtaaagtcataatcctggctgcaaagggaggatttctgcgcggggtgtgaggtggatactttgaacattctgagaacccaataaaactagaaggagcc

SEQ ID NO: 13246 - DNA, 863 bp, Homo sapiens
ttctaaatactcttccataggggcatctattcaaaatgcttgcatgagccaattttcaggtttttacatatatgtgcattagtcaacctattgcgaaaccatctgacaaacagaaggagaagcatttgtgaacagtttctgaacagaacactttggaaatatttatgcttttctttgtgtggcatgactgacatacatactcaaatataggctgtctctagtaaatcttaaaatcttgaagctaaaattcatccttttatgaggtgtggaagtcagtgacttggtgacgttcttcctagcagtgttaatacatgcaagaagtaagagcatttgtggcttgaacttgccagatgcaaataccacagactccaagaaaacccgagttggggtttgttttgttttgattttttttttttaaagcgggtaaaagagaaaacactgaaaattgaattcttatcttccagaggctacaattattataatggacaatacttttacctttgtctctaaagatcagattagttttatttgttcacttacgtgctttgattatcccctctgaattatagaccgagtcttgttgtttagcctaagagaagatttatgtagtaatttcttctcaggtatggaaccacggtcataactaacatgttggccagaatagaaccactggttaaacatattttattcaccattaagtgatctttatcaatattctggattagacaacaaattacctttctgggtgtttcttgtaaactatactcctgtttgaatgttaaactttgttgctaaagtttaattttaagatgtttgaatgttcagtttatgtatttgaactacaataaaccaaccctttttat

SEQ ID NO: 13247 - DNA, 106 bp, Homo sapiens
attggagtttcaggagaccgaagcccaggcacatgtattttgcaaaactacactgaagtttctgataatgacggatatcaacaattaaacgcttacttcttgccaa

SEQ ID NO: 13248 - DNA, 140 bp, Homo sapiens
catcaagataaagagcggaggtggatggggatggaagatgatgctcctatcctccctgcctgaaacctgttctaccaattatagatcaaatgccctaaaatgtagtgacccgtgaaaaggacaaataaagcaatgaatac

SEQ ID NO: 13249 - DNA, 373 bp, Homo sapiens
caggaagattgttgaaagccatgagggaaaaaataaaccccagttctgaatcacctaccttcaccatctgtatatacaaagaattcttcggagcttgtcttatttgctatagaaaacaatacagagcttttgggaatggactcactgattttcagtcttttccatctctttcctcctagactctgtgatctgagggtataaagacatctccaccaagtctgagccctcaaaatgtcctgattacaatgctgtctgtccaactgcctgttcaataaaagtaaactcagcagaacaccctttctgggatttctttgtcactatctggataatagatatttgcttttaaagaaactgaataaactctacccttttg

SEQ ID NO: 13250 - DNA, 186 bp, Homo sapiens
gttaaagccaatgtttcttggtgacttgccagcttttgcagccttcttttctcacttctgcttatacttttgctggtggattcctttaattcataaagacatacctactctgcctgggtcttgaggagttcaatgtatgtctatttctcttgattcacttgtcaataaagtacattctgcaaaagc

SEQ ID NO: 13251 - DNA, 232 bp, Homo sapiens
attctccatggacatagagagaaaggaatgatattctcatcatcatcttcatcatcccaggctctgactgagtttctttcagttttactgatgttctgggtgggggacagagccagattcagagtaatcttgactgaatggagaaagtttctgtgctacccctacaaacccatgcctcactgacagaccagcattttttttttaacacgtcaataaaaaaataatctcccag

SEQ ID NO: 13252 - DNA, 689 bp, Homo sapiens
ttggtccctcctcctttccagctattttgtcagaaagcaagtagggccatccagctgccagagtgctccacagggacttgaggcatgcagttgggaggtcctggctcggtttgctatatagggaatatataaggaacatcgaaattgtatacaaagatttgtacataaaaaatatacaaagacgcttcctaaagtaccaactttatatcatatgtttatacaatttaatttaaaaattcattttaaggaagacagataatttgaaagacttttgtttttcttgacttaattcatgaagtatcattttttgactgagtctccatttacttcattcttaatgattattgtcatccctttaaatctgtgcctttttcttcttgagcgaagctgtttgagtaaacctgttgaagagtgtttgtgtcttttgtgcttttttgttgttattaaaacaccaactaaaccttatagtcaagacaaggctctatgtttctgtacaaagctgtagttctttcttagtattatagttgccatgtttcttaaaatcaagtaaaaagacttatgagcttaaaaaaaagtgagtttgagagggaaatggaaaagtttccagagtatttctagtaatttatttccacattgaattgtgtatatgctttatcttgaatataaaataaaagtttattaaaaacttt

SEQ ID NO: 13253 - DNA, 552 bp, Homo sapiens
agcagtttttctacttttaaagacccccccccccaacagaacactaaacagactatttaacttgagggtaataaacttagaataaaattgtaaaattgtatagagatatgcagaaggaagggcatccttctgccttttttatttttttaagctgtaaaaagagagaaaacttatttgagtgattatttgttatttgtacagttcagttcctctttgcatggaatttgtaagtttatgtctaaagagctttagtcctagaggacctgagtctgctatattttcatgacttttccatgtatctacctcactattcaagtattaggggtaatatattgctgctggtaatttgtatctgaaggagattttccttcctacacccttggacttgaggattttgagtatctcggacctttcagctgtgaacatggactcttcccccactcctcttatttgctcacacggggtattttaggcagggatttgaggagcagcttcagttgttttcccgagcaaagtctaaagtttacagtaaataaattgtttgaccatgcc

SEQ ID NO: 13254 - DNA, 2032 bp, Homo sapiens
gcagaggctctataaatatatatgcatttatataaagatatatgtaaaatctctctactgaagctcggtataatcctctcttgtgtaatgggacacactgcctgccatgagacttgcttttctgtactgtcaggcaagcccacgtcatcgagatatttttatgctccttactttctcttttctaagtgctgtgggatctgggaagggatttgaggggactctgtccttttattggggatcctttttatactgaaacatctgtcctaacttgagtgccccaaggtccaactctctttcctaaagaaggtgcctgaagaagtctctcttctctctgcttcgtggcccctttcttaaatttctagggctgatgctgaccatgtggtttccacaccttattggccccagaggggccctcccatgggaagatctgcagcagtctccccaaatcagtgagcacctttgagcgcccacgaagaactttctcaacacccccaattaggagctcagtgctctcttggggcaatgcagttaaaagggtgagcctcaaatctagtcattacaccagtcaacagaagtggacagggcctaggcctctcctcagctccttaaccctcctccttctgccctggattgtaacctctcccttgtccaaatctaggattcctggtaggaaaaggaaaaggcccttcccttccctccaccacttccaactggcccctttgcctgacctggacttggagaaccagaggaaaagagagggagcggaagtgggagatggagcagggcacctgttagaatcagagctgcaggatttcttgggaccctcctctctccctcactgctcccagcacctcctgacccttccctctttcaaggagaagcccatgattgcagcttgtattctttagccttattacaatctatgtgcctgacaactcaacacaccgcagggctaatgttcccaccagagctccaactgaacaaccagacagacaactctcatcatcctccagagagaaaataggccgtgtctcaaagaaaggttcttggtctatgcctctggtctgtgggctggcagggcaaccataccatacccccgccagtcctcggctcctgctgcaaagttggccatgtttcacagggaaacttttggaagagtggctgcttatgagattccaaaatgaagtgttggccaacaccgctcatggccatcctggattttcccagtggcttcccttcctgctcgcctccctgaacaggggagaaagcttaacctctcttctcctctccaaacctttcaccttgaatgggtaatgtttggtgggggctgttccttcttggagaagccttgagtcggaccattttgagatcatggaggaaggatgaagaagtgaaaatgacaataatgactctcaagaggctggcgatgtgacatggcaaatgtagaactgacttaaattgaacaaaccctcactgagcacctctgatgttgagcacctgctgaatactgagcactgaatgggggagggggaggggagcacggggtgagtcaacctgggactcggtctcagggatatgcctaccaatagcgggtatcgtaaggcatgtacccaaacataacggatgtaaggcagaaagtgatcggagaaggaatgagaaagtgtgcgtgatgttaatgaaaagtcatatgcagctagagcagacccaggaaagctttctggaagagattgcatctgaggaaattcaggaaggatctttgtagattggggggagattctaaattgaaggggtgatggggtgaggggccagagggaagtctgctgtgttctcatgtaggatgtcagccctccctgcaacttctctttttggccaatgtcttttcactttcctgaccctttagaatcatccccagccagacgcaatcatggaagttgccttattgtcactggttaagaacttggcgagattgaagggcttttgttattgttgttggatatttttgtttcccataaaagcacatcatttcaaccct

SEQ ID NO: 13255 - DNA, 1772 bp, Homo sapiens
gaagaggatgaggatttcattccaaaggaaataccagcttgtccacctgaggaagaaatgcttttttcacaaggagacaccaagagaagactaggaagtagccctcgttctccagggcacccaaaataccagcctttattgtctgcatgattttaggggatatggggagggaacaagtagaagggaagagggaaatggagagcatccttatgactttacaaagggtggaaatgaggatggagggatacagaagtctgcacagctgtaaaggttttatagatgtctttgccttcccttctgaggaagggaagaagtaatgaaagcacatgtgaataaccccttccatcccattcacagcatcgcactcccagtccttaaggcaaagggaggcagtgctgaagcattggtggtgcagtgtaaagagacaagacctgatcatctgatcacacttgtgccaacttgattcatattgggcattactaacaacccctggtcaaggtaaataggttgaacaatcaataacattatccctgcctgcatacatgtgaacaaaagctatagaggacatgcaaattctacagtcattcctcatatgctttagacagagtgcagctactggaatcttccagatttcagtgttttaaaatcagagctctgaatacacaaaaggaaagagaaatggagcagctgacatattttaagctcacagtgatactcagtgacaggagcacagagctctaatgtccacaggatgttgtagggtagggtctctcagtaaatcaagtcccttacctatgttctgacactgaggctcttggagctatgggttagaaatccaggaggcaatatgtctttattctaatgaagtcctcatcttgcactcagaggcccactagtttgcccttctatatattaagtaaaaccaagagaaattaagaggatgatggcttctttctgtcacatgggtgctaaaccttttacaaacacttgatacttctatagagggaccaaggacctcaagtcctgggcagtctccttactgtgctactcactactgtctcaacactgtagtgagtctgtctttaacacatttccttccaataaagataaaaccacttaactcttaagtgccagtgcttagctcaagaggaaagaaggaaaatcccagaataaccgtggccactttgctataggggttacatattttaacccacctaaggttttacagactttagcctcactcaaactttatcaccctctgaggtagctggagaccacagcaggaaaaataacctgaccagtaatcacccactgattagtggcagagcgtaggacttaggggttataagcccagatccagatagggctaggtttgagccatgcctctaatgaccagctgggtgaccttgggaaagtcacttgattgctctgattcttgttttccttatctgtgaaatgggactaacaattgttacttttctcccaagattgttgggaagatttaataagataatatatagtaggcatcttgcatagtgtctgagaaataagaaatgctcagtcaatagtggctctcattagccaggcatggtggtactcgcctgtagtcccagctactcaggaggctgaggcaggaggaccgcttgagcccaggagtttgagactgtagtgcactatgatcacgcctgtgaattgccactgcactccagcctaagcaaatagcaagaccccatctattaaaaaaaaaaagtggctattattagctatatcag

SEQ ID NO: 13256 - DNA, 3300 bp, Homo sapiens
agaggccatcaggaactggatgttctcccagagcgcagtcacctatgtttcttttatttattaaactaggtttgtattgtacatgaggtacttcatgtgatatgttttggatttagtcatattggctttatttctaagatattctattgatttaatgtgacctgtttggtctcatcagaagtcttaccattgggcatttgaacagtgtgacaggtgttccaatggcctttatcaaaacatgtttaggaaaattggtactgtgataaatttgaatccaaaatccttttaactatgggttttcaactacatgtttcttcctagcggtctctataacaggaattgtgtagtatcttgtattttgtggaaaaaggagatggtagggattggttcaacatttgggtacttagaggataaagcttcgtggtcgtataaatttagatcatttggattgatttttatacacatagattttcaggactttaccttttgttttgtttttttccttttagccatcttttgttcttgtaatcccaactagataggctttatgctcacatcattgtcccatacccacccctttctcatccccatttgcaggggctaaaggtctagatgagacttggaaggcaaggagcatcgaaatttgagatacccaggaccctttcaagcaagaatggccaaaaagccttgtgctgtctttgctcttcaaattattttcagcctccttgtcatataatcatttcaggcaaactgaggcaacactaacagctaatgacccagatggctctatttgggtaatttacctacaacttattccaccagcctttactcctctgcccttttgtcaattttaccttataatcctttattaaatgatgggaggtggtgatcaggacaaaagtgttaggttcccatgatttctcatttcatttattaatagttaatgctgaatttttttttaagtttcctctggctctatttatgttactttttgcgataagaacacttaacataagtattctctcctcttggcaattttttttttttttcctgtgttgcccaggctgacctccaactcctgggcccaagcaatcctgcctcagcctgccaagtagctaggactacaggcgttcaccactgcgcccgcaaagtttttttgttgtttttttttttaagttggtactcacaaatcactacctctgttatattgacaagctctatttcctattctttgtatctgttaagtcacatctgtgtaaacattgagctcaccttttatatattaacctctagaattaatgggcctatgtggttttttttcagtcttatagctggtgttctgtaaaagatttgtccaataaacgacttaatgaatgatacatcagtcagattttaggaaggcagtcaattatggatattttaatgttggaagaggccttaatgatcaaatctcaccctttctgcttctgaagtatgaaaatctagtctttttaggactggacacaaggaaaataatctctaaactattgactaaattccagtgagagtatgaatgaagaacaactagatattaatgtcaatcatttaagattaatgggcatgcaattaagtctccatttaagattaatgggcatgcaatgaagtctccagcagacaatcagatgttgttggatgtctagattatataggtttaggttgaagttataaaataaaataaaattcattttccactggaactctatgacattcagtggagtggtggaaagttaacctcttatacattatagataattctaagacagcacacaaacttatcaataaagccatctccttgtgggccttaccatcttcatcagatttagacccttaaaaaacaagtaaatatgcacttttaaaatgcaatcaaaagactggtggttaagcttgtaaaaccagaacatcttttggcattccactaagtatatattgtaaatttaatgaacaatcaaggttcacaataggaagttgtctttttttgccttccattctgtgagatttgacagatggtgacaataagaaaatgagctgattgtaattactctctgtgtgtttttttattgctagctatcattaccagttagaattaacattaattacaattaacaataattttaggtatggaatgttatgattacctaaagagatgtctctacctaatgagctcaagtgatcctcccacctcagcctaccaagtagccaggaccacaggcaagtgcaccaccatgactggctagttttgttttttggtttttggtttttggtttttggttttttttttttggttggttggttgttttttacaggcggggtctcactatattgtccaggctagaagaattttctaatggtctattacacctcccgttttggcaagtaaattcagaataattttaggttcttttgttattcagtagttttgcagacttaaaagtgtaaatttagaattagaagatgaagctatagtagtaagaatctcaagctgaagggctttggggagccaaagcagcatattagagcataggcttgaacttaaatctcagctcagtcacctgcaggactttaggcaccagtgatttcacccttctgagcctgtttctttattcgtaaaatgattataataattctttcacagcgttgtgaggattaagtgaaatgtgttaaatgcctactacagtaggtgctcagatatttatttttatttttttattatgcacattgtttttcctgcctttttatggctgtctaaagtctagggaaaagggaagactggttaatgatgagtagaaaaaacttgtaagctaatcattcactgacttattttccttccattttctggtttttaaaattagccacaccacaggaaacccacatttttagatggaaagagcaagaaaattgtgtcagtgctcttagttattttcatcttaatggtatagtgaaaagacattgacttgagatgatactaaggaagctttggctcactctcacttgaagaggggatcttggtgttgtagtacttggactgtacaaatgttttactgacttttcttactgctgtaaaggaatcaggcagttgggtattgatatgttatttggtgctctcattcatggcaaaggatttgataaataaaagttctttaaacactaaagcaaaatcaaatgagcaaaactaaggatgaaatgtaatattcatcagaacaaggatcactgagaaaaaatattcagaaacaactttaataaaacctgaattgaaataactgc

SEQ ID NO: 13257 - DNA, 998 bp, Homo sapiens
gggctctagggagagcctgggaactttcatcccccactgaagatggatcatcccacagcagcccaggactgaataagccatgctcgcccaccaggcttctttctgacccctcatgtatcaagcatctccaggtgacctactgtctgcctatattaagggtccacacggcggctgctgcttttttttaagggggaaagtaagaaaagagaaggaaatccaagccagtatatttgttttatttattttttttaagaagaaaaaagttcatcttcacaaggtgcttcagacttggtttcttagctagaaaccagaagactacgggagggaatataaggcagagaactatgagtcttattttattactgtttttcactacctactcccacaatggacaatcaattgaggcaacctacaagaaaacatttacaaccagatggttacaaataaagtagaagggaagatcagaaaacctaagaaatgatcatagctcctggttactgtggacttgatggatttgaagtacctagttcagaactccctagtcaccatctccaagcctgtcaacatcactgcatattggaggagatgactgtggtaggacccaaggaagagatgtgtgcctgaatagtcgtcaccatatctccaagcttcctggcaaccagtgggaaaagaaacatgcgaggctgtaggaagagggaagctcttccttggcacctagaggaattagccattctcttccttatgcaaagattgaggaatgcaacaatataaagaagagaagtccccagatggtagagagcagtcatatcttacccctagatgttcatcccagcagaagaaagaagaaggtgttggggtaggattcttcagaggttagcctggtactttctcatcagacactagcttgaagtaagaggagaattatgcttttctttgctttttctacaaacccttaaaaatcacttgttttaaaaagaaagtaaaagcccttttcattc

SEQ ID NO: 13258 - DNA, 2773 bp, Homo sapiens
ggtaccctctttggagcctacattgccaaatgatgggggaggcttagaggctctgaccctggggggaaaagaagcaaaggaaaggtggaggtggaagggaagaccaggccagggtgggtgaagcacactcaggaggcagccagaagacatgggcgggcctcgcagagtgcttggtgtggtgggggcacaggaggctccagccaggactgctcattatgtctgcataaagaactcattccgacctggggtcacaatgcacttggacagcaggtcacagctgattggccaggactctccataggttatggccagtcttagctgtgcctgcatccgggcctgcctgtgggcgtgggtcacacgggataatgttacctgcgtgctgtgtggttgcaggaagcgggttctggaggagtccagaactgcctggtcagacagttcacttcctacacatggtatcaggagacatcataaccaatgagtcagcttttatttctctatgctggaagctgagtttatcttgggcagtgacccactgggagccctctcaagtggggaagccatggatttatcggtgtagcagagaggttcccaagactcttgactggtcctgggagtgggtgtgaccaagtcatagttctggaatgtgtgtaggcaaattcagaggctgttccagggaagaggggattttgatactgtgttaggtggggtgtgtgaggctgttggcagcaggtgaacagctactgctgtgttctcaggactagggaacaaaggggtatgcaaatcatagaggaaactctgggaaggcggtgataaggcctggtgggtggggaggttagggaatggcttgctttcctgtttctggttagaaggggagccagggggaacccccagtggtttcaggtggcccctgaggtcctggaggcagccgtggatgtgatgcaattggctgtgggaccttagatgtaggacacaacttcagtgttcccatccagaaagacctcactcacagggttgtgctgagaatgacgtggggctaagcatgcagagctccctgtaaactgtgaagtgtgatacaaatgtaaatgacagcagtgatctcggggtggcccccggcatgctgccctcccccacgcccatgcctgtggcagcaaaccttgttcatcagtatagctttctttcctgtaacccaggatctaccttggggggcttctcaatactgcattctatgtagccagcctctttaacttggtaagtgagccaccccattctagaacctggaaattggagcccctcaaaaacagttcctgttcaaggaggactgacctgctggggcaatgttgggtgcagtgcagtccctgcttggggtggtcatgtctaggctgttgctctgggcaaagataagttgcaagattcacagaaatgggaaaatgtgaccaagtgtgatcttaacaactgacaaagtttgtaaccaacccaagttagaatgtgtgtcaaacaggaggtagtttagatatgcttccaagaacatgtctgtgttataaccatagtgcctaagcagtgagctctggtttttgaagggcttttaagaaatatatacatgtctgtgtcagtctataacttgcctcctctgggcctgttaaagcatgaagactgcatgacacaagagaaatgcaagccctacggttcctttctcagcagcgaattcacttgagaggatgctcttgactcattctctctgctctttcctgctcagatttctgataaaaatagagagcataggggaacagataatgaaataggaaacccactcgtgggttccacagatacctaccgaaggcctactgtgtgctagaattgtagctcaggagttctcagtgtagctgctcactgaagttaccatggcaggtttcaactggcagaatccaggctccgtcccacccagagattctgatgaaattggtttagggtgtggctcgggcctcaggaattcagaaagcttcccaggtgcttccaatgtgcagccagggttagggacctctaccctagacacaaagtattggacagatagacctggtgccagagatggccatgagctgtaagctaggacgtgccccacctgagctctgcactagctagttcaaacaggcgctttaaaggcagtgtgaaaggggacagcctgttctgccaggtctcagaatgtatatttattaagtgccattaaaagggacctgaacaaaattggatgtcttgtaggcataagggaggaaaataaaatatacttggaaccaagtctatgtcatgaagggaaaataaaaatgtattcagtagcacgtgggttatggtttctcatagaccaggggataagattaaaagtcactgaagagtgggaaaatgcatgttgagaagatgagaatggcctgtattttctccaggggaatctgtgtaatgtgccttttccctctccaaatgcctagaaccatggcactgtgtcttatttatttaaccgttgggctgtctcatactaaacttgcaaagatatttgcctatgaactgaacaagacttccaggagttgaagtctggttcacaagggtaccccttgcctcctgtgatggagtgagaactcttaaacccctcaggccccaactcagttgtggagatgaggacaagattacaatatcaaaagaaagatgaatgaattcttggttaatatgacgaaccccagctcaatgagtaactgatgtgaactgctgggaataaaggacttcaaagatg

SEQ ID NO: 13259 - DNA, 146 bp, Homo sapiens
taacagccttaaccctcgaggaatacctcaatacctcagacaaggcccttccaatatgtttacgttttcaaagaaatcaagtatatgaggagagcgagcgagcgtgagagaacacccgtgagagagacttgaaactgctgtccttt

SEQ ID NO: 13260 - DNA, 5583 bp, Homo sapiens
ttgagaaggtagatagaagaatgtctagccaataggttaaaatttcaagtgtccaacatttcccagttccacagtgggaaattttgcacacttgaaattttaaccaagtggctagatattattcctcctttgaagctaatggcatttgtatatacacactgcagcagagcttgtagctggacagagtcaaaaagaagaaaatacggtttcaggctttcttgcagatatgaagtattcttggaatgcaataagtatgtattgaactgtactgtaaagtagctccaaaacttaattactctcctgttttaggggttatacatttggactgtgcattctccaagagatgaagcggtgaagttgggatttacattggaagtgctgtagacttctttatgtggctcagtggagagagggaaagaatgttgcacctgctctagtaccataggtcaagaggcttctggatcacaaagtcataactagacaggtttgttcttgtagttttctatccccagtctttgctccccagatggcagtagtttttagtaggaaagtgccattcctgtccttaaggcacagtctcatcagaagtctaatacctgggcaggtttataacatcctgagagccagcctgacattagacagaataccctttgtaatacattggaaatttttactcatgcctttttgtttaggataaataggtaagcacaaagagctcttcaaaatcagaaaaaacaataggagtccttccttgtcttttctgtgatctctgtccttgtttctgagactttctctaccattaagctctattttagctttcagttattctagtttgtttcccatggaatctgtcctaaactggtgtttttgtcagtgacagtcttgccagtcagcaatttctaacagcattttaaatgagtttgatgtacagtaaatattgatgacaatgacagcttttaactcttcaagtcacctaaagctattatgcaggaggatttagaagtcacattcataaaacccaagtgctatgggtgtattattcatgatagctggcccacaggtcatgaattgaggaggaatttgctttcaaaaagcaagaatgtccaacactgaaagtttatagttttatatttggaccttgaaaggtaagaaaaaaccaggttctccaaagttaggaatagggaactaatttatgaaacagccatcttaaaaaaaaaaaaagtaaactgcaaaagtacaaaatcatttttcaatctgttcccagtttctaaacaattttaaatatttatgagaagcaaaccctatgtgtagggcatctgttggagtgggatgcttttagacatatattaagtatgtacatgtttaatatgtatatttaaaatgcatatatattttattatatctatattatcctatatagatatatgtaacttagctttattgttagctccataagctgccagtgttgcttttctgttggtagagctctcccatttggtgacatggaaaatacctttccattatcacaacaaagcagttgctcagtagaaagtctagatttctgtcttataggtgatttctgtcttataggtgattataatcaagtgtaggcttcctgaattttgacatccttttagaacttgggtctggaattccagaaatgttaattgctgcttgtatttgttcttgtttgttttttagccagtatttgccctttctatccagccttatgaataatagcagtaaaatcacagtatcttggtcagtctttatttttttccttttttcttttttaagagacagtcatccaggccagagtgcagtttgatgatagcttactgaagcttcccactcctgggctcaagttatccttccattttggcctcctgagtagctagaccataggtatgcatcaccacaccctgctaattttttaaatttttttctagagagagggtctcactgtgttgcccaggctggtctcaaactccaggctcaagcaatccttcagcctcagcctcccagagtgttgggattacaggcgtgagccactgcacttggccaagttatttatttttaatctctcttgcccttctcccaaggcaggcttaagttgagactattataggtgtctaataacctgtgacagagtaatgagtacatgcttaagatgttataattagccaacaccaacacagcaaaaaatataattccagccaaagattctggaaaatccctcagaaggagggataacaggatttgacctttaccagcgatttctgtccatatgtggatgtaaacagttctggaacgttatgcatgcagttagcgaatccttgaattatgttctggtttgtacttgtcccatccatccaaacaagagattctgcttttggtagccatctgtagaaacatttaagatgtcactagaatttacatttcatcctctctacttgggttgaggttgcctatacttgcatattgttaaaatgttttggttgctgatattcagaggaatgaaacctggaaccaaagcctaatttgccgataaaaaaactgttttcggccaggtgcagtggctcatgcctgtaatcccagcacgttgggaggccgaggcgggtggatcacctgaagtcaggagttcgagaccatcctggctaacactgtgaaaccccgtctctactaaaaatacaaaaaattagcggggcatggtggcacgcgcctgtagtcccagctactcaggaggctgaggcaggagaattacttgaacccgggaggcggaggttgcagtaagcagagattgtgccactggactccagcctgggtgacagagcgagactccgtctcaaacaaacaaacaaaaaactgttttcatttgctctcttgaccaaaggataggactttagttctttaagcattattttaaacactatattgatacaaaaatatcttgcttactctaaactttagagtctaaatgaagctttttctcagtacaagattctgagtatcataaaatggttatttaattgaaacgtagtgtggtatactcttgatggttagaactcttacagccttatttatttttaagtttgttacagccaaagggttggagtgtgccagtgcacaggtagactaaggaaaacattatagaggagtgaagagaacagaccattgaaaagactattatctgaccagcggaggcagaaaagagaggaacccagttgaataggatccaatccctggttagcctctacacaataatagggagacaaggattaggagccatacctcccagagcaaggtatctttctagagcaaatttctctttctagaaggggagggtcacagggtcacagattcaccaaagctgaaagggctgaggagctcatggtagcctgggctgacctactctggagcacggtgtcttccttctaaactgagtgactgtagtactatctgtgcctctgatggtaataaaactgacaagatgtctaatttttttttaagtaggaccaaaggaaaacaagatttagatagtctgactttgcttttgaacaacagacattgcaagtcaaaattgttgtcaaatttacatatggtaaatgatgaactttaaaaatgtgtccaggtgttagatgagttcattagactcttttaatgctaatggctagtacgtttaaacaaaacagcagttctctgctgcaatattcccattgaccacttaaatgaccataagtggtcatttaagaacatgttagggttagccctgatctgaatataaaagtgagaaaagggctacagtgcatttcttggtaacttaaactgagtcttgaagttataatgatccattcgagttctgtgatccttattgttcttaattgtgtttctctacgtattgttacagatgagccatacgtttctttgtatcaatgtagacatgacttcagatacctctgaggacctacccagcagtctaggaccctgggccaagtgctgggactatggtactaaatccagtagatgggctgtgtagcaactctcccagggaacacactagggtacttagggaggtgctttgtggagcatgttgaagctttgagatctgagcaggaggcagtgatgtccctggtctattcagggaaagatttcagtgtgaaatggtaaacatccaattgacaggatttagattttgcttagtttttctgctttttaatgtttctatcccccatctcagtgttttctttatccatcccagtgatgccttatttgaaactgggcttaaactgcaaaaagaatgaagttggatttaggaagctgttagatcattgagtggtgttgagagtgaagtttcactagcagggaagtttccttgagcctaaaataaaaagaaaaaattaaaaagaatcagtttttttaattaaaaaaatagaaagctgttaggctcctaattcgtggggtttttttttgtaaaaacagtttagataatcctgaatgcaatcattaacttggttgctaattacaagaatgaaaattataatggaaaaggacaaaataatataccagctggtttgttattatagtccgtgtattaaaatactattgaaatacgttaaaggtaaatttttaaggtttaaaaaaaatttagtaacttacagggatggagaatttagatgtcagaggtggggagatttatttttataaggtaatttttatcctgataaggacttaaaaaaaagttttgcaactgaaattttaaagtaaacatgttaagtacagttaaaaagtaagcattgtagtaaatagtggattctctggtgtgtattttttatctcagtgttgaaaattggaaaagaatggactgaagtctaaaaactggaataatgaaggacactaaatgcctttattgtagatactatgtttgtaagtctatagctaagcaacttaagccaaaaaggtctttcaactgaagctttaatcaacttattttggagatgttctcttcccttatctcatgcgtcatccctaaaataataagatacatgggatcaaatagcccttgccttttcaacacaaatcagttggaaaattatggtttgagtcctgttgctgccatggcttctgtttctcagaaatgagtgtgtatgaacataccaatctatgtaataggctacctttttttgtcttctttggaactttgtacacaaaccaagacaatatcagggtgacaggtgaatgaacttaaattctcagtcttgtctattcaccaaaaaagtatactgcctgttttttctttaattattcaaggttgatgacttttaggaacatgttttatactgtattttttaattaaagcaagtgccttgatgtaattccatgtaaatcattgcttaaccctcttatgggatgaggatgagttattaatgtattgcagcctactggaaaggagggggagttggttaatagcagatacttttcttctagaagcttatgttttatgctgtttattatgtaagatcctgtatgtgtgttgagatttagaggtttcatttgttttgtctgctaataaattgttactctaat

SEQ ID NO: 13261 - DNA, 878 bp, Homo sapiens
ccccatgcccagcctgtgcgccgggggacctggggactcgggtgctgggagtgtggctcctgtgggcccaggaggtctggtccgagtctcagccctgaccttctgggacatggtggacagtcacctatccaccctctgcatccccttggcccatctgtgcagtaagcctgttggataaagaccttccagctcctgtgttctagacctctgggggataagggagtccagggtggatgatctcaatctcccgtgggcatctcaagccccaaatggttgggggaggggcctagacaaggctccaggccccacctcctcctccatacgttcagaggtgcagctggaggctgctgtggggaccacactgatcctggagaaaagggatggagctgaaaaagatggaatgcttgcagagcatgacctgaggagggaggaacgtggtcaactcacacctgcctcttcctgcagcctcacttctacctgcccccatcataagggcactgagcccttcccaggctggatactaagcacaaagcccatagcactgggctctgatggctgctccactgggttacagaatcacagccctcatgatcattctcagtgagggctctggattgagagggaggccctgggaggagagaagggggcagagtcttccctaccaggtttctacacccccgccaggctgcccatcagggcccagggagcccccagaggactttattcggaccaagcagagctcacagctggacaggtgttgtatatagagtggaatctcttggatgcagcttcaagaataaatttttcttctcttttcaaaaatgtataaaaatcattatacatagcattaaagaaacatttttgagaagtacaaatca

SEQ ID NO: 13262 - DNA, 1457 bp, Homo sapiens
ggcaggaggcaggcgggcagaaggccctgcccgggacctcacagtcccttcttagaagcctgcaaaggtcagctgtgccctctgggattctgagaggctatgggggggcctgccatagggatgccagtcccccagtgggggtcccttctgcagcctctgcctctcctgaaacctctgacaaccccctacacacacacacaggcatactcagacccactcaaagctgagaatgatccaactcagccctactttgcggatggacatattaaggccaggaggggagggacttgccccaggtcgcatggcagaggggacttgaacccacgcctcctgaccagccagctccctttcccatggggcagccggcaccaccttctcatctctattcagggcctacacccctccctttttggggggagcctgtccccacacaccttagcacaaccagaatcttgagttgggcagggaaggtcagggctacagaggctcttgaggctccgaggccctggggatcaaaggtcaatgagttaggtggggagaaagatccctgggggctcctgtatgcaggactcctgaaggaggtgggagctgagggccctggaggatggggaaggtttgcagagagaggaagaagagggcagggtggggaggagctctgggccagaggatgctgagctgcctgggcagagaccaagagggttggagacactagttttaccaggttacaggagggttcaagacagaaggaaaactaacagagggggagccagggatgatggggtgggcaggggatttgcatgatgaggagtatcattccagatctgtgcagagcggatcggacgggacagggtggagcggggaggcctgtgcaaagtgggaaagagctgccggtggcctgagccagggtgctggggctgcgggtggggaaaggaggccccagcacttcagacaaagaccaccccttcacccactggaccccaagccgcaaaagctggggaggtaggaagggtcactgtgagggcccagggcccctctcttcccatctcccttgtcctggtggccttcagtgtctcttccagttccaggagctgctgggaagctggccttcattgttggtgacagggcaaccatgggactaggaggtggcccatacacatggctggctggtcctgaggccacccaccttgttccaggacatgggcccgggcccggtgtgggggtagacgcagagggcagagggtagcccttggtactgtgggtccctcaaagaggagagtggggtgcagaaatgcctcagcatggctcatgcacacagcattctcccgtggggcagggttccctcatgcaacaggcctccctgtggccagcctctctgcctgtctctcgctgcgtccccccaaccccttgtgttctattggttcattgttaataaatatcaaatgaggtcacgctcctta

SEQ ID NO: 13263 - DNA, 875 bp, Homo sapiens
atcccatgagctctgcccaggaccctctctcaagcacctgtggcataccttcatgtgctccactgcacccagagcttaagccacagtcctgctcaggctacacctccaagggtgggaccaggcccaccttatcttcctgtactccagaggcccaagtcagccatgctggtgtggtccaagcttctgtgtgaaccctggcccttccatcagacagcattaccctttgtcctcctctagccccaagctcccagaagcttctgccaggcacctcagagcaccagctcccctgtcccagggcctaaccacagatcctggagttctgcaacctccagaccagagcggtctcatgaaccacctccccttgaatatcacataccacattgttatcaattcatcagtaaggtcagatgctgtttgcacacctccagcaatagggtgctcactgcctctcactttccaatggcacagattacaaaagtaaagaacaaccaccaccaacatcggtaactccctgtattctcatttttctgtttaatctccacaacagccctatgagggtggctccctttgttgtttgcattttaaggaactgggagtgaggctcagagaagttgagggacctgtcccagcatcacatggctgatgacaagtggacagacctggtgtttgagcacaggccattcacattctgacccgttgcctggtgctgccccgacactctcctctcctgggcttgggcattgccctctggctctgtgtggagcctttacgaggccacctgcctctctgagggatctaaacaactgggagggaggggaccgctccccctttctctgtgggggtggactaacacaattaaaatgaacatcctgctt

SEQ ID NO: 13264 - DNA, 498 bp, Homo sapiens
ggatttcctagccgagcagtggccatccccatgcctctgacctccaccgacctctgcccaccatgggttggaactaaactgttaccttccctcgctccacagaagaagacagccagcttcaggggtccctgtgctggccaagccagtgagcctgcggggaggctggtccaaggagaaagtggaccagctcccatgacctcaccccactcccccaacacaggacgcttcatatagatgtgtacagtatatgtatttttttaagtgacctcctctccttccacagaccccacatgcccaaaggcctcgggacttcccaccaccttgctccacagatccagctaggcctgacctgtgcctcatcccgtgccgctcggtctctggctgatcccgaggctttgtcttcctctcgtcagttcttttggttgtgttttttgttttttttttaataactcaaaaaaaaaataaaagacttggaggaagggtgcaagctcccagtgc

SEQ ID NO: 13265 - DNA, 4878 bp, Homo sapiens
ccgtggccaccacagccagactgaacgtttgtgaaagctgggacatcccaccacacgctgagccagacctgcagagtgggaagctggaccagggcagctgcgcacttatgagcaatactctgtggaggtctggtggggctgggggagcacccaggcggatctgcaagcacctcggagcacccaccgctgggtctgcggcctaagggacctccctcgccagcagaggtccattccgttcccagctgctcctggggaggccgcttcctggtaggagggagtccacgagactcttttctgtccctcactgtgttccgccgactgtcccctctcgtcacccatcactccctgcttccgcagggcgcccctcagtattcgctgccatatgtccctgtcctccaggctgtaggggaggagagcctggccgggggagacagactggacatttccctgtttcgagccaggctcttccaaggggccagctgggtccccggagtcagtcctaggctggatgggagggtggccccctcaagaggactcccagcctccacatctggttcctaccttcacatctcaccctcccgttctggggaagaatttctggttcctacagtatccactccatcctcaaggcttcccgcagggccttggggcactgccttgccatcgggcccagttctccgggccccacctgcacccctttcttccccctgggatatgatgtgtggtgtttcctgtggtaaaagactgaggcaggccaggggtctgccagtaacatgttcccatgtacagacacggtccccacaccctcccagcctcaggcccaggcagacatgggcgagctggtgagactgccagccacggctttgcttagccacctgtggccgagggctctcagagacccccttaacctcccaaatactaagaagctaaaatattttaatattttgtttttttttttcttggtgccagagtttataccctgggtgctggggtcgcactgtgttatatatatatatatatatatataatgtgtatatatatatattctattttttttggttgggttcgtttttaattcagtcctacaaaatggtggtaagccccagtctcaggggtcaccctgtcttagagctagagatgaggtggcagggagggaggctgtgtcctcagtggcctggggctgagcagaccttaggaaggggccctccccagtgccgtggctgctctggggctaccccaggtgaacagaggtggtgagatgcgcagggaagaccagctctctccaggacatcgggctgcgtgaagtccagtgaccctgaggggattttggccaaaggaaacagccagggctgggctaggagagctggggtcaaaagctgccccacccactctccctcacatggtgctaggctgggagctgccctgagagctgggatgcccaccaaggcccacagaactgtctccaggcccttgtagacagtgggatctctgggctgatttctggttggggtctgctcctaccccaccccatttaacaatgtgaagtgactgaggctggggtgcctctccctggccccctccaactgccaaattctgcttccctctgaaccccaggaaatactttctggagaggcttgtcttgttcagaagactctagcatcttggggctggaaggtcctttgacgggtatgaaacaggtccagaaaggggaggtggcctgcttggccgacgtcatggagccagctgggagcagggctgagcgttgaacccgaggctcccggttccaagtcccatcgtgctcctcttccaatgccacactgcctctgagcccatccttgggaccctactctgtgccaggttcctgtcccttcctccgtcacagcatggtcattccaggatatggggacaaaccactccttcccagccagggtgcctttgagccttctcattccgaggtctgcgtttgcatccctgtcgtgttctccctcgaggggtccttccccagcctgtgggggcctgggtctgttctgagctgattcccttttctccagttctctgctgggatgaagaaagttggacactcagtgggaccagctgcaggtggtttcactgtgtacacagcagtgtccccatcatgcctctcaatggggcctgcaagcctgggaacttgggcatcgttgggccagcaggatgagcagcaaagggtctgaggacagggtggcatgtctgcttgtgtgctcatgaagacatgcccacgccatggagccaggggcttatagagaggggcagtgacttccagagtcccatccgtcagtgaggggactgggctgcgggatgggtgaggatcttacagctcccaggttcggaaatctaccctctaggcctggaggcctctctcgcagagcatggaaggcaggagaggtgggctggcctagggcaggagctccacttctctctgcctctggctatgggaaggagcaggcggttggaaatcctgtgacagcagagatcttctggatttttgcctggacccttctgcaagcctggagactggacctgccacatgttccaagtctgtctgcctaggtcactgctgccacttctcctcccactaacagacctttcttgaagacccactaggtccagacactgccgggacttgcaggtatggggggtagaaggagaggcagataagctgcctggggggctgttagctaatgggtacaaggacaccccctcccgagaagagaagccacagatgagtgggccagcgaggccagtcttcaatgtccactaattcactctaagcatttggccaaaaaaaggagagagaaataactgaaattgttcaggtggctccatcgtctattctgtggtcccctccatgagcctttgccccagggtgggtgcaggtgcgagtgtcacctgcagctgcctcagtcattcagagttccagagccttctgtggtggagcatcctgctgcttggaggatgagtctgaagtttaaaaatgggccttttctgagcccccctgatgagcagtcagtgcttctgggcccagctaaggaagccatctgttcccagcagaggagagctgctgcgctgacctgcagaggttggtggtcccagcacagagctgtgcccatgggcttgttagtgggaaaagcaaatacaacaatgttttaccaaacatttaattatgaatgcccactccccagcatctagatctaaaattattaacattttgccacattctttttctctctctgtgtatgtatatgttttctctgtcctaatttaaaagtacattgcaaacatcatgaaacttgatccctgaaagcttcagcctgcatctcctaagagttagggcattgtcctacacattggcccagtatcacagccaagacgagaagtcatttcccagcgatgtctgctatctaatctgtattcaaatccccccaattgtctcccaggtaacttatgtgtctggttttggaatcagcatccagtcacggtgcacacattgcattttctaactatgtttttaaaacctctttgaatgctgaaaggtcttccctcagctcactttgagtttttaaatgacattgtttttgaggccctaggcctgctgtctttttgaagccccacattctgaatttgtcagattgtttgctcatggtgtcgcataaccacttcttctatcccctgtactttcaaggataatttaggctacatgagattttgccttttgtgctgacttgacagcttcacttctgcctaagatgcgcctccactgtcacctgtaccaagtgccaaaacagcagaggggccagttagagcaagagctctgggggggccggaaagtctccctggagaaggccgtaatatctgggccttggaaggaaggacacagggctctggaaggaggaggctgcatgcctgaaggctgggccttcgaccctggggatgggccacagggcaccaaacacatcatatgtctctctctttctattttggggtcccagggttttcatttcctggagacccgtggtctgtgtgcactggagcagagccaggctctcagttgcagcagggaaaagcctacatggggaactgcctcccgcaagctgtggtgtgagaagagccctggctggcagcaggagctgtgaagtttcatcccagccgggtgcatttagtagctgcctgaccatcttcctcccaggccctcagtttcttcatctgtagaatgagcagataggggccacagcagggattttcacacatcaaaggaggcagcctctgctctagttgatgtgaggatgagggggcggcctagaccccctgctgcccaggccgttgaggcaacactgggttcctggcttgacagctgtgggctggctgcccttgccagctcagacggctggcgagttttcagcttccctaagggactggcatagggttttgtggggtcaatgccaggaacctgggggaaactggatgcgttttatcctaagaagttcatccctcctgctcttactgtttccggccctggaggagaatgagggaggagagggttttctatgactgtgttagcttttattattagcaagagggctccttttgtaatttgtgcatgaaattcatgtcatttcctgggagaggagagggccgactggagagggtggggggcacactggggaagcaggcagaggtttccttcccttgtaggggggtggggagagtggggagagggggtgctatccagttcgcctgatgagggctctcgaaccagccgttttgggttgtgttaaaggtgagaccttcctccattaatgtacaatctcgaactaactgctaataaagtggggttctgtttgt

SEQ ID NO: 13266 - DNA, 302 bp, Homo sapiens
agccccacccccgaccccaccccgggagggcagagccagaagaaggctcattagacctgggggacccaaagggtctggcctctttgggcagccccagagatgaggggtcagcagaggagagctctggggttggggatgggttagggacgcaagcttgagttctagcccttgctctcattcagctgttgtgtgaccctgggtaagacccttccttgtttgaccctcagctttcccatctgtttaatggtggctttggccaaggcaatccacaaacgtcaaaattccccttcccatcagtacac

SEQ ID NO: 13267 - DNA, 2488 bp, Homo sapiens
ccctagcctgaatcttcagttccccagtctcgggggcctggtaacatccggagccaagacttgtggacagcacttcacagttgaagaagggccttcacacacaaaacctgattgcaaatggcttcagaggtcaccaagttcagtcgtcccaaaacatgggtgtgtttcaaaattacctggggatgttgttccaaatccagacaactggactgtcccagacttgcagcatcagagtctcctgagtcgaggaatctgtattattaatagcaaccagggccgggtgtcgtggctcacgcctgtcatcccagcactttgggaggccgaggcaggaggatcacctgaggtcaggagtttgagaccagtctggccaaaatagtggaaccccgtcgctactaaaaatacaaaaatgagtcggacatggtggtgcatgcctgtaatcccagctacttgggaggctgagacaggagaatcacttgaactaggaggcagaggttgcagtgagccgagattgcgccactgcaccccagcctggacaacagagtgagactccttctcaaaagtaaataaataaatagcaaccagtactccaggtgattccagcataacttatccatggtttgtgtcattaggagtccacatccacacctctgctctttcctgttcctgtagtgtacactcccccggtgacagggtgctcactggcaccccatcttcctgtgaataactcaaataattagaaaatgttccttttactgagatgcagttggtcttcatctattcatgctctaaacagttcctaagcgctgactgtgcgctagacactgccaggcccgggcctcgaggaggaaaagacagtagggaagacattatagagcatgaagtcaccataattttccctaaagcatgcttattgacaattgaggaacaaagtgttgtggagcagaagaaggagtccctcaccctaggtgtgagatgggattctggaagcttcctgaaggatttgagtgggaccttgtgggaggcgtgagagtccatgaagggggtgtgagggggagggtatttctggaaagtggaccagcatgtgcaaaaatatggaactgagcacgggtgcagggtgttctgcagaagggagaaggctgtgctagaggagccagtgagggccagcatggggtgggcttcactaaggaaatggggaaggttttagtgatgggtcttgctgggtgctgtgtggggcgcatattggagaagggtaatgccagaagccaggaagcctgcaagggatgaggccatgggaatggagagaaggggccacccactgggcacctaacaggacaggtgcaaagtggggtgcttattaagattccttctttccactccattttgagcaggctgcttaaagtggtggtgatgatgatgatgatgatggcagctttatatcgagtgcctcagtgcttgggctggtagtagtttctctacatatcttatttctaattctcagaacaaccctgagagaaagatattgttgtccccactttacagatgtggatatttaggccaaaaggaggaagtgacttgtccaggggcagacaccaaatgggaatctgattccagtggatgtctcttttcagtgcactgggtggtcaatgcccactcgctctgaaatcatctgactgtgatgccctgccttggagtttagaagttgagtgcaggcttgggagtcagactggatggggtaggttctaactctgccactgctagccggatgaacttgagcaagtcatttcacatctccgagcctctgtttctccaagtgtaagatgaggacaagtataaaacctcctttatgggtttgttgtgaacacagtgcagggcacatttataataagagctcagtcaatggtaggtttcatgcaactgctgctctaggctggaaaagttgttcttgcactggatgcagcatgagaagctggctgctaagatgtcactgggggtcactaaagctgaagcctgaaggaaagcctctcattgctgtagagctctccctgcctctctctctgggggcgatggggaaggtcaggagtccagcccattcccagggtgtgtgggatagcgattgcattttccttttgctctggagtttcactccccttctgggtcccaagggcccaatggcctgacttttagaattgcttgcaattggtgttttctcttgaatttgggggctgccatttaaagccaggtttccatgagctgaagaccagccattcaagaatctgaaaagtagacaagaggactccagttgcctcaggttggttctgctgtgctctggaaagtaactgcagccaccaggtatgaaaaggagcctggtggggagaccactgcacccaaaacaaatcctttcttcttctgagaatgtgactttttctggtgttgtaaaaaagaaaaaaaaaagaatgctcattgtaaaaataaaaaaataataataagc

SEQ ID NO: 13268 - DNA, 1301 bp, Homo sapiens
agcaacatggatgcagtcagccaagtccccatggaagtcgtgcttcccaagcacatcctggatatctgggttattgtcctcatcatcctggccaccattgtcatcatgacctcgttgttgctgtgcccagccactgcagtaatcatctatcgcatgcggactcatccgatccttagtggggctgtttgagagcctcccaagagggccgggtgagggatgaggacaggcatcctatccccagcctcttcctgtcttcagaaaagcagcaggagggactttggggcatggacctgagttctggttttgattctgccacgagccagctgtgtgaatttggtcaagggacctaactctctgagttccaggttccttatctttcaaatggggatggtgatccctgccctttctacctcatagggatgtgagaaccacctgacttagtggatgtgaaagctgtttgtgatcagtaaagctaccacagatataagggtgttatgctgaatcctgagaagctttcaagaaccagagaacctgattgctgatgatggccttaaaggtggtgagggagatactgggggcagagcagactttgccagtgcccctcaggtcaaaccaagccaagagcaccctgtccccattccaaggggccagcagcactttggcccaaagtattttctttaaggtgccattccttcatgttttctcagtttggagggtgatgggtagagctttccagaaccttctccattccagaatctctgcccctgtgtaatctgaaggaaggctgtgccatctttgggcactgccaagggagttggggtgatgggcttctttctgcactggagtctcacatctgttagctttgacactcaagcaatgttggaaaatgcagggtgactgagttccctgcccagctttcgggatctctggcccccatccccttgtgtgtgtccctctgcccagctcctgctgtaattagctccacgtgtacccccttcactccctcccaccagctctgcagccagcctatggcaattatattttaagaggtgttcccaggacttttgggacctactaaaacaatgatggttattttagatgtgatgatttatatttatgtagagatatttctggaccactcaagctcttcgataccaaaatcaggagcatcttgggatttattaaattatgtaagaagatagcacagatatcgggatattattgtgtgaaaatgctgcttttactttgatgtgatctcattgatgtacacaaccaagttccaataaagtgctagaatgtgc

SEQ ID NO: 13269 - DNA, 862 bp, Homo sapiens
ctgaaggccgtctcatcccatgtccaccatgtaggggagggactttgttcaggaagaaatccgtgtctccaaccacactatctacccatcacagacccctttcctatcactcaaggccccagcctggcacaaatggatgcatacagttctgtgtactgccaggcatgtgggtgtgggtgcatgtgggtgtttacacacatgcctacaggtatgcgtgattgtgtgtgtgtgcatgggtgtacagccacgtgtctacctatgtgtctttctgggaatgtgtaccatctgtgtgcctgcagctgtgtagtgctggacagtgacaaccctttctctccagttctccactccaatgataatagttcacttacacctaaacccaaaggaaaaaccagctctaggtccaattgttctgctctaactgatacctcaaccttggggccagcatctcccactgcctccaaatattagtaactatgactgacgtccccagaagtttctgggtctaccacactccccaaccccccactcctacttcctgaagggccctcccaaggctacatccccaccccacagttctccctgagagagatcaacctccctgagatcaaccaaggcagatgtgacagcaagggccacggaccccatggcaggggtggcgtcttcatgagggaggggcccaaagcccttgtgggcggacctcccctgagcctgtctgaggggccagcccttagtgcattcaggctaaggcccctgggcagggatgccacccctgctccttcggaggacgtgccctcacccctcactggtccactggcttgagactcaccccgtctgcccagtaaaagcctttctgcagcagctg
